United States Patent Application Publication US 2026/0103690 A1 - sequence listing, part 90

SEQ ID NO: 445425 - protein, 364 aa, unidentified
MCILSENGEKIQEKYGVLTKELDTLRDVLVANNVGEVAMESTSIYWMPIWRVLESDFDLKLVNPYFIKQLPGKKSDVKDAEWIATCLQKELIKGSFVPDAAIQRLRQYNRRIFDLNKDISYKLTKLDMALQRCNIRISNYVSKTDSKSYKKVVDKLAGGITDPQELEKCIHGRTVNRFGKDIITASLTGVINETDIDIMSQLKSEIDLAERHKSECLMKMREICMENYPKQLENIKSMPGVKEQSATAIIAEIGVDMKMFLTAAAIVSWCGLRPRNEESAGKIKSRKIVHGNKYLRRTLIECAWAASKTQGCFYNKFSYTQVSIRKKNVLKVRVAVARKMLVTIWNILSKGEAYREILDCTQPQ

SEQ ID NO: 445426 - protein, 387 aa, unidentified
MFYCGIDIAKRKHAVSLLNDQGQTLKAVFTIANTRPGFDHLLAELQTLQGSVTVGLEATGHYWLALYDELTRTGYPVIVLNPLQVAAYRKSGIRKIKSDATDAVWIADYIRIANLPPTEQNLPVMLQLRELSRFRFRLTEQVGNSKRKLLTILDRVFPEYEHLFSSVFLKASRAILKEAVSAQEFADFDLQELTDLLAQASRGRFSQDQAEKIQEQARQSVGVGFLTNAVHLEMHCLLAQLDLLDEQRSQVDQTIAALMQQVPQYITSIPGIGPVTGAAILAEIGDIQRFETVDKLVAYAGIDATVYQTGQFEASEAHMSKRGSPYLRHALWCAATAALLHDPSLQQYYQKKRNEGKHHGTALGAVCHKLLARIFVVLKEQRAYVIR

SEQ ID NO: 445427 - protein, 379 aa, unidentified
MRHVCGLDVHKDSVFVCILNEKGVVFQEKFGVLTPELERMVGVIMEHGVTEVGMESTSVYWMPVWRVIDPYVEQKLVNPYFIRQLPGKKSDVKDAEWIATCILKGLVRGSYVPEERIQRLRQYDRRIFDLNDDIVHKLTRLDAALQRCNIRLSNYVSTTDCKSYGDVVDAIARRETSPDALLRCVHGRIVNRHGADVIRSALTGVITPVDVDVIRQLREEIELARRHRDECQRRMDGLCSEWFPEQYANLQTIPGVKARSATAIIAELGTDMSSFEDAAHLVSWAGLRPRNDESAGRIKARGITHGNKYLRKTLIECAWGASRTRGCFYSRFSHHQTVVRRKSRMKVQVAIARKMLSAIWFILHDGVAYRDFEGDANAA

SEQ ID NO: 445428 - protein, 440 aa, unidentified
MTVPAAVNSQGGGVTGNIRIVYPVCCGIDVHKRIIVACIAKLQPDGTVTHDIQTFSVFNEDLICLRDWLMSNDCHDVLMESTGKYWIPLFNILEQSVRVQLTHPKYVRSIKGKKTDKNDARRIANLFMSDQVRSSFIPPKEIRDLRTLSRYRFKLVGMRSSERKRYQDCMTVSNVTLAGVLSDSFGKTGIEIMEYILSGKPIEEAEVKEHIYGKAKVKTDDILKSVRGNAFDDAQKIKINMVKDHLRYLDTQIANIEEMMYLCAKSKLASHLHLLCTLPGVDTLSAVQILSEIGADMTVFETSKHLASWAGLSPGNDQSADKKKSTRIARAGTFLKPLLIQCAWSAVRSKKTPYFSIKYYRLIRRKEKKKAIVAIARMMLTCIYQMLSTGEVFNPVDIQAIKSEKKHPVSISEEDAIAFLAGLGYDGDMIRSLKPKTESG

SEQ ID NO: 445429 - protein, 355 aa, unidentified
MSSEKYIGLDVHQATICVAVMDAKGKVVMESILETKATTILEFFAGLRGTLSVTFEEGTWAAWLYDLLKPHVANLVVCNPRKNALLKHGNKSDKIDARKLANLLRLNDLEPVYHGETGVRMLRELARSYLTIVKDVSRVMSRLKAIYRSWAIPCAGRDVYYTRHRGEWLGKIPEAGSRRRAEQLYQQLDMLQPLRQQARRELLAESRKHTITAKLRQIPSLGPIRSALAVALIQTPHRFRTKRQLWTYSGLGLETRDSGEYHYVEGQVRRRKKQVFIRGLNKDHNHDLKGLFKAAATRASVQPGPFQDFYQRSLAKSIQPTMARLTLARKIAAITLTLWKKGENFDAEKLKAQAA

SEQ ID NO: 445430 - protein, 407 aa, unidentified
MTKKKMELDIINSDCAGIDVGSKFHFVAVGQALEDVKEFGVYADDLTAICLHLKEYGITSVAMESTGNYWQNLYVELERHGMEVTLCNGKFTKHAKGKKTDVKDCRWIQKLHALGLLTGSFLPDETTEQLRTYCRQRTNWIDLAAEASHKMQKYLKLLNFRLDVVVKDICGTDFLFGLKQEYESYLFFQKKIDACDVQINSFLKTQINTHPDKKKLQTDNKIHKRINKNAIKGIDLNQAAYQYFNGVDLMKIEGLSHSTVLTIMSEVGPDGFTKFETAKHFTSWLRLAANNKISGGKILSNKIPKGSNRLKIALRHAANAIGNLKDTHLSDFFKRVAYRKGRATALSATARKLAVILWNMIAKTIAYKPPTEYLFLDQKRKLSLIRKIKNNIAKFELKPEDVGFVTR

SEQ ID NO: 445431 - protein, 342 aa, unidentified
MKQYVGLDISQKEISVCVVDDAGRIVYEGRVKSDPGALTELLRKRAPHAERIGFETGAMASWLWHELRRVNLPVVCIDARHAHATLSVRVNKSDRNDAKGLAELVRVGWYREVKVKSQESQRVRAILVARSRLVSIRRDIENQVRSIIKEYGFLFRRAIGLQFRNQVIELLGEDHHLRAVIDPLLSIHEQVCRQQGKFDDEVRHLAKSDETTRRLMTVPGVGVVTALTFRHTIDEPLRFRSASAVGAYLGLTPRRNQSGEADTNGRISRWGDRLLRTYLFEAATVLLYRTKKWSTLKAWGMKLARRIGIKKAKVAIARKIAVILHCIWVDGTSFEWRQSKAA

SEQ ID NO: 445432 - protein, 338 aa, unidentified
MSREYVGIDLHRRRSVIVRMNEGGETLSTVSIDNDPVALALEVAKAGPDPEVVLEATYGWYWAADVLEAAGAEVHLAHPLGVAMFTHQRVKNDRRDATNLAQLLRMGQLPEAWIAPPELRELRELVRYRAKLVALRSGLKAQVHAVLAKEGVRVPMTDLFGVGGNRLLDSLELAPAFDARVRSLRDLIEIYDTQVKVFEQACTQRLAGHQGYRAIQAIRGVGRVFGALFVAEIGDVHRFPGPRQLCSWAGLTPRHHESDTTVRRGSITKQGSRLVRWAAVEAITQHHGATKIQTDQRRIAERRGAGVAKVAAARKLLTLVYYGLRDGEIRCLTRPKAA

SEQ ID NO: 445433 - protein, 404 aa, unidentified
MEVIIERVCGMDVHKDNITACIMTPEGKEIQTFSTKTIFLIKLMDWIKSHGCTHVAMESTGVYWKPIVNLVEAEDLEVFVVNAQHMKAPGRKTDVKDAEWIAQLLRHGLLTASFIPNRQQRELRELVRYRRSIIEERSRQLNRIQKVLEGANIKLGSVVSDIMGVSSKEMLYAIADGEEDPTKLASMARRSLKRKKDELELALRGYVNPHQRMMLKTILTHIDFLTEQIEKLDLEVTQRVSSYQEDIERLDSIPGIATRMAEQILAEIGTDLENQFGSAPRLCSWAALVPGHNESAGKRKSTKSKKGNKYFKAALTEAAHSVGASKNYLGAMYRRTAARKGRKRAGIVVAHAMLRIAYYLLTRKEMYRDLGEDYFDKQKEASMVRYSVRRLEKLGYSVSIEEVS

SEQ ID NO: 445434 - protein, 346 aa, unidentified
MGIDAHKRTHTAVAIDEAGRKLGEKTTRMTTTEANLELLRWADAFGPERRFAVEDCRHLSRRLEADMLAAGEELVRVPPKLMAHARDAARTYGKSDPIDALAVARAALREPGLPLARLDGWTRDLRLLVDHREDLVRDRVSHINRLRWHLHELDPSWDPTPRSLVRFKHLDAVATRLEGVEGTVAWVARDLVSRIRELTVAVNDLERRIAEAVARIAPALLGVVGVGVLTAAKIVAEVADVRRFRSKDCFARHNGTAPLPVWSGNQVRHRLSRSGNRQLNAAIHRIAVTQMRIHQPAMDYLERRTAMGNTKTEALRALKRRLSDVVFRALLVDAEMAAEAPFSEAA

SEQ ID NO: 445435 - protein, 378 aa, unidentified
MNMNAVGIDVSKGKSMVAILRSYGEIISKPFEVKHTVSGIRSLIEQIQSIDGESRIVMEHTGRYYEPLVRELSKADLFVSAINPKLIKDFGDNSLRKVKSDKADAVKIARYTLDSWTELRQYSLMDEIRNQLKTMNRQFDFYMKHKTAMKNNLISILDQTYPGANTYFDSPAREDGSQKWVDFSATYWHVDCVRKLSLNAFIDHYQKWCKRRKYNFSRSKAVEIYEASKELVSILPKDDLTKLIIKQAVEQLNTASQTVEQLRTMMNEAASKLPEYPVVMAMKGVGKSLGPQLMAEIGDVSRFTHKGAITAFAGVDPGVNESGSYEQKSVPASKAVPVLFVRLCFKSWMFSSKQSHRMILSTCLWIRNEHKESLITST

SEQ ID NO: 445436 - protein, 358 aa, unidentified
MAVIEGVCRIVGGVDTHKDLHVAAIVDEQDRIIGTRSFATTRQGYRQMLAWMRSFGELQRIGIESTGSYGAGLLRFMQQAKVTVLEVTTPDKQDRRRRGKNDDLDAQNAAHAAFAGQRTVTPRSRDGMIESLRVLKACRKTAVSARRIALQMIHNTIVCAPDGLRDQLRSLTRMQLVRTLASWRPDLTAYRDLDSAYRIGLKSLGRRYLELHDEIADLDAMIAAIVDELAPNLVARNSIGHTGAAQLLLTAGDNPERLRSEASFASLCGVSPVPASSGRTVKHRLNRGGDRAANSALHIIAIGRLRTDQRTKDYVARRLAEGHSKLDAIRALKRYLAREVFTLITQRRKEINATRIAA

SEQ ID NO: 445437 - protein, 406 aa, unidentified
MHQIEQIIIGVDPHKLSATIEVVDKHEQRLGSGRFTTDRAGYAAMRTYANSWPQRMWAVEGANGAGRPLAQRLLEAGEQVVDVPAKLAARVRLFDTGHNRKTDALDAHSIAIVAVRTTTLRVLQVDGELEALRMLTDRREALTRRRVQTVNRLQALLAELLPGQAKKDITPLQAKGMLASVRPRDVAGKTRRSIAAEELAELVAVDAKIKKATAELKSIVLARGSHLMDLHGVGPVVAARVLADVGDISRFADRNRFASWTGTAPLDASSGEQNRHRLSRAGNRRMNHMIHIAAVTQVRLDTEGRAYYRRKRAEGKKPMEAMRCLKRRISDGIYRQLIADQKRPGAAKREAGPGGHCGASQESSAVDLPPHIDTSDQPLPGPAQPTLRPASTSRKTNRRSNLQTTG

SEQ ID NO: 445438 - protein, 385 aa, unidentified
MSSKAFIPRDYEVFAGLDVDKKSISVTFTNHQGFIRSLRVPYSAEHLVNHVRKHFPDQKVAFAYEAGPTGYGLYDGIVAQDYPCLIASPSMIPKAPGQRVKTNRLDSRGISENLRGGQLKSIHVPSVLYRELRHLTQLRDTFVSELVAMKQRIKSLLLMEGLEFPPAPAGSQWSFMVKAKLRKLPCSSTVRFKLDELLDGLEFNEKRVVKTTQQIRRFCQNDPELSQCIEYMMSVSGIGWIVASQLLARIGDWRELGNVRQLGAFLGLVPTEHSTGERTDRGSITHSGEPRLRSKLIQAAWSAIRKDGELREFFRSVCQSHARPLASRVAIVAVARKLTVLISVVLMEQRPYVVRKKVHSAPLIQEETVPQGTPRRQAEPGEKNS

SEQ ID NO: 445439 - protein, 418 aa, unidentified
MDQQFGWFVGLDWASTLHRVCVLDGEGERVAERDVDHSGAALAELCAWLCQVTGAAPAEIAVAIETPRGPVVEALLEHGFAVFAINPKQLDRFRDRFSLAGAKDDSRDALVLGHSLRTDRHAFRRVAVDDPLVIELREWSRMYDELKQEQNRLANRVRDQLWRYYPQMCAFSEDFASDWFLDLWHAVPTPDASARATNTAIGRILKSHRIRRFDAATVRGILRQPPLAVAPGTVAAATAHIRTVAARLRLVNTQIKETERRLDELCAAIEAAAETAPGQICEQRDVAILRSYPGLGRINVATLLAEACEPLQRRDYHALRTLSGVAPVTKRSGKSCVVIQRHACNKRLQNAVYHWGRVAIQHDPTSRQRYTALRARGHNHARALRSVVDRLLYVLCTLLERQVLFDPGYAEAPTTAAA

SEQ ID NO: 445440 - protein, 387 aa, unidentified
MFFCGIDVAKHKHVVLVVDDGGRVVLPAFSFDNNRAGFEQLAKALTALSEPVSVGLEATGHYWLALYDYLTRQGHSVTVINPLQVAAYRRSGIRKVKTDKTDAFWIADFLRIANLRPTNQDVPVILQLRELSRFRFWLTDQIGDCKRKVLCVLDRVFPEYDTLFSSVFLKSSRALLKKAASAQEIADFDLAELTDLLRNASRGRFGQPKAEAIQNTARQSVGVSFLADAARVQMDCLLQQMDLLQEQVAQLDHAMAQLMDQIPQYITSIPGIGPVTGAAILGEIGDIHRFQSVEKLVAYAGIDPTVYQTGQFQASQAHMSKRGSPYLRHALWLAATIAVRHDPELQAFYETKRKEGKHYGTVIGAVCRKLLARIYVILKEQRPYVIR

SEQ ID NO: 445441 - protein, 415 aa, unidentified
MVANLKMIERRKTREMNAVGIDVSKGKSTVVVMRPFGEVVAEPFEVSHTDAELSELACFLGELPGETRIVMEYTGNYWQPIAKVLYDAGLFVCVVNALLIYKYGNNSIRKGKTDKLDAVKIANYCLDRWANLERYTPADQIRQILKTCRRQYDQYIKLKVNLKNNLISLLDGTFPGVNTLFKSASRDTDGHEKWVDFAENFWHRECVCMKSEKAFTNQYRKWCAKTGYRFSVEKAVAIYAHASSHVNTLPMSDAIKLLVTHAAVQLNTIIKTISTIQHQMLTLASQLPEYPIVMRMFGVGPVLGPQLMAEIGDVRRFDRKQSLVAFAGVDAPPCQSGTFDSKNRHISKRGSPRLRKTLFQVMSTLIQHAPADDPVFQFLDRKRQEGKHYYVYMTAAANKFLRIYYGTVTAYLEKL

SEQ ID NO: 445442 - protein, 460 aa, unidentified
MLITRGFGQHMIPRINLLLQAPRILDRKGGDIMLKINPLSTLYVGIDVSSKSNYVCALDFYKNKYINSSFANNQPGAEELAQKILECLKEHPDLNTVVAALESTSVYSIHIANYLSSCEELLHLKPYVFVVNPKCTANYKKSYIGVGKSDPIDAFVIADYARAGNIETEPWRGSQFLALKRLTRHRLHLVECMTREKAYLVSNLYLKFSELQMLEKDDQPFCDIYGATSSSILTEYLSPEDIVSSSEEELVSFLAEKSRNRIKDISKTADLLKKAARDSYRLDKALYEPLNVSIASSFNCIETFKKEIKVIDAAIEREIKGLNPNAFIILQSIDGIGPVFAGGIVAEIGDISAFHSSDALAKYAGLMWKSNQSGDFDGEDTPMSKAGNRYLRYYLGEAANSMRKHNVEYGAYYRKKYNEVPKHQHKRALALTSRKFVRLVYGLLARNQLYSGVSLDTSNE

SEQ ID NO: 445443 - protein, 387 aa, unidentified
MEVRMVNTPSADSNNEPVACYVAIELSKSGWLVGFLTPLSDKTGRYQVKAGDAQALLDLIERVHTRVARQLNRPVEVMSCYEAGYDGFWLHRVLEAHGIHNHVLDPASLQVNRRARRAKTDRIDVDRMLRALIRYLRGEPEACSVAQVPRVEEEDAKRLHRERKRLVVERVQHVNRIKGLCAAQGIYNYAPLRPDRWSQLDKLRTGDGRSLPARLKSEIVRELKRLELVLEMIETVEAERDAIIKDPRSRHLNADKIKMLARLRAIGPEFATSLTGEVFYRKFANRRKLGRYVGLDGSPFRSGSVERDQGISKAGNPVARSMMVELAWTWLRYQPDSALSIWFRERVGNLKGRPRRIAIVAMARKLLVALWRYLETGVIPTGAVLKA

SEQ ID NO: 445444 - protein, 404 aa, unidentified
MKGPIVSIDGSKGKSDYQAFKNLNVKYTGSRSIKHTKDGFDEIVNLVREMEKKLETEVCVVYEATGVYHRVLKKVLEDNNIKQFIINPLSSAKTRKNDSLRCPKTDKLDPKSIAKTYYSHSLHNSHKQETIYHELRELSRYYEDILVHIRKDKVAFRAQLDIVFPGYDTLFDDLYGPVALAVIEKYPHPEMLQKKKINTVSKVIQSKTCHRQAMSDTMADKAIEYSKTIYSGCDKDDIEVLILQRFIKKLNEDMAEAERTIGEMIKLAQELPDFSIIKSIPGIGDNLAARIIAELGDMTRFKKKNELVAFAGLDPRISESGKNDGDHMHITKKGNKRLRCLLYLAVTCSIRLKRDDNSIKDFYIKKKQQSNPMCSKAAKTACASKLVRIIYSMCKTGELYQYNK

SEQ ID NO: 445445 - protein, 544 aa, unidentified
MMERYVGIDLGISTKHKVTIYDGPERVGKTFAIETSREGLEYLLKRATQGVEGPVNFVFEPTSTVWLPMSAYLSAAGHRTFMVKTQKSSDFRKFFSKHAKSDNIDSGVLARIPQIDPKGVNELLVPTAEQTTLKRQVKRRERYVSDASKQKLRIQALLLLANPFLIGVLGQDKFGKATVEFLKKYTDPQKAVKCGRKRLERFWDKHSKGQVDKQRAGKVFEACQKAVELYGPLRKESRLPFDYEAVQQEVCEELELMEDLEGRAKRIEKQMIAMYKALHPERVLEQLRGIGPIIAAIIIAMVGNINRFKNGRKFVKYCGLCPRKNQTGNSDKKMRITKAGQALLKKSLYLAADVARNWDPEFAAYYARRYAKGDHHDYIIVALARKMALRVYALLKRCEAARHKQQSTSEQVEATYILRTPEGLKVDAKEAREIIKKKYAREVVAPDRAQRDRAKKNSGTKNKKKKPTQSEKRWPPKDATNGVASASRHKIAPSFEDGNRQFNPDQQSNPEAISELLMKNLKLFVPESMQKDLEKLLKKGEQNA

SEQ ID NO: 445446 - protein, 359 aa, unidentified
MTVIEGRERRIVGGVDTHKDLHVAAVVDEQDRVIGTQSFATTRQGYRQMLAFMRSFGHLQRIGVESTGSYGAGLLRFMQQAGIAVLEVTTPDKQDRRRRGKNDDLDAQNAAHAAFAGQRTVTPRSRDGMIESLRVLMACRKTAVSARRVALQMIHNTIVCAPDGLRDQLRSMTRMQLIRTLAAWRPDLTAYRDVEAAYRIAFKSLARRYLELHDEIADLDAMIVAIVDELAPNLVARNSIGHTGAAQLLLTAGDNPERLRSEASFASLCGVSPVPASSGKTVRHRLNRGGDRAANSALHIIAIGRLRTDQRTKDYVARRIAEGHSKLDAIRALKRYLAREVFTLVTQRRREINATRIAA

SEQ ID NO: 445447 - protein, 422 aa, unidentified
MGNSKTIEVGVGEVFVGIDWGASHHQLCVVDATGRRRRQVRLSHDVAGLDQLDAELARLGTGLPICVERSDGLLVERLQAGGHRVFPINPRIAARARERYRVASSKDDVFDAFTLADTLRHEHAHWRPLSIPSPALAELRALSRDRGRLLESQQRVEAQLHAILDAYHPAPAQLFSSIDRDIALAFIAAYPTPQAAARIGEQRMAAFCRRQSYRGRVDPAILTQRLKDNLLAGAEGTVAGKSHSAQVFAELLGLLNHQLADYDKRLELALAKHPDAKVFLSFPGVGLLTAATLLAEIGEDRDHYPAVGMLLAEAGLAPVTRSSGRSHRVGFRYAANTRLREACMWWAYNSLKTSPWARAAYDDARARKQPHHRALRGLGARWMRVLWRAWTDGVCYDQARHLKTAPAGEDITAEPSRSIAAA

SEQ ID NO: 445448 - protein, 462 aa, unidentified
MPGREDSETGESSRRQLQGLPVIRRNVAGIDLGSERHWVCAPTQDGSGREIASFGATTAELLRLAGWLKARQVESVAMESTGVYWIAPHEVLEAQALQVLLVDTRQLARVPGRDKKSDPSDCEWIQRLHSCGLLRGSFRPEEAVCMLRTLVRDKANLVAESGDWLRRMQKSLDQMNVRVHRAVSDIDGVTGMAMLRAIAAGERDAQKLAQLRDRRCSKTQQEIAEQLTGHWREDHLFSLQQALKMYDAVQERIAAYEQEILRQLGAMEEPGQQGQTAPPLHNANKTKAIKKRGQESKRQALYRMSGVDITQIDALGVETVEVVLSEYGPDLSRFPTEKEFVAHVTLAPRVPSSGGKPLKKKKRNSASTRVAAALRMAALSLRHSQTALGAYYRKLAQRLGGDVAVFATARKLATLIYRLLRWGQPYVDEGAAAYENRYLQQRIKSLTAKAKQLGYELTAVNA

SEQ ID NO: 445449 - protein, 341 aa, unidentified
MRKTLFCGVDLHCNNAMYVITDGRDKQLFRKRLPNRLPIILECLEPFRQRLKVVAVESTYNWYWLVDGLQDHDYPVVLANPSQMEQYNGIKEADDLTDAAFLAHLARLNILPTGYIYPKEDRPVRDLLRRRTLVVQHRAAIKQSLQNMAMRQTGQSFGWRALRKLSDPERTELLGDNDCLGFVASQQVDLIELLSEKIKRFEEKILEHAQLKPAYVCLLTLPGVGMILALTIMLETGDIGRFKTVGDYTSYCRCVRATRTSNNKSKGKNNSKNGNRYLAWAFVEAVHHATRNCPQAKRFYDRKCAKRNGALATKALAAKWSKAAYYIMKRQEAFDLTRVFG

SEQ ID NO: 445450 - protein, 348 aa, unidentified
MIHVGVDLHQRFCYMTALDSRGRQLNAQAVPNEAGALRAYFRQFRRPVRAAVESCGFWPAFRAAVGDVVEVKLVHAQRVKAIAAAKLKNDRIDSATLAHLLRCDLLPEAWMADESTRELRQQVRLRATLVRQRTRLKNQVHAILHQNGLKPEASDLFGKTGRKWLQQVIVGEKARDAMSTYLHLIDEFTGHVKQQDQQVKQFVGQDQRAQWLMTIPGIGQYSAMLLLAEIGDIRRFADKHALTNYAGLVPWLRESAEKRRSGGITRVGSPWLRWIMVEAAQIAVRTSPAARSYFERLRQRKHRNVAVVAVARKLLVSVWALLQHGECFDENTFAGNCGKGGAARLGKR

SEQ ID NO: 445451 - protein, 284 aa, unidentified
MPIGRLTRTVAWAVSPHLCKVWESAVNEASLFIGIDIAKETLDTASSPAGLSRRLAHSEEAITELIGELTRLGTELVVKEATGGMETRLASRMSAAGLAVAVVHPRQVRDFGKATGKLAKTDKLDALLLAQFAAAIRPQVRPLPDDEARRLAGLVKRRGELVQMRMQEKLRLAHASGTTKVGIQEHIAWLSARIRALDVDLTANLRRSSMWRAKDDLMQAIPGIGQVTRAMLIARLPELGCLNRKQIAALAGLAPFNRDNGKHRRKRTIFGGRAEIRRSCTWRL

SEQ ID NO: 445452 - protein, 409 aa, unidentified
MRIIGLDIHRAFAEAVAWDEGKLKRLGRVDMRRPLLEAFAKKLSKEDVVVVEATGNAASVAAVIAPHVKKVVIANPKQMRVIAHAKIKTDTIDASVLAQLYASGFLPEVWIPDEPTQALRRQVTRRNQIVRQRSRLKNIIQSILHSHLIPSCPHADLCGASGRAWLFHQVLPEDERLAVERHLREFDRLGEDLKVIERDLARSALRDEGVKRLMTIPGVDMVVALAIVAAIGDVGRFEQSQKLVSYLGLNPSVRQSGPGPAYHGRITKQGRGHARGMLVEAAWAAARAPGPLRAFFLRVRARRGQHVAAVATARKLAVLIWHLLSKGESYVWARPALHARKLRDLELKAGYKAERGQRGAAHAYNIKSHRDQERRWVEQAETAYARFVAGWNPRGPKQTRTGAATEGRR

SEQ ID NO: 445453 - protein, 397 aa, unidentified
MYIVGIDIAKRKHEAAVIDGEGTVIIKPFSFTNNCSGYNRLLAMLAKVKLPLDEVSFALEATGHYWLALFTRLQKEGFRVQVINPVQTNSIRSFYIRQAKTDPRDALLIAEVIRFGHFSESTLHPENIYELRELCRGRHAIVSMQADVKRKVVALLDQVFPEYETVFTNMFGDTSMAILQTCPTPKELSEMPLEELCHLIEVSSHKRFRMAKAQELQVLARNSFGFAMAGDVFSTMIRLYAKHLDFLKQQVREMDRKIAEIMDTMDTPITTITGIGPTLGAYILSEIGDISRFSSAAKLAAYAGIDPTMRQSGEYNGVRNRMSKRGSPYLRHAIWLATSSAVLHDPALKLYFQKKRDEGKPYMASVGHACRKMVSIIYAVMRDSKAYTPCIPNEISA

SEQ ID NO: 445454 - protein, 394 aa, unidentified
MFFVGIDIGKLSHMFCILDASNNEVIVKPVSFKNDKLGFDFLMNQLKSYPKDHLLIGMEDTGHYHFTLLKFLLDSGFSVALINPVTTDLTRKIQLSSTKDDDLDTLTICDVLASNQRRKSYRISKIDSFDLYEQKRLTREHHDLKEQLNIYTNKLQKCIDIVFPEFNSLFKSKYGSIYMNVLKTFGSADSIAHADIRNIRKCFETNRKGRRISLTPEALKEAARNSIGFPSKAEVIELRHLIDIIELINVQISEVDKKIEEFSVQNNSPILTIPGISHFSGTSILAELGDLRNFSKVSQVIKFAGVSPSKYKSSQYEAQHTAITKKGSRYLRKTLYQVILPVIRYNPVFNAFYRHKLSQGKGHRCAQGHCVRKLLRIIYHLVTTDQSFDPKLLR

SEQ ID NO: 445455 - protein, 337 aa, unidentified
MNYKQNEKINQVKESTLVVGIDIGSTTQYARAFDWRGIELGKVFPFSNSREGFESFKAWMQHLQDKYKKLDAIVGIEPTGHYWFDLGAYLEDEGILLVMVNPYAVKQTKELDDNSQSKNDRKDPKVIAKLVTEGRYSAPYTPDGVYADLRIMVANRKRLIREMTQIKNRFARWFAIYFPEYTDVFGDYEAQSSMLLLKKVCTPEAIVELGAEKINQIWRDAKLRAVGMKRATTLCETAKRSIGLKKGSSAARYEMKLLLEDYEYKKAQLDAVMEEIEKLCRKIPESEQMLAIKGIGVITVAGFLAEVGDVRRFESPRQIQKLAGLSLRENSSGKHKG

SEQ ID NO: 445456 - protein, 380 aa, unidentified
MPQPNDLSRSLVALDHNSTIVAVVELSQSSWLVGGILPGIERQPRKKLEPSPERLLAVLHRWRNEAVRAGRNITRIAVAFEAGRNGFWLARWLEARGVEAHVIHPSSVAVSREHRRAKTDRLDTELLKRGFLGWLRGERGHCSMVRVPTIAEADAKRPNRERECLVKERTRLVNRMKGTLARLGIRNFRPTLRQAAEHLAALSTPEGSPLPPNVWGELQRDMARLGLVIGQIQEIEKARQKRLEQQPETTPHAMVRLLARVVGIGIETADMLVNEVLSRPMRDRRAVARYAGLTGVPDESGARRRGNARARRGMIQLAWRFLRFQRQSTLALWYRARTADSRIGTRKTMIVALARKLVIALWRFVTIGEPLEGVVLRPAV

SEQ ID NO: 445457 - protein, 478 aa, unidentified
MAKVKQSAFDRLRLGARLNRKERRAVEQRLSAADPGLEIVNRDAAGIDVGNESHYVAVPRGRDAQPVREFGSWTAALVEMAQWLVRCGIRTVVMQSTGVYWIAVHDVLQKHGLEVYLVDARGTKNVPGRKSDVQECQWLMRLHTYGLLRACFLPAPEIQRVRTVWRLRDQHVRDSSRCIQHMQKCLIAMNMQLHNALSNIGGTSGQAIIRALLAGQRDPKTLSSLRDRRCMASEEEIVHSLQGVWKPDVLFELQQAVDAYDFYRQQMAKCDEQLKQYLALLPARRMEAVDPPSTDMTKKSRKPHKPQGNEPLFDLEAELERILSVNATSIDGINVMTVQTVLAEVGPDLSAWKTEAHWSSWLNLAPKRDVSGGRVIRHVREHRTNRAGNAFRMAAQALIHAHSYLGARCRYLRAKLGGHKAIKAMARILACLYYRLVMKGQKWVDQGMEEFNRRSEQRELDLLQRKAHKHGMQLVPAA

SEQ ID NO: 445458 - protein, 340 aa, unidentified
MYHVGADLHKEQTWFYVMDESGNKVSSMSVSNEMQTLEAYVASIPRPFRIAVESTYNWYFFIDLVERYADAAYLANSYELKAFAKRHKKTDKIDARLIADVLRKGYLPAVFIPDRKTRQMKELLSCRMNLVKDRSRTIFRLKALLDRLGIPSTGDFTTQKRLTTIPVNMMPAEYAVSATHMIDSLTFLGSKLFTIDKDIRHYGNQDRDILNLITVPSLDYFSAMLIKTEIVDISRFASFARLCAYAGLAPRVSQSANKCFHGPLNNNRRKKLQWILIEVVYHFIRQQPDKQVKYDAIASRKGSNTAKIVLARDLLKVVYHILKEQRQFIIKPDPLYANAA

SEQ ID NO: 445459 - protein, 338 aa, unidentified
MKFKRIAIDTSKHVFTLHGVDEQDRPVLRRELKRSQMESFFGKQPPTEVVLEACGGSHYWGRLLSKLGHRVRLIPPQYVKPFVKRAKNDRNDAEAIREAASRPTMPSVAVKTVDQQADVIILKHREMLVSQRTQAINALRGHAAEFGVVAAKGTVNVTALVAVLAADPTIPDTAKAMFEQMAQHIDALDQRVAALEGELAALHKANPVSQLLAEIPGVGPVSAITMALTVEPGHFASGRHFAAWLGLTPKEHSTGGKQRMGKISKAGNERLRQLLVVGATSVVRFAKPGSKSALAWLLQLVERKPRKLAAVALANKNARIIWAMMSRGEAYRRQPVAA

SEQ ID NO: 445460 - protein, 393 aa, unidentified
MICVGIDVAKDKHDCVILNSEGKILAGVFTIPNNADGFDTLLQKIRSCTSSDDKIKVGLEATGHYSYNILGFLINQGLPTYVINPLHTNLYRKSMSLRKTKTDRVDAKTIATMLMSNVDLKSYTDTAYHNEELKSLTRYRFDKVRERAQLKQSVSLLVTILFPELEKLVPTLHMSSIYALLIEFPGAKQITEAHLTHLKSLLKDASKGRYGRDMATEIRDAAKHSIGSVMPAKSLELRHTIRLIRELDSEIEDIEAAIEAIMEELQSPITTIPGMGFRMGAMILAEIGDFARFDSPDKILAYAGMSPSTYQSGQLSLAGTYSHMEKRGSRYLRYALYNATKYVCHWDPGFAAYLAKKRAEGKHYNVALSHAAKKLVRLIYAMEKSRQPYKRAA

SEQ ID NO: 445461 - protein, 415 aa, unidentified
MKVVFPTCCGVDVHKTFLVATIITTPADSLQPNYQKKRFSTFNSDLNRCADWLLEHNCLDVCMESTGKYWVPVFNILEKRGIRVVIANPKWVKAVKGNKDDTKDSKWIGDLFRIGLVKSSFIPDLNIRILREFPRYRYKLVSMKSSEKNRFQNAFTVCNVALDSVVSDMFGKSATAITDYLTSDESFDAEHCVSLLQRSLKKKAEQVLESIEGFSIADEQKARIKIIREHHDFIEEMIATVDTRVNEMVAKYEGNINLLCTIPGIDRRSAITIISEIGTDMGQFGSSKRLCCWAGLTPGNNESAGKKKSVRISRAGVYLKPALVQVAHAAVKDNDHPYYKLKYERIAKRRGKKRAIIAIARMILTAVYSMFCTGEVWNPVDLYKVDMPGCLKEQQLAKAIKQATRFLEKQGLSVA

SEQ ID NO: 445462 - protein, 475 aa, unidentified
MSKGSGNGMTRGDRRRNARRERLRERLPRDGAVVGIDLAEDKQALAVTDHDGRVLARKTMRVKAFRLGEALDWAVAQARVKGFSHVAVACEPTGPRWLQVQRLCAGRGLPLVCIQPLVSHIAREQQDYTPHKTDESDCVLIGRLAAELHCYVPEELDETWAHLRHLGRRRAQLITAGTASVQRIRDFLSVAWPTVTECCAHPFDSVTWLAAMGVVTGRCGGDPGRLAGMGLAEFTALVRAAVAGWGGQRPAAVICARVFAALSDDEGVVVACRRGLLRRVADELGDLARTRAQLRAVEADMVAVLGELGLSRLGEVPGLTAVGAAAILAEAGDPRRYDGSSSLVKHAGMSPAGNASGAFEGQARISRRGRPGLRLAVWRAVWPMLRHNPVLAAKYAALTGGAAAAAADPAAAADAGSPQASTAAARARRARARVACAASLLRWIYSLTVHGTSWDAAIASGDAGQHTARRPAEAA

SEQ ID NO: 445463 - protein, 336 aa, unidentified
MQHEPIAVADAALPDAALPDAALPVAGVDVSKDKLDLYVDTVGLRLTVANDDAGVATLLAALRRHKARLVVLEATGRYHRRAAATLLDAGVEVAVVNPAHARDFARACGRLEKTDRVDAELLARFGRAVNPRAAAASPGHRAVLADLVSRRRGLVQVRVAEANRSHDRLPKLAAAQSRKLLRLVDQQVEDLDREIARLVEADDDWRGKAELIDSVPGIGPGTANQLVVALPELGTLNRQQIAKLVGVAPLNCDSGHYRGQRKIRGGRADVRACLYMAAFNARQRCDRFRRHFEGLIARGKLYQVAMTASIRKLVVTLNQMVKNNTHWNQSFNGATA

SEQ ID NO: 445464 - protein, 366 aa, unidentified
MKKISTAQAFGNEILKEQKLTIGVDLGDRWSFYCVLEEAGKIILEQKVPTTPEAMKQTFSRIPQSRMALETGTHSPWVSRLLTELGHEVIVAHAQKVQLITKSNRKDDRHDARTLARLARIDPELLGPIRHRSVQAQIHLTVIRARAELVSARTALVNAARGLVKSYGQRLPKCGTQQVSRELAAALSTELRDVLEPLLKEIESLNEGIKEYDERMEKIAKEVYPEVSLLKQVKGVGTQIALTYVLTIEDPHRFLKSREVGCFLGLRPGRRNSGESEPQKSISKEGDRYLRTMMVQGAHYILGPFGADSDLRRWGLKLAERGGKNAKKRAVVAVARKLAVLLHRLWVSGEVYEPLRNSQKAMRAVA

SEQ ID NO: 445465 - protein, 338 aa, unidentified
MAILYVGIDLAKSVFAVHGVNDAGKAALVKPSVPRGKLLELVAALPPCVVGMEACTGAHHWARLFMAQGHVVRLMAPKFVAPYRLSGKRGKNDAADAAAICEAVQRPNMRFVPVKSVEQQARLMVHRARQGFVEQRTATLNRIRGLLSELGIVLPLKAATVRREATQVLEDLPARANLVIGDLLSEVHRLDERIEQYDRQIVLMAREDDRAKQLMRLSGVGQTTATALIAMIGNGHEFKSGRQLSAWLGLVPGQYSSGGKTRLGRITKAGDPYLRSLLVLGARAVLHAAKGKSDSVSRWAVQLAERRGYWRAIVAIAAKNARMAWAVLTRGDRFVMPG

SEQ ID NO: 445466 - protein, 347 aa, unidentified
MRYIGADVHKNYTLFAVLTQEGKVEQRTRVENDGQALREFLGELSKPAHLVVEAGYHWQPFYEVVEELGFEVSLAHPLKVKMIAEARIKTDTIDATALAHLLRLNYLPTAYIPPREVRDLRETLRHRARLVKTQTMVKNRIHALLAKNGIRRRFSDLFGKAGRHFLKALHLRPCYQLALKQLLALLDTLGGLIQEVTEVIEEEAKATPEARLLATIPGIGYYSALLILAEIGDINRFPNGKKLCSWAGLVPSTHSSGGRTYHGHLTKQGSRWLRWILTQAVPHAARGSSQLGALYQRVARRGGRNAAKMAVARQMLMIIHRMLVRGEPFRDRPDSVGTGHPLTRSSP

SEQ ID NO: 445467 - protein, 407 aa, unidentified
MRLFVGDDWAEDHHDVELMDERGRVLARKRLPEGVAGMARLHELIGEQLGDGADDAEVIIGTETDRGPWVAALVAAGYTVYGVNPLQASRYRERHGVSGAKSDTGDAHMLADMVRTDSHQLRAVAGDSPGAAAVKVVARTHKTLIWERNRQVQRLRHQLREYFPAALEAFDDLDAPDALDLLARAPDPARARRLTRAQISAALKRARRRDIPGKATAILTALRGAQLGQPPAITAAYAATVRSLIAVIITLNEQVKILQGQVEADFGQHPDAEIYLSQPGLGPVLGARVLGEFGDDPHRYASGKARKNYAGTSPITRASGKKKTVMARFIHNDRLIDALMAQALSALGSSPGARAFYDAQRAAGVEHNAALRTLANRLVGILHGCLKTRTTYDESTAWSHRENKLAA

SEQ ID NO: 445468 - protein, 328 aa, unidentified
MKYLGVDVSKDKLDCCLLREASDTKRKNRKVANSSAGLATLFSIMEKEGIRPDELHVIMEGTGVYHQLAAETLCDAGMMVSIANPAQVKDFGRGIAVRTKNDTKDSFVLARYGALLKPAPWTPPPPAARQLQAYIAREDAIKKDIQREQNRREKSVIGRAPDDVLASIDETIEFLKAQLKAIRKKIGSHINRHPDLKNDMALLTSIPGVGPETGHHMLSIMHVHQFRSAEQLAAYLGLVPVERQSGTSLHAKPRLSKAGPKTIRAALYMPAVSAQTWNPHIRALKERLTARGKTPMAIVGAAMRKLVHLCFGVLKTRTKYTVDHVQPA

SEQ ID NO: 445469 - protein, 403 aa, unidentified
MNAVGIDVSKGKSMVAIMRPFGEIVATPFEVKHTASDIKSLVNLINSVEGESRIVMEHTGRYYEVLAHQLSEANLFVSAINPKLIKDFDNDSLRKVKSDKADAVKIARYALDKWQNLKQYSVMDELRNQLKTMNRQFGFYMKHKTAMKNNLIGILDQTYPGVNTYFDSPARSDGSQKWVDFASTYWHVDCVRKMSLNAFIDHYQKWCKRKKYNFSQSKAEEIYGKAKELVPVLPKDEVTKLIIRQAVDQLNSASVTVEELRSLMDETASKLPEYPIVMQMKGVGPSLGPQLMAEIGDVTRFTHKGAITAFAGVDPGVNESGSYEQKSVPTSKRGSAELRKTLFQVMDVLIKTMPQDDPVYKFLDKKRAQGKPYYVYMTAGANKFLRIYYGRVKEYLSALPESE

SEQ ID NO: 445470 - protein, 322 aa, unidentified
MSFSFSGVDENEQPVLRRQIRRGEVAKFFAKLAPARIGIEACGASHCWARVLRGLGHEVMLLPPQYIKPYVKRGKNDKIDAEAICEAMSRPTMRFVPVKSAEQQAALTMLGVRDLLVKQRTMLINAIRGHAAEFGITVAKGSKQVPELLGRLASDEGVPALAREMIAMLSSQLDGLDIKLTAIERRLMAWHRQDQTSQCLATIPGIGPITGVSFALKVPDAKAFRSGRHFASWLGITPREGSTAGRQKLGRISRAGDEDLRRLLVIGATAVIRAAKPGRTAPWLLALLARKSKKLAAVALANKMARIVRAMMVSGETYRQPA

SEQ ID NO: 445471 - protein, 410 aa, unidentified
MSLYCGIDWATAHHDVAVVDADGRVVARERVSNDAAGFAQLLTLLAEVGDTAEHPIPVGIETDRGLWVAALRETGRVIYPINPLTASRYRARYAVSGAKSDATDAVLLANIVRTDANAHRPLPADTELAQVIRVLARTQQDAVWARQQIGNQIRDLLKDFYPAALAAFAKLPSGGLARADARAILAAAPTPAQAATLTPARLRRLLVKAGRRRDLDRDVSRLRAVFTDTYLHQPPVVENAMGIQLTALLRQFEAACAAVDDLAQAATAHFEQHPCAKIITSFPGLGNLAGARVLAEIGDDRTRFADARGLKAFAGSAPITRASGKKTVVTHRHIKNRRLAAVGSIWALTALRASPGARRHFDARRAAGDWNRQAQRHLFNKFLGQLHHCLQTGQPYDEHRAFPPPHTLAA

SEQ ID NO: 445472 - protein, 316 aa, unidentified
MAEITNPSNVGIDVSKDWLDIVVIPSGETWRTENIAEEIDVLVKKLEKIKPERIIIEATGGYERLVVSKLYVAKQPVCRVNPKRVRYFARSLGQLAKTDKLDAKVLARFGELVKPALTQLPSDQEELLSALLARREQLTAMRVAEGNRMDTAPARVRPSLNEHLTWLKNQIKQLDKEIDDFIDQDPDLKEKDEFLQEVQGIGKKTSAKLIADVPELGHCDRKQIAALIGTAPYNHDSGYKKGQRSISGGRPDVRRILYMATLAATRHNPVIQVFYQRLLKAGKKKKVAIVACMRKLLTILNAILRDRIHWNLAFSS

SEQ ID NO: 445473 - protein, 358 aa, unidentified
MPEERANVIGGVDCHSRTHHAVALDGRGQRLGDAQFPATIAGYQALHAWLEGFGAIEALGIESTSSYGAGLTRWLTARQIRVLEVNQPHKHTRSRKGKSDSVDAEAAARRVLAGETVVVPKDTAGAIESIRQLRVAREGAVKARSAALCQLGGLIVTAPAELRESLPCKTLLGQARQCARLRPDPRRLAEPLHAAKFALRSLALRIVALDREIGQLDQALEELVRRAAPRTISLLGVGTHHAGQLLVTAGQNIERLRSEAAFAHLCAADPIPASSGLTRRHRLNRGGDRSANRALHMIAVVRLRYCPRTRVYVARRTAEGLSKREIIRCLKRYIAREVYQALSADLREIASREVLDTV

SEQ ID NO: 445474 - protein, 522 aa, unidentified
MAFKRSRHSSKSGAAEFLQQPNGVVHARVQKVGPEHFGIISVDCAKARSKWMLADFYGNILIPPTEVAHNRVELAAAVKQVRTGLAKHDLRDCLVAVERTGRYHHPVKNAFRKADFETRVVHPFTTKQFRQPADPDNKTDDTDLKAIHRAAVNGFALLEAAPVESWRQLQLFIRHRRDLVRKSSALACQIREHLDAALPGYAACFDKLWESNVAFRLVQQFGSAQGMLEAGETALGEFLYQQKVRFQQRTLVTVLTWAKSAAAPDVAADLHRQIALAYHDDHARKSLEIIRLEREIAHRLAQTPYILLLSCPGINVVSAADFAGEMGPIENYANSRSITGRAGLFPARHQSDRVDYTGHLARRSNRALRAAILGIADNLILCNAHFHNLANLWKLAGKDPRMTHVKVAARFCRIAFQMVAGRQVFRHPCLRERGYILDKLLAFHVEQQTPMQETMRDLHYAITHIPKSEHAAEAKPLHERMQPTRERGKMGPQPIRELIAIVLARLGVGVINLNPSGEEDLT

SEQ ID NO: 445475 - protein, 319 aa, unidentified
MSHEPMYVGLDVAKATLDVALRPTGEGWRVVNAEAGIAELVARLRAMQPALLVCEATGGFERPVIAALAAAGVPVVVANPRQVRDFAKATGQLAKTDRIDAGILALFAERVRPTPRPLGDATTQLLDALLTRRRQLLEMLVAEKNRLGFAPRPLHRGIQQHIRWLEHQLDDVTRELAAQIEASPVWRAQDDLLQSVPGIGPIVSAVLLGELPELGSLSHKQIATLVGVAPLARDSGTLRGKRMIWGGRAPVRTALYLAALCGRRWNPQLKVFYERLVGAGKPKKVALIACARKLLTILNAMVRDNKRWMSPQVRLQHSC

SEQ ID NO: 445476 - protein, 394 aa, unidentified
MYFVGIDISKYKHDCFIVTEAGEVIKDTFTFDNTRTGFDQFFSVLDGLGPKNEIKIGLEATGHYMNNLMKHLSVKGYSFILLNPIIVSRFRHSETLRRTKTDKVDAKLIAQVIASKDFSSYPLQAYHFPDLKTLTRLRDRLIKQRSLYLVMLTNQLDLSFPEFKEFFNGSLKSKTAQFILTKYGISSRIANMNSQSFELLNKVSRGKFSYAKFAKLKELAKNTIGCSSEIDEMLFTLTINLYQSLDKVITEVESKIAELMEKLDSPTASIPGIGLISAATIIAEYGDVSRFANDGQMLAYAGLDSGRYQSGTSDFPGRMVKHGSGYLRQALMNVAETCMMHVPSFYDYYLKKRNEGKSHRVALSHIARKLVRLIYKLETSHTHFDLSIFNSQHQ

SEQ ID NO: 445477 - protein, 321 aa, unidentified
MSSESSESRVFVGIDVSKDQLDVAVYDRPGARSFANSATGLGELVAWLTPQQPALVVLEATSCYHVQALAALVCASLPAVAVNPRQVREFARSTGELAKTDRLDAGILALFAARIQPAVRPVPEAAQRTLQALVTRREELVRMRAEEKTRQHTAPPVLQQSLRAHIAWLDKQIDRLDADLDDQIRHHPRWLELYHLIVSVPGVGRVTAVCLLAQFSELGQTNRQQAAKLAGVAPLHRDSGRRRGQRCIWGGRAPVRRSLYMAALSAIRCNPIMKALFERLHAAGKPRKVALVAVMRKLLTTLNAMVRDGRPWAPGPTPSNP

SEQ ID NO: 445478 - protein, 367 aa, unidentified
MAGGTEDKEHAMSQKLDTSPAVIGIDIGKNSFHIVGQNQRGAVVLRQKWSRGQVEARLANLPPCLIGMEACVGAHHLSRKLQALGHQAQLMPAKYVRPYSRGQKNDYRDAEAIAEAVQRPTMKFVATKTVDQLDLQALHRVRERLVSQRTGIINQIRAFLLERGIAVRQGLRFLRLELPGILATRADVLSPRMMRVLEDLSGDWRRLDTRIEGLTSEIEALARQDQHCERLMTVPGVGPIISSAMVAAIGTGDVFSKGRDFGAWLGLVPKQLSTGDRTILGSISKRGNRYLRVLFVQAAWVVLVKLGPEKWERYGLKSWIEAAKKRLHHNVLAIALANKLARIAWAVLNKGRAFACIKTDAMASCPA

SEQ ID NO: 445479 - protein, 354 aa, unidentified
MEIVSALDVHRRQITYKTVDLESGQVWRGRISPGARGAVREWLGRFDGRADVHFALEGTTGWRFVVEEIERAGHRAHLADPAETAAKRGRKRRAKTDHADCDLQLKLLLSGELPESWIPPTHLLELRTRVRMRKTLVDQRSAWQQRLQAQLFHQGAPAGLRPRTRAGRDALARVELSPAGRALVLLALRMIATIDRELAPLGRELRSFAGRQPGCRALMARLYGVGPVCATAILAELGDPRRFARSDDAVRHSGLDVTVYQSDSKRAPGHLSHEGPELLRWALFEAALSAARAGSPDHAYYLRVAGRIDHNRACLSVARKLCRRAYHILRELGDEALAPVERDRYAEEAIAAAT

SEQ ID NO: 445480 - protein, 371 aa, unidentified
MKEFTKYVGLDVHKETIAVSVAESQGGEVRYHGEIANTTEAIVKLVKQLRKGDAELSFCYEAGPCGYGIYRQLSDLGWNCKVVAPSLIPKKAGDRVKTDRRDSLMLARLLRAGELTAVWVPDGAQEALRDLTRAREDMKHLQRQAKQRLLAFLLRHGKSYSGKSNWTQAHYRWLEGVKFDHPVQQIVFQEYVDTVKDMTKRVDALDKQIESAASESVFWPVIEGLMALRGVNTLTATTIVAEIGDLRRFASAPQLMAYLGVVPSEHSSGGTKSRGGITKTGNGHVRRVLVEAAWTYRHPARKTVTLQRRAERTSAEVQEIAWKAQKRMCSRYKSLEARGKLKVQVCTAIARELAGFIWAVGQTVPQPAANA

SEQ ID NO: 445481 - protein, 482 aa, unidentified
MKKKNIYTNQSQELLTLFEEAGNGAKVMCVPIDYAKKDHIAMLCNGNGHILRKPFSIKNSPEGIEYLIEQVTRSCSHRQIDHKHVFFGGEDVGSYAENFVNTLRSGGWIVAGVNAHDAKEQRANMQASTDRLDLMGIASMLLNRRGNCSPAQSGIYRNLRTLVRHRRKLVTMSTEVKNRMHTVVDRLFPGFLDEKKSGILSFSESSLYLMEDRFSPRQIRRRKRQKLIEILKRYGTAKPESIASKLQEYAARVLNTPNEYVDTLQLSLAQHVKHFRCLQDSIEQLEHEAAVWLAQTQGAFLTTIRGIGIVLAAGVSAEIGNPHEQEPLNNLVSYSGIIPRVKQTGGSEGKTYTGKVAKRCNHILKDYVVQSGNHMGLHGPEELMADYKRREAADQHADFGIGRRYLRMAMCLMRTSQIYIPTRLRDTAVEPEERAAYYLTAWPTLRGKWKKAGALDAAFEKDRPLGQWRCMVQELYEIKLKL

SEQ ID NO: 445482 - protein, 331 aa, unidentified
MVAILGIDVAKDSLAVVVGKDGGQQLSAAFPNTPQGFKQLHRWLKRQKAVPVHACLEATGRYWEAVAAFLVERGHAVSVVNPARIKAYADSQLARNKTDKLDAHTIADFCRTQHPPLWTPPDPSWYELQALVRHLDDLETDRQRQRNRLHALQHGVQPSATIQDNLQHQIDLLSDQIDQVKQALQDHIDQHPDLKQQRDLLVSIKGIGPLTAAKLLGEYGDMSQFTDVRQVVAFAGLNPRHKQSGSSIRGQTHISKVGRASIRAALYMPAINAKRFNPRMMAFADRLAARGLCNMEIVIAVMRKLLHIVFGVLKSGQPYQADFGLHRAAVA

SEQ ID NO: 445483 - protein, 454 aa, unidentified
MAKKKEKGKTLDGFAEIKHDAAGIDVGNAQHWVAVPAGRDTVSVRMFGCFTADLHALANWLMRCGIKTVAMESTGVYWIALHEVLESRGFRVCVVNARQAKNLPGRKTDVKDCQWLQQLHTYGLLTASFRPQAEIIVLRRYLRHRETLVQEAATCIQRIQKALTEMNLQLANVISDISGTTGLRILHAIVGGERDPQRLATLRDWRIKATPEEVANSLLGNWRDELIFVVEENLALYGVYQTKIERCDQRIEQHLKSMPAQIEGDNNPIPKPRKGKRPHGNAPAFDLRSELYRVTGTDLTQIDGIDVVTAQAILADTGTDMSAWRTEKHFVSWLGLCPDHRISGGKVLQRGTRRVVSRAATAFRLAASSLRRSQSALGAKYRRLQSRLGPPKTITAMAHHLARLFYRMVKYGSQYIDHGMAAYEARFKEQQLKWLSRKAAELHFRLAPIPDLAV

SEQ ID NO: 445484 - protein, 339 aa, unidentified
MKLTPVGIDIAKNVMQMHYVDEGTGEVVNKPIKRAQFLEYFANRAPCLIGMEACGGAHHWARQLTKMGHQVKLMPAQFVKAFNIRNKNDAADARAIWLAVQQPGKPVAVKTEMQQAMLALHRTRERMVAFRTMQINGLRGMLTEYGEVMGKGRAAITKAIPEVLARVADRLPAVLIDTLREQWNRVAELDEQIARIERRMREWKKDDGAVKAISEIPGVGLLTATAAVAMMGDVKAFRSGREFAAWVGLVPKQTGSGGKVNLHGISKLGDTYLRTLLIHGARSVLTNAKEPGPWIEQMKKRRPLNVVIVALANKTARTIWAVLAHDRPYQKGYVSAKPA

SEQ ID NO: 445485 - protein, 355 aa, unidentified
MNSEKYIGLDVHQATISVAVMDSRGKVVMESILETKAATLLEFLAGLRGTLSVTFEEGTWAAWLYDLLKPHVQKLVVCNPRKTALLKDGNKNDRIDARKLAELLRLNNLKPVYHGETGVRMLRELARSYLTLIKDLTRVMNRLKAMYRSWAIPCPGRDVYYTRHRAEWLAKIREAGVRRRAEHLYQQLDMLQHLRQQARRELLAESRKHSITAKLRQIPSLGPIRSALVVALIQTPHRFRTKRQLWAYSGLALETRTSGEHCYVQGQLRRSKKQVSIRGLNKDHNHDLKGLFKAAATRASVQPGPFQDFYHRSLAKGIKPTMVRLTLARKIAAITLTLWKKGENFDAEKLKSQAA

SEQ ID NO: 445486 - protein, 350 aa, unidentified
MKKNSKAVKEQPAETVGVDLGDKVSRYAFLNEEGIVVEEGHFRNTVESIAKHFGQIGRIRVAMEVGTQSAWIAREFEKLGHEVIVANSRELKWITSSDTKNDRNDAVKLARLARADRNLLAPVQHRTAEQQSDLAVIRARDALVRTRSLLVNTARSLAKGFGLRLPSSITHTFGARALAGLAAHLHLAMQGLLEHIDQLSLRIRDYDQHAKEVAAKYPAAAQLAQVPSVGTLTAVTYVLTLGSRERFAHSRDAGGFLGLRPRQKQSGERDPQLGISKSGDKYLRKLLVQCAHHMLGQWGKDSALRQWGLSKGSTGAAKKRAVVAVARKLAVLLHRLWTTGESFKPFPKMA

SEQ ID NO: 445487 - protein, 362 aa, unidentified
MSRMAKIAGPVTGGVDTHAGVHVAAVIDQVGRVLGTESFPADEPGYARLLGWLAGHGPLARAGVEGTGSYGAGLACYLAAQRVTVLEVPRPDRARRRRHGKSDPVDAVSAALAALAGEDCGTPKARTGAAESIRALRVARAGAIKARTQAGNQLRDLITTAPGPVRAPLAALSTPRRVRAAAAFTCGDTADPAEGAKTAMASIAARWLDLDAEVTRLETAIAALVTQVAAPACLARTGVGPQSAAALIATAGEDPGRITSEAAFAALCGVSPVDCSSGKHQRHRLNRGGDRQGNTALWRIAVTRLQHDPATQDYYARRTAAGKTRKEIIRELQRYAAREAYRDLIRPGFLTAAAAPPPARAA

SEQ ID NO: 445488 - protein, 417 aa, unidentified
MFKKTKKRSTTSRRVRVARSVATSHADTASGPRPIVPRPTTAVTEQGPSRSRVHSPEQSTGPLPPVRRPARPNPQDRDARVDHPSFQVLSSQFPPPGPLYVGIDVAKDKLDVAISEDPAAPVDTIANDPPAIADLVKRLSALKPAVIVVESTGGLERPLLEAMLDAQLPVALVHPGRVRHFAKGVGILAKTDRIDARVLVRFARQAEPRLAEKRRKNHDELRDLVACRRQLTATKTQQTNRRGATFAKPALKSIDAVIKTLDKQIASLDKQIRHIIDADDDFKYLDGLLQSVPGVGPAVSATLAADLSELGQTDRQCVAALAGVAPFPDDSGTTKGKRSIRGGRADVRCALYMATLSAVRFNPVIKLFAQRLKSAGKVNKVMITACMRKLLALINAMVRDGLTWDQLNVVKKLATTH

SEQ ID NO: 445489 - protein, 462 aa, unidentified
MTKEKVIRKAEKSTVQYDKSLKMINPCAAGLDLHKETIWACIATGNDADSAVKTFGTSTDELRRLGHWLKDAGIETAAMESTGVYWIPVYEVLEEMGLKPVLVNAREIKGVKGRPKTDRLDCMWICRLHSYGLLRGSFVPSSQVAALKSLCDCREKIVSEAGRTVQRMQKALQRMNCRLDIAVSNVVGDSGKRIITAILAGERNPRKLASLADVRVEKEKAEIARNLDGNFREELILVLGEWFEHYQFYDHRLTAINDQIYALLEKFPKKAMAQELPRESPNYREDKMNFTQPLRPILFEIFGTDLTQLAGVGPSTVLSFLATVGPNVSAWPTENHFASWLGLAPNPQISADYRKKGKTKRVKNLLACNLKVAGMTVQRTDSFLGAFHRRLKSRSGPGTAKNAVAGKMAIIMYRLVKSGGATIKFSAEKYDRLYRERKLANLKRQAEKLGYNLIADEQQHSA

SEQ ID NO: 445490 - protein, 338 aa, unidentified
MDKITTIGLDLAKNVFHVVCCDAHGRVVRKKMLKRSRVLEYFSKQPQCLVGMEACASAHHWARELRVLGHEVKLIPPQHVRPYVRGNKNDYNDALAIAEAVMRPQMRFVEIKTGAQQDIQALHRLRERRVQERTALSNQLRGLLAEYGLILPKGISAMRSSIPLLLEDAENGLSELFRRLLAQGYRQLLELDAHIDVYGEEVKRYSAQSEACQRLQTIPGFGPVVASAFAGHVATGESYRRGRDVSASLGLVPRQHSSGGKQVLLGISKRGDRYLRCLLIQGARAVVYRAADKDDPLGHWIQRIKDRRGINRAIVALANKMARMGWAVLRNKTVYQAA

SEQ ID NO: 445491 - protein, 314 aa, unidentified
MNAQALVVGIDVSKNWLDVVMGSESLRVANDGEGLTELLSRVRDVGAQVVVMEATGGYETQAATAIAGAGLRLAVVNPRQVRDFAKATGRLAKNDRIDAHVIAAFGQAVDPQIVCLPDEETLELQGLVARRNQLVGMRVQESNRLTLMKGAMRKQIKAHIAWLDKAIDEVNTDLTGRLRTSAAWREKDELYRSMKGIGPITSGTLMAGLPELGALDRRSIAALVGVAPFNCDSGKFHGRRTIWGGRAHVRHILYMAATSAIRFNPIIKEFYERLIGRGKPHKVAMVACMRKMLTILNAMARTNTPWTPPLHGAN

SEQ ID NO: 445492 - protein, 368 aa, unidentified
MKNSITFVGLDAHKKMIVVAMLLPGSTEFIVWQLPNEAGALRRMAKRILREAPGPVKVCYEAGPCGYALQRTLKDLGLDCVVIAPSLIPVKAGDRIKTDVRDARKLASLFRAGLLTEVHPPTPAEEAVRDLSRCREDAKEDLMRARHRLGKLLLRRGMIWDRNNWTQAHRAWMEKIRFDHPADQLVFQDYLLATQHLEDRIRRLDQALEAVMEEHRYRGPVGALRCFQGIDTVSAVAIVAELHDFGRFRSARELMGYLGLVPSEDTSSDRRRLGSITKAGNSHVRRILVESAWHYRHPPRLYKSLRDRRAGQPATVISVADRAAQRLYRKFQKFQARGKASTKAVVAVARELAGFVWAALYPLSVKSA

SEQ ID NO: 445493 - protein, 466 aa, unidentified
MKPAKKVDLSQTSPTVAEVDPLTVLHRDAAGMDIDSASVWVSVPADRDAEPVRQFGMSTPDLIAMAEWLKACGIKTLAMESTGVYWIPPYEILEERGFKVYLVNARHAKNVPGRKKDETDAQWLRRLHTFGLLNNSFRPTGEICAMRAYRRHRAMLIEHRAAHIQHMQKALRQMNVLLSPTVKDITGETGMAIIRAILAGERDPVKLAQLRDPRCAKPESEFVKALTGNYREEHVFALKQAVALYDAYTEQIRECDREIERKFSTLKPIHNDTLPPLDTTDKRNTHSKNAPTYDARSQLYQLLGVDLVAITGLNASTVEDILFEIGTDMSCWPSDKHLCSWLHLAPHNDISGGKVLRSHILKGPNRAGQAFRLAAQAVSRTDTALGAYFRRMRAKHGPQKAIVATAHKIARIFYFMLKHRKPFHDIGAEEYGKHEREREVARLQKKAAKLGFTLVQSTAQPTQVSE

SEQ ID NO: 445494 - protein, 410 aa, unidentified
MEVLHAHCAGLDVHKDSVVGCVRHMVDGKVTTSVKTFKTTTQELMALSGWLSTEGATHIAMEATGVYWKPVWHILSDGEFELVLANAAHVKNVPGRKTDVNDATWLADLMAHGMIRASFVPDEPTQQMRDLLRTRKQIVRERSSHIQRIQKTLEDANIKLDSVVTNILGLSGRRIIEALIAGQTVPQALATLAHRNLKATADELEASLRGRVTRHHRFLLKLHLDQIDAFDATIAAIDKEVDGNVEPFRVAIEMLSAIPGVGDLSAAVIVSEIGIDMSRFETAGHLISWAGLCPKNDQSAGKRRSTRMKKGAPWLKSTLIQCAWCASRTKDSYLQAQYLRLRSRRGAKKAVCAVAASILTTAYHMLKNGTVYQDLGASYFDNRAKDKQALRLISRLKNLGFEVQIKPLAA

SEQ ID NO: 445495 - protein, 364 aa, unidentified
MYDSTMTVAVGLDVHARSIRLAAVRADELLEERTLPYDEEQVERLLRRWPSVRCCYEAGPTGFGLYRHLVDRGVDCTVVAPGLVPQRPGDRVKTDPRDARKLARLLAGGLLEPIHVPSPEHEAARDLVRAREDARLDRMRDRHRLSKFCLRHGRILPTSSWTVVRRKWLGEQRFEFVAEQLTFDSYLHALDLVDARIEQLERAIRETAEQEPWRQLVARLRCLRGIDTLTALALVAEIGDFNRFRSAAEFMAFVGLVPSEHSSGEKRRQGSITKVGNSHVPRLLVESAWHARRRPKVGYDLARRQRGQDAVVLERAWRCQQRLYQRWQRMAGRGKPQQKIVVACARELAGFVWAIATEQPLRSS

SEQ ID NO: 445496 - protein, 312 aa, unidentified
MFVGIDVSKATLDIAIRPSGERESVSNNESGIKALITRLAEVHPALIVLEATGGVEHQLTRALVSAELPGVVVNPRQVRDFAKATGQLAKTDAIDAMVLARFAEAVRPAVRPLPDETLLELRALIVRRRQLTEMIVAEKNRLGTVSKTVTKRIAAHIRWLQAELGRADKDLDQSIRRSPIWQENQDLLRSVPAIGPVVSRTLLAELPELGQLNRKQIAALAGVAPLNRDSATLRGRRVIWGGRATVRATLYMAALVASRRNPVIAAFYKRLRAAGKTPKLALVACMRKLLTILNSMIKHRTRWSENTPLQTT

SEQ ID NO: 445497 - protein, 316 aa, unidentified
MTKPDNVIYVGIDVSKNCLDVYVYPTGVSLQVRNDKSGFKKLARKLVSLVPRQIILEATGRYHRACVRALHAQGLPVAVVNPFRAHQFAAFKGQLAKTDSIDARTLALFGSEGHALTSQPKPECLQRLEDLMVARNQNTRLQTMISNQNSVQVEKDLRRQGLEKLALLKRQNEEIDTAMRNIIEADPALAARFTILKSVPGVGDLTAISLIASMPELGMCSPKQAASLIGVAPFNRESGTLRGNPAIRGGRTALRKILYMSALSAIRVNGPLKSFYQRLVDNGKPAKVALVAVLRKLVTILNALVRENRPWRTKVS

SEQ ID NO: 445498 - protein, 341 aa, unidentified
MAEQYVGIDLHRRRSVIVRLTPAGEVLEIVRVNNDPVALSLELVKAGPDPEVVLEATYGWYWAADLLQACGAQVHLAHPLGVKMFGYQRVKTDARDSRNLAELLRMGRLPEAWLAPPQVRELRELVRYRAKLVALRSGLKAQVHAVLAKEGVRVPMSDLFGVAGSRLLDELHLGRAYGLRIASLRRLLVAYDQEIARLGQEISSVLAGDVGYLAIQAIPGVGPVLAAVFVAEIGDVHRFADAPRLCSWAGLTPRHRESDTTVRRGPITKQGPRLVRWAAVEATQRLPRASKQAADFHRIADRRGTGIGRVAAARKLLTLVYYGLRDGQVRCLTPAPRQGHD

SEQ ID NO: 445499 - protein, 366 aa, unidentified
MDPAAEIRWSFKGKLKQGRNVMEIVRIGLDLAKSVFEVCGVDMRDHVVLRKTLRRDAVPHFFAELPPCLIGMEACCSSHYWAKVLTDLGHQVRLIAPQFVTPYVKSNKNDRNDAEAICEAISRPSMRFVPPKSSEQLEIQAVHRIRQRLVSSRTRLVNQIRGLLAEHGVVIGRDISRLRRALLQVVEGAGRNLGDLIQELASDLHQELSALDERISSYDRRIRNLFRTNEMCQRIGKIEGIGPITATALVAAVGDQSCFANGRQFASWLGLVPKQRSSGGKSRLFGISKRGDRYLRTLLIHGARAVLGKAGGKRDARSAWINRMRERRHPNVVVVALANKNARIVWSILSKNEEYRAPAMMLSTAE

SEQ ID NO: 445500 - protein, 483 aa, unidentified
MIATSGRALVSPSEEYMSEGTGSRRKKRSAVATALEALRPMVAGVDIGSKEHWVCGPARPDGQPNVRVFGTTTAQLNELADWLIEQKVKSVAMESTSVYWIPLYELLESRGIEAMLVNARQLHNVPGRKTDFHDCQWIQLLHSCGLLRASFRPGEAISGLRAIHRQLANLIEQRIRCVQWMQKALDQMNVQVHRAVTELTGTTGMAIVRAIVAGERDPHRLASFRHRCCSKSVEQIAQHLIGTWREEHLFNLASALRTFDAIEAEVQQYEAHLLTKVEALQPPERKAQSVPAHPNPRKERDIQSHGDQLVRTALWRFAGVDLTRIDGIRNGAAQVILSEVGMDFSKFPSEHHFVSWLRLSPRTAISGGKPVKKTRNGMGSNRIASTLRMAASSLQRSKTALGASYRRIARHKGASVAVFATARRLAQLVYRMLRYGQDYVDEGEKAYEARFEAKRLAGLADAAKSLGYTLLKQAPNSSHPLPA

SEQ ID NO: 445501 - protein, 324 aa, unidentified
MTRGIFVGVDVSKDRLDVAFRPSGEKLIVPNDRRGITRLVRTISHLTPECVVLEASGGYERRLLERLAEEELPVALVNPRNIREFARASGRLAKTDAIDAAVLAHFAEVMKPELRRLPNPETRKLRALITRRNQLVRMMTAEQNRQLQALEGLRTGLAAIIRCLKKQIAVLDKQLAALVQATPAFRQKADLLRSAPGVGPVVSATLIAHLSELGTLNRKKIAALVGVAPFNRDSGKLKGKRAIWGGRGDVRAMLYMSTLVAVRLNPSLRAFHSRLLSAGKSPKMALTACMRKLVVVLNAMLKVGSRCSEERTRPVKLIAAPAPA

SEQ ID NO: 445502 - protein, 403 aa, unidentified
MARVIIGVDPHKLSATIEVVDEREAVLATGRFGTDRAGYAAMRKRVVPFPERVWAVEGSNGAGRPLAQRLLADGEHVVDVPAKLSARARALDTGHNRKTDPHDAHAVAVVAVRTSNLRVLTHDPQLEALRLLVDRRAELTRSRIQCVNRVHRLLAELVPGQSKRKMSTTQAKAILATVKPRDVAGKTRRRLAAEQIAELVVIEKKAKAVTKELKTMVRASGSTLMTLPGVGPVAAARVLADTGDVARFTDRNRYASWTGTAPIEASSGEIVRHRLSRAGNRRMNHMIHMAAASQLRHDTEGRAYYRRKLAAGKTKAEAMRCLKRRISDALYRQLRADAQSQPVMDVDAGPGGHCGASLISSAAGSHPHTGTSDQPLPGPAPKTVRPTTTTRKSTTSRPLKPAS

SEQ ID NO: 445503 - protein, 315 aa, unidentified
MTNLKKSKSNVNVGVDVGKFELDVCIYEKQIHWRDENTAVGIKRILKRLALYQVERLVMEATGRYEFNLAQAAYEKQLPVCIVKPLRVRRFAGALEQLAKTDKLDAELIAEFAFRVQPEVTPEKSKTLLAIKDLIARRRQLMNMRTQELNRSHMVDKLLATSCKRIIRTLDEEIKRIEKRLAKHVEDQVEWTEKQMILKSAPGVGDTLIYTLLADLPELGSLNRKEVSSLVGVAPINRDSGKMKGKRRIQGGRYTVRTILYMATLSATQCNPVIKAFYQQLVAQGKHKKVALTACMRKFITMLNAMVRDRCEWAY

SEQ ID NO: 445504 - protein, 349 aa, unidentified
MSDKLSSAIAVIGIDINSFHVVGHDKRGTIMLRQKWSRGQIEARLANLPPCLIGMEACVGAHHLSRKLQMLGHDARLMPAKYVRPYSKGQKNDFRDAEAITEAVQRPTMKFVATKTAEQLDLQALHRVRERLVSQRTGIINQIRAFLLERGVAVRQGLRFLRAELPRILAAPCDALSPRMLRVIEDLAGDWRRLDERIEILSSEIEALARQDKNCERLMTVPGIGPIVSSAMVAAIGTGDAFSKGRDFGAWLGLVPKQTSTGDRTILGSISKRGNRYLRTLFVQAAWVVLVRIGPKHWHRYGLKSWIEAAKKRLHHNVLAIALANKLARIAWSVLACGRAFEASKIQAA

SEQ ID NO: 445505 - protein, 377 aa, unidentified
MTSMPEPTPIDRARDEREEDEREEVVLGVDTHKDLHVAAVLSGLGALLATRAFPTTAAGYRGLVAWARSFGALRRAGVECTGSYGAALTRHLQAEAIEVVEVNQPDKATRRKRGKTDAIDAEAAARAVLSGRATATAKTSNGPVEAMRVLRMARNSAVNASTKAINQLKAVLVGADPALRDSLAGLGPATLVRRCAELPDPTPGSGLSEVDRAVVFTLRTLAARIMALKAEAYQLHKQLRALIAAHAPELLERRGIGPDSAAALLIAAGDNPERLCSEGSYAALCGASPVEASSGKTQRLRLNRGGDRQANAALYRITVSRLRWDSRTQDYLRRRLTEGKTRREAIRCLKRYIAREIFTLITPKAATALANQTANAA

SEQ ID NO: 445506 - protein, 487 aa, unidentified
MPQLNKNATIKWPTESKGVGRSKSRRVSKSRRSSADPTEGLQVGNPNAAAIDIGCSEHWVAVPAGRTERPTQRFGCCTAELNRLADWLKECGVDTVVMEATGNYWVVLYDILEERKLNPVVVNPRYAKNMSGKKGDICDCEWMQKLHTYGLFSNSFRPTQEIRVLRAYLRQRETLVGAAAQEIQHMQKALTEMNVQLANVISDISGETGLRIIDAVLGGERAAGVLAKLKGPRIMASLVTLERSLEGHWKEEELFRLEQARLSYAHFQEQLQQCQQRIEQQMQTIQGRVPLEGQGRAATDKGAEPLPGQGDGRKSKSFDLGVELKRVLGVDLTQIDGVGPVAAQVILSEVGTDMSRWRTEKHFASWLGLCPDHRISGGKILGRATRPVVSRARNALRLCAYTLTHSKSWLGAKYRRLKHKLGAPKAIVAMAHHLARLIYRMIKNGQDYVDKGMEVYEAKYRENRIKWLKKQAKELNLELHEMQALAS

SEQ ID NO: 445507 - protein, 322 aa, unidentified
MNKVIGIDISKQKFDACFLDGKTQTSDVFTNDQDGFKRLTGFITNLDIVVMEATGPYFLKLATYLFERGYQVSVVNPLVIKHYSRMKLSRAKTDKKDAYLIACYGLGENPPLWKAQQEYIMQINQELSVLESFDKQITMIKNQLEALGVLPYCDKVALNALKTALATIEKQSIKLEQHLQGIEATHCQNAYDALKTIPGIGPKASLLLIAITGNFQKFSTSRQLISYLGLSPRIYQSGTSVKGKSHICKMGMAKARKTLYMCSWTAKFYNPQCKELYQRLKEKGKAERVIKIAIANKLVRMAFAVGKNLSTYEKNYRTNVCF

SEQ ID NO: 445508 - protein, 421 aa, unidentified
MHKQEASAYAAFIGIDWADKKHDICLQVAGVEKRERLVLEHRPGAIQAWAEQLRERFAGAPVAVSVELSRGPVVSALLEHDFFVLFPVQPTTVANYRKAFSPSGAKDDPTDAEVILELLVRHRDKLKRLEPEGAEMRALRRLVEWRRDLVQDRTRLTNRITDVLKAYFPQVLEWFQDKEAAIFADFLERWPTLQHAQRARRETLESFFRAGNVRRASSIEKRIQAIGEERPLHSDEAVTGPARLLVEALLPQLRVLSAGIVRFETEIAELAPRQPDYQFFDDLPGAGPAFAPRLLVAFGESRERFPTASSLQKSAGIAPVMERSGNKAWVHWRYSCSKFVRQTFVEWAAQTIPRSFWAKAFYESCRARGARHQAALRALAFKWIRVLHRCWLDRVPYDESRYLMALQKRGAPLLKHAARNP

SEQ ID NO: 445509 - protein, 356 aa, unidentified
MNTAKYIGMDVHQATVSVAVSNAAGKIVMEGVVESKRESILDFLAGVRGSLHVAFEEGTMAAWLYDLLVGRVTRVVVCDPRKNTTKKANKSDRIDARKLAELLRLNALTPVYHGEKSVVRLRELARSYVTLTQDGTRTMNRLKAIYRGRAIECTGRKVYSPRYRQQWLEQLKEPGVRRRAERLYQQLDGLQQLRREARQELLAESRKHSVSKRLRKIPCLGPLRVALLLAWMQTAHRFRSKRQLWSYSGFALETHASGEYRVVGGELQRKRKAPQVRGLNVNHNRGLKEVFKSAATQASGSPRGGVLYEFYQALLAKGLQPEKARLTLARKIATLVLTLWKKGEEFNAELVKSKQA

SEQ ID NO: 445510 - protein, 421 aa, unidentified
MSNVTEFGNKVKDQEKKLMENISWVVGIDIGKEKLSCAVMDIKKVLICRFEVESSLGGYNELLERVKKEIRGSGRIIFAMEPTGHYWMVLGQFFEDHNQSYVLIHPLVVARSREVQRLSRGKTDSLDARLIGELACDKSITRTQIPEDYWATIRFYAREYMDREKEIAREKNRIVSYLETTLPDFVAIFPKPLSMSGRACLRFLANFREASKGDVKHFATQIRKHLTGKRLMISRVRRLHAILQQGTVLGLRAGRQAMFFRIINCLDRLEIYEDQEEAAKQAMLDVYQKSEYKEYLDSIWGTSPTVNALVLGFMGDPASYDSPSSLVKLAGCDPVPNESGKFRGRASISHRGRSLLRKAGDRVSFLLEKRNSVFRAFFNHFMSRQKNRFSKRQARVACINKYFRIVWVLCHYRVPFNPALA

SEQ ID NO: 445511 - protein, 326 aa, unidentified
MQGKVLLERSATPVYVGIDVCKARLDVYIHPTGQKLTVSNDRDGLKRLKRVLKTCKVALVVMEATGKLHRLAHRNLHAGGFAVAVVNPLRSRLFAEALGTLAKTDAVDARMLAILGESLKPTASEPQAEHLETLRELVGGRDAAVAARTALKNQLGVTQARVLANEIKRQLHAIETAIAHLEAEITRLIAEDPQLARRLAVLTSIPGVGITTTAALLAGLDELGSLSARQAAMITGLAPIACDTGDRSGARHIKGGRPQVRRALYMAAITAVRHNPPLKAFYDRLRAIGKKPKVALTAVMRKLVILANALVRENRPWQPTRPVKSP

SEQ ID NO: 445512 - protein, 343 aa, unidentified
MQAVKTIGLDIAKSGFQVHGVDADGQVVFRRQLKRRNVLAFFQKVPSCLVGMEACATSHQWSRELQALGHTVRLMPPAYVKPYVKRQKNDATDAEAICEAVTRANMRFVATKTPEQQSGLMLHRTRHLFIRQQTAVINAIRAHLAEFGIVAAVGRNGLEQLLNVVADAGDKRLPEVARTCLMALGTQLRALKAKLLELDRMITAWHRSNETSKRLDAIPGVGHVLATALVASIADPKVFRSGRDFSAWIGLVPKQHSSGGKDRLGSISKQGDRYLRSLFTAGALAVIRYAKIYGTKHRPWLTALLARRPTKVAAIALANKLARMAWAMMSRGERYKEPVALAA

SEQ ID NO: 445513 - protein, 373 aa, unidentified
MNQNTLKNYTVEATPVASAKQIKDQKTPKAKRIAVGADVHLRGYQATRKVDNAAIGAVANLRSETELLLYVEKQCEQAEEVVVVYEAGPLGYGLYRKLEARGVKCLVCAPDSTQQKRKRRKNNQIDARTLTSNLFNYLNGNEAALQLVRVPTAEQEQARIASRQHDQLVEERKRLGAQGNALLLSQGFGSWKNWWRPKAFSRLEQLLPAWLFEMLQSWVDLLRALDEKIQRAKAALSKGWSGPRPKGAGANSLVQLQSEVLDWELYANRRKVACLAGMVPSEWSTGDDQRRGSITKVGVPAIRRIITEMVWRIVQFQPQYPPVQKWQEVLRGTNGTLKKKAVVAIGRQLMVDLWRMETGRVTAEELNLVMIGA

SEQ ID NO: 445514 - protein, 420 aa, unidentified
MTSQNSIPADAVLVAIDIAKVRNEVLIEAPGHKRRRRLSVLNTRAEHDHLIEILQSYDRPVVCAFEATGNYHRPIAWRLVEAGFETRLVSSLALARTREALHNSWDKNDPKDAQVILHMLRIHSTQVYHDPLRAGINDVQELSKTHEAIANAKTEIQHRILTHYLPLYFPEIERFRGNSRSDWFFAFLDAFPTPSSITTLTKEKFVEAAWDVVGRKVSKSQILMDIYETARTSIGLPLPPDAPAIRMFRMVVAEARSLIRQRNEIEAQADDLLRHSRDYQILRQIPGIGPINALTIIAEAGDLRRFHHHRQFLKFCGLDLSTQQSGQYRGQTRLSKFGNARLRRTLWIAGQVAIRQRENGFRHKFERYIARDRDNPDLRRKAMTAITAKMARVVHAVIKNGSDYRPFVEGRVPGGRTSVS

SEQ ID NO: 445515 - protein, 370 aa, unidentified
MTQSNILFVGMDVHKESIEIALAEGANQEVRRYGKIGGTHDAMRKTLGKLVSSGKALHFCYEAGPCGYELYRYLVSEGHDCRVVAPSLIPKKAGDKVKTDKRDAMQLARLFRAGELTPVYVPNREDEAIRDLSRAREDAMLVQKAARQRLKSFLLRHDIRYQGKTSWTEAHLRWLADEVRCPSPAQQVVFQEYVDTVTEAQHRLARLNEQIEVFTRQWRLYPVVEALMSLRGVKMVVAVTVVSELGDLSRFDNPRQLMSFLGLTPSEYSSGPRQSRGRITKTGNGHVRRILIEAAWCYRYPAKVSPEIQKKKQDLPLAIRGIAWRAQLRLSQRYQHMQRKGKPHNVTVVALARELSGFMWAIANEVKCPR

SEQ ID NO: 445516 - protein, 365 aa, unidentified
MRIDIGVDLHKTQFTVYARREMKPGESGQYPTSDEGYREFLGKLGQWRGGGHDIRVGVESTGNTRYFKHRLEAKGYPVVVINTLKFKVINESVKKTDKHDAATIAEFLSKDMLPESKLCSEASEQLRRLLKVRSTLVRARVTVKNQIHGLLVSLGMEDTRASLQSKRGRQRILDTLAGAGNGLVVQPLFETIDRLSGNVKAIEREIEKLVSDDKVVELLQTIPGCGPITAWTIRAYTDDIGRFSSHKKYASYAGLAPWVQCSNETEHYGRITKRGPEELRTAFVQLVVGIRRSRQSASWRLMERYEAMKTVKGSGKSIIATARKMSKIVWFMLTREEEFNVELMTDNALEKEIDSMRTALNMMSA

SEQ ID NO: 445517 - protein, 352 aa, unidentified
MVYVAVDIGKRRCVTCVMDQDGSILDTGSYPNTAFDASHYARQTVEKYGECKAVVESTGNMCMKTYEAFESNGVEVKLANPVKTRAIAEARVKTDKLDSKILAHLLRADLIAECYVPSKDVRLARALLSHRVNITREQTRIKNRIHSLLDKYDLECEYDDIFGAHGMRWLHTLQLNGHDHEILQSLLRQLEFQQYEEENANSTIAKDALHSQYVPIIMSMTGFDYYSASVLAAYIADISRFPSPSHLVSWVGLCPSVYQTGESLYMGRMKGGSRKVKWIMTQAVNLAIRTDPRMRAYYERKLRRHHHNVAVTHVANKMLRIIWHMLRENRLYNERKERLYESKLKRMTHTAQ

SEQ ID NO: 445518 - protein, 410 aa, unidentified
MEVMFDRVAGLDVGKETVTVCLRTPGSKGRRHAETRTFKTMSGSLQVMRDWLVEAGVSIAAMESTSTYWKAPFYCLEEVMEVWLLNAAHMKAMPGRKSDVKDAEWIAQLLEHGLLAPSFVPPPEIRRLRMLTRYRVQLMGDRRRDIVRLELMLEDASIKLSSVASSLKTVSARAMLTALIEGEQDPLVLAEMAKGRLRRKIPDLAQALTGHFDANHARLAGSMLRRLDLVEQALAELDPTIMDACQPWAHEIELLQTIPGVGEKVAQVIIAETGGDMSRFPTAAHLTAWAGLAPAMHESAGKQSPAGKRHGNKWLAAMLVEAAGSVGRMHGKNYLAAQHARLLKRRGMGRAQVAVAHSMLVSAYWMLKRDEPYRDLGADWHSRRNDQAHTRRLIAQLERLGHTVIIDPAA

SEQ ID NO: 445519 - protein, 314 aa, unidentified
MDSMVLYVGIDVAQDQLDIATTADQTWSVKHHPRAMAALARRLQKLSPARIIVESSGKLEQELVVVLAEAKLPVVVVNPRQVRDFAKATGVLAKTDRIDARILARFGEAVKPEVRELPDAQARDLMAHVARRRQLHQMLRAERHRLLRVARPLKKSLERHIAYLEKQLAKLDEDLHDAIRQTPIWQESFDLLQSVPGIGPTTAATMIAELPELGRLSRHEIAALVGVAPFNRDSGKWKGKRSTWGGRSSVRSALYMATLVATQYNAYIRAYYQRLLARGKAKKTALVACMRKLIVILNSMLKNHQPWNPKIQTA

SEQ ID NO: 445520 - protein, 344 aa, unidentified
MNEVTTIGVDLAKNVFQVHGVDAEGAAVVGRQLRRSQMLPFFRKQPPCLVGIEACATAHHWARQLMELGHEVKLMPPNYVKPYVKRSKNDAADAAAICEAVTRPTMRFVAVKSAEQQSVLMLHRARELLVRQRTMLVNAIRAHMAEFGIVAPVGIPRVKELFVVIADGDDDRLPAIARTCLEGLAKQFVSLHEEIAIAERRIHAWHRSSAVSQRLETIPGIGPISATALAATITDPSVFRSGRELAAWIGLVPRQNSTGGKERLGRISKQGDQYLRWLLVAGAMTIIRHAKRRGTTNLPWLANLIASKPTKVAAVALANKMARITWVLLRTGQDYQKPTLTHDT

SEQ ID NO: 445521 - protein, 482 aa, unidentified
MKKRNIYQNQSQELLFLFENAGSNDKVMCVPMDYAKNDHLVMFCNGHGDILRKPFSVKNTPEGLAYIEDQVIRSCTKRGIKKEHVFFGGEDANSFAKNFVSTLRSKGFLVANVNAHDAKKQRESVQASTDRIDLMGIAAMLLNCRGNCSPAQFGIYRNLRLLVRHRRKLVQMLTEVKNRVHGIVDELFPGFLKEQNTGIVAFTESSLYLMEDRFSPKQICRRKRKKLIEILKRFGTSKAEQTAAKLQQYAAKVLHAPVEYIGTMQLSLSQHVKHIRCLKESIAQMEKEIALNLAQTQGAFLTSVRGIGLILAAGVTAEIGDPNDQKPLNNLSSYAGIVPRVKQTGGIEGKTYTGPVARRCNRILKDYLVQSAHHLGWHGPPDLMNDYKRRDASGQHANFGMGRRYLRMAMCLMRTSQIYLPSDLRKDDYTLEEKASYYLMNWPYLRGKWKKVDALEEAFAFNRPLGLWRQIVQELYDIKLKL

SEQ ID NO: 445522 - protein, 410 aa, unidentified
MELLHPHCAGLDVHKETVVACIRHMVDGKVTTEVKSFSTTTQELMELSDWLSSQGVTHIAMEATGVFWKPVWHILSDGEFELLLANAAHVKNVPGRKTDVNDATWLADLMAHGLIRASFVADQPTQQMRDLLRTRKQFVRERSSQTQRIQKTLEDANIKLDSVITDIVGLSGRRMIEALIAGQTDPQALAALAHGRIHATAAELEAALRGRVTSHHRFMLRIHLNHLDALNTTIADIDKEVNVNVEPFRVAIEMLTTIPGVSSLAAQVIVSEIGIDMSRFKTEGHLISWAGLCPKNDESAGKRRSNRMKKGAPWLKTTLIQCAWAASRKKNSYLQAQYLRIRSRRGPKKAIGAVAASILTAAYHMLKDGALYQDLGANHFDNRDKAKQALRLVNRLQSLGFTVQIKSMAA

SEQ ID NO: 445523 - protein, 352 aa, unidentified
MRYLGMDVHAKSTVWCLLDAQGEVVSEGHTPTTAALLAALVRELAQEDTVLAGQEVGTLTYLVHDAVTAAGTTLLSFNAQSLRMIAASRKKTDRRDAYWLAKALQSGMYPHPVYVPTGEIRELRARLSQRRVLHTDYNRWRYRARTYLRAGGYPVAPGGTALRAALAPGNAGTRGAPTSLTDALGLCQRQEAALRAELAQVDATLRGRPQAVAAIQRLMTVPGIGPLTATTIYAWVGDVRRFPHAKQLAAYAGLVPAVRQSGGTVHVGGITKQGAPALRATLVQAAHVLLSRCRGADARPLQAIGLRIRGTRGRRKIAVVAVARHLLRIAYYILRDGTTYDAHRLGTMTDAA

SEQ ID NO: 445524 - protein, 351 aa, unidentified
MGEVIKLGIDVHIEKYVVVMKIDGSAPERAKRFTPEAFLDWAKQLKKRCEQLHSCYEAGPFGYSLHRRLAKMGVTNHVIRPINWDEHGKNVKTDARDATQMVLCLDGYLRGNHRSFSTVRIPSETEEQRRSTTRQRQSLIKERQRLSAKARGHVMYYGGRLQGEWWKPRRWRDLSEQLETHLLDLLSALRTIIVVVEEQIVRLEKCLEEMTEVALPKGMGSVIFQQMEREVCDWNRFETRKQVGGYTGLCPSEDTSDKRRFQGSITKHGNPRLRHMLIECVWLLIQWNPDYRGIVKWRDKLLEAKLTKASKKKIVVAIARQFAVDWWRIRTGKVTPDQLGLTMKALPATSA

SEQ ID NO: 445525 - protein, 344 aa, unidentified
MKNRTIAVDLAKNVFEIGISDRPGHVKKTYRLSRAKFLKFFVNQSPSRVVMEACGSSHYWAREIAKLGHEVKLISPQYVKPYVQRNKTDRADVKGMLEADRNSEIHSVPVKTVAQQQITALHRIRSRWMATRIGRINTLRGLLREFGFIIPVGAQHVIPGATELIEDAEVDMPPVLREVFHQICTEIRDREARLRSVEKRLEALASQTPAVARLRSIPGIGLLTATAMVGFVGDVERFHSSRHFASYLGLTPREHSSGNVRRLGRISKRGDVYLRTLLIHGARSLLWSAHRKSITPSPLQRWGLRIHEQRGYNKATVALANKLARRVWAVWKRDSNYQTDYRAA

SEQ ID NO: 445526 - protein, 404 aa, unidentified
MLKQPIEVCTRRENASLFFISSSLNRMLGIPHCGISRISHQETKRREIFTFLLKTIGMNKKIVKQVAGIDVAQKELVITLGRMYDDWSPELYSHKTFPNTEKGFMAFVLWVKKQVVEEAAVRFVMEATGVYHESLAYFLDEKGYEVSIVLPNKISNYSRTLEVKTVTDKTASEAIARFGLERGLDKWKRPKKVFKKLRQLTREREQLVQTRTIAKNQLHAEQVEAEPNKSSITRIKKQIAFLNKQEQEIKSEIESLTRQEEQVKKSIEIISTLPGVGLLTAVTILAETNGFELIRNKRQLTSYAGLDVKEKQSGTSIKAKPRISKKGNRYLRKAMHMPALSAIRHDERFKAIFARLVSKHGIKMKAVVAIQRKLLEMAYILYKTNTAYDKNYLNRIGSEINIKN

SEQ ID NO: 445527 - protein, 340 aa, unidentified
MEKRYIGIDLHRNRFTCCIRLENERTYLTDWELEDLGKFVKKLRPADEVAVEITGNTRLFFDAVAAHVARVVVVNTNQFRVIRQSVKKTDPNDARTLALYLSKNMLPEVRMKDKEHGQLASLTQTRDTLVKLRTALKNKITYILSARGLNLAKEALSSEKKLAEVLELPFDEIVRIELRVIVGQIRSLNQSIAELEKTIGEEGSKLDGHKGLSSIKGIGKITGAILLSVIGDVNDFADEGHLASYFGIVPRVSNSNETERSGRIHKRGTKLGRTALVQSALIAANYSPYLKRFYEQVKGRRGAGKAIIALAKKFLGIIYRTLKNKWVFEDFPNFVLAEAS

SEQ ID NO: 445528 - protein, 361 aa, unidentified
MSVKATVLVGLDVHARQTHAAVLDLSSGELRERRLRLAPAQVAGFLTELGPGVRAVYEAGPTGFGLARAAREHGVMVEVVAPGSIPKGPGDRVKTDRRDAVRLVRLLAAGELRFAFVPSVADESFRDLVRAIDDVRGDLMRARHRLSKFLLRRGERYPAGAWTATHMRWLRAHVFDEPCAQAAFVDYLAAVELLAGRRGTLISELEQAIPSCAHAPVIARLRCFRGIDTLSAAGLAAEIGDFKRFPRPPLLAGFLGIVPSERTSDTKRRQGSITKAGPGHARRLLVEAAHHYRYQPRVGETLARRQAGQDPRIVEIAWRAQRRLHQRWQHLHSERRKPAGVVAIAVARELAAFLWEAATLD

SEQ ID NO: 445529 - protein, 331 aa, unidentified
MKKMVLVGIDVSADELVVAVEREGQSLPVATFDNDATGHRKLIRWLTKSGRPVRVCLEATGVYGLELSLALSRAKQVEVMVANPRAIKDFARAFLQRSKTDDLDAKAILEFVKRMPFRAWQAPPVEILQLRAISRRITALTKNMTMEKNRLHASDHCEELTKFTRDDIASHIEYLQESIRRLGVEAVAVIRQSPQLSREFDHLVSVKGIAEASATQILAELSVLPGDMTARQWVAHAGLDPRHHESGSSIHRPARVTKAGNKYLRSALYMPALVAIQHEPNVRAFYEKLLARGKKPLQAIVAVMRKLLHAIYGMLHHDRDFEGEKFFAMGA

SEQ ID NO: 445530 - protein, 341 aa, unidentified
MNIKRIGLDLAKQVFQLHGVDGQDKVVLRKQLRRAQMLDYFKKLPPCLVGMEACSSAHYWGRELQKLGHTVKLMAPQFVKPYVKSNKNDANDAEAICEAVARPTMRFVAIKTIAQQDIQAIHRIRSELVQQRTAKVNQIRGLLAEYGIVVGRRVDTLRTALPLVLEDAHNGLTLDFRTLLEGLQQDLTTLDGRVDELDKKIKTLAGSNADAKRLQQIPGIGPITATALVCAIGDGKQFKRGRDMAAWLGLTPRQHSSGGKDRLLGISKRGDAYLRTLLIHGARSVLKVAGQKDDPRSRWLQNLCGRRNKNIAAVALANKNARIVWALLTKKVDYLPEGEPV

SEQ ID NO: 445531 - protein, 350 aa, unidentified
MKFYTKQHRFYCGVDLHADTMYVCVLDSGGEVVCHRNIPTKPETFLRLIKPFRDELIVGVECMFTWYWLADLCVEEGIDFVLGHALYMRAIHGGKAKNDRIDSHKIAVLLRGGSFPLAYVYPKPMRATRDLLRRRNHLARKRAELYAHIQNTATQYNLPEPLGRIAKPSERGALLDKFPDPAVRRMVEIDLLTIVHYEQLLGNLERQLERTAVHHDPVGLALLKSIPGVGRILGMVMLYEIGDIARFPREQDFASYCRLVKPAKESAGKHYGHSGKKIGNAHLRWAFGEAVVLMLKGNTAAQRQLQKLASKHGKGKALAILAHRLGRAVYYMLKNQTPFDAERFLRQQGA

SEQ ID NO: 445532 - protein, 354 aa, unidentified
MQQSSTLYVGLDVHKESIAVAYVAQEHGAEVVSLGTIGTRQCDIDKLLRHLQSKGQPLVFVYEAGPCGYWLYRYLTTKGSVCWVVAPSLSPKKPGDRVKTDRRDARQLARLMRSGDLTPVYVPAVDDEAIRDLSRAREETLRDLKAAKLRLKAFLLRHDIRYTGRANWSPAHLRWLSEVSCPTPAQQIVFQEYVQTVTEQTARLQRLEHARRDQVKTWRFQPVVEALQALRGVQFTVAVTTVAALGDLTRFANPRQLMNYLGVTPSEYSSGPRRQQGSLTKTGNSHARRALVEGAWAYRYPAKVSRHLQLRLEKLPAAIQAISWQAPVRLCKRYRQLMAKGKHANQVVVAIARE

SEQ ID NO: 445533 - protein, 338 aa, unidentified
MAIVHVGIDLAKNVFALHGVSDTGAVQLRQPKVARSKLNEVVAALPPCTIGIEACTGAHHWARLFAQHGHTVKLMAPKLVAPYRMSGKRGKNDAADAAAICEAVQRPTMRFVPVKSEEQQSRLMVHRARQGYVQARTATINRIRGLLAELGIVLPQKAEVVRRQAAQHLEDLPGYANLVIGDLLSEVHHLDERIKQYDAHVRAMAKQCTAAQQLMQLCGVGETTATAIVAMVGNAREFDSGRQFAAWLGLVPGQYSSGGKTRLGRITKAGDAYLRSLLVLGARAVLNAAASKTDSLSRWAIALRARRGYWKAVVAIAAKNARMAWAVLRKGESFKLPA

SEQ ID NO: 445534 - protein, 353 aa, unidentified
MKVTTFGLDLAKTVFQLHWVDAETGEVCRRRLRREQMLPFFANRIPAVVAMEACGSAHYWGRQLRGLGHEVKLIAAQFVRPFVQTNKTDAADAQAIWEAAQRPAMRVVALKDEGQQSVLALHRMREQLVKLRTMQSNQVRGLLYEFGVVLPVGRERALAELPKKLEQLETRLPAMLLTTLRRQQARLTELTADIVAIERQLKQWSKGEAAAQRASRRLQEIPGVGLLTATAAVATIGEARSFRSGREFAAWLGIVPRQSGTGGRVKLLGISKRGDVYLRTLLIHGARAVINCRREPKPWLQQLLARRPPNVAAVALANKMARTIWALLAHDRTYAEDHVSTRPVSGQPAPQGH

SEQ ID NO: 445535 - protein, 415 aa, unidentified
MKVVFPTCCGVDVHKSFLVATIIKTPKDNLQPSYQKKRFSTFNADLNRFSDWLHENNCLDVCMESTGKYWVPVFNILEKRGIRVVIANPKWVKAVKGNKDDTKDSKWIGDLFRIGLVKSSFIPAKDIRILRELTRYRYKLVSMKSSEKNRFQNAFTVCNVALDSVVSDMFGKSATAITDYLTSDENFDPQHCVSLLQRSLKKKADDVLASIEGYEISPEQKYRIGIVRDHLHYIEKLIERVDSCINAMVEKYDGAISLLCTIPGIDRNSAITVISEIGVDMAQFGSSKCLCCWAGLTPGNNESAGKKKSVRISRAGVYLKPALVQVAHAAVKDKTNPYYALKYERIAKRRGKKRAIIAIARMILTAIYSMLSTGEIWNPVDLFKIDLPEHLKEQQLQKAVKRAVRFLEAQGLKVS

SEQ ID NO: 445536 - protein, 408 aa, unidentified
MDAIVERCCGLDVHKDTVVACVLSGPPNKRARKEMRTFGTTTAQLEELRDWLRGLECTHVGMESTGVYWVPVYAVLEDCFELVVGNASHIKNVPGRKTDVKDAQWIAELIRHGLVRRSFVPPKWQRHLRDLTRYRRKLVESQAAERNRLQRLLESCNIKLASVASDVFGKSGREIVRALIAGDTGPEAMAQLARGRLRSKVDALQEALHGRVEAHHRFMLQMQLKRVEDIEANVAELDVEIEKAVAPHRAVFDRLKTIPGVDRVSAETIIAELGVDMAVFPTASHAAAWAGVCPGNNESAGKRGKQQKRRGNVHLASALVQAAMAASRTKDTYLRARFWKIAGKAGKKRAAVAVAHSILKAVYEMLSTNADYKDLGGDYLDRFLNRRSEERLVRRLEAMGYQVRPPAA

SEQ ID NO: 445537 - protein, 404 aa, unidentified
MWYVGLDWADTHHDVEVLDEAGKRVGTRRFAHSHQGLNELIQFLLGIAAQPEHLACIVETNHGLLITFLLEAGIPVYPVNPKTANQLRKSAGAKTDQIDAHLLAKIGRLDLAELRRLEPDSPSVAELKTLTRDQDALIQTQTRLVNQLTACLKDYYPAALHLFAKLQQRSTLVFLQTYPTPQAAQAASLGEITATLRLGKHTNPTRLAPKIVEELHRPQLVASAAMIRAKSRLMLSLVKQLLVVLEDIASYDEAIAPLFLSHDDAELWSSLPRAGKRLAPRRLSEWGDDRARYVAAGSVQALAGTAPVPFQSGNYAKAHKRFACLKPLRNALHQFAWQSTRQEGWAREYYQRKRAEGKTHSMAGRSLANVWARIIYRMWVSKTAYQSATFEAAKMTHAPRQRVA

SEQ ID NO: 445538 - protein, 455 aa, unidentified
MAKKAKKIKTNKGLKLEVVNPNAAGIDVSSTEMQVCVPEDRDGDNNRCFGTFTCDLHEISAWLKACDIDTIAMESTGIYWIPIYGRLLADGFDVLLVNAKAIKNIAEKKTDEVDAEWIMLLHSYGLLKNSFQPSNQAREIRNLVRHRDNLLQSSTKEVQHMQKSMEQMNIKLTIVISDILGKSGQDIISAIIKGERNPKVLAALADPRCKASSDVIEKSLDANWDETLLFMLKQSYEMYHYIQNQMKDCEKMAEKIIIQYRNSLPEEIVHKNECMRSKKPVAPKNSISIDIEQYAYELWGVNLMRIPGISEGSLFKLVGALGHDFVDKFNSYKEFCCWANLTPNNKISGGKILSSKIPKRKNPVGQILRVAANSLNNSKSPLGFYFRKIKSKGGNIAAIIAAANKLGRIIYTMVKHKTEYDETKGQEKQADILKKKIRKAQIELEKLQIHLKDCA

SEQ ID NO: 445539 - protein, 409 aa, unidentified
MQQLFERVAGLDVHRQTVAVCVRVPGAGGERAQHIRTFGTTAADLVALRDWLEAHQVTQVAMDSTGVYWKPVFYVLEEAMSCLLVNALHVQKVPGRKTDVQDCVWLAQLLEHGLLRGSFVPPPPLRELRDLTRYRKVLIQERTREANRLHKVLEDAGIKLATVATDILGASGRDMLHALVAGTTDPQVLADLARGTLRKKLPALRQALAGRFRAHHAFMVSQHFGHLDYLDEAIATLSTQIEEALRPFALAHHQLDSIPGVGPRTADVLIAEIGVDMRQFPTAQHLASWAGLCPGQNESAGKHKSGRIRPGNRWLRMALIEAASLAARSRTTAFGARYRRIARHRGHKKAVVAVAHAMLVTAYHLLDRQTEYREPGVDYFERRHAERTTRRAVRALERQGYRVTLEPAA

SEQ ID NO: 445540 - protein, 360 aa, unidentified
MFSERTSVGLDVHARSVVAAAIDGVTGEVFRARLTPANEDVIGWVRGLPGPSAVAYEAGPTGFGLSRALSAAGFRCEVAASSKLQRPAGDRVKTDARDALHLARLLRLDEVVSVRVPTQAQEAARDLVRAREAARADLMRARHRVSKLLLRHGIVYSGGKAWTQVHDAWLLGQHFDRVGTQAAFEDAYEAVVLATGRRGRLDEKITAMATASEFTPVVGRLGCLRGISTLTGFALAVEIGEWDRFTGGSIGAYLGLVPSEHSSGPSRRQGAITKTGNAHVRRLLVEAAWHHRKPYRPTAVLRRRWDAATPAARARGHAGNQRLHARWVGYAERKKRPVAANVAVARELAGWCWSLAMLPD

SEQ ID NO: 445541 - protein, 420 aa, unidentified
MPRTQHTTVLSVLHPICCGLDVHKESVNACLIVTNSSGEDIVEFEVFRTFTDDLIRLREWLLAHDCPIVAMESTGVYWRPLHNILEGYLQVVLVNARHIKNLPGRKTDMADSQWIAGLLRVGMLKGGFIPPKEVRRWRDLSGYRKSLVETIGDSKRRVHKLFESCNVKIDSVVTDLFGRTGRNLMDLLIGKESREITKEDVEDCLRGKLKTKGTELFRSIQGFFEEHHRWLLQEQLDIIDYLQERIRRVESQLKDLFRQHNDLIERMGQIPGINLVAAYAILSEIGTTLEAFCTAAALCSWCGVCPGNNQSAGKRFGTRSPVRSSRLRTFLVEAAWSAVRVKGSYFRAKYFSLRARLGPKKAIMAIAHRLLKAIYHVVKHGSSFKDLGEDYLIDLHRHDKINYMMRLAEKLGFRLVPAPH

SEQ ID NO: 445542 - protein, 342 aa, unidentified
MDKVSTIGLDIAKSVFQVHGVDAAGAVLIRKRISRAKVLEYFGELPPCLVGIEACPSAHHWGRELQGLGHTVRLIPPSYVKAYLKRGKNDANDAAAICEAVTRPSMRFVPIKTKEQQTALMLHRARQLLVRQRTMLSNALRGHLAELGIVSAKGRNGTAELLRIIADGRVSPAVCGILKVLTRQYGAVGTEIASIDKSIMALHRGCEASQRLAEIPGIGPIGATALVAEIGDWKTFSSGRSFAAWIGLVPKQHTTGGKDRLGSITKQGNRYLRWLLVVGAMAVIRYARKHGTEKRPWLGRLMERRPTKVAAVALANKIARMAWAIMVRGERYKEPKLLLLAA

SEQ ID NO: 445543 - protein, 419 aa, unidentified
MTTNSSDTTFIRIIHPVCCGLDVHKKNISACLLTVDEHGKENYEIKEFGTFTDDLETMKKWLTDNNCPIVAMESTGVYWRPVHNVLEGFMEVILVNARHIKNVPGRKTDISDCKWLAGLLKHGLLKGSFIPEKQIRQWRELTRLRRKYTESMADYKRRVHKLFETANIKIDSVISDLFGVTGRNLICLLCNESELNESTIKANSKRGLKEKSEELYRSIQGFFEEHHRFQLIGMMEMIEAIENQIAKITKRMENLTEGHHDLLNRLDEVPGIDQKSAQSIVSELGVTLEEFPSMAHLASWSGLCPGNNESAGKRKSGRTSVRNHPFKTILIEVAWAAVKKKGSYYRVKYFKLKARRGAKKAIVAIAHRISKAIYNIIKHGAVFTDLGENYLTIQTRQREIKNIKRKAGQLGYKLVPCED

SEQ ID NO: 445544 - protein, 341 aa, unidentified
MTVYIGVDLHARQQTLAYVDTQDGEIKRRELHHQRDDVLAFYQQFTGEVIVGVEASGYTCWFEELLEQLGHRLLVGDAAEIRRLARRRQKNDRRDAELILDLLTCDEFPTLYRYSQQSREVLRQLRFRHKLVRMRTMIFNSLHALSIGAGLSLQAKLATAQGRRQLLQLRLSPVLVHQRDEWLALADELSTSILAVERWLKAQAKADERVQRVQTHAGVGLLTSLCLVHTLGDVSRFAATRKVTAYVGLDVTEHSSAERKVYGGISKAGSRLLRYLLVEAGQSAAKSDDQLKAFYQQVLKRRGKAKAKVAVARKLLIRTFIMLRDEIDYAEFLRRGKRAGE

SEQ ID NO: 445545 - protein, 401 aa, unidentified
MQENQQHRSVDVFVGVDVGKGHHHAVALDRTGKRLYNKALPNDEAKLRALITELKTHGQLLFVVDQPATIGALPVAVARDEGVLVAYLPGLAMRRIADLHAGEAKTDARDAAIIAEAARSMPHTLRSLRLADEPLAELTMLCGFDDDLAAQITQTSNRIRGLLTQIHPALERVLGPRLDHPAVLDLLERYPSPSELAATSEKTLANRLTKLAPRMGKSLAAEIVQALSEQAVVVPGTQAATIVMPRLAQQLASLRKQRDEVASEVERLVHAHPLWPVLTSMPGVGVRTAARLLTEVAHKAFASAAHLAAYAGLAPVTRRSGSSIRGEHPSRRGNKVLKRALFLSAFAALRDPISRDYYARKVQQGKRHNQALIALARRRCDVLFAMLRDGTLYQPKSAPNA

SEQ ID NO: 445546 - protein, 349 aa, unidentified
MRVLIGVDPHKSVNAVAAIDENGELVAHETFPADRRGLRALERWSKRFPKRRWAVEGAAGIGRPVAQKLVAVGEEVVDVPPKLSAKVRVLSSGNARKNDRLDATFTALAALGNGRLATVRTEDGPEGRSEVLRLLTERREDLVAERTRALNRLHVLLRDLLSDGVAKGLSAEAAAKLLRRARPGHETGRVRKRLASELVRDVRALDRKVASLDERIREEVEASGTALTEIFGIGPILAAKLAGIVGDVARFPSKAHFASYAGVAPIEASSGEVVRHRVSLAGNRRLNKVLHLVAVCQARSDPRGRAYYLKKLGEGKSRREAMRCLKRRVSDAVFRALVADSELALQAVA

SEQ ID NO: 445547 - protein, 244 aa, unidentified
MFVGIDVSKDQLELAWRTPSGLKRERLAYHEAELQALVARLQAAQRIVVEATGGYERLLVATLAEAGLPVVVVNPRQVRDFARALGRLAKTDRIDAEVLALFGERIRPPLRRPLEAERAALAALVARRRQLLEMRQAERNRLQTAYEAAVRASIEVVLQALEQELDAQLRTCGVWQEQFRLLCSVPGVGPVTVRVLLAELPELGRIGRRQVVKLIGLAPLNRDSGRWRGRRRIWGGRASVRAAL

SEQ ID NO: 445548 - protein, 358 aa, unidentified
MAKPTQISPVVGGVDTHKDLHVAAVVDQSDRVLGTQSFATTRQGYKLMLIWMRSFGELKRIGVECTGSYGAGLLRYMQTAGVVVLEVTAPDKQDRRRRGKNDDFDAESAAHAAFAERRTVTPRSRDGMVESLRVLKVCRKTAVQARRIALQIIQTTIVCAPDQLRDTLRKMTRMQLIRTLAAWRPDLTAYRDVEEAYRIALKSLARRYLELHDEVADLDTMIQAIVTDLAPELIARNSIGLNSAAQLLLTAGDNPERLRSEASFAALCGVSPVPASSGKTIRHRLNRGGDRAANSALHIIAIGRLRLDPKTQEYVARRVAQGHSKLEAIRCLKRYIAREVFNIIARRHKQINQAQIAA

SEQ ID NO: 445549 - protein, 370 aa, unidentified
MSDSITYVGLDVHKQNINVAMLLPERRNAISWQVASEPSALRGMVRRIGTTAPGEVRACYEAGPCGYALQRYLHKTTDIVCEVVAPSLIPRKPGDRVKTDRRDALKLAELLKAGLLTEVHGPSEEQEWVRDLTRAREDAKQDQLRSRHRLGKFLLRHDIRFTGCRAWSHTYMEKLGKLRFDNVAAQAVLDDYLLAVNQLSERVAELDARLAEVAAADSRHEIVERLMCFRGVALVSAMTIVAEIHDFSRFQSPRQLMAYLGLVPSEFSSGGRQSRGPITKTGNTHVRRTLVEAAWHYRHPPRVGVGLRQRRRGQPGSVIALADKAQKRIHRRYKRLSERMSRNKAITAAARELVGFIWAAARMETENVAA

SEQ ID NO: 445550 - protein, 343 aa, unidentified
MQTITTIGLDIAKSVFQVHGVDNDGKVVIRRQLKRRYVLAFFEKLQPCLVGIEACASSHHWSRELQALGHTVRLMPPAYVKPYVKRQKNDAADAEAICEAVTRTNMRFVPVKTPEQQSGLMLHRTRHLFIRQQTSVINAIRAHLAEFGVTAAVGRKGIEELLRVIADPSDKRVPDVVRACLAALGSQLLSLKKQILDFDRMIMAWHRSNQTSKRLNCIPGVGPLLATALVASVADPKTFRSGRNFSAWIGLVPKQHSSGGRDRLGSISKQGDRYLRSLFVAGALAVIRYAKIHGTKYRPWVAALLARRPTKVAAIALANKLARMAWAMMARGERYNYPASLRV

SEQ ID NO: 445551 - protein, 404 aa, unidentified
MDWMSTKKKIVACILTGPLGKPTRSEIREFSTLIPDMIALRNWIVSKNCHHVAMESTGIYWMPIYEILEDAFSGDITLLVVNARHMKNVPGKKTDMRDSEWISTLLRAGLLNGSFIPEKRIREFRDLNRYRKSVIRDITSQKNRIEKFLQSSGFRLSSFISDIFGASGRNIILHLIEHGQIDKTALDSCLKTKTRNRIDEILMSVNGTLSEHQKAFLRILMTHYDSLKKHLAEIETSLEEDMAPFALQVEQLNSIYGISTTASCAIIAEIGIDMKPFKTAEHICSWAGLCPGNNESAGKRKSTSVTKGNPYIKSMLCEIAWVIAGKRNTYLSAWYWRIKQKKGAKKAIVALARKLLVIIYTMLKQGTVFDESCFETRRKHCEQKQLSRYIRELEKHGYHVEAQS

SEQ ID NO: 445552 - protein, 371 aa, unidentified
MNTVIHIGIDVHKDSYTLSAFNFSSNRSFGQSRIDSKSNLVIKYVERLRKEYQGCEFICGYEAGPTGYGLYRDLERVGIPCVIMAPTTLPKASGNRVKNDRLDAQELARHLAYGTYSAVHVPTPQDEAVKNFTRLRNTRKESLKKAKQNLLSFLLRMGKTFSEGKNYWTLLHFKWLKDQKFDDVVDQETFDEYLQEVHDQQEKVERYNQRIEELAERDEYRDKVAKLCCFRGIETHTALSLVSEIGDFSRFATAQQFSAFLGLVPSEESSGQRERRGAITKAGNTRLRMLLIEGAKSTLRSGIFGKKSKRLTARQKGNAAEVIAYADRASRRLYRVYGRLISRGVHYNKAAVAVARELSCFVWGMMNDRID

SEQ ID NO: 445553 - protein, 424 aa, unidentified
MKVTFQTCCGVDVHKSFLVATIIKTSSGIEPSYQKRRFSTFNNSILEFKKWLLENECLYVCMESTGKYWIPVFNLLEDEINVTIANPKWVKAVKGNKDDTKDSKWIGDLFRLGLVRGSYIPCKKIRILREFTRYRYKLVSCCSSEKNRYQNALTVCNVALDSVVSDVFGKSSTSIIEYLLEQSGTSIDHEVIASKLLKRLKAKEDAVIESIEGYQMTDSQKYRMHLVRAHMDYITAAINDVDSEIESLIASDPDYENAVELLCTIPGVKYDSAITIISEIGIDMSQFYSSKRLCCWAGLTPGSNESAGKKKSVRITRAGVYLKPALVQCAHAAVKSDKSSYYKKKYESLVKRRGKKRAIIAIARMILTAIFQMLTTGETWNPCDLYKIDMPEALLEKQKQKAIKQAQKLLIREGLLPPTEPIAS

SEQ ID NO: 445554 - protein, 355 aa, unidentified
MAVTIVEEARPVTCRAAVTGGVDTHADTHVAAALDPVGGLLGVAEFPATAAGYASLLGWLGGFGAVALVGIEGTGSYGAGLARHVTAAGIRVVEVDRSDRQDRRRQGKSDPLDAVSAARAAQSGRARGAPKGRDGAVEAIRALMVARRSAAGERTRTINQARALILTGPDDLRARFTRHSPAALITGLASLRPRPGDVAGHAVRVALRELGRRAQFLDSQLERLDELIVPLVTAHAPGLLAVYGPGPRTAALLLIAAGDHPGRLRSEAAWAHLCGVAPIPASSGKRNRHRLNPGGDRQADHALWRIVFTRLGSDPATRAYAERRTAEGKSKAEIIRCLKRYVAREVYPHLRPAAG

SEQ ID NO: 445555 - protein, 360 aa, unidentified
MQRKINENSFNGQSFYVGIDYHKKSWKVTILGEKYEHKTMSQNPDPKILANYLKRNFPGGNYQAVYEAGFSGFNACRKLRELGINCIVIHPADVPTNQKERLQKTDKVDSRKLARSLRSGEFEAIHIPDNKLEADRALVRQRFRLVKDISRTKNRVKSLLFQFGIDIPGRFTSQQTRHWSKVYINWLKELPIEQESLKLTLDNYLRIGEIQRKELLTINRQIRKLSKTKYYQNNCRLLLCIPGIGLMTAITLLVELGDIKRFKRLDELCNFIGLVPSMYGSGEKMETGKIIKRGRKALKIMLIEASWQAVRKDPALMMKFNELTTTMKKNKAIIRIARKMLSRIRHVLVHQEEYELAVVQ

SEQ ID NO: 445556 - protein, 451 aa, unidentified
MSSGSIKPAGLPVIHDRAAGIDIGARFHVVAVPPDLCEQPVQTFQAFTGDIERMADWLVSIGIKTVAMESTGVYWVPVYEVLQSRGIEAIVANAREARSVPGRKSDVNDAQWLQRLHACGLLRASFRPAVDIAALRAYLRLRERHLDYAAAHIQHMQKALTLMNLQLHHVVSDVTGTTGMKIIRAIIGGQRDPQALATMRDVRCKASPETVRAALVGNYQPEHLFCLGQALALYDFYQARVEECDDQIERTLANLNADKPSPVAPLPKPRHRAKQPNAVSFDTRPAMYQLTGVDLTQIHGIGPYLALRLVAECGTDLSRWPTVKHFTSWLTLAPGCKISGGKVLSAHTRKTTNRVSAHLRLAAVTVGRTDTALGAFYRRLAARVGKAKAVTATARKIAVLFYNAIRFGMNYQDPGADHYERRYRERVVKQLHRRAAQFGFTLQESAPQSVS

SEQ ID NO: 445557 - protein, 320 aa, unidentified
MIAETTFVGIDVSRDWLDGFCLPDQQRFRHPNTAEGHKALVAMIREMPGPVKVGFEATGGHEWVLWAHLADAGLVAFQLPPAQVKAFALSRGTRAKTDRIDAELIARFMAFRPAAGRELPDENLRLLRTLTTRRGQLVDMRKRLKAQIGARTRQGVSADVETMDDDLKDVLDTQIDAIERRIENVIAQLELLATKATLLRSIPGIGPVSAAMLIAELPELGRMTSGEAAAMTGLAPVPHDSGTMRGRRTIAGGRRSLRHVLFQAGLAAACHNPVLKPVAKRLKERGKPHKLVIVAIARRLVVIANAIIKTASPWQIQPNR

SEQ ID NO: 445558 - protein, 348 aa, unidentified
MTEAYDGREVVGMDLHRRRSVLVRMTGDGQKLGTARITNSPAELLRQIARAGKHPRVVLEATYGWYWAADTLAAAGAEVHLAHPLGVKGFAYRRVKNDVRDAADLADLLRMGRLPEAWVAPHQVRELRELTRYRVKLVRTRTSCKDQVHAILAKLGIAVTCTDIFGVWGNMWLDGLALPQPYAGKMASLRKICALLAAEIAALETVIAGLLEDHKGYQAVRALPGIGPVLGAVIVAEIGDVTRFRRPAELSSWAGLTPRHRESDVKVSRGHITKQGSRNLRWALIEAIQHVPAGHPLRQRRDAIIARRGKEAKNIAKVAMARQLLTWVYYAMRDGQARSLAAALRQAA

SEQ ID NO: 445559 - protein, 366 aa, unidentified
MSITMIGLDTAKSVFQIHGVNETGKAELKRKVRRSELIAFFEKQERCAVVMEACGAAHHWARILTGLGHTVKLLAAEAIKPFVKKGKKNDAADAAAICEAASRPDTQFVPAKTVEQQGILALHTARSLLVKQQTMLANAIRGLATEFGLVVPRGLHNLEPLVELVNTDEAMPKQARQAIAELHDRFGELTKSIKAFEVAIVAHARSDATARRLATIPGIGPITASLIAATVVDISLFKTARQFAAWLGLVPRQNSTGGKTRLGRISKAGNREIRKLLVLGATSMVGRADGWNSAVGAWLRDILQRRPVRLVTVALANKMARIAWARLAKAPASRLRLVGRPGEGVMTRKEVYRPQGGVAAKAQAAE

SEQ ID NO: 445560 - protein, 409 aa, unidentified
MDQLIERCCGLDVHRDTVVACVRGPGPNGRRQHQVRTFGTTAVELLALRDWLEAHAVTDVAMESTGVYWKPVFYVLEEAFTCLLVNAAHIKQVPGRKTDVKDCMWIAQCLEHGLLRGSFVPPAPIRELRDLTRHRKVLIQERTRAANRLHKLLEDAGIKLASVATNILGVSGRAMLEALVHGTTDPAVLADLARGKLRKKLPALRQALAGRFRPHHAFLVSQLLAHVDYLDEAITTMSEEVEGRLAPFAAQLTQLDTIPGINTRTAEVIIAELGVDMSCFPSDRHLASWAGICPGNNESAGKHQSGKTRKGNRWLRMTLIEAAGAAIRTKDSALGARYRRVMRHRGHKKAVVAVAHAMLRAVYHLLAEGTTYREPGADYYDRHHTHRVTRRAIQLLERQGYRVVLEPAA

SEQ ID NO: 445561 - protein, 403 aa, unidentified
MEVVYPNSCGLDVHKKTVMACAITPRGKETRTFSTMTRELLELKDWLRAHKVSHVAMESTGVYWKPVYNLLEDEFTLLLGNARHIKAVPGRKTDVKDAEWIAELLRHGLIQGSYVQNRSQRELRELARYRRTLINQRSQVINRIQKVLEGANVKLSSVATDVVGASGRAILEEMIAGVQDPKALAEMAKARLRNKRSSLEDALNGLVGTTQRMLLASLLRHLDFLDSEITGLSDDISRRMGHLEEAIQHLDTIPGVGRQTAEEILAEIGPDMSRFPSAQHLASWARLCPGNNESAGKHKSGSTGHGNRWLRSSLVQASWGAVRAKHNYLASTYHRIAPRRGSKRAILAVGHCILVGIYFVLSRNIIWQDLGENYFDEHHHQRILNRAVYRIQSLGYRVTLVPA

SEQ ID NO: 445562 - protein, 351 aa, unidentified
MDWIGVDCHKWQHTAALLNGQGQVVDTWHGAATPAAWQELLDWASRFREQRHWGIEGSGHYGRGLAQFLVAQGETVVEVNTRLTVLGRRHRGSLQKSDSQDAAAIAAVVRDQAARLPPIQVEDASAVLALLTRERDDLQAAATRMRNQLHALLQQAEPGAPKARLRRPKDLQAWRDYPPASTDPLVQVRAARIRRRARQLAGLLEEIDDLEQQIETAAPVLAAPLTEIVGVGKLTAGMLAGYLGPGRRFASDRQLAAYAGVAPLEVSSAGQVRHRLNRNGHRQLNAIVHRIALSQLRHSAEAQAYLAKRIGQGKSHRDAVRALKRYIVRRIYNQWQQCLPHLAPQLEAAGA

SEQ ID NO: 445563 - protein, 369 aa, unidentified
MADHSVAYVALDTSKLRNAVAIAEAGRDGEIRYLGEIDNAPAATAKLARRLAKQHATLTFAYEAGPTGYGLYRQLKSLGHDCIVVAPSLIPRKPGVRVKTNRRDAIALARLLRAGELTPVWVPDEAHEALRDLVRARDAAVEDLRRKRQSVTSLMLRHGRIFPGKTTWGARHARWLQEQRFEHPAHQIVLQELVLAIQHAQERLERIEAAIAEFVPGWSLAPAVEALQALRGVNLISAVTFLVEVGDLRRFETPRQLMGYLGLVPGERSTGDTVRKEGITKAGNSRARRTLVESAWTYRYPPRIGKVKLYHLQRVTPAIRDIAWKAQSRLCARFRALAARGKKSTVAVTAVARELAAFMWTIVRAVPAT

SEQ ID NO: 445564 - protein, 331 aa, unidentified
MAITFGIDVSKARLDAACRRDVDQVKSKRKSFGNDTDGFSSLLTWAENLAGKDHQDIVFIVEPTSVYHEQLVEFLHGSGGIVYLVNPGKVRKFAQGIGILSKNDAIDADLLCQYGLMARKLIPFEPLPREVSTLRSFLNRLDTLERNLRRELNRQEKVGNTSVFHKLEEQSIERFVKHHKTEIKRFKKFIREMIKKSKPLQKEYELLMTIPGVGEKTAWTMLVILKSRTFSSAQEVASFIGLNPIEKRSGTTEYRRPRLSKSGNGHFRQALFFPAMVATSKNPDIKAQYERLLANGKSKMCAIGAAMRKLVHICYGVLKNQRPYEVQIQHS

SEQ ID NO: 445565 - protein, 372 aa, unidentified
MKSVNYSAYIGLDVHKDTIAVAIASPERQGEVRFYGNISSSKDSVIRLMKKLIKLHNTILVCYEAGPTGYGLYRLLLSMNIDCTVVAPSRIPKISTNKIKNDHRDAVALARLLRAGELVDVWVPDITHEAMRDLVRARSCAKKDTKVAKQRIQSILLRTGKRYEKKMWTVRHRVWLANQSFPLASQQIAYEHYRQSLEQIENRIEQLDQEIDRLLPNWSLYNLVNQLQALKGVGRTIAISVVAELGDFSRFNNPKQIMAFLGLIPGEYSSGNVTRKKGITKAGNVELRRLLYEAAWAYRNNAKVGNWLVTYRPDSVCQEAKDISWKAQQRLCFRYRSLVAKGKKSQIAITAVARELLGFMWDIAVTTQNQRV

SEQ ID NO: 445566 - protein, 418 aa, unidentified
MKIVFPTCCGVDVHKSFLVATIIKTPQNSLQQSYQKKRFSTFNSDLNRFADWLRENDCLDVCMESTGKYWVPVFNILEKQGIRVVIANPKWVKAVKGNKDDTKDSKWIGDLFRIGLVKSSFIPNKEIRILRELTRYRYKLISMKSSEKNRFQNAFTVCNVALDSVVSDMFGKSATAITDYLTSDVEFDAQHCISLLQRSLKKKAPAVLEAVEGHEIAPEQKTRIGIVRDHLHYIDKLVERVDDCVEGMVQKYEGAITLLRTIPGVDRSSAITILSEIGIDMAQFGSSKRLCCWAGLTPGNNESAGKKKSVRISRAGVYLKPALLQAAHAAVKDKSSTYYAVKYERISKRRGKKRAIIAIARMILTAVFCMLSTGEVWNPVDLYKVDMPEHLKEKQLAKAVKQAVHFLETQGLTVLDSA

SEQ ID NO: 445567 - protein, 425 aa, unidentified
MKSATNTLPHPQPAVLPEVPANDVTAGIDWSRDDHAVSIVNSRGQETHRSTIEHTAAGLRDLTATLARFGVGETAIERPDGPVVDTLLQAGITVVVISPNQVKNLRSRYGSAGNKDDRFDAFVLADTLRTDRPRLVPLIPDSPATVTLRRTCRARKDLVEHRVAITNQLRAHLHNALPGAIGLFRDLDSPISLAFLTRFDTQDRADWLTPKRLANWLASVGYPGGKDPAVLHTHLTTAPRGTTGHDATLNAHITHAYLALLTTVTNQIKTLTHQIADQLATHTDTHIFTNLPRTSTIRTARLLTEIGDSRGRFPTPEALTCLAGVAPSTRQSGKHKTIAFRWACDKQLRDAVTDFAGDTRHANPWAANLYQQARTRGHDHPHAVRILARAWLHIIWHCWQNNTPYDPTQHRALQHHLNNPTKQEA

SEQ ID NO: 445568 - protein, 372 aa, unidentified
MKKRSSSRQNPKPAAKAKRAQQSVTIGMDLGDRNSRYCILSSEGEILREGQVATTKAEMIKTFSRLGRARIAIEVGTHSPWVTRLLQSLGHEVIVANPRQVKLITESSRKDDRLDAQTLARLARIDPQLLRPIQHRSEKAQTALMVIRVRAALLSARTSLVNVARGLAKSLGERLPKCDADQMGVPQGESLPPNVQGVLEPLLKEVESLTEKIKDRDQKIEQIAREDYPETTLMQQVGGVGALIALTFVLTVENKDRFQKSRDIGCYLGFRPRRSDSGQRQPQLRITKEGDPYLRTMLVQGAHYIISRRGPDTDLKRWGMRLAERGGKRGKKKAVVAVARKLGILLHRLWVTGEVYEPLRNQNLRKERKQAA

SEQ ID NO: 445569 - protein, 415 aa, unidentified
MGGRQQWYAGVDWGSQSHHVVLTDGDGRKIGERSFKHGGEGLAEMAAWLMAASCAAEPGQILAAIEVPHGPVVETLIERGFKVHAINPKQMDRFRDRFTMAGAKDDSRDAEVMASALRTDPRCFRSLAAADPIIVELREWSRIAEDLGVERNRLINRLREQLWRYFPALLELEDDLGAEWLLELWEAAPTPNTASRLREATIAKLLKRHRIRRFDAASVVNTLRRPPVRVAAGTVEAASAHVALLVPRIRLLNRQIKDAHSRIDGLTARLMPAEAAEPGQKKQHDAEILASLPGVGRTVLATLLAEASDALQRRDYAALRSLAGVAPVTKRSGKSCVVVRRQACHDRLANAVYHWARVAVQHDPRSRAKYAELRRRGHSHGRALRSVADRLLNVACAMLKSGAAFNPSSAAQKPA

SEQ ID NO: 445570 - protein, 346 aa, unidentified
MGKPIINLSSVTTVGLDLAKHVFQVHCVDASGCVVVAKPIRRNKLLEFFASLPPCLVGLEASGSAHHWARELIKLGHEARMMPPAYVKPYIRRQKNDAADAAAICEAVTRPSMRFVGVRSLANQAALMRHKAREMLVAQRTQLLNGLRGHLTEVGVIAAQGPRHARELAELIEACDETIPFEVCEALAPLVVQLRNLDEAIARLDRTIAKLAQRDETARRLMSIPGFGPITASAMAATIQDTSSFAGPREFAAYLGLTPKQNSSGGKQKLGRISKMGNRNLRKLLVVGAHAVLFHRKPHTDPLRMWAKKLIEKKPFKLVAVALANKMARIAFAILRGKTVYREIPA

SEQ ID NO: 445571 - protein, 430 aa, unidentified
MEEITEDAEIVARVAALDVGKAELVACVRVPREDKPGRRLQEVRTFATTTPALLELRDWLVCEGVTLCVMEATSTYWKPPFYLLEDAVECWVASARDVKNVPGRPKTDKLDAIWLAKLAERGMLRPSFVPPPWQRQLRDLCRYRRTLIQERTREKQRTEKLLEDTQIKLSAVISDIFGKSGRDMLEALIGGQRNPAVLAELARGSMRGKKSVLREALTGQFRDHHGWLLRMMLDRVDALTAQIETLTGRIDEVLAPFARQVAQLDEIPGVGKTGAAELIAEMGTDMTRFPTSGHLVSWAKFAPRARQSAGKDKPGTTGKGSPWIAGALGEAVLGAARTKTFLGARYHRLARKRGKQRAIVATGRSILVIAYQLLSAPMPASPTSARTGTTASPRYAANASSSPSLNACPARRSPFRRPQPDTCSPSPRLR

SEQ ID NO: 445572 - protein, 347 aa, unidentified
MSITMIGLDTAKSVFQIHAVNETGKAEIKRKLSRNDLLPFFKKQELCTVVLEACGAAHHWARILTGLGHDVKLIAPEAVKPFVKKGKKNDAADAAALCAAASRPDMKFVPVKSLEQQGILALHSARSLLVKQQTMLANAMRGLATEFGLTVPKGIGRLEELTVLVDTDEAFPVKARQAFTGLFDQCKALTESIVTFEAEIVAHARHDETARRLATIPGIGPITASLIAATVTDIGLFKSARHFAAWLGLVPRQHSTGGKTRLGRITKTGNREIRKLLVLGATSMVYRAPQWNSAAGLWIRGVLERRPVRLATVALANKMARIAWALMTRKEVYQAKGRAAAAADAVA

SEQ ID NO: 445573 - protein, 343 aa, unidentified
MDPARTAARADATSSSHLQDRDMFMDAAVNSFVGIDVAKDSLDVCVLPDRRRWTTTNDRDGVGRLLEALPAAGACLVVLEATGGYQRTVVAELIAAGHQVAVVNPRQVRDFARGLGLLAKTDRLDAQAIARFGQQVQPRPAQKVPEKQDRLEQLVARRRQLIELRAAEKCRLETASTKFVIKNVRSMIEQLGKFIRQIEKELSELVDSDDRLQCRAAALQTAPGVGAVTAVTLVAELPELGRLNRQEISALVGVAPFNRDSGKFHGRRAIWGGRAAVRSVLYMATLTARRCNPVIRTFGQRLDAAGKPFKVVMVACMRKLLVILNTILKNNSTWNANHQLNHG

SEQ ID NO: 445574 - protein, 350 aa, unidentified
MLIIGCDFHTRYQTIAMLDEATGELTERRLDHQTGEAEAFYRNLQGPVRVGIEATGPIRWFERLLAELGHELWIGDAAKIRASEVRKQKTDERDARLILELLLTKRFPKIWVPTPAERDLRQLLWHRHKLVCLRTLLGNQLHALALNEGLCRKKKLFTKKGRAELAGLGLGPWASRRRAELLQLLDQLAAPLAELDRAVLEEAQRRADAVLLMTHPGIGPVTSLAFVLAIGPVTRFPRSRKIASYLGLNPSEESSGGRRRLGAISKQGNTMVRWLLIEAVHPAVRKDPKLRQDYQRLKFRRGHAVAKVAIARKLAVRMYWMLRSGAAYAQLVRRQGSPGATLVDASSSSG

SEQ ID NO: 445575 - protein, 472 aa, unidentified
MIKSVGIDLAGTGEHKVRCMDEGAQLCDGFGFETTPEGLAKLEERIFRDGSNPTVVFEPTGLAWVAVAVYLRARHPDCPLVRTQSRNVAALRKYLRHSSKSDKIDAITLAKMPFVDAERLNEVFLPPAKIYAIQRLARQRRRLESDMTARKTRIISILDGYLPGVRLAFSNLWSLQAKAFLSSQLNPLAVVRDGEKALHRFLTLARSPRKGDSMESHMVYLACKGVATIYDLSHSAGTINDDFFTALQEEIGRELRLMEAEEAESESITQRVKDLYLELHPSDNLSTIPGVGEQTAPVFLAVVGDPARFRSQSAFANFNGVVPDSRQSSQMEAKGLRMTKAGPAIMKWALFQSGQIGRRYDPQLAWLYYREMVHNGKNHKQAMGAVMSHIGARILAVLREDKPYELRDVQGKPITWEDARKLILLKYQVPEEIKRDRRRRKTLGDSAKKPPRKRREMVAHRTHEATKFLNPQ

SEQ ID NO: 445576 - protein, 343 aa, unidentified
MEAYAGKQFVGIDLHRRRSVIVRTTEAGEVLETVRIVNDVERLASVMARAGECPEVVLEATYGWYWAVDALQAGGASVHLAHPLGVKAFEYRRVKNDVRDASDLADLLRMGRLPEAWIAPPATRELRELVRHRAKLVGLRSHCKAEVHAVLAKCGVQVLMSDLFGLWGTELLDRLDLPAPYAARIASLRRLIDDLEFEIDLFAGIIRGRMVREPGYTAVQNIPGIGPTLGAVFVAEIGDITRFASAPKLTCWAGLTPKHHESDTHVHRGRITKQGSRLVRWAAIESVKNIPARSVAGVLRERVADRRGRNVGAVAAARRQLEFVFYALRDGHVRALEHLPRVA

SEQ ID NO: 445577 - protein, 325 aa, unidentified
MKMAKRTTICAGIDTGKRKLDLALDGSSEQLQVDNTAEGHKALLDWLRRRRVKRIGIEASGGYEQAVVAEMRRKGSVVVVFQPAQVRAFAKFHQQRAKNDKIDAALIATCTAAVKKIHAAPDARLLPFAEQLTMIDQIGEDIARLKNRIETCRNPRIQHVWEEDIVRLEERERIEFKALVRAICEHRDLSERLDLIHSVDGVGLPTAVAVLVRLPEIGQLTREQVAALAGLAPYDDDSGEQVGARHIDGGRKRLRRALYAAALPASFRWNPQLIALYKRLMAAGKKHKRALIACARKLLIFVNTVVARGIPWQHARPPIAAMPGG

SEQ ID NO: 445578 - protein, 525 aa, unidentified
MKLLVRLRRLAVAINPERRLKIESPGSRCQPSQSKTTMATTRKQPHRKNGSDARCSALKRKARGSHCHPGKGNRQRSKLTISNPDAAGIDVGAEVHYVAVPEDRAEAPVRSFGAYSAQLDELVQWLKECGIKTVAMESTGVYWIPLFQKLEEAGLEVLLVDARQAKHVPGRKSDVQDCQWLQQLHSYGLLRAAFRPEDSICRLRTLQRHRKDLVECAAMWIQHMQKALNEMNLHLHHVLSDISGQSGLAILDAIVAGERDPSKLASLAHYRVQKSQAEIEAALRGDYRPELLFVLSQSLENYRQLQQQLLKCDLSIEKKMATLAGRATISQGAEPTQQSQDSDGKPPKRKPKDALELSLASHLKRILGVDLTTIPGLNVLAVLTLLSEIGTNMTKWRNEKAFASWLGLNPNNKISGQRVLSSRTRKVANRAATTLRLAAMLSGKTNTPLGSFYRRKRAQLGAPKAITATARKLACLVYRLIKNGQAYKPTDLRTYELKYKQQTLDSLRKRAKNLGFDLVQLPKAA

SEQ ID NO: 445579 - protein, 309 aa, unidentified
MTDDSIGIDISKDQLDAFRLSDGACRAFDNSQAGFRKLRRWLEQTSPVRVVYEPTGPYHGAFELACSPHLPLCKVNPLQARRFAQARGTRAKTDAVDARMLAAMGAAFALEPDRPVPDNQHELKELQVQRSALVKDRTRLLNRLKTQTLALTRRQTKARLAQVERQRAAVEAEIEARLRRTRARALDILHSIPGIGSVAATAILIECPEIGSLGRKQIASLAGLAPMTRQSGKWRGHAFIQGGRKFLRDALYMPALVATRFNPDMKAKYTAMCSAGKPKKVALIAIMRKLLELANALIRDDRKWTSKIA

SEQ ID NO: 445580 - protein, 334 aa, unidentified
MLYAAIDIHKRMFQAAVLDVETGETVERRFGATREELSDWAMPLQGTLAAVAIEATNGWRWVWRELSARGFDVRLVDPAQAKALQGRIKRAKTDRLDARWLCVLLAKEMLPESWLPPAEIQVLRDQTRLRKALAEDRTRWAQRLHALLTHEGWPCQRARLLTVEGRRWVNALSLSPAARAQVERLLRLIEAVEDELRSLETELRRFARADRRCIALQTIYGVGPILACHLLAELGEAARFRRARQAVRAAGLDPVVDESGETRRRGHLAKHGAPLLRWALVEAAQHAQRTNSPDRALYTQAATRVGSKRAVLTVARKIGRRAYHVLHELETQAA

SEQ ID NO: 445581 - protein, 327 aa, unidentified
MWQRRWTRSGACWGSPPFDTTGAGYEALLAWLTSFGVVDRVGVEGTGSYGTGLAQFLMGHDVEVIEVDRPNRQERSRTGKSDPVDAVEAARAALSGRATGLTKTKDGPVEAIRALLVARRSARDHRIATLVQMRHLVFTAPQQLRDRFFGLSKTQLVKQAAGLRPRDNGDPVTYATKVALKGLAQRVQLLETQIKQIRSLLRPLITAAAPSLLDVNGVGLDVAAILLVAAGDNAHRIKNEAAFARLCGVAPLEASSGKVVRHRLNRGGNRQANHALYRIILSRLSSDPETKRYVQRRTQEGKSIAEIVRVLKRYAAREVFKHLPHTI

SEQ ID NO: 445582 - protein, 344 aa, unidentified
MKVTTLGIDLAKNVFQLHGVNEYGKTVIKKQIRRDQMAEFFANLPACLIGMEACGSAHHWARKLEGFGHTVKLMAPQFVKPYVKTNKNDAADAEAICEAVARPNMRFVSIKNIEQQAVLALHRVRQGFVKARTAQANQIRGLLSEFGLIVPQGIGYIASRVPELIEDAGNELPGSFRMLIERLLDHLRALDHQVVELETQIVRWHCQSAASSKLAQVPGIGPITASALVASLGDAKNFDGGRQVAAWLGLVPKQHASGGKQKLLGISKRGNTYLRTLLIHGARSVIYRAQNKPESCRWINGVVSRRNKNVAAVALANKNARILWALLANEREFRPDYTTAKAAT

SEQ ID NO: 445583 - protein, 342 aa, unidentified
MEHIAIDLGSRESQICVRDDRGEIIEERRRSTAQLGSYLAARPAGGRVVLETSSEAFAIADLARQSGHEVRVVPATLVRALGVGERKLKNDQRDARKLSEMDCRMGVPSVHIPSRERRDQQARVTARQGLVEVRTKLINIVRSYFRTTTCSQVKATSKTLAKNARAKLLQQPDGIPDYIEHLLRTLDCLNEQITQADKALKELADADEVCQRLQTMPGVGPVTSVCFATAVDEVGRFESAPRLTSYLGLTPGENTTGFKTTRTNMTKAGSSRTRWALVQAAWTMVRTRPHDPLVAWFQGVANRRGKRIAIVALARKMAGILYAMWRDQRSYDPQRAAKAMNA

SEQ ID NO: 445584 - protein, 340 aa, unidentified
MDQVSIIGIDLAKNSFQLHGARADGSVAFRKKLSRGKVLDFLAAQPSCVVAMEACASAHYWGRETEKLGHDVKLIPPIYVKPFVKRHKNDTTDAEATSEAAQRPTMHLVAVKTEEQQARGMLFRTRDLLVRQRTQTINALRGHLAEFGVVAPQGPAHVGRLASALDDPGSGLPDPVRELGRLLLEQIAGLGEKISGLKKELHASARQDEEASRLMTIPGIGPITAMAFQAFAPPMVSFRRGRDFAAWLGLVPRQHSTGGKPKLGKISKMGQRDLRRLLITGAMAVVKQAIRRGETADPWLARMLARKPRMLVAVALANRMARITWALMTKEEIYRAPAAA

SEQ ID NO: 445585 - protein, 351 aa, unidentified
MLIIGCDFHTRYRQIAMASDETGELLLERRLDHESDEAHTFYRNLQGPVRVGIEATGPIHWFERLLAELGHELWIGDSAKIRASEVRKQKTDERDAALILDLLLAKRFPRIWVPTPAERDLRQLLWHRHKLVCLRTMLGNQLHALAMSQGLCRKKKLFTKKGRVELGNLTLGPWASRRREELLKLLDQLDPAIAELDRAVLEEAQRRDDAVLLMTHPGIGPVTSLAFLLAIGPVTRFPRSKKIASYLGLNPSEDSSGQRRRLGAISKQGNTMVRWLLIEAVYPAVRKDLALRQDYQRLTFRRGHAVAKVAIARKLAVRMYWMLRTGAAYAQLVRRQGSPAATLVGASPSLG

SEQ ID NO: 445586 - protein, 350 aa, unidentified
MEYNIGIDLHSNNSVLGVLDQHAQRVFSKKLPNDLALILKTLAPFKSPQSGVVVESTFNWYWLVDGLREHGYTVHLANPVESRQKYSGLKYTDDKHDAYWLAQLLQLNILPTGYVMPYDQRAIRDLLRKRWHLVKLRNSLILSLQNIVARNTGQSVAASQIKEETFENIAPPAFVNEHIQLAGQASKETIDFLSVQIDRLETVILRSLEPNAQYHRLKTIPGVGTIIAWTLLLETGPIDRFPSPGRYASYCRKVGSARISNNKKKGEGNTKNGNRYLAWAFSEAAVFARRYYPECQKFYDKKLKKRNEPVAHNALAHKLCRAAYHILKNETEFDMTKLFHQPVVEKTASQ

SEQ ID NO: 445587 - protein, 348 aa, unidentified
MIIIGVDFHPEFQQIASVDSETGEFQEKRLAHPAEAEKFYRALVGQKVRVGMEASGHARWFERLVAELQFELCIGDAAEIRTKRVRKQKTDRQDAQLILRLLLEDRFPQIWVPSWENRDLRQLLWHRHRMVQARTRIMNQLQAVALNEGLRCKKKLWRERGRQQLESFRLAPWATRRRRDLLELLDRLTPTIAELSQAIEQEVEKCPAAQRLRTHPGVGSLTALAFVLIMGEVNRFRCGKQVASYLGLVPLEESSGNRRRLGHITKQGSSMMRFLLVEAAQVTVRSLPEWRNKYLHLVLRRGRKIAKVAMARRLAVHLFWMMRKDWNYQQLKKFGSHAGEPGNRHGVR

SEQ ID NO: 445588 - protein, 360 aa, unidentified
MHATPKSAAASTVAIDLAKDVFELAFADADARILERLRLKRESFAHGLDNRAPLRVLMEACGSAHYWARRFGRLGHHVELLPAHDVRPYVRRNKTDRADAAGLLEAARCESIRRVPIKTPDQQGIQGLHRVREFHKAQRTAAINLLRGLLREFGVTIPLGAAQVRPAVLLALEDADNELPMALHATLKALLDTITTTEKDMAAIEARLQAFAEQDLRSQRLQRAGGVGLITATAMSASIGDFDRFPSGRHFASSLGLTPREHSSGNTRRLGRVTKRGDIYLRMLLIHGARAVLRSAKVAAKRQQPMDRTRAWALALSERVGHNKAAVALANKQARRLWAAEHHRARFDPDHVSVRSTPMN

SEQ ID NO: 445589 - protein, 485 aa, unidentified
MKEATLIRSVGIDLSRTGSHQVRCLDEQAKPCDSFSFDSTLEGLENFEKRVFSNGDTPTIIFEPTGLAWIPMAVYLRARHPECQMVKARLQKVAALRRYLRSYTKSDRVDGVTLAKMPFIDAEQLDEAYLPPAEYHSLQRLTRQRERLMKSITVRKNRIGSIVNGYLPGLRKAFSDEWSDRARLFYRQRLNPFTVVRDGKSALETFLVSVKAKGAQTESNRVYQACQKLAEFYEKSKAAGMINEDFFDDLQDEIACELRLMETEEAEVERVSVRIEELYGHLHPSDYLRSIPGIGVRTAQVFLAIIGDPHRFRSQSAFANWTGVVPGARQSADTEGKGLRMTKAGPSMMKRALFQAGDIARRYDPQLAHLYYREMVHHGKTHLQAMGAVMSHLGARIMAVLREGRPYELRDSQGKLLTKKEAMELIRSEYKVPEETRQARRRRKSNEGRLSGRRTREAAKAPQSEPLIPPPKIVYCAEELQSTAY

SEQ ID NO: 445590 - protein, 377 aa, unidentified
MTQFPVSTSNEQSIHAALELSKNSWLLAIQVPGRDNPSLYPIRGGNAEGLMAKLDAARKRVAKVTGRTPKVTLCYEAGYDGFWLVRFLEQRGIECLVMEPASLQVNRRARRVKTDRVDVENILHTLIAWCRGERHVCSMVVIPSVEEEDIRRSHRERGRLVRERTAHINRIKGLLFGQGIRGINVMRHYKTLKPADLVTGDGRPLPERLSREITREIQRLALVQEQLVEIEHERDQAPTTCAATERKRHDLLRLNGIGPTFAAVLSREVYYRHFANRRQVANYIGLAPSPYDSGDSRRSQGISKAGNSLARYTMIQAAWLWIRHQPNSALTQWFHRRTEGESKRMRCVMIVALARKLAIALWRYVETGLIPEGAVVK

SEQ ID NO: 445591 - protein, 354 aa, unidentified
MSKIKQLNFDGKVIYCGLDTHKTNWKINARMEGIEMASFSQNPDPSLLKSYFDKNYPRAELKVVYEAGFCGFEIQRSLTTLGIDCIIVNPADVPSSDKDRKRKDDKRDARKLSIELAKGNLKGIYIPDKQMQDARTLVRQRHRLIQDQTRCANRIKHLLLSNGIKTGEKSERWSLRFINKLQQLDCRSALLKASLQFALEQYLQIRRILKEVTMMIRDLSRQEPFAKVQAILQSIDGVGLINGMVIQSEIGDINRFKRLDSLCDYAGFVPDIYSSNDKTVVRGISKRGNEFLRETIIESSWVLIRKDPAMLMKYNEYRSRMNANKAIVRIAKHLLSRIRFLWRNEKTYVRGITG

SEQ ID NO: 445592 - protein, 343 aa, unidentified
MEHFGGLDVSVKETSICIVDDTGRIVKEVKVASEPEALLKVLGKPAYRFKRIGLEAGPLSQWLFSALAEAELPVVCVETRHMQAMLKAQINKTDRNDARGIAQMVRAGLYRPVHVKTLRSQKLRMLLTHRKLLQSKAIAIENDLRGTLRNFGLKVGMVGKVKFESRIKELVDNLPDLALLVEPLLIVRRALREQIIILHRRLLAIVRSDEVCRRLMTTPGVGPVVALTYRATVDVPARFRKSKSVGAVFGLTCSRYQSGEIDWSGRISRCGDEMMRVMLYEAAQSMLRSKKWSWLKAWAMQIARRRGMKKAIVALARRLAVILHRIWVDGTEFRWTREVVPAA

SEQ ID NO: 445593 - protein, 362 aa, unidentified
MSTITIGVDLAKVLFSACEVDGPGHVLRRQDLRREPFALWLAQQPAGTVVAMEACSGAHHWARRCLEHGLQPRIMAAQFVKPFRKSVRSKNDRNDAEAIATAARQGNMRFVPVKDIDQQVRLSWHRVREGYKVESLAIGNRIRGLLAEFGVIVAQSDLALRRLLADMDGQPGLPAEFKELLRDLADHWQQLRLHFDACNARIEAHARQDERCLRLRAIVGIGPITADAAVATVGNAREFKHGREMAAWLGLVPTQHSSGGHARLGEISCRGDAYLRTLLIQGARSSLQRAKAVATEKATPEQLWIRTLDGRMPFGKVIVAIANKHARQIWAMLAHDVDYDPHACLNHPMHQQTREAPTAHAA

SEQ ID NO: 445594 - protein, 340 aa, unidentified
MKIYVGIDLHSNNSYFGVINESGERLYDKRIANNPDKILGAMSLISKFGEIEDVVIESTYNWFWLVDLLSENDYPATLANPAQIKQYSGMKVTTDKTDAFFLAELTRLNILPKCWICPPGERATRELLRLRLYLVQKKASMKTSLAQLVSRYTGLCIGGTKIVNMDKAGRHELISFEDALFRAEELVIQINSLEASIKRTEEQALKRLKLKPEFELLTTVPGIGKVLALTIMVETGDISRFSQSGNYTSYCRCVTSNRYSNGKRKGTNNKKNGNKYLSWAYSEAAINTCRYSDGAKSYFDRKVSRTNKMVAYRSLAAKLTKACYHMMKNREVYREEKTFY

SEQ ID NO: 445595 - protein, 315 aa, unidentified
MSAYEFVGVDIAKDKFDSSLCINNRHKHAVFSNTNQGHNEFLNYLNQSAVSPWVCMEATGHYSEELADFLVRKGIRVSVINPFQIKSFARASLARNKNDRIDAKLIAQFSQRMEPRLYQPTPTEQKEMKELTKVLDMLKAQVTQLTNQLHSIRGATAQKSLKKMIQKLGQEIECIQKKIDELINNNQRLKEKLDLLISIKGIGKLTAYYILARMPDIHSFQTAKQFAAYIGITPKQHQSGSFTGKTTLSRLSDSRLRKALYMAALVAKRYNKALLCFVKGKTPKTIICAVMRKLAHIIFGVLKNNKPFNENWACF

SEQ ID NO: 445596 - protein, 405 aa, unidentified
MNAVGIDVSKGKSMIAVVRPFGEVVVAPYEVRHTVSELRKLAHSLKSLDGETRVVLEHTGRYYEPIAQTLCNAGIFVSAVNPLLIKEYGNNSIRKVKTDKADAMKIARYGLDNWVELREHTVMEKFREQLKILNRQYSLYTKNKTALKNNLVALLDQSFPGANAFFGSPVREDGSQKWVDFVVSFWHVDCVRNLGIKAFTERYQKWCKRHRYHFNSSKVVDIYDEAKELVPTLPKNDSTKILIIEAITQLNAVSRTVEVLRAEMHRLAEQLPEYPVVMSLYGVGLSLGPQLMAEIGDVRRFAQRGSLAAFAGVDPMPNQSGKQERQSNPSSKRGSPYLRKTLFLVMNVLMQKAPTDDPVYRFLDKKRAEGKPYYVYMTAGCNKFLRIYYGKVKEYMDSLKKADLP

SEQ ID NO: 445597 - protein, 410 aa, unidentified
MKSAVITAVGVDVSKSKSTVAVRRPGGEIVMHPFDVRHTNSDLKKLVSTLKKLGGDIRVVMEHTSMYWRPIALTLKKAGFFVSAVNAMLIHDFSDNSIRKLKTDRADALKIANYALTFWDTLPLLNDEEKTRLLLKMQSRANERITATATVLRNGLIALADQTFAGVNLAFDPNTKNTDGHEKWVDFFLRYWHRDCVCQYFMEVFTESYRGWCKRKNYKFRTATAHKIYIMAQECVATLPKCESTKTLIGQTCKSLNAVCEARHNTQLEMQRLAALLPEYEIVMQMEGAGPVTGPALMAEIGDVRRFKNKKALVAFAGIDAPPFQSGAFESKSRHVSKRGSPHLRRTIFLVSNIILTLSNPENAVFCFMGKMLRGKTLLCLYCCRKRKVLAHLLCSRERVPSLSSSSGCL

SEQ ID NO: 445598 - protein, 344 aa, unidentified
MDEITTAGLDLAKRVVQLHGEDRAGRVVLRRTLKREGVLAWFARRPPCVVGMEACASAHHFARELAVLGHTPRIIAAEFVRPFRLSGKNDANDAAAICAAVRQPQMRFVSVKSAGQQARLAVHRVRQGLQEERTAGLNRLRGLLAEFGRVYRNSATAALGGARAALADETLPTTLRRCVERQLAHLRELEAHLADCDREIASDTRDDARAQRVARLSGIGVLTASALAATVVDPQQFRCGRQFAAWLGLTPRQYSTGGKSRLGRITRRGDAYLRTLLVQGARSALQAALRVAPARRTRLAAWIVATHARIGYHKTLVAIANKHARLVWVLLMKDEPLRAHAAAH

SEQ ID NO: 445599 - protein, 316 aa, unidentified
MKFYTKSHSHFCGIDLHARCLYVCILDASGEPCLHKKISASPQALMKVISPYRDDLVIGVECMFSWYWVADFCEDNNIHFILGHALYMRAIHGGKAKNDKIDSLKIALLMRGGMFPLAYVYPRQLRGTRDLLRRRIHMMRKRSELLAHVHNTTSQYNLPAIGKNLRYSFNREGIAEIFSDPSVRKSIEFDLALIDFYDKQLSKVEWHIKQKVTAFDQHALLLLRSVPGIGLILSLVILCEIHDIDRFSRVQNFSSYARLVKCKHESAGKTYGTGGSKIGNAYLKWAFSEAAVLFLRKNPEAQAWLEKKSNQHNKAT

SEQ ID NO: 445600 - protein, 347 aa, unidentified
MNLYNNMHPYYCGIDLHARLLYVCIIDQDGNVCVHKEISADPNKLATLLEPYIGNIVVGVECMHCWYWVADFCDDIGVDFILGHALYMKAIHGGKAKNDRIDSFKIANLIRGGNFPLAYVYPREMRATRDLLRRRMKIVRHGADLKAHIVNTTSQYNLPPNKVNLKNANAREHLKSTFPELSVQKNIDLDMVILNCYAEQLSKVEWFIETQARQHKPIHLHLLKSISGIGRILSLTIIYEIGNIDRFDSVQNFASYARLVKCKAESAGKSYGTQGNKIGNAHLKWAFSEAAVLYLRGNDKAKNYLLKLQKRMSKGKALSALAHKLGRCVYFMLKNETVFNEEKFLKG

SEQ ID NO: 445601 - protein, 346 aa, unidentified
MTNGGIDLGRRMSQICILKQDGEVIEQRIKSERERFAAVFKAHPGARILIEAGTESEWVARSLEELGHEVIVADPNYAPMYGQRHRRVKTDRRDARALAEACRLGAYRPAHRTSEAQRHVRWQIAVRETLVRTRARSIVLIGSLLRQAGLHLPGGGAETFLNRLNALALPEPLHQAIGPMLPALEMLNRQVTTADRALEELARSDPRVRRLDTAPGIGPVTAATFVATLDRADRFAGPHQLEAYLGLVPREYSSGERQVRGRITKGGNTRLRCLLIEAAWSIVNYPKPETAALRQWTLRLAGRRGMPRAVVALARRLAGILFAMMRDETVYDSRRLTSRARPARVA

SEQ ID NO: 445602 - protein, 308 aa, unidentified
MGGTDVSKDQLAVALRPSGEQFSLTNDGRALRSLIKRLARLRCARIVVEATGGYETLLVAGLQAVELPVVLVNPRWVRSFARSLGQLAKTDRIDARVLALYAERAELKVRELPDEQTRELRALCARRDDLVEMIVAEQNRLEHAPKRLLREIRAHISYLRKRLKHLDRDIDSAVRGSDLWQQKNELLDSVPGVGPVLRASLLAWLPELGTLNRQEAAALVGVAPFNRDSGLMHGRRTVTGGRAPLRRVLYCATSAAIIWNPRLRAYYEHLIGNGKLHKVALVATMRRLLLILNALIKTRTPWKSPYPV

SEQ ID NO: 445603 - protein, 353 aa, unidentified
MRILFTIFPHPLAQVIPMEYIGIDVHNRHCQVAILDDDTTDPQEYRLRTERAELEEFAREHHGAQAAIEATRNYWFVYDCLEPHLDVSVANPHETGLISEQKVKSDRLDAKRLAVLLRVDALSTSYIPPDEFREARKLVRRRKALVDDRTAAKNRVRAALADRGVTYDGELFGEEGREFLADEELPLSPADRHIIEADLEVIQSLDAQIDRLQQEIDEIAATWSETQLLMTIPGIGPCLAVTIAAEVGEIDRFDNKKQVVSYAGLDPRVRQSGETETTDAITKEGPPVLRWALGQAALNVVKYDSYLGSYYSRMKDRKHNQKALVATARKLLVSIYAMLTKEEEYNPPRATHG

SEQ ID NO: 445604 - protein, 344 aa, unidentified
MSQVTTIGLDIAKSVFHAYGADERGAMVFSRKLSRGKLLDFFAGQPACTVALEACGGAHHWARELRSMGHEVRLIPPAYVKPFVKRHKNDAIDAEAICEAAQRPGMRFVAVKSEEQQAAGLVFRTRDLVVRQRTQLINAIRGHLAEYGWVAPRGTAHMTMLADLLDEEEMISTLPEAARPMFKLMIDLLADLNKQVAVLDREIARRAKEDEAARRLMTIPGIGPIAATAILALAPPIETFRKGRDFAAWLGLAPRQHSTGGKQRLGSISKMGERTIRRLLIIGGSSMVRQATRFGAPAGSWLERMLIRKPRMLVSVALANKMARMVWALLTKQEEYRAPAAVAA

SEQ ID NO: 445605 - protein, 345 aa, unidentified
MSNVPVFVGLDYHQDFIQVCVLNQKGDVLLNRSAANDCQELGRIVQPLGVVQRVGIEACCGAADLGEQLVQRLGWNVSLGHPAYIAKIKSSPDKSDYSDSRLIADLTRVGYLPRVWLAPANIRELRQLVNHRQRLVDRGRALKLQVGAILREQRVKIDRERGSRWSKAWTASVADNERLSKHARWIVNDLLDDLKYTAGKIAKAERQLREATEGDKVIEKLMEQAGVGEVTAWVLRAYVGDFSRFKTAKQLARYCGMSPCNASSGKKVADAGLIDGCNKLLRMTIVQAAHRLIRTVERWSKLADSMRSHGKSACVIVGAVGNRWLRNLHHAMKESAIQQGVTSVN

SEQ ID NO: 445606 - protein, 429 aa, unidentified
MKVTIVEEKVNSLNYLIVAYDVSKGKLNYFSKFTNQQGEICELENIVSNRVKHIERHFTELRTLAEDNGFHGVCIACEPTGGYEKKFLKMGRRHGFFTQYVSGEATHKAKVIESNDSGKNDKKDARIIYFLASQGKTLTCNERTGSYEQLQTLNSHYEHLSLDGGKLKNRISSLQELLFPDLSLKSVQLYSKTVEAVITLYGLNPYKIAAIKWNIFVKKVGKVIGHKLGDAGLSVLEKIHGDAVANSFYLMATEQSDEYERELRFYYKSYQDITQRKEKYKEQMVDTFKETDEYERIKEIPVSLFLLSRLIAETGSLANYGGIKQLMRYGGLNLRERQSGKFTGQLRISKKGNILMRKIMGQIAFSSMIKKGALYHDFYIEKKENKQGFYALTCVIRKTLKMIFGVYKNNCGFNQARVFDPCFELLKAA

SEQ ID NO: 445607 - protein, 348 aa, unidentified
MNSTILAIDLGKYNSVLCWYDPATHAAAFRTAATTPDDLRRELVRQPGVTVVCEACSQAGWVHDLGEELRLTTLVASTTGDAWQWKRVKRKTDRDDALKLARLAAVGQIDPVCVPPRAIRQWKSLIGLRKRLVSERIRGQNRIRGVLVGQGLPAPMGVRAWTRLGRAGIASHARPPAECGPDDLWRGELHLLLERLDFIETQTGVVEEQLDARAASDSRVSLLRSVPGVGPRTAEVIVVHLHDAARFRSADEVSAYAGLVPRQYQSGTTDRRGRITRRGPKLLRAALVECAWCSLRYNRWARDTWLRLQANGLSKKKAIVALARKLLVRCWAILRTGQPWRTPEPIAA

SEQ ID NO: 445608 - protein, 454 aa, unidentified
MAKPKKKSKFNVHSLPAHLRHINLHAAGIDIGSERHMVAVPEGRDKVSVREFGAFTADLQALADWLRQGGVTTVAMESTGVYWIPLFELLDRQGFEVKLVDARHVKNVSGRKSDVLDCQWIQQLHTYGLLAGAFRPNDELCVLRSYLRQREMLTQTASMHIQHMQKALQQMNLLLHNVVSDITGVTGMKIIKAILAGERDPRRLARNRDGRCQNSSATIAKSLVGNYREEHLFALKQAVDLYETYQGKIADCDEAIIKQVEKQPDLTDDTVPPGEKHIQARERIRSGVDVRELMFKKSGVDLFAIPGLAADTLLTLTSEVGVDMSPWKTIKHFTSWLGLCPGTKISGGKVLNKKTKRHPNRATQAFRLAAATQARSKTALGAFYRRIKSRTGGKQAITATAHKIARIYYTLLTKGTSYVELGQQAYEQKYQERRIHHLKTQAKLFGFQLVPCAT

SEQ ID NO: 445609 - protein, 348 aa, unidentified
MIIVGCDYHPSFQQIAWVDSETGECGEQRLPHSDGEAEKYYRGLNGHGVRVGMEATGHARWFERLLAELKYELWVGDPAQIWAMRVRKQKTDRQDAQHLLKLLVEDRFPRVWVPSAENRDLRQLLWHRHRLVQMRTRVMNQLQAIAMNEGVRRKKGLWSKQGRRQLESFPLAPWATRRRQDLLELLDRFNPSIQELSIAIEQEAMQRPEVKRLMTHPGVGPLTALAFVLIIGSPERFRCGKQIGSYLGLVPCEDSSADHQRLGHISKQGNALLRFLLVEAAQATVRSDPEWRRQFLHLAMRRERAIAKVAMARKLAVHLYWMWHQGWDYQQMQFGSHVGQPVVSHGVK

SEQ ID NO: 445610 - protein, 477 aa, unidentified
MNKKQGDNLQPPKAKSKRRRRNKGMCLEDRPVLEPNAAGVDVGAREMFVAVPPGRDENPVRVFATFTADLERLTDWLEQCGVTTVALESTGVYWIPLFEILEQRGIRPCLVNARHMKNVPGRRTDWHECQWLQFLHSVGLLRAAFRPGQDVCAVRTILRHRNELVAAASQHVQHMHKALTQMNLQIHHVISDITGLTGRAIVDAILAGQRDGAELAKLRDPRIKADTETIRKSLEGNWRPEHLFTLGQSRDLYRIYQQQIVNCDLEIEKMLQGFAPRIDPGERPLPPDRKRNRAGSKRRKKNGHPHPEFDLRTEAYKLFGVDVSQIPGLEENALPLFSEVGRDMSRWPSAGHFVSWLALCPDNDISGGKLLWRGARRVKNRAGQLFRMAAYALHRSLTPLGNYLRRMKAKLGPEAATMATAHKIAVIFYTMIKNQVEYNETIWDARDAQREKKLQAKLKRQAKQLGYELVPIEPQAA

SEQ ID NO: 445611 - protein, 352 aa, unidentified
MQKFNYHLGIDLHRRTSYWTLMDNERNILWKKNMATSEDAIDAAVRDISIDPKEIQAAIEPVSGWGWYGDQLEARGFAVRLVDVYKSKLIAGTKLKNDKVDSKILADMMRSDFLPEAYRAPKETRDMREFMRSRAFLVRLRVRIRNRIHMMLQKHGIICPWTDLFGKSGLMWLKEQRLGDVYLRELESLLVLFGELSLPVKERDARCVELITRSKEAKLLMTIPGIGVVTSLTMLAEIGDYARFPSPEKLASFAGLVSSSNSSGEKLRFGHITHRGSVWLRTALVESTGKVSKKWGYLHDFYWKLRERKGNKIARVALARKMLTLSWHLITKNQSFNPRRTDSVKTEIPELS

SEQ ID NO: 445612 - protein, 406 aa, unidentified
MISVGIDVSKGKSTVCAIKPYGEVLMTPKDFKHTRDELGSLTKQLSRFKEEIHIIMEATGNYHLPVYQYLKSKDYQISIINPLEMKRYRCQGIRNPKTDKIDSYIIAQYGIDYWYRFKPNDDMDEKRKELRLLGKQYTSYMRIRTIRCQDLCHILERTMPGVYGLLDDFNRNNGQDKLCDFAEKYYHSDNITKYSEKIFIERYNSWLKKKGYRSNGKEARQLYSIAKNAIPTLDSKLPSTKLLVQEAVNVLREVDSSLYDILNQLKVLSKDMPEYNTVLHMKGIGETLAPRFIAEIGDPRRFHSAKALIAYAGIDAPPYQSGQFTGTKRHISKRGSSNLRKLGYELMDSVNKHKSSYTGDPVCEYFMKKRNEGKPYRVAMIAAFNKFLRIYHSRVSEVLNEYDNSH

SEQ ID NO: 445613 - protein, 415 aa, unidentified
MEDLGLRALYRRVAGIDVHRMLHVVTVLIEQADGSMQRQTREFGGFRRDCRALAAWLAELGVELVVMESTGIYWKSVHAHLENAGVAAWVVNAHMIKHVPGRKTDMADSEWLAVLARFGLVRASFIAPKDLRELRLVSRYRRKLGAMCASEVNRLHKILDDGGIKLGGVVSDINGVSARAMVSALIAQQPIEHMLGLARGKLKQKREDLCASLEGDLSARHLFVLGHIHAHIETLQREITDIDRYLLAAMQPYAWAHKLLQTIPGIDEIAAAMILIEIGDDMGRFGCGERLASWAALSPGNNESAGKRKSGRTRHGNSIIRFILCECANAARMTKSTLASKYRSLMVRKSHKKAIVAVAHKMIRLIFLMLSRRQPYIDQSIDYAAMSAKKNAPRWIKQLKTIGRWPSPKPAAPST

SEQ ID NO: 445614 - protein, 347 aa, unidentified
MKIIGCDFHPSFQQIAMLDKATGEYSEHKLTREHAVAFYRGLTGPVTVGMEACGNTLWMERLLAELGHELRMGDAAKIRAMEVRKQKTDRRDAELLLRLLLDNRFPQVWVPSPEQRDLRQLLLHRHKLVNMRRQVKNQLQHLALNQGVQQKRKLWTEKGRRLLQELPLTGWTARRREDDLQLLDQLNRSIAELDAAVEQEAGNHPIARLLQTHPGVGPITALAYAVTLGKIERFARSKQVVSYLGLNPAEHSSGGRQRLGSISKQGNPLLRSLLVEAGQSAARGDEWLGRAYQRLKHKKHSGVAKVMVARKLAVRLYWMWRTQQPYAATRMQGSPGHSVVVRQNRCG

SEQ ID NO: 445615 - protein, 337 aa, unidentified
MTSNKKYIGMDVHKESISIAVMNSNGKFVMECVIETKASMLLQFIDGLRGDVRVTFEEGTWAAWLYDLLKPHVSEVVVCNPRKNALLKDGSKSDRIDARKLAELLHGNLLKPVYHGEQGLRTLKELARSYLTISKDVTRVMNRLKALYRSWGIACAGTQVYAPRHRSEWLGRISEAGVRRRAEHCYQQLDVLRLLRQQVRRDLLLESKKHQAWKLLRLIPGIGPIRAALLIALIQTPHRFRTKRQLWTYSGLGLETHDSAQYRVVEGQLRSKKSVTLRGLNQDHNHDLKDIFKGAATRVSSSNGPLHDFYEHIDRLEEGGTFRRQLFDITSRVSASG

SEQ ID NO: 445616 - protein, 342 aa, unidentified
MLYVGIDIAKNKHDVTALNVPGKTALKPLTFSNNKAGFKLLDLSIRQLNQDCLIALEDTGHYAFNLLNFLHEQGYKVYTYTPLLIKEFAKSLSLRKTKTDKKDAHGIALKLLSDPNREQFQHDNRQVELKILARHIHRLKKKQSDWKVQYTRCLDIIFPELDKIVGKHSEYTYQLLTCYPNPQKRLEAGFDKLIEIKRLTASKIQDILSVAPRSIGTTSPAREFEIIEIIKHYKRLIDKAETCVNDLMAEFNSVITTVTGIGGRLGAVILAEIRNIHAFNNPAQLQAFAGLDSSIYQSGQIDLAGRMVKRGSPHLQWALIQAAKACARFSPAFKAYLKTKLE

SEQ ID NO: 445617 - protein, 404 aa, unidentified
MRYMNPVIGLDVFKGESMAQAFLDKGLPYLKVFRFKHTTEGLTRFRKYMKDLQDEAGTPPTIVLEATGHYQSPLIPVFEELGYVYLVINPLLSKTARKRKLRNVKTDAADAHLLGELFYKEELQPELKRGTPLLNLRHLTRFYESISDMYVQTKLQFHAVMDQVFPEYIGVFGDTFSKVSLRLLLRFPTSEKVLQLGKTELIEAIKELTPRARSVRWAEERSERLIAAAERNPFKSSTMSSHFVSLGILVQSLLQYQEHLSQLETQIDALAEDIAAFDLLRSIPGIGNKIAATILSEVGEIERFDNAKKLVAFAGLDPSVFSSGKFTATQNRISKRGSKRLRLALFLAVRCGLRLSVNQKIKAYYDKKRTEGKGHKVAVIASANKLLHWIFAMLKNKTTFVDLA

SEQ ID NO: 445618 - protein, 318 aa, unidentified
MRRPTDKLIAGIDLHSNNVVIGLMNQDAKRIAHRKLDCDLNEVVEFLEPHKSHLQSMAVESTFNWYWLVDGLRARGYPIDLANPARIEQYSGIKHADDKHDAFHLAELQRLKILPKAHVYDPELRPVRDLLRRRTNLVHQRTALFLSFKSLYARTTGQTMPLKHLKSLEPKEAKDIYQHPANQLIARIQLEHIEALDRSIGRIEKGVLACAQEIPLYRRLLTLPGVGKILGMTITMEVGDIKRFKTDGDFASYCRAVDSRRLSNGKQKGENNQKCGNKYLSWGPSSFFYESRFQRSGSFAGLGTRRVAPGWYEKGLWP

SEQ ID NO: 445619 - protein, 337 aa, unidentified
MKYCGIDLHSNNRVIVVIDEEDRVVGQKRLPNELARIVVFIVQWRDELAGVVIESTYNWYWLVDGLQAAGFQAHLANTAAIKQYDGLKHGGDEADARHLAQLLRLGILPTGTILPRDERAVRDLARKRIQLVRGRTTHILAIENIMARQFGARMTSNQIKRLSADDIDQMPIEADVRLAMNANLAVIGALDAQIEVLERRLRERAKPRPEYAFLTSVPGIGQALSTTILLETGPIDRFASVGNYASYARCVDSAHTSNRKKKGEGNVKNGNKYLAWAFVEAANFARRYCPEAKRFYERKKAKTNTIVATKALAHKLARACYHILREGRPFDVTRCFA

SEQ ID NO: 445620 - protein, 423 aa, unidentified
MRFYTTSHRYYCGIDLHARRMYICVLDADGQIRIHRNGPATPEHFLATVAPYREDLVVAVECIFTWYWLADLCAQEGIAFVLGHALYMKAIHGGKAKNDKIDAHKIAVLLRGGMLPMAYVYPREMRATRDLLRRRCHFTRKRAELFTHIQNTASQYVLPALGKIAFHGNRVGLAEQFPDPAVRKSIETNLALVDHYDRALKALELHLGQTAKVHDVNAYYRLRSVPGIGKILALVLLYEIHDIHRFPRVQDFASYCRLVKCAKESDGKHYGYAGTKIGNAHLKWAFSEAAVLCLRKNPVAQRYVARLAQKHGKGKALTLLAHKLARAVYYMLRRGQAFDVTKFFSSTTAGEPAARAAGPHLSRGDAHDATRAASTRPDLEGGRYLALAENEGPEPAPPAPEGSGAIVRRRGRRRGPAMSASLS

SEQ ID NO: 445621 - protein, 349 aa, unidentified
MPITLAPPDTALGESMKSETPYIGMDTHDGHSQVAVMGSDGTILEERRVTDADLSEFAREFAGSPVAIEATGFYRHVYETLDEYMDVTLVNPKKTRVIAEASVKTDKIDAQMLAHLLRANLVAESYVPPRDIREQRDLVRTRKTLVEDRTRVKSRVRAVLKRTGNQYRSELFGPTGREFLAELSLADTDRVIVETYLDVVDTYDKQIAVLDREIEAVARESAAAKLLQTIPGVGAFSAVLLTAEIGDVTRFSSHEKLVSYAGLNPTVRQSSDHETRGGISKEGSAAMRWVLTQCVNTAVTCGNEYLAEFYERLKRRKNHQIAVVATARKLLVSIYYMLTREEKYAPPVS

SEQ ID NO: 445622 - protein, 349 aa, unidentified
MVVVGADVHKRTHTFVAVDQAARELGHRTFQATTAGHQAAVRWARERFGTDVVWAVEDCRHLSARLERDLLTAGQSVVRVPPKMMAEQRRIARTRGKSDPIDAAAVARAALREPDLPVATHDEAARKLKLLIDRRDDLVKHRTATINRLLWRVHEIEPAWAPPKASLDRAVHQHTLADRLACVPGIVAELARDELADVVELTGRINHLERRLTDLVSDAAPSLRAMPGVGALTAAKIVGEAAGVARFKSEAAFARHAGIAPIPVWSGNTAGRVRLTRSGNRQLNAAIHRIAVTQIRLDGLGKAYYDKKRAEGMSTPEALRCLKRRLARVVFNHLTTDHAASGNVLAQAA

SEQ ID NO: 445623 - protein, 470 aa, unidentified
MHLPSPVRLLGIDLGITSDHTAVVVDDTGRVCARRRARSTVASLAVLEAAALDGADPGTCLVVVIEPTGSAWLPVAVFFGRRGHTVLRVTSAKAADLRRFLARHAKSNSIDAETLARLPLVAPTGLTAVEFGSPARASLDRRVRAVARLTAEIGRRKTRIRALAHQLVPTIGAVLSEGLNHTDLAVLERYADPRALLAAGPARLTRLIVTTSRGQLGQAKAQALRTAAAEAVDLWEGDSAIAVQDLAAEVASEVRLVRAAELERTRHELARDAAMAGVDPTGLAASLPGMGPVGTTQLVATMGRPGRFPNGGAFKAFTGLTPRANETGQTDRKHQPMTKAGPRALRSQLIQSANTARKLDPQLAAVYHAQMTQRGATHRKALCVVAARLAERAWLTMARGEPYVVCDLDGQPVTPEQAKRLIAEHFTVTAEVRRRRRSTKKAGKAPHMALEAQGKSQREAGHEATFPAPA

SEQ ID NO: 445624 - protein, 338 aa, unidentified
MMLKRIAIDTSKHIFTLYGVDDQDRPVLRRELRRGQVEAFFRKLEPTEVVLEACGGSHHWGRLFTQLGHRVRLLPPQYVKPFVKRGKNDNKDAEAINEAASRPTMSSVPVKTTDQQAEAIVLRHREMLVNQHTQAINALRGHATEFGVVVAKGTTNVAALLSILAADSAIPAAAQAMFEQMGAHIDALGQRVAALDGELAVLHKSNAVSQLLAKIPGVGPIGAITMALTVDPGNFESGRHFAAWLGLTPKEHSTGGKQRMGKISKAGNERLRQLLVVGATSVVRFAKPGSKSASAWLLQLLQRKPRKVAAVALANKNARIIWAMMSRGEAYRRQPIAA

SEQ ID NO: 445625 - protein, 442 aa, unidentified
MRLLNANANEHPLRIKLSAHIRTGIIMELQRNKVCGIDVHKRFLIATILSRDGKKDTQRFSVTLEDLLKFRDWVIENGCEQVAIESTGIYWHPVHSVLEGKIDLIVANSYKIKHTPGRKTDANDSEWIAELCLNGMIEPSRIFPKDDRELRRLTRAREGYVKQMTQEKNKIHQSLDSACIKLASVISDIFGKSGMYLLNCVLEGRDIDEIIEGIPSGRLKKKADQIKESIKSRLEISQVILIRGSLSLMRSIQERIDELDGEISARIQYRKNDLAIAMSIPGTGFVSATAILAEIGNYIDFKKPEQLAAWCGLVPSLYQSAEKTILGGITKQGSKHIRRMLIQVAYAISRTKDSKLKKFFLRIQAKKGSKVAAVALARKVLCILHHLLMNQEMYLEDRDKKNMHQKPLTQPSPIEMSIQEMIDCIVRAGYVVTKSDSIGGFG

SEQ ID NO: 445626 - protein, 337 aa, unidentified
MIVIGVDVHKHSLSAVAVDEVGRQLDCIETSDGEELISWSKRVGRRRLWALEDCRHVTRGLERTLERQRQHLVRVPPRLTAPERRRGRVRGKSDLIDALAIARAALREPLLDSPRPEEARLRELKLLVDHRDDLVDERRRCQQRLRWHLHELDPSLRVPLGALDRTVWLERLSRQLTRHQQTTQVRIARQLLARCRSLSRSIGELDRELQAQTTTLAPRLLELPGCAALTAAKLLCEIGPIDRFRSDAQLARHAGVAPLDASSGKHQRHRLDRGGNRQLNCALHRIAVTQGRVHPPAKAYLERKQAEGKTRREALRCLKRQLARTVYTTLKSELLLT

SEQ ID NO: 445627 - protein, 380 aa, unidentified
MLGGKLADKWDEQVLRIGGTMPMKKSTQHLIAEVPRSNSKIGMTIGIDLGDVWSHYCTLNEDGEVVDRGRFRTSPSGVEKWFTDLPRIRIAMEAGTHSIWVSEQLQELGHEVIVANVRELRAISHSDRKSDQVDAEKLARYARLDPKILRPIAHRTVAQQEALTLIRACNLIVRLRTAAVNAVRGLAKPCGYRLPASSTLCFAKRCMAALPPGLAEALGPVLEQIAAMTLKIKQYDRAIKRLTETEYPETQALIQVYGVGQLTALTYVLTLGSKERFQRSRDVGCYLGLRPRRSQSSDSDPQLGITKAGDVYLRSLLVECANHVLGPHGRDSTLRQWGLHLASRGGKQSRNRAIVAVARKLAVTPGPPGRGPARSESLQE

SEQ ID NO: 445628 - protein, 338 aa, unidentified
MKAVARIGLDIAKNTFQVHGVNAHGAVVMRKQLSRGEVLRFFANVPACVVGIEACAGSHYWARELKGLGHDARLMAGQFVAPYRKSGKNDANDAEAICEAVGRPNMRFVPIKNEEAQAVLTVHRARQLLVSERTALANQIRGLLGEFGIVMAAGLAPLRRRLAQIGAGQQALPVLARETVGELHDRLRLFDACISQYDRKIEVIARGSEPARRLMRVEGIGPVTSTALVASIGDARAFTNGRQFAAWLGLTPSQHSSGGKSRLGHISKRGNVDLRTLLIHGARSVLQFTSKKTDRKSVWVEALKARSGTNVAAVALAAKQARIIWALLARGTEYQPAT

SEQ ID NO: 445629 - protein, 410 aa, unidentified
MIKENYMYVGIDLHKETHTAVIIDCYNQKLGEITFPNRPADFPKLVTKVKKCNTDGKEVVYGLENAYGYGRALAVWLIDKGYFVKDVNTAISHRQAKHRGAMYRKSDSDDAKAIALATLNMLDKLPDACPNDAYWSLGQLVHRRDNIMKQRTRLVNQLHEQLCIVYPSYKQFFNDISRPTALYFWEHYPSRKYLKGKSVEDLRAELVPVSHNKCSTKTCEKILDAVASDKVKNIDYQDARDMVTLSIVSDLQHYDSQLAEVDKMLEQMYKMLGCTLTTIPGVNVITAVKILAEIGDIKRFSNANKLAQFAGIAPLHLSSSGKGKDVATKQGNRRLQATIYFLAIQMVQVSSKGTPRNSVVRAYYEKRKAEGKTSQQALICISRRLISIIYGMLKHGTEYRMPVVESAGEK

SEQ ID NO: 445630 - protein, 367 aa, unidentified
MTKSITVERQQASNFAEKKYTVGLDLGDRWSWYCVLDERGEVVFEGKVSTTPKALREVFGAMPHSRVALETGTHSPWISRLMKELGHEVIVAQASKVRLIGESRKKDDRLDARTLARLARVDPELLGPIRHRSARAQADLIMIRARAGLVRARTALVNAARGLTKSYGERLRGCSPRNMDAEKSKGLSAELQMALEPLLRAIESLSQQILDYNKRIEQMARDRYPEVARLQQVKGVGTLIALAYVLTLEDPQRFTKSREAGCYVGLQPGRRNSGSSTPQLHISKEGDPYLRTLLVQGAQHILGPFGQDSDLRRWGLKLAERGGKNGKKRAVIAVARKLAVLLHRLWVSGEAYEPLRNQRAVELRTAA

SEQ ID NO: 445631 - protein, 318 aa, unidentified
MTQVALFVGIDVAKEKLDGCIRGVARATASNSPDGCAKLAAELKARGVTLAVMEASGGYERTMAAALRRQRVPVRIVDPKRIKDFARAAGRRAKNDPIDANTIAWFAHTFTLAAEDKPDKEREHLAALVAERQDLVEIRTQCLNRNEHKAPALCQHVRKKVLNEVKQGIAKLDAAIAAWIAKCPRLAARARLLASVPGLGRKSVAALLAWLPELGHITRHQIAALLGVAPFDNDSGEHAGIRHIAGGRRQLRNSLYMPLVGAATQHNPILKRYYKRLLASGKLKKVAILACMRKLIVILNVMLAREQSWNPQPTSAQP

SEQ ID NO: 445632 - protein, 376 aa, unidentified
MKEKLRFLGLDVHAETIAVAVAEPDGEVRSMGTIANREESIRKFIKKVGPAEQLRVCYEAGPTGFVLYWQLTQLGVECTVVAPTLVPKKSGDRVKTDRRDALKLARSHRSGDLTAVWIPDEGSEALRDLVRAREAAKQDQLRARHRLSKFLLRSGQRPAPGVKAWTQIYMAWIRQIHFAQMAHESTKLDYLHEVEHMGERVMRLEQAIAGAAKLASPELQEVIQGLQALRGIAHISAITIAAELGQISRFEGARQLMGYSGIVPSEDSTGKRKRRGSITKTGNSHLRRTAVEGSLELPASTRRRTRIAKATRGRSTRDKGDSLEGTQHRLHKRYCRLTATRKDQRKIITALGRELLGFIWAIGVKAETAARQKIAA

SEQ ID NO: 445633 - protein, 419 aa, unidentified
MQQVPPLQRWTGRAIGLDLHRDFCEVAVCEDGVVRSAGRVEMAAERLEALAASLESTDRVAMEVSGGAWEVARILEPHVERVVVVSPDDTGIAQARTKTDRLDARTLAGLLWKGGLDSVWVPDERARVVRRRLARREQLVRTRTRVKNEVHAVLMRRLKGKPPYSDLFGVKGRKWLRRLALPPEEAETVQAALRHIAFLDREIEQVERLVAKQMLTWPEAKRLMTVPGVNLIAAATFLATIGDIARFRNSRKLVAYLGLDPRVRQSGEQPARSGSITKRGSVSARWALVEATWSVVSQPGPLRAFYLRVRSRRGHGKAIVAAARKLAVLFWCMLTRGQDYAHQQPSLTAQKLRRLELAAGAPVRKGKPSGVWVTHARMRHAEKQVAAQAQTSYERTVRDWQASGAKNKQAGASVTLERA

SEQ ID NO: 445634 - protein, 345 aa, unidentified
MELHTIGIDLGKTVFHLVGLDLRGEVVVRKKFSRTQLLRFTANVHVGLIGMEACGGSHFLGRALREHRHEVRLIPAQYVKPYVKTNKSDYIDAEAIAEAVARPTMRFVPIKTDDQLDMQSLHRVRERWVMRRTAVINQIRGLLLERGITLRKGRHHVHAALPLILEDADANLSGAVRLLLAQLKLDLDQLSVRIDEADAAIQKTAHENEACRRLVAIPGIGPVTATALIAAIGNGGAFHKGREFAAWMGVVPREHSTGGQQKLLGISKRGNSYLRRLFVQGARAVLQQRTKQSSGLSAWLAQLTSRTHRNVAAVALANKLARIAWAVLAKNEQYRPSVVADVAAA

SEQ ID NO: 445635 - protein, 391 aa, unidentified
MFYIGIDIAKHNHEVSIIDDNGKALGKSFSISNSQKGVDKFNTYLDSFNITSENCVIGMESTGYYWINLFSFLVNLKFNVFVINPIQSDAFRKMYIRKTKNDSKDSYIIAQIMRFGEYSSSNISDENIFALRQLSRYRTSLVDECSSWKRKIISILDQVFPEYSNLFSDTFGVTSKELLSKYPLPENMLELSTEELTNLLNKASKGRLGNEKAQEIKESAKNSFGVSFAKQTFSFQIKQIINQISFIESQLKELDNEISNMLKELNSEITTITGIGDVLGACILSEIGDISRFEKASQLVAFAGLDVAVKQSGEFIGTEMKITKRGSPYLRRAIWLAATVASFKDPALSIYYKSLIARGKKHLTAIGAVSRKMCNIIFSVLKNKKVYTPNI

SEQ ID NO: 445636 - protein, 394 aa, unidentified
MPQYTITTKHASIIALDTHARTTTARGIILETGQIKTRRFNDCPTPLEIADWIQKEFPSPQYCAYESGCTGFYLSRKLNELNIACDVIAVSSIPKSSDDKQRKTDARDAKGLLRELLVPATTLSPVWEPDPQCEGMRDLLRSYKDISAALMRSKQQTTALLLRHGHVWSEKTPTGQRKTAWGGDYFKWFDKIELDSAWAQETLLDYRIIVEENKERAKRLMKRIEQYAKEPRFKPYVDAFTCIRGVGVFSAMVFAAEFGDFFRFRNGRSVSKWAGLIPNSNESGEKKSTGRHITKAGSAIVRYTLVEGLNSVGRRLPKMGKLKKGQVVSERVIAECNRCNHRIHERYVHLTKEMGKKANIAKVAVAREQIRWIWVIGCMVQEEQEIAAKERKDI

SEQ ID NO: 445637 - protein, 353 aa, unidentified
MTKDITKYVGIDLGDRTSMVHELNQAGEFVKETRLPTTAQALEREFEGQPRMRIAIEVGGHSRWVSRKLKEYGHEVIVADARKLRLIYQNPRKSDRVDATYLAKLVRLDVSLLGPIRHRGEAAQQHLSLLRSRESLVKARTQLVNHTRGMAKSFGARLPQCSTESFAKKVRTALPASLQPALGPVLDSIQDLSRRIRSYDQEIERLAEAEYPETESMRQIKGVGALTALAFVLTLEEPRRFFKSREVGPCLGLVPKRDQSGDHDPERHITKTGDDYLRRLLIGSAHYILGPFGQDSHLRRWGLRLAERGGKNAKKRAVVAVARKLAVLLHKLWVTNADYLPFYPAVSEEEVSA

SEQ ID NO: 445638 - protein, 315 aa, unidentified
MSKDTLDANCARGQRRQSKTFDNSPDGWKLLLAWLKAMGSKQAHVCMEATGRYSLGVALALHDAGHVVSVVNPAQIRDFARTKLGRNKTDKVDATLIREYAELFKPAPWAPPSPAMRRLCELQTVRAGIVSNRAEWKNRIGSGLGDRTATTLAGATIDHLTAQLEAVDKAISETIDQDTELRGRRDLLLSVIGVGETLAALLLTELPEPGVLRRSGEVVAYAGLNPSHHRSGSSIDRPTRISKIGNATLRSSLYMPALSAMRFNPPVAALVARLKSAGRLKPKQIVVAAMRKLLVLCFGVLKTGKRFDPAIAMPA

SEQ ID NO: 445639 - protein, 371 aa, unidentified
MEHTRFVGLDIHKERLSIAVAESGRTGAVEYLGEIANDPHAISKLCSRLGLPGKPLIFCYEAGPCGYGVHRQLTSLGHRCDVVAPSLIPVKSGDRVKADRRDATMLARLHRAGELTPVWVPDTDHEAMRDLIRLRSVVRHIVTRARQHLQGFLLRHGRKHGRGTAWRMAYRRWLSTLAFEHPAQQIAFQDYVDAVTDAERRLQRVEEQILSLLPEWNLRAVVDALQAMRGIALINAVVLVAEVGDFTRFSNPRELMAYFGLVPGERSSGETVRRGGITKTGNAHARRALVEGAWAYRMKPRIGRHKVDRIEALPKVVRDIGWKAQVRLCARYRRLTARGKTANVVNVAIAREMVGFIWSIACTIQSAPKPA

SEQ ID NO: 445640 - protein, 408 aa, unidentified
MELVHAVCCGLDVHKASVSACIRRVMEGGIIKLEERTFETTMRGLKALLDWLMESGCGIVAMESTGVYWKPVYHVLSPSVKVLVANPAEVKQRKGKKTDKADAQWIAELLAHDLIEPSFIPPAEITALRDMIRMRTALVNNRTQAKNRVLGLLEDTNIKLSSVVSDTFGKSGRAMLDALVSGDRDPKALAQMAKGLLKKKIPQLETALEGSFTAHHAFLIKVSLSVVDLLDKQIHELDKHIESMVMPLRTELDEVISIPGVGETAARGIISEIGVDMDRFVTDTRLSSWACVCPGNNQSGGKRKSGRTRRGNRYLRRVLVECAWAAGKTDSFLGRTFRRLQARIGGKKAAMAVGHKILVIIFHLLKEGAVYDEGKYNRLTPREEDKRKKRALETLRRLGYCVTLERAA

SEQ ID NO: 445641 - protein, 399 aa, unidentified
MKRVAGLDVHKDIIFACAAKGKYQSEVKEFDTTTSGLEELFHWLSGERVTKVAMESTSTYWMPVWRALEQEFTLCLVNPYFIKQMPGRKSDVKDAQWIATLLDKDLLRGSVVPEKTIRILRSYLRRYARLQGQTTRCIQSLERQLSQCNIKIASLTSTIASKTTLNIVESIIEGEHSVDALMKKVHGRIINSKGKEKVRKALEGIIEEHDIFLLRQIYQDYRHIETQCTELLAQAEKIADEHYNQQIALLETIPGIKKLSAIIIFAELGGNIGLFKSASHLSGWCGLRPKNDESAGKIKSTSIGKGNKYLRRILVQTAWAASRTKECYLKEKFETLSVRKSRKKALIAIARKQLVITWNVLSKEEIYQEPTIILSSRQIEQKRKYYRAKLEKLNTQKVG

SEQ ID NO: 445642 - protein, 314 aa, unidentified
MVETTLCFVGIDIAKDQLDVHVLPSGEAFAVARDGPGLEQLVKRLAPLQPSLIVLEATGGFETLVAAAIATTGLPLAVVNPRQVRDFARATGRLAKTDRLDAAIIALFAERIRPEPRPIASLDAQHLGELVARRRQIIDMITMEGNRRRQAASRAVQASLDAIVTALKAQLRDIDTDIDTAIRASPAWRENDELMQSVPGVGPATARVLIADLPELGTTTRQRIASLVGVAPVNRDSGTLRGRRTIAGGRTSVRNALYMAALVGVRCNPVLKAIYNGLVLKGRPKKLALIACARRLITILNAILLSRTPWTTAP

SEQ ID NO: 445643 - protein, 345 aa, unidentified
MEPMYYIGLDVHKQKISYCVKDSSGKIYAEGWIPATRHDLDCWMKNLPQPWSAAMEATMFSGWIYDHLKPNAAVLKVAHPLMLRAIAAAKKKNDRVDANKICDCLRCDFLPESYMAPTAIRERRRTLRYRNLLVRQMVQMKNKIGMLLMEAGVSYNKQKLHKAGYFRELLASNPDINESLRSLLRQCREMVVRLGKMEAALTRSLQQDGLLMERVERLMSIPAVGPITALTWALEIGEVQRFSSIKKAISYCGLCGDQRSSADHTQRMPLSKQRNKHLQTTLIEAAKMAPRYSPTLALIYDKERQKGNANRATLAVARKRVAYLMAVDRGQTHFLVLDRDTCAAA

SEQ ID NO: 445644 - protein, 344 aa, unidentified
MQIARIGLDLAKYVVEIHGVDARGKTILCKTLRRHAVSAFFANLPPCLVGMEASNGAHFWAKAISELGHDVRLISPQFVTPYVKSNKNDRNDAEAICEAVGRPNMRFVPVKSAEQLAVQAVHRIRSRLVADRVRLVNQVRGLLGEHGIVVAKDLGNLRRALARIVGDNEDRALNPLVRALMGELREELTELDARIAGYDRKIRELYRNSEICQRLGKVEGIGPVTATALVAAVGDRSSFKNGRQFAAWLGLVPKQRSSGGRARLFGISKRGDRYLRTLLIHGARSALGRVRDKQDPRSLWLGKMRQRRHPNIVAVALANKNARIAWSLLTSDSVYDASLSVCAA

SEQ ID NO: 445645 - protein, 439 aa, unidentified
MNSKRIKEKRHFISDKIIIGIDPAKRNHQAMIINELGIPFCKSFNFNNSYSGYNEDLWKKLKTVLKEIDPQKVVFAVEISINLWQKLCHFLHRKGFTVLMVSPLYTKHERPKMDNTYSKTDPKDALAIANCARQGYFNFYREYSNSSEAMHRLSITYDKLKKHMTQIKQRIRSQVELIFPELPIAVDIDTDTARELLRRYLSPEEFINMNIYSETTIIEKVSQRQHGLKTLKRIQEVAANSIGITVSDDLLFAEKLTMFNWLNQYQLLKEQMKLVLDKLIEIAEESPMFAILTSLKGISGITASRFIAELRDPKLFTNYKQIETFAGMSLKLSQSGKFTGYRRITHIGNHRLRAIIYTMAEETKNHIPEIRIRYLKRQMKQSRYKKNVVASASNMLKLIMSMFKDNHIYKYKEESLEELKQLDIKYKEFKNKKKLKKSA

SEQ ID NO: 445646 - protein, 343 aa, unidentified
MQTVTTIGLDIAKSVFQVHCVDADGNVVLRRQLKRRYVLAFFQKLPPCLVGIEACASSHHWSRELQALGHTVRLMPPAYVKPYVKRHKNDAADAEAICEAVTRPNMRFVPTKTPEQQSCLTLHRTRHLFIRQQTAVINSIRAYLAEFGIVAPVGRSGVEALLEVVANANDTRLPEIARACVAALGTQLLGLKTQILAFDRRIMAWHRSNETSQRLDEIPGVGPALATALVASVADPKAFRSGRDFSAWIGLVPKQNSSGGKDKLGSISKQGDRYLRSLFTAGALAVIRYAKIHGTKHRPWLTALLARRPTKVAAIALANKMARMAWAMMTRGERYKEPVALAA

SEQ ID NO: 445647 - protein, 444 aa, unidentified
MIRKVMEAIYQSVGGLDVHEETVVACRRRLISDGQAELEIETFRTTSAGLRELLDWLKEWGVTHVAMESTGVYWIPVWNVLEGHFKLVLENAQHLKKVPGRKDDQIDAEWIAQCMQCGLLRGSFVPGAEVRQWRQLTRHRTKLVDQRTSVVNRIHSVLEQGNIKLSNVATDIMGVSGRAMIAAMSKGESDPARLAALAKGRLKAKFEELTEALDGQLNENQRWMLKRLLEQVGSLEKEIEVYSERIGEQMLPYRRQLERLDTISGVGQRSAENILAEIGPKMDQFPTDDDLVSWGALCPGKNESGGKQRSSRTPKGNKWLKRTLTEAGWAATLEKDSYLAALYRRLAPRRGKKRAIIAVARTILQSAWHILKKDVDYKELGGDYFEHLNEEKSTKYFVKRLEKFGYEVVLKPKQAEKARIEPKPKKIKKAAVERKARKSQEATT

SEQ ID NO: 445648 - protein, 325 aa, unidentified
MKRPVLGIDIAKQSYQVSLRVGKKIERHEFANQPEHFRELSAWLQQHKVKRCHVCMEATNRYWEELANYLYAQGHVVSVVNPARIRDYARSKLLRNKTDKLDADLIADFCITQTPDAWQPLRPEVQELQALMRHWEDLKILRSEVHARISNGNPSSSVHNMLSEHLAFLDQQIAELKKQIENHIAQHPGLRQQRDLLVSIPGIGDLTAAKLLGENIQAFSSTRALAVYAGLNPQHRLSGTSIHYRPRLSKIGNSHLRKALYFPAINAKRFNPIIQTFCVRLQQHDKHKMTVIGAAMRKLLSLCLGVLKSGVPFDPHYQSAALLHP

SEQ ID NO: 445649 - protein, 475 aa, unidentified
MARARKQVRRGAQAEPGKQVSQAVDLVITHRHAAGIDIHAAEHFVAVAPEDVPAGFVNPDRKLPPGVRKFATNTADLEAIADWLKGCGVTTVAMESTGVYWIALYDLLAGRGFEVLLVDPRQTKHAPGRPKTDVVDCQWIRRLHSYGLLTGSFRPGDEIVRWRGFQRQRETLIRYAAQHVQHMQKMLEEMNVKLTEVVSDIVGVTGMKIIKSIVRGERDPLQLAKNRHESCKRTEAEIAAALYGNWREELLFGLQQALELYQFYQKQLRDCEAQIAACLRSMKDKSDARPLPPSLRKRKPEKNEIRFGARALLFRMSGVDLTQIEGISETTALVILSELGIDLSAFPHEKNFVSWLGLCPQHRGSGGKIFKRGTRRGANRVARALRMAAQGCHRAQNALGAFYRRIQGRSGGAKAVVATARKIAERVYRMLKFGQDYVRQSQQAYDQAYQLRLMKSLAKRAAAMGYKLVPETATT

SEQ ID NO: 445650 - protein, 339 aa, unidentified
MKKVFIGIDFSKLKFDAAIYSVDTKAIVATEVFDNEQSGYVDFLQWVKATTRCQKSGMLFCGEHTGYYSGNLSVFLYESGYDMWLVSGLEIKLTQGIKRTKTDRVDACKIAEHAYRYQDKVVLFQPVSKALDEIRELLSYRERLVETRKMLTTSAKEMKRVKDNASCDYIYRDSIEYIKTLNASVRDCEKRIEALLKQDISLKTNYKLVSSVVGIGLVNAALILVATDNFTKFDNPRKFGCYCGVVPFEHSSGTSVRGKTRVSKMANKQLKTKLTLAAQNAVRFDPDLKEYYQRKRSEGKNNWLVLNNVKNKLIHRIFAVVRDGQMYEKQYVHPLKQVA

SEQ ID NO: 445651 - protein, 403 aa, unidentified
MLFCGVDWASDHHDICLVDEGGATRWRGRIAHDPAGIERLRQAIAEHEPDPAQVAVGVETSHGLLVGALVEAGYVVYPINPKAAERFRDRRKPSGGKNDQLDAEVLAQAVRTDRTSLRALLPDSALASEIATLARDRHALVREHTRLLNQLRSALGEYFPAATLAFDLDADSTLAFLERYPTPEAAAKLTAFQIAAFLRARRANRDLAAKAAAAKEALRAPALRARPEIARAKARLVRVVCVQLQSLRPELAAYARELERLLKMHPEGELFLSLPGLGTILASRVLAGTGDNPARFHSAAGLCAYAGTAPIVLQSGRRAVVKARSACPKELRDAVQQWADQARRPARSAWAAQFYQRHRDRGHNHNESLRALGNRRLELLFDLRRKGIRYDEAVHAANIRWAA

SEQ ID NO: 445652 - protein, 315 aa, unidentified
MTDTIAQNVGIDISKAHLDVATFPDGEYCQFSNDNQGHKELGKWLLRFDFDRVVFEATGPYHRKLEQFLNAQQLVYAKVNPRQARRFAEATGKLVKTDRVDALMLARFGALLQPSETIGKTQSIEELSELVVARRALIKDRTAARNRLQCLTSSLLKQQVDLRLQQIKQDIKTIDLTCEKIIKSDDTLLGKAQIISSIPGIGPIATKTMLAEMPELGSMDKRQTASLAGLAPITRQSGKWSGKSYIRGGRANLRHALYMPALVAINHNKELKIVYQKMIAAGKPPKLAITAIMRRLIIIANALLRDQRKWTENIT

SEQ ID NO: 445653 - protein, 369 aa, unidentified
MTDVTLFVGLDVHKKTISVAMVEGSAGAVVRFYGTVTNTPDSLRTLCRKLSQSEQQLHFCYEAGPCGYGVQRQLTRLGHHCDVVAPALIPRKVGDKVKTDRRDAMMLAQTLRAGQLTAVWVPDEAHEAMRDLVRLRAQAMRDLRKTRQQLLSFLLRHGLVSPYGHWTKMHRRWLGELVFAHPAQHLAHEEMLQRIERAEALCDRLKAAIIELVPQWSLAPVVEAIQALRGVSLIVASVIVAEVGCFARFDNPRQLMAFLGLNPSEHSSGTTIRRGAITKTGNSLARTCLVEAAWTYRFPARVTQIIRNRLNGLPEPIRNVAWKAQVRLSARYRKLMAAGKPAPKAVVAIARELVGFIWAIARMLEPKFA

SEQ ID NO: 445654 - protein, 344 aa, unidentified
MDHFGGLDVSVKETSICIVDDTGRIVKAVKVASEPAALLKVLGNPTYRFKRIGLEAGPLSQWLFSALAEAELPVICVETRHMQAVLKAQINKTDRNDARGIAQMIRVGLYRPVHVKTLRSQKLRMLLTHRKLLQSKAIAIENDLRGTLRNFGLKVGMVGKVRFEARIQELVENIPDLAVLVEPLLIVRRVLREQIVILHRRLLAIVREDEVCRRLMTTPGVGPVVALTYRATVDVPARFRKSKSVGAVFGLTCSRYQSGEIDWSGKISRCGDEMMRTMLYEAAQSMMHSKKWSWLKAWAMQIARRRGMKKAIVALARRLAVIMHRIWVDGTEFCWTREQATAAA

SEQ ID NO: 445655 - protein, 366 aa, unidentified
MSLVSIQAGDQPGPQPSTPSAPPCFVGIDVAKAELVIARSHTAQSDTSRKNNANKNTAAPLVPQAIVNRARNIKSWLKTLPESSALIVESTGTYHRLVCDLAYQQGFTVYLINPHWLCSHRKAQGKRAKTDRCDAQLLRQYGEQNHQELRPYQPISPEGQRLTQLLRERSQVMGHLVALRQSLTPLKTNRISPLDIPIEKTAGSVIQELEKLVTQFDLRIQNLVQGQSAWQEQAQRLRQIPGLGPLSVASLLAAFERGEFKSAESFVAYLGLDPVACDSGSHRGQRRISKKGDPMVRKTLYMAATAAMRTKTWKEFAQRYQARGLHHTQVACIVARRMAVTAWCLIKRQSEFIPEKLFRLDPCTQT

SEQ ID NO: 445656 - protein, 338 aa, unidentified
MKLYGAIDLHSTNNVMVVINEHDQVVYQKRLPNDLSLIAQQLSSYRRSLEGIVVESTYNWYWLVDGLMEKGYRLHLANTAAIQQYNGLKYTDDHSDARWLAHLLRLGVLPEGYIYPKQERAVRDLLRKRGQLVHQRTANLLSIQSLISRTTGNSINAQYIRALNIQRVDGVLSNPNHVLALKANLAVMNSADGQIEILEKAVQDRVKLRPQFRFLKTVPGIGPILALTIMLETGEIERFASVGNYASYCRCVGSKKISNGKRKGSGNTKNGNKYLAWAFVEAANFAIRFNSKIKGFYQKKKSKRNAIVAIKAVAHKLCRACYYIIKDQVAFDITKAFA

SEQ ID NO: 445657 - protein, 452 aa, unidentified
MAMKGKRRCDTLPILHPDAAGVDVGASELYVAVSADRDPHPVRSFPTFTRDLHALADWLVQCGVHSVAMESTSVYWIPIYQILEARGLEVYLVNAQHVKNVPGRKTDVSDCQWLQYLHSVGLLRASFRPPGFICAIRSLWRHRASLIQMAAEHVLHMQKALDQMNLQIHRVLNDITGVSGLRILDAILAGQRAPLTLARLCHGGVKSSEDTIAKSLEGDYRPEHLFALRQSLAAFRYYQQLVLESDREIQLQLAELETAATAQPTTPPPTKATAHYARHYEPRTFDLRGELYRVFGVDLTNVPGISALTAQTILCEIGTDVSRFRNASAFASWLGLCPEKKISGGKVLFTKSRRVRSRVATALRMGAQSLHHAKDYLGEFFRRITRKLGRPQAITATAHKLARVVFHLLSTKEAYTDSVFHKSEEETLRRAQYRLRKQAAQLGFQVIPAENG

SEQ ID NO: 445658 - protein, 370 aa, unidentified
MLYLAIDQHSKQITVCVRNADGDTVLSRQVSTRPEKLKAFLQELTEMDREFMAILEVCGFNDWLIEELRRWNCREIVLIHPERPSKRKTDRRDARKLADLLWLNRERLAANEPVHGLRRVYMVTQRERENRHLTALRKTLGQRRTRTLNKIHRIINCHNLIWNYPTKTFQTQAGRRWLEKVELPEFDRLEMDMLLKEWTTWNEQIAQVDEKIVERANHREPGEIVSAAQILMTAPGVSHYSGLALSSRVGPIERFPRPRSLANYFGLTPGCRNTGKATDRLGSITKEGSTIARFILGQLVLHFLKQDPQMRSWYRRIKKRRGSKIARVAVMRRITTVFWHMLTYQEAYSIGGPPPRLRQLNSPTTRSDAA

SEQ ID NO: 445659 - protein, 322 aa, unidentified
METVAFEQVVSRGCGLDVHKETVVATIDGEGLERTTREFRTFTRSLTELKDWLVENKITHIAMESTGVYWKPVYNILEPTGITIWIVNARHVKNVPGHKTDKKDSRWLCKLLLAGLLKPSFIPPREQRELRDLTRYRKKLIRDVASNKNRIIRILEDCNVKLSSVLSNTSGITATKLIDKLCEGKQVTMQDIDEVYHGKIGATKEELWEACNGNITDHHIYLLGAIRSHNRHIESLIEELNQKIRQMLSPYENVLELLEEIPGLSHKTVEDLIAEIGLDMEVFPSEKHLASWVGISPGNNESAGKKKVVEPPTGINRPKQPW

SEQ ID NO: 445660 - protein, 338 aa, unidentified
MNIIRQNVGIDIAKDSFVATYTTLLEKQKLKHHSTKSFINNTKGFKEFLGWTKKYQTTNITESYTMEATGVYYESLAYYLIENKKTTHVLLPNKVKKFGESLDLKSKTDKIDSKILGQIGVERQLEVWKLNTVLYRSLKKLSREREQIIKERSVLKNQIHAENHSAEPLLSTLNRMTSRISFLNEHIDSIDKELKNLVKSDLVLSKKTNNILTIPAVGFITAITIIAETQGFINVRSIKQLTSYAGLDVSLKESGNWKGKPRISKKGNSRIRKVLYMPTLTAIQFNKQYKKFYERVTPKKVNGLIAITAIERKMLGLIYSLWKNDTVYDENHNQGKKK

SEQ ID NO: 445661 - protein, 466 aa, unidentified
MGEMMSKTEQSKFKRADKPKIDWKALEVMHPHAAGIDIGGHEHWVAISPEKDERPVRSFDCFTADVEEMADWLVDRGIRSVAMQSTGVYWMPVFEILQQHGLEVYLVNARHTKNLPGRKSDIAECQWLLKLHTFGLPNNSFQPSDEVRTARTLWRHRGGLVAQASSAIQRMQKTLIEMNIQLHSALSDLSGVSGMAILQAILDGERDPVKLAALADPQVKASKAVIAKSLEGNWRPELVFVLRQEVETYRSCQDRIAACDRQVQPHLQSMAPKVDLKMQPLGPRRKGKRARGNAPKFDLRTELYRITGVDWTRVDGIDVQVAQSVIAEVGVDLNAFPSEKHFANWLGLCPTNETSGGRVLKRRTPKVVNRAKVALRQAASTLIRSKSYLGAQYRRLRTRLGAPKAITAMARKLACLFYRLLKYGQEYVDKGQQYYEARHREQQVRSVIKRAHQLGLQVAQSAGESA

SEQ ID NO: 445662 - protein, 363 aa, unidentified
MKRVKFVGLDVHAETIAVAVAERDGEIRSLGVIPNREDSVRKLVRKLGPVEELRFCYEAGPTGYALYWQLTKLGAQCEVVAPTLVPVKAGDRVKTDRRDALKLARNYRAGDLTAVWVPDADHEALRDLVRAREAAKKDQLRARHRLNKFLLRHGRRPPMGVKPWTVKYLEWVKRDVHFQARAQEVTLLDYLHEVEHAATRIARLDGAIEEAVKLAPPKMRAVIAALQALRGIAQVSAVTIVAELGEITRFSKARQLMAYGGIVASEDSSGERTRRGSITKTGNAHLRRVVVEAAWAYRHRPSVGATLRKRQEAVTGGSGKERTLAAGGLRKSLLVVRGTQEAVWVAVEGHTKENPRSSLCGRS

SEQ ID NO: 445663 - protein, 346 aa, unidentified
MATSYIGADVDSKMTELAVDNGRTIQRHRVSTTIPALKEVLAGIGGRRKLTFEEGPMAQWLYRNLKQDVDELVVCDPRRNRLITDDGDKADPIDAGKLAELLRGRHLRAVYHSDDDQQVLLKQWVSMYHDRVGDAVRQINKIRARCRMHGIRPPRGALRTGAIWEEWIAQIKQHPVAGQLRVLWVGLDANRRQSRMARQMLGRLARPYPVLARWQELPGVGLIRAVTWMAYLDTPWRFACPKKLWKYCGVGLQRKASGTDKRGRPKPGTLKLAYRVNRRLKEAVVGAAWSAIGQGDNVFAEYSGQLLRKGVYEANAWHAVARKLLTVMWGMWKNGSRFNEGCVRGR

SEQ ID NO: 445664 - protein, 450 aa, unidentified
MVNGSGVSRGDRNRNARLVRLRELVPLDNAIVGIDLADKKQMLVVTDHDSKVLARRTFRCKAWDLGSALDWAAERAVAKGFAGVTVSCEPTGHRWRVLGQLAADRGMPFVCVQPMQTSWARRSEDLTFDKTDDKDAVLIARLTAQLRCYGPEPVEETWGRLRHLGARRERLIVEKVAQVQQMRDLLECVWPAALEAARQPFRSHTWAAAVTVVVDRDGGDLERTRRLGWARFERAVRREITRRGGQKPCLRIARKLYSVLADPTGVLAHRRGALERVQLLLEDWADTQRKITDTETRMTAVLDELGLATLAASIHGLSPVGAAAILAETGDPHRFATARALVKHAGLAPRQRQSGTYTGQTRLTGKGRPRLRAVAWRAVWGTLQTNTVYAARYRHLTTRETNKLKPTQAQAVIAAALLRHLHAVITTGRAWDPVIAQHGTGPKQTATLAA

SEQ ID NO: 445665 - protein, 320 aa, unidentified
MMAQDDLVVVGIDVAKDKVDACIRRFKLRQTFPNTLQGRRKLTVWLRKYQVGKAVMEASGGYEREWRNVLHSAGIEVRIVDPRRVRSFALSAGRLAKNDPIDAEMIAWFAETFSQAPGQIPDAAREELAALAKARKALVDVKIRLQAQDEHAAPEPARKAYARVLKSLATEIDKLETAISAKVKATPEFAERAEIIESVPGLAQATSAILIAGMPELGQVSDEVAAALIGVAPYDDDSGKRRGERYIKGGRRWVRNAIYMPCLGAATQYNPVLKAFYQRLLANGKEPKVALVACMRKLIIILNTMLARRQKWNPGRHAMA

SEQ ID NO: 445666 - protein, 429 aa, unidentified
MQNESAPGARGPVFCGVDTHADSHWLCVLDWRGRKVLSRQFPADAAGYEALAGAIAAAGEPACVAMEGTSSYGAGLTRHLASLGMPVREALSPARMQRRRPGQGKCDESDAERAARAAMSGSKLGTPKSQDGWVDGVRCMLAARSGAVKARTSAINTARSLLTTAPEGLRSRFRGMAGPRLMEELPSVRAEGALGAALGALADLWAAARDAALDMERAIEASLEENCPALLAMYGCGPVSAAKLAVAAGDNPGRLRSEASFAAICGACPIPASSGKTVRHRLNRGGDRQANSALHEIARQRVMRDPETAEYAERARARGKSDREVMRCLKRYVAREAYRALMRPHEVRRPEDASGLVAARRAARVSQVRAASILGTSEKYISMLERGQRELKPIRRAYEAWVEAGLPLDWDRQAFEAERKMDSKKHLAK

SEQ ID NO: 445667 - protein, 343 aa, unidentified
MWIIGCDYHARFQQIAFVNQATGECGCKRLEHGNKEAEQFYRSLSGQQVRVGIETTGGTRWLECLWAELGFELWIGDAARIRAAAAHKQKTDKRDAELLLQLMLENRFARIWRPTPEQRDLRQLLVHRHRLVQMRTRVKNQLQAVAMNEGLQRKQRLWSEAGQAEFLSLSLPRWSNLRRSDLLGLLKDLDARILPLDRSLKQQAEQQPEVRLLMTHPGVGPVVAMAYALTLGDPERFASSKQVASYLGLVPLERSSGGRQRLGHITKQGSSLLRGLLVEGARVAARHEPEWKRKYIRLALKKNRSIAAVALARRLAVSLWWMWKLGLDYGRMKESHSHAGSPA

SEQ ID NO: 445668 - protein, 418 aa, unidentified
MKVVYPICCGVDVHKTFLVATIITSQGITPHYSKKRFSTFNNSILQFKQWLIDNNCFDVCMESTGKYWVPVYNLLEDTIRITIANPKWVKAVKGNKDDTKDSKWIGDLFRLGLVPGSYIPDKPIRILREYTRYRSKLVSCKSSEKNRFQNAFTVCNVALDAVVSDMFGKSASSITDYLVSTDSFDPKYCSSLLQRSLKKKADTVVESIQGYQMTREQKARIVMVRSHLEFIQQSIATLDEKLDEMMAPYESAIILLCTIPGVERASAITIISEIGTDMSQFASSKRLCCWAGLTPGNNESAGKKKSVRITRAGVYLKPALVQVAHAAVKSNRSPYYRIKYERICKRRGKKRAIIAIARMILTAVYHMFVTGEVFNPSDLYKIDMPQEMLEKQKEKAIKQAIKLLISNGLIKASDISVA

SEQ ID NO: 445669 - protein, 363 aa, unidentified
MRYAGIDLHKRSLTICIIDKETGETFTTRFSCQEEARIAEFFEKQKPFQAVVEATATYDWLWVLLEPLAERLVLAHPKKLRIIAESKKKTDRFDARNLAWMLAKDEIPEAYRPSPRQREYQHLIQHRHGLIRQSSRLKVQIRSILAARNLDRRNIFSAQGALCIDTLDISEAERFRLRELFSLLELISNHLGTAKREIKKFRDAATEGQKESHAIAKSVPGVGDVVADVVLATLGDVSRFPSIKKVTAYAGVVPGVRQSDTKRRDLRITKEGPRILRWALVEAAWRAVQYSSYWEDIFKKIARAQGRKKAVVAVARRLLGVIYTLLKKGERYVRRKGEVAIGRLNRTKPIPSLEQIAPAAGNA

SEQ ID NO: 445670 - protein, 362 aa, unidentified
MESTPLIAFDQHAATTVAAVLLPGQRTAALHNLTSDSPTILRFVKRLKKTVGTMRCCYEAGPCGFELQRAMTAEGIPCEVIAPALIPRRAGDRIKTDRRDAGQLAVLYRAGALTAIHVPTDQEEAVRDLLRCREDIRTDILRARHRLSKFLLRHGRRFTATKSTWSLRHHAWLRAQTWPLAALAQTHEAYLRTVDEAVARLRTVETQLQELVTLEPLRTRVQRLRCFRGMDDLTALTIAAELGDARRFASARGLMAYVGLIPSEHSSGTKRARGAITKTGNAHVRRVLVEAAWHYRHHPFIGKQLRRRQLGAPTAALLPAWRAQQRLYRRYQRLAARGKPKQHVVTAIARELTGFVWATLIP

SEQ ID NO: 445671 - protein, 350 aa, unidentified
MLIIGCDYHPAFQQIAFADTDTGELQERRLQHREEAERFYRDLAAERMKVRVGMEASGHARWFERLLSELQFELWIGDAAEIRTKRVRKQKTDRQDAQLILKLMLEDRFPEIWVPSWENRDLRQLLWHRHRLVQARTRMMNQLQAVALNEGLRCKKKLFRETGREQLEAFRLAPWASRRRKDLLELLDRLTPTIAELTQAIEQEVEKCPAARRLRTHPGVGPLTALAFVLIIGKADRFQCGKQIASYLGLVPLEKSSGNQRRLGHITKQGSTLLRFLLVEAAQVTARSLPEWRSKYYHLTMRRGRKIAKVAMARKLAVRLYWMMRKEWDYGQLTKFGSYAGKPENRDGVK

SEQ ID NO: 445672 - protein, 297 aa, unidentified
MSQSSTLFIGMDVHKDSIAVADVAQDHGAEVMYLGAIGPRQCDSDQLIRKMPSNAKPLIFVYEAGPWGYWLSRYLSKTGYDCGVVAPSLIPQKPGARVKTDRRDAVQLARLARSGDLTAVYVPKVEDEAIRDRPRAREDAISDLKDAKCRLKALLLRQDSRSVGRATWGPAHLRWLSEVGCPPPAQPIVCQEDVRAVHEQTERLQRLEQERQEHVKAWRLNPGVEALQAVRGVQCTVAVTLVSESGDLTRVDHPRELMNFLGLIPAEYSSGEQRRQGAITNAGTTHARRALVEGAWA

SEQ ID NO: 445673 - protein, 456 aa, unidentified
MPKQRRSKPKSKPDPFAGLPPLNLNAAGIDVGSKEHYVAVPPDRDPQPVRKFKSFTCDLHHLADWLQACRINTVAMESTGVYWIPLYQILESRGFQVYLVNARHVKNAPGRKTDVLDCQWIQKLHTFGLLNASFRPPDEICVLRCYLRQRDNLISSASTCIQHMQKALTEMNLKLANVISDITGQTGLAIIRAIVSGERDPHKLARMKNYRVHANLDTIAKSLQGNWRQELIFSLRQALALYDTYQSKIAECDHQIYAHLATLPNNIDTSEKPLPPRKPSKRPRGNSPQLDLRDELYRISGADLTSIDGIDVVTSHTIISEVGLDMTRWKTEKNFASWLGLCPHNTITGGKVIKRATRHVVNRATHALRMAAFTLLRSHTALGANLRRLVARLGAPKAITAIAHKLARLVYRMLRYGQTYVDKGMEHYEQRFRQQRIKWLKKQAMELNLQLVEQTQ

SEQ ID NO: 445674 - protein, 341 aa, unidentified
MGQAHTIGLDIAKRVFQAHGADASGRVVFRKRLVRAKVLAFFAAQPPCTVAMEACAGAHHWARELGKLGHIVRSIPPAYVKPFVKRHKNDRADAEAICEAAQRPSMRFVPVKTEEQQANGVVFRARDLLVRQRTQCINALRGHLSEYGYVFPQGITHAEAVIAHVEDPDSAVPESARAVLKVLIGTFQALEAQIQALDAEITQRAKADPVARRLMTIPGIGPIAATAITALVPAPEGFRAGRDFAAWLGLTPLQKSTGGKQKLGAVSKMGERTIRRLLILGASAVVRWAGQRGTPAGSWLTQMLARKPKMLVTVALANKTARIVWALLVKGGVYRAPAPAA

SEQ ID NO: 445675 - protein, 357 aa, unidentified
MLSSNVKYIGLDVHKEAVAIAVLNGAGKLVMESIVETKANTLLDFLHGLRGELHVTLEEGTWAAWLYDVLKPHVAELVVCNPRRNALLKEGSKSDKVDARKLAELLRSGMLRAVYHGEHGLGTLRELARGYLTIGKDQRRAMNSLKALYRSWGILCSGKQVYTPRHRQQWLNKITQPGVRRRAELMYQQMDGLSVVRHTVRGELLAESRKHQAVNILRQVPLIGPLRAALLLALMQTPHRFRSKRQLWTYSGLAVETHDSAQHRYVDGQLQRSKKPQQVRGLNQNHNHEMKEIFKSTAMSASRCAGPLQDFYAGLLAKGMKPDMARLTLARKIAAITLTLWKKGEHFDAEHLKSQAA

SEQ ID NO: 445676 - protein, 322 aa, unidentified
MELFHLGIDVAKAKLDCALRSPEGKIRHKVITNDAAGFAQLQAFLSRQHALTLHVCIEATGVYWEPVAEFLAALPHVTVSVINPAQIKAFAASRMVRTKTDKVDAALIALFCHERSPEPWQPPSEAERTLRALVLRLDSLQSMRTQESNRLLVAQSAVQQGITQHIEWLDAEIERLARAIRDLLDQDDDLDDKRRLLDSIPGLGERTIAILLAFYARVSRFDNARQATAFAGLDPRQHQSGSSVCAKPRMSKVGHSFLRKSLYMPAMVALYRTAWGKLFRQRLSAAGKPPKLIIGAMMRKLIHVAFGVLRSGKPFDPAAHGV

SEQ ID NO: 445677 - protein, 319 aa, unidentified
MAKNTVEYEQIVLRGCGIDVHKKVLVATIKGNGIQEETRTYSCFTEDIESLKVWLQDNQITHVAMESTGVYWKPIYNILEGDFEILLVNARHIKNVPGRKTDKKDSKWIAKLLITGLLRGSFVPPKSIRELRDLTRNRKKLVEQITSDKNRIQKILEDANIKLSCVVKDMSGATAVKIINAMISGVDDIDELVKYRHGKMKASKEELASALQGHLTKHHKFMLTFLKDSILSKELLIGQLDEQIEEYLKQQEVELYVDLLQTIPGVGKESAIGIIAEIGTDMDQFPSEKHLASWAGMSPGCNESAGKKKVAARLRAISI

SEQ ID NO: 445678 - protein, 428 aa, unidentified
MNCNTQNAKIASITEKTLIVGIDVGSEIHYARAFDWRNYEYTKKPLEFSNTEAGFQTLKEWVEDIAEKHGKTAVIPGMEPTGHYWFALGKFLQDSGMRPVHVNPHHVKKSKELDDNNPNKNDRKDPKTIAALVNEGRFSYPYIPTGIYAEIRSLSNLRFQTQEELTRIKNRIARWFAIYFPEYKDVYGDYKAVSGRMVLKEAPLPEDIQKLGVEGVNKIWRDAKLRGAGMKRARTLVSAAEHSVGSKEAPGAARMELKNLLNDMDVYTSRLEELLLKIEEKLKEIPYVDKLMGIKGIGMVTVSGFIAEVGDIGRFDNPKQLQKLAGYAIVANDSGKHNGESRISYRGRKRLRYVLYEAAISLIGKNAEFKAIHEYYRTRKENPLKKMQSVVAVACKVLRVFYTILTKGVDYDAGKLMGDIRRPQVQAA

SEQ ID NO: 445679 - protein, 519 aa, unidentified
MRAGVLSLQSTPIRFGFPRAVPRAASFLLLLKGKRGGVAAKTKDAKTGPDRGSAAAAAEHGGDGTEVAEELVQVVERAAAIDVAKGSGMVCTRVPGSRPDRRRQKVWRVEATYAEVIALMDHLRCEGIQRLVLESTSDYWRIFYYLAEAAGLEVWLVNARDVRHLPGRGKSDRLDCVWHCKLNERGMLRRSFVPPEPVRDLRALTRTRARLAQDQARHQARVEKILEDALLKISVVISDLFGTSGRRFLDALVAGERSPAALAALGDPRLKATRQELEEALTGRFRDIHALEISTHLRLIDAINAEITRLDEAIGQQLAKVPRTAPCCTSCGLAGGGHAPGCADEGTALLGLAERLDEVTGIGAVNARAIIAELGTDPSQFPTPGHAAAWARLTSRSRQSGESARPGRTGKGNRYIRGALGQAAMTAARTDTRLGALYRRIARKRGKQKAIVAVSRVICEIAWILICDPGARYQELGPDYYRPRSPARQTRDRIREIERLNPGKKVILAPADAEAGTAA

SEQ ID NO: 445680 - protein, 341 aa, unidentified
MNIKRIGIDLAKQVFQLHGVDSQEKPVLRKQLRRNQMLTYFAKLSPCLIGIEACSSSHYWARELQKLGHTVKLMAPQFVKPYVKGNKNDANDAEAICEAVARPNMRFVAIKTIEQQDIQAVHRIRSGLVQQRTAKVNQIRGLLAEYGIVIERRVETLRKALPLLLEDAENGLSFDFRALLQSLQQDLITLDDRASEMDKKILQLANSNSTAKRLQQIPGIGPIIATALICAIGDGKQFKRGRDLAAWLGLTPRQHSSGGKDCLLGISKRGDAYLRTLLIHGARAVLRVADKKDDPRSRWLQNLCSRRNKNIAAVALANKNARIVWALLTKGTDFLPEGKLA

SEQ ID NO: 445681 - protein, 341 aa, unidentified
MTIGIDLGDVWSHYCTLNEDGEVVDRGRFRTTPSGVEKWFKDVPRARVAMETGTHSIWVSEQLLEMGHEVIVANVRELRAISHSDRKSDTVDAEKIARYARVDPEILRPVSHRTVAQQEALTLIRARNLIVRLRTAAVNSVRGLAKPCGYRLPASSTLCFAKRCMAVLPPGLAQALGPVLEQIAAMTVKIQQYDRTIKQLTETEYSVTQALLQVYGVGQLTALTYVLTLGSKERFKRSRDVGCYLGLRPRRSQSGDRDPQLGITKAGNIYLRSLLVECANHVLGPRGRDSTLRQWGLHLASRGGRQSHNRAIVAVARKLAVLLHRIWITQEPYIPFYAVAA

SEQ ID NO: 445682 - protein, 357 aa, unidentified
MTIIYSGIDVSKDKLDVALTFDGNKILSTATFQNSILGFQKLSAWVEKHSKIATTAHFCIEATGIYHEEIAEFLCDKENFIVSVVNPFQPKSFAQSRLLRTKNDKVDANLLASYCAISKPKEMVKTSEELKTLRKLVRTLNYQIVERSKYKTKLHSVKDDYAAHVVNATIIFFTDSIANIEEKIKCHIRECSELKRKTDLLKSIISIGDRTAWQIMAEMKDIETDKINAKSQVAHSGLAPKEYQSGSSVNGKPRICRTGNKKLREAFYMPAMTAMRYNKPMKEFYERLVSKGKPKKVALIAVMRKLLVTAVGVLNNGVPFDENWLEKRKEIKNQEQNFHKNFALASWLLTYNLLLTL

SEQ ID NO: 445683 - protein, 393 aa, unidentified
MTATRNRKPSTQPRSQPLYVAFELGESNWKLAFTIGIGQKPRLRGMIARDLPRLQQEIAKAKKRFGLPDDAPVHSCYEAGRDGFWLHRHLTAQGIDNKVVDSASIEVNRRKRRAKTDRLDAVKLVTLLLRYHNGEHKVWSINRVPNITDEDARQLHRELEALKEERTSHVNRIKGLLASQGLESPEVKKDFADWLQQARLWDGSKVSKELHQRLLRELERWQLLERQIKDLETERSRRIRRDDTPHVDKIRTLLNLKGIGPNGAWLLVYELFAWRSFTNRKQLGACVGLTPTPYQSGGSHREQGISKAGTRRLRHMLVELAWCWLQWQPDSDLSRWFAYRFGLGGRHRKRGIVALARRLLIALWRWVEQGEVPKGAKLADWRTKVKGSSKAAA

SEQ ID NO: 445684 - protein, 400 aa, unidentified
MIAAVINADGVIRMPQPNDLSRSRASFEQDATIVAVIEMSQSSWLIAGTVPGIERQPLKKIVPDAVALLRLLQRWRDEATRGGRCVARIAVAFEAGRDGFWLARWLMRHEIESHVIHPTSVAVSREHRRAKTDRLDTAMLMRVFLGWLRGERGHCGMVAVPSLEEEDARRPSRERENLVSERTRIVNRMKAALARLGIRGFKPELRKAAQQLESLHTPEESPIPPNTLDELRRDLARLAILRGQIIAIEQTRLERLEQAPHTGANAMIRLLASVIGVGIETADMLVREALSRGLRDRRAVARYAGLTGSPDESGTRRHEKGLAKSGNARVRRGMIQLAWRFLMFQRDSVLAQWFRARTEGVKGARKTTMIVALARKLLIALWRMVTTGEVPQGVVLRQPT

SEQ ID NO: 445685 - protein, 341 aa, unidentified
MEQYIGLDVSMKETAVSIRREGKRIWRGKCASNPAALAKLVRKRAPHAKRVVFETGPLSVWFFHALKSEGLPAICIDARHAKAALDMAPNKTDANDADGLAHLAEIGFFREVRVKGFESMISRTRVAARNRLVRISVELSNQIRGLMKTFGLIIPSAKGGKFDEHVCRSLDGRNDLAPIMMPILEAWRSIRIRAAELGRQLLADARQSQACQLLMSIPGVGAITATAFTSAIEDPANLKKSRSVGAWIGLTTRRYQSGEIDYDGHISRRGDAHLRGLLYEEATVIMTRAAAESDLRSWGLKLREKIGFKRAAVAVARKLAVIMHAMLVSGEFFERKATATA

SEQ ID NO: 445686 - protein, 371 aa, unidentified
MKQFSKFVGLDVHKATIAVSVAGANGGEVRYVGEIANTSEAIEKLVRQLRKGDAHLSFCYEAGPCGYGIYRQLSDLGWDCQVVAPSLIPRKAGERVKTDRRDSLMLARLHRAGELTAVWVPDDAQEGLRDLTRAREDMKHLQRQAKQRLSAFLLRYGKSYSGKSNWTQAHYRWLEQQKFGQPVQQIVFQEYVDTVKALSKRIDGLDTQLERVANESVFWPVIEGLMALRGVNLLTAMTVVAEIGDLRRFGSAPQLMAYLGLVPSEHSSGATKSRGAITKTGNAHVRRVLVEASWTYRHPARKTAHLQRRAERTSEAVQDIAWKAQKRLCARYRLMEGKGKLKVQACTAVARELTGFIWAIGQALPQPAPNR

SEQ ID NO: 445687 - protein, 341 aa, unidentified
MPAIGIDTHKRTLAACAVDEVGAVINERMFSCDPAGFAELAAWAGGIAPEATIGIEGSASYGAPVAHHLVAAGFVVREVPPHLSRRERGRSRRPGKSDPGDALAIARVTLREPDLPPVRLEDRSTELGLLADARDDLVHAQTRARNRLHAHLVVLLPGYGRTVAHLVSGRQLLAIERALDGQAGVRAELARALLAEIRDLGRRAVELERSMTALVAGHPLLGLPGVGPLTAARLVAEAGDVERFRSPAAFAMLAGVAPIPASSGEVQRMRLNRGGNRRLNRALYTIALSQAWHHEPAKAYIARKRAGGKSWAEALRCLKHRVSRPVFRLLQAGQSEWARAA

SEQ ID NO: 445688 - protein, 359 aa, unidentified
MNAIHYIGLDVHKKTISYCIKTADGQIVQEGTLEAERTVLRRWAKGLRQPWHGAMEATLFSAWIYDTPKPYAQQLYMGHPAKMKAITAGKKKSDRIDARTIADLVRCDLLPKCYVLPPELRDLRRLLRYRNMVVQQSVRMQNKMAGLLMESGTAFNKEKLHGKKYFTDLIKSLREVPESVKDLLRMSRGAMEMFESTQKQLIQRLLSEPALEQRVERLMSIRAVGPITALTWALEVADPHRFSSIADAASYCGLTTAFRSSAGKQQRGPISKQRNAWLQTMLIEAAKLAPRWNPQLAALYAQQLKRGHPNRATLQVARKLVAYLLAVDKSGQPFQLPTPPMLPVTAKTKKKKVALARAA

SEQ ID NO: 445689 - protein, 327 aa, unidentified
MQGKVESTISALAVYAGIDVSKDWLDVYLHPGGQSWRVANTPLGLRRLRRHLDELGLQLERVVLEATGKYHRLAFRTLSAWGYGVVVINPLRARLFAEACGVLAKTDRIDARLLAVMGHSLAPQPNQPVPQQLEQLQELVNAYTAARTEAIALGNRLEQATVSFLKTELRGRLTSLKGHVQRLEAKIEQLIKADPGLAGRYAILLSIPGIGAITAAALLAGLSELGRCSAKAAALLAGLAPIADDSGRRLGQRHIRGGRMQVRNALYMAALSAARYNPDLKAVYQRLRNAGKPPKVALTAVMRKLVVLANTLLTQNRRWEPNQPETA

SEQ ID NO: 445690 - protein, 400 aa, unidentified
MDERQRFKWFLGIDVSKETFDVCCIPSHGERLFNLSASMDRKGFEELIKQLSTLSIPQESVVVGMESTACYHVNLYSFLISLGYSVMVINPLLISNFVKLQLRKTKTDKKDASVIAQFLLLNRDSLSQTILSSDISDLRDLSRQRESLVDQMSSIKSEIKRLLTMTFPELEHISGIFTKSMLRLLCHYPSAASIKQAKRSKITKVLIPGSYGKQTDVSVDRILKAAQGSIGTSSATKEIILKQKASLLIQLGEHLQELTDILIGLCQGKIQGEMDILTSMKGIGEKSAVNFLIEIGGDIKQFESHKKLIAMSGLDPALYQSGKIDRKGRISKRGNRHLRRVIWLMATKVIQFNERFKQYYLKRIKDGLPYKKAVLATAHKLIRVIFAMLTNKTLFNPKMN

SEQ ID NO: 445691 - protein, 373 aa, unidentified
MPKYSTAFGMDVHLRSTTVCALDADTGEAVTRRFPGNPWGEIAGWMDGFPGPSLAAYESGYLGFAPQRELAGLGAECVVAAVSKIPRSAADSASKNDRNDAARMAKAMLAHDISPVWVPSPEVEGIRDLAGAYDGATARLATAKQRLLAFLARRGFVYGGTTPAGNPRKYWTYDFLRWLDKVRPEDDGGVRTLAAPRNEVEAAAEARADLLSEYRAAVDASPIAAEVAALQSIKGCAFALAAAFSAEVGDFTRFRSGRQVTAYFGLAPSQRSSGDSVRLGGISGAGNALVRKLAVEGSWCYAAARHQPKLMPRDTGVPLEIRMHGRKGSERLLRRREEMLARGMPAAKANAATAAELVRWLWALGMMCREGAE

SEQ ID NO: 445692 - protein, 371 aa, unidentified
MKYTQKFVGLDVSKEKIAVAVADEGREAPRFVGSIPNNPGAIRKLIKQLGDPQTLAFCYEAGPTGYELYRWITGIGAFCEVIAPSLMPRRPGDRVKTDRRDALQLAQLYRSGELTTIYVPTREDEALRDLVRAREDAREDVHRARQRLLKFLLRLHIHHPVHLKKRWTKVYRQWLEALTFEHPAQQRTYDEYLHAIYEVEQRQKRLEHEILNQATTGAKAEMIQVIQSLRGVARLTAVTLVAEVGTFTRFHSPAQLMAYLGLVPREYSSGQSVKRGGMTKTGNRHMRRVIVEAAWSYRHRPAVKRDLAERLEGMSGEVQSISWRAQERLHTKYKKMIHRGKPKTVAIGAVARELVGFLWAVARVVEQPAGI

SEQ ID NO: 445693 - protein, 429 aa, unidentified
MSYRIAGIDVHKKMLAVVVSDVEIEGEFQFERRMFGSNPDQLRALVEWLQQQKAEEVVMESTAQYWRPVWETLERYWKPTRQKREGARSTSGTLHLAHAQSNRGRRGRKKDFLDAERLVKRLVARELNLSFVPDAEQRLWRTVTRRKCQLRQNRVRLQNRVESLLEEAHIKLSSFVSDLLGLSAQRMLRALADGETNPAALAALADRKLHATPEQLCDALGACTELNVVYRRLLNMMLGELRLIDEQIGQLNQEMANLLSEHQDAVQRLAEVPGLGVDSAQQIIAEVGATAATFPSAKQLSSWVGACPGEEESAGVNYSHRSPKGNRNMRRILNQAANAAVKSKGTIFEIVYRRMVLRLGHKQTIGVVAHRQCVLIWKVLHDGVRYEERGPAVNKESKQRRTARMIRQLRSLGYRIDPPNPQPRQAPAQ

SEQ ID NO: 445694 - protein, 358 aa, unidentified
MKTNTNTHGIIKTQIVTKAKYIKLGIDVHADSYRVVRQIDHATPQPAQKFTPKDFLVWVKKQLEQAEAVHSCYEAGPLGYSLHRTLLTMGIHNVVIRPQNWDELHKGVKTDKTDALALAQRLDRYVQGNLTALAVIRVPTPEQELARSQSRQREQLLSHRLRLEAQGRSLLLFNGLRIRGRWWQASHWEDVKPQVSEALLELLTVLRDLLLAVQTQLETATARLEKAATTQPRGVGALTSQVLEREILSWDRFKNRRQVASLTGMCPGVRSSGVKSQSGPITKHGNRRLRTALVELAWRWVRFQPDYKPVKRSWTVLSSPKSSGAAKKKAIVAVGRHLAIDLWRLNTGRTTMEKLSLR

SEQ ID NO: 445695 - protein, 326 aa, unidentified
MEHELHYIGIDTAKEKLDVDVLRPDGRHRTKKFANTTKGHDELVSWLKGHKIDHAHICIEATGTYMEPVAECLYDAGYIVSVINPALGKAFAQSEGLRNKTDTVDARMLAEFCRQKRPAAWEAPHPLERALRALVVRHQALTDMHTQELNRTETAREVKRPGIDAHLLWLEAELKRLEKQIKDLTDDDPDMKHRRKLLESIPGIGEKTSAVLLAYIGLKNRFAHARQFAAFAGLTPRLHESGSSVRGVSRMSKAGHVSLRRALYMPVMVAASKTEWGRAFRDRLAANGKKGKVIPGAMTRKLARVAYGVLKSGVPFDASRHNPVAA

SEQ ID NO: 445696 - protein, 434 aa, unidentified
MTITNTAYVTGEMEFAALIGVDWGDASHAIALWDTATGGIESITLRHTPEDVHTWLEALEQRFGGRPVALALESSKGPLVHALLHVPWLRLYPIHTSTSARYRAAFRPSGAKDDMPDAHVLLDLVRHHRDKLKPLCAEDEATRRLDALCQARRAAVDQRTQLTNQLTSTLKGYYPQALLWAGEKLHQPLALAFLEKWPDLLALKAAREGTIRKFFYAHNVRRAESVEQRLQAIASARALTTDEAIVEVSVRMMQMLVEELRVVQKHITRFDQAIREVFAAHPEAELFRELPGAGPALAPRLLTVFGTDRSRYPDADSLLKYSGLAPVKEKSGRREWIHWRWNAPHFVRQSLIEWAGQTVMFCDWSRAYYQRQKKKGVGHWAVIRALAFKWVRVLWRCWQNRTPYNEARYLEALKRRGVSVSPDISHGNFFSKPT

SEQ ID NO: 445697 - protein, 339 aa, unidentified
MEKAATIGLDIAKQVFQVHGADKAGRAVLRRKLSRNDVIRFFSEQPPCLVGVEASGSAHHWARVLSGLGHTVRLMAPQFVKPYVKSQKNDANDAEAICEAVGRPSMRFVPQKSVEQQDLQCLHRVRSRLVANRTQLINQVRGLLAEYGIVLPQHPGQVRSGLPAVLEDAESQLTGFGRVLFRSLYEELAQLDEKIAAADKRIQIAFQSIPDCRRIAAGEGVGPLIATAIVAAISNGHAFENGRQFSAWLGLVPRQNSSGGKSRLLGISKRGDPYLRTLLIHGARSVVYRAKAKTDQRSLWINDKQQRLGTSKACVAVANKNARIIWSLIAREQEYRRAA

SEQ ID NO: 445698 - protein, 361 aa, unidentified
MTGSGLSAVAARVGAVVPAAGLVKVGVEAAGHYHRPVLDHRWPDGWEVLELNPAQVAEQRRVQGRRRVKTDVIDLEAITELVLAGYGRVVTDRDVVIGEVSAWARHRRRRVATRSATKNQLLGQLDRAFPGLTLALPDVLGTRIGRLVAAEFADPARLAGLGVNRLIRFAATRDLQLRRPVAERVIAAAHDALPTRDAVIARRILAADLVLLADLDIQIDAAETALESLLPRSPYATLTSVPGWGVVRVSNYAAALGDPQRWPGPRQIYRASGLSPMQYESAHKRRDGAISREGSVALRRALIDLGIGLWLNDQAAKNYARGLKDRGKHGGIVACALAHRANRIAYALVRDHVTYEPPRWA

SEQ ID NO: 445699 - protein, 326 aa, unidentified
MNDFSKYVGLDVHKETIAVAVADANGGEVRYYGEIPNTPEEVVKLVRRLRKEGARLSFCYEAGPCGYGLHRQLKDLHQDCQVVAPSLIPKKPGDRVKTDRRDSLTLARLLRAGELTSVWVPDEAQEALRDLTRAREDMKHLQRVAKQRLLAFQLRHGKNYPGKKNWSQAHFRWLETLKFDQQVQQIVFQEYIDTVQALTKRVAIFDAQIETAGVESAFSLQIEGYMALRGIDRLTATTIVAEIGDLRRFPDAPALMKYLGVVPSEHSSGATRSRGGITKTGNGHVRRVLVEAAWTYRHPARKSPLLQRRAERTSEAVQEIIRAQAS

SEQ ID NO: 445700 - protein, 341 aa, unidentified
MENVSIVGIDLAKRSFQLHGAAADGSLVFRKKMSRPQLTAFLSELPKGVVAMEACATSHYWGREIGKLGHETRLIPPVYVKPFVKRQKNDANDAEAIAEAASRPTMRYVSVKSAEQQAQGMVFRTRDLFVRQRSQLVNALRGHLAEYGVVVAQGMVQFRRMIASFDEVAVDLPAQILSLCQAYIDQIALFDERIVVLDHEIKGRAKTDEATSRLMTIPGVGPMCATTIQAFAPPMEEFSNGREFAAWCGLVPRQKSTGGRQILGRTSKMGQRDIRRLLITGAMAVIRWAIRKGPPPGSWLAKMLARKPRMLVATALANKLARTVWALTTTKENYRIPPLAA

SEQ ID NO: 445701 - protein, 346 aa, unidentified
MGKPIINLSSVTTVGLDLAKHVFQVHGVDASGCVVVAKAIRRNKLLEFFASLPPCLVGLEASGSAHHWARELMALGHEARMMPPAYVKPYIRRQKNDASDASAICEAVTRPSMRFVGVRSLMNQAALMRHKAREMLVTQRTQLLNGLRGHLTEVGVIAPQGLRCARELAELIEACDETIPFEVCEALAPLVVQLRNLDEAIAQLDRIIAKLAQKDETARRLMSVPGFGPITASAMAATIQDTSSFAGPREFAAYLGLTPKQNSSGGKPKLGRISKMGNRYLRKLLVVGAHAVLFHRKPHTDPLRMWAKKLIEKKPFKLVAVALANKMARIAFAILRGKTVYREIPA

SEQ ID NO: 445702 - protein, 351 aa, unidentified
MQIVGALDVHRRQITHKTLDLATGDVRRGRLRPANRESVREWLERFAGCEAEFALEGTTGWRFVAEEIERAGQVAHLADPAETAAKRGSKRRAKTDRADCDLQLKLLLAGELPESWIPPAHILELRTRVRTRKTLVDQRSAWQLRLTAQLFHQGVPAGINARTRAGREALARVELSPTGRELVSIALRMIDVLDVELVPLDRELRAFAARQPGCRTLSERLYGVGPVTATAILAELGDCRRFTSSDDAVRHAGLDVTVYQSDSKRAAGHLSHEGAPVLRWALYEAGQQATRQTSPDHEYFLQVRERTNHKSASLSIARKLCRRAFHILRELGEEALAPVDAHVEEAIHAAA

SEQ ID NO: 445703 - protein, 412 aa, unidentified
MDVMYPCCCGLDVHKKTVVACLITSAEGPEPVKEIRTFRTMTADLLALADWLQQAGCTHVAMESTGVYWRPVYNLLEGQCALLVVNAQHIKAVPGRKTDVKDAAWIAELLRHGLLRGSFIPSKPQRQWRELTRYRSTLVQDHARTLNRLQAVLEDANLKLASVVTDISGVSARAMLEASLAGQRDVEALADLARGRLRAKRDQLKEALEGRVTAHHSFLLTEHLSMLEYLDEVIARVSGAIDQRLTADQEAIALLDTIPGVGQRAAEILSAEIGTDMSRFPSAKHLASWAGMCPGHHESGGKRLSGKTRKGSRWLRQILVEIAHVASKTKHTYLAAQYRRIAARRGKKRALIAVGHTVLTIVYTLLTRKQPYQDLGTAYFDQREQHRVERRLVQRLERLGYEVALQPKALAS

SEQ ID NO: 445704 - protein, 421 aa, unidentified
MKKACTGKVKFVKDSTLIVAVDIGMEMNRGYCTTPDGRDIKPFKFDNTREGMDKLWGMVMASKNRFQCEEIIIGYESTGPYGEPMVHYLMKKPVMLVQVNPMHTKRVKEISDNSPLKTDDKDPRVIADIIKLGRTLSIVIPEGDAAYLRRLNNSRERHVGERTALLNQLQQLVFLLFPEFKKVFKNINCITPLYLLKKYPTPEAISVLDKDTLGKEMRKQSRGKFREQHAEMLIRFAKNTVGIKEGVLGLSMDIRHILAQLEMLNTLIDEIENEMEIALGRIPYSSKLLSIKGLGVVSVAGIIGEVGDFKKFQTRGEIMKLAGLDLYEISSGKWKGRRKISKRGRSLLRKILYYAGIQTIRKNGILHDYYTRLTDGGMKRMKSLVAVSRKLLGIIYAIVRDDSEYLVNFESIKRQVIKKAA

SEQ ID NO: 445705 - protein, 389 aa, unidentified
MYYVGIDVSKYKHDCFIISGDGIIIHDAFTFTNDIAGFTSFNCVLSKLGDSTNIRIGFESTAHYALNLELFLEKCHYTFMEFNPVLIANYKTSISLRKTKTDAIDCEYIARWLMTVEYKPHPTGFYHTYSLKSLTRLRDSLVRQRSLYIVKITNVLDHSFPEFKPFFYNKFSATALYILDHYPSAEKIGRMNSASYEKIRCISRGKFTPQKFLDLKSLAKNTVGQSNDIFEAELKSLLNQYNQGVAEVDALEKKITCLIEEIHPRYMSITGIGPISAAIIYSEFGSLTKYSSPNKMLAFAGLDPGYYQSGIAEHRGRMVKRGSSHLRYALYNCCLPLIRYDMTFASYYAKKRAEGKPHKVAMAHVAKKLVRIIFTLERKDIDYNPNLIR

SEQ ID NO: 445706 - protein, 345 aa, unidentified
MAEFIGLDVSKEETSFCVMDKAGSILSSGKALSDPDALFQALKETTLCPERIVLETGTLSNWLARGLREYGLPIDIIDARQAHAVMKLQHNKTDANDARLLAEIARTGFCRAVSISSEKAQQKRILLKSRQHLIRLRRDTENAVRGLLGALGIRFPKGSGKLLKRVRTALQGKSDLSAMIEPLLDTIENARLQTDRLDDQVLQHAEQSQKVRLLMGVPGVGPLTALGFVATIDDAGRFKKSRNVGAYVGLTSRRYQSGEMDYSGRISKKGNAMLRSFLFEAANSLLTCVRKAHPLKDWARRLRKRSSHKKACVALARKLAVIMHKMLITGEPFRWPEKKMETIMA

SEQ ID NO: 445707 - protein, 349 aa, unidentified
MRYFQPAAETRFYAGVDLHARSLFLVVLDHTGQTRYARNLPAAPQPFRKAIAPFRDGLVVACECMHCWYWLADACRDDNIPFALGHAWGMKAVHGSKTKCDRKDAEAIARLLKGGNFPLAYAYPKERRGLRDLLRARLRLVRQRAELYGHVHTARRQLNLPPVSNDVKYKSKRAAILTDIDDACVRRRVEADLSLLEPLDTTIRRLEKDIEIAARQHYATEMAVLQSTPGVGIVIALTILLEIDTLERFDTRQQFCSYARLCGARQESAGKKVGTGNAKQGNAWLKWAFSEAAVLGAQKNERIGKYLDKLSSRLGKAKALSALAHKLGRAFYHMLHKKEVFNIDKFLRH

SEQ ID NO: 445708 - protein, 309 aa, unidentified
MSNITRVGVDLAKNLIQVHAVDAAGKVVTNRALKREKFLLWCADLPAGCLVAMEACSGAHHWCRQLRERGFDARMIPAQFVAPYRIQGKSGKNDANDAAAVCEAASRPHMNFVPPKTLDQQGMLCVHRLREALKEERTACINRIRGLLAEFGVVLPQTPAILRQHLNDILEDASNDIAGMARLVLQRAQEHWRELEKHIQWCDERISAHQKNDEQVQRAAELKGVGPITASAMVATVGDFKQFKNGAQFGAWLGLTPKQNSSGGKTSLGSITKRGSKYLRNLWAVMTGNKRYDAHHVSIPHAGAMPAAA

SEQ ID NO: 445709 - protein, 312 aa, unidentified
MIVVGVDVSKDTLVAVAIDKSIRIKQSFTVKNNKESIDKWLNALPYKKLLLSCEATAEYHRVLALLALSSKIPLRLLNPIVTKQYTKATVRKRKTDPQDALTIAKLALAGEGRLISTQTFHIAKTHERTAIKLTHMKQRLLLIQQHVQEVDPDDTASFEELQVCIDTIEQSIKAFRKKAEEEVDSKLVKLLCSIPGVGETIATVLLAEIGDINQFKSDKALVAYAGLDPKVKQSGGRLHHNTHLTKRGSPYLRQMLYTGASIAQRHDKELKAYYEKKRAEGKRYKEATIAVSRKLLNRVYAVLKRQTPYIPG

SEQ ID NO: 445710 - protein, 407 aa, unidentified
MEVIYTRCAGLDVHKETVVACVRIAEGGTPRQEVQTFPTTTSGLLALADWLESFGVRQVGMEATGVYWKPVWHILEGHFDLVLANAAHVKNVPGRKTDVNDAMWLADLLAHGLIRASFVPPVAVQELRGLTRTRKQFVRERSAHVQRIEKVLEDANLKLGVVLSDIMGKSGRAVLDAIVAGESDPQRLLSCVSQRVKAPREEVREALRGRIRPHHRFMLKLHLDHIDALDRAIAAIEKEVGQQIEPFRAAARLISTIPGMSDIASQVVIAEIGIDMSRFETPGHLLSWACLCPRNDESAGKRRSTRLRRGGHWLKTTLVQAAWAAVRVKGGYLQALFHRIRARRGAKKAIIAVAASMLTAIWHMLRDGTKWQDLGANHFDRANTQKTANRLIRQLQQLGFNVQVTTG

SEQ ID NO: 445711 - protein, 403 aa, unidentified
MNNVAGIDVSKGKSMVSVLRPFGEVVAKPFSVGHTGSELKELADYLKSLDGETRVVMEHTGRYYEPVARFLHDEGVFVSAVNPKLIKDYGNNTLRKVKTDKADSRKIARYGIDNWAELRQHTPMDTIRMQLKTLNRQQSLYTKTKTMMKNNLIALLDQTYPGVNALFDSPVREDGSQKWVDFATTFWHVDCVRNMSLAAFAERYRKWCKRHGYNFSQSKAVEVHAGAQDLIAMLPRDALTKTMVRQAIDALNAISASMERLKAEMQALAAQLPEYPVVMAMHGVGDSLGPQLMAELGDVTRFTHRNAITAFAGVDPGADQSGTHEAKSTRVSKSGPPELRRALFLVMDCLLKTQPQDDPVYRFMDKKRAEGKPYLVYMTAGANKFLRIYYGRVKEYLASLEGN

SEQ ID NO: 445712 - protein, 351 aa, unidentified
MNYIGVDYHKKYSYIVVKNEDGRVGGRGTVNNTKEEVQRFLEPYRPGMAVVEATRNWGLIYDWLDEVLDDVTLAHPLKVKAIAEAKIKTDKISADILANLLRADLLPRAYAPSKQTRELKNILRQRMFFVRVQTMMKNRLHDILDRHPEVLSQAPEASDLFGAAGMQWLSQTALSGEDNKLLTSELGFLKFLKEEISQSNGTVKKLAKEDRRARLLQSIPGIGPFFSVLILYEIDDISRFRDEKKLCAYAGLVPSTHASGGKVFHGRITKTGSKWLRWAAIEAAQTAVRSDSEFHAYYQRIRIRKGTNAAKVATARRLLTIVYRLLRQGRFYEGRTTNTRKIVTPAALVTD

SEQ ID NO: 445713 - protein, 452 aa, unidentified
MTKKKIALDVVNPFAAGIDVGSRSHYVAIGQTDEDVREFGVYNEDLIALAQWLLDNEIKTVAMESTGTYWQSLFATLQSMGLEVLLCNGKFTKNIKGKKTDVQDCQWIQKLHTLGLLSGSFLPDEATEQLRTYCRHRANLLGQAADTSRKMQKYLRLMNLRLDVVVKDITGLTGLAIIDSICKGESNPENLASLRHGNCKKSEKEIAKALQSNGRKDLLFALTHEYQLYLLFQKKITECDNEINKLLSEQISNDDNKKEHHIDKKIYKRINKNTPDININLLSYQYFEGVDLLAIEGISHSTVLTLMSEVGPGIHKFETAKQFASWLRLAPNNKISGGRILSNRIPKGSNRLKIALRQAANAVGNLKDTALSNFFKRIAFRKGRTSAISATARKLAVIIWNMITKKLPYKTDTQYEFLDQKRKRKVMEMKKLIHKFDITPDDLGLQLNINNL

SEQ ID NO: 445714 - protein, 362 aa, unidentified
MNEGSTEHIEMTAGPDLGDKYSYLYVLEADSGEFVEEGRLRTTPEDLRRRFDSEQKLKVAIEVGTHSTWVSRLLEGCSHQVLVANSRKIRLIYGDKRKTDKLDAQKLARLARADPELLYPIEHRGEESQAHLALIHSRDALVRSRTQLINHVRGTVKSFGARLPKCSAESFHRKVADALPSELAEALQDVVATIGSLTERIRDYERRIERLCEQSYPQQTGLLRQVAGVGALTSLTFVLTLEDPDRFEKSRTVGAYLGLVPGKDQSGDRDPGKRISGEGDEMLRRLLVGSAHYILGPFGPDTDLRRHGEKIARRGGKNAKKRAVVAVARKLSVLLHRLWITGEAYEPLRNARLAGTPGEEVA

SEQ ID NO: 445715 - protein, 354 aa, unidentified
MTKKEASMRFYTLQHQHYCGIDLHARSMFVCVINQAGEILLHRKLDCDAAELLKVLKPYRKDLVIAVECLFCWYWIADFCEDQGIPFVLGHALYMKAIHGGKTKNDKIDSHKIAALLRGGTFPQAYVYPRKMRPTRDLLRRRSFLTRKRGELFAHIQNTNTQYNLPVLEERARKTKDRGAIIEHFEDPTVQMSIASDVELLKSYDEVIRDMELYLVHEVRKDHNADFFLLRSVPGIGEILALTLVYEIHDIKRFPRVQEFLSYARLVKGTHESAGKKKKSTGGKMGNVHLKWAFSEAAALFLRGNAVGKKYFARLEKKHGKGKALSVLAAKLGRAVYYMLLRSKPFDPKRFATV

SEQ ID NO: 445716 - protein, 344 aa, unidentified
MGEITTIGVDLAKNVFQLHGADAQGRVVLRKQLKRAQFLSFFVNLPPVLVAMESCSSAHHWARELSKLGHQVRLIAPQFVKPFVQGSKNDVSDAHAICEAAARPTMRFVAIKTIEQQSTLALHRARQGLIRARTAQINQIRALMGEFGWVSPQGPHQLLANLPAQLEQACETLPAVFVELIELLRGQLLGLNERIEAITKLIVQAISHDPVAQRLQTIPGIGPLSASALAASVGDVKSFKNGRSLAAWLGLVPGQHSSGGKAKLLGVSKRGDSYLRCLLVHGARSVLCGIERSSSKRYDPWIEQLKQRKHVNVVSLAIANRNARIAWSLMAHGHSYEAQPRRAA

SEQ ID NO: 445717 - protein, 341 aa, unidentified
MEQATIIGIDLAKRVFQVHGVASDGRPVLRKKVSRAHLLSLLALQPRALVAMEACATAHFWGRTIGELGHEVRLIPPIYVKPFVRRQKNDAADAEAIAEAASRPSMRFVSVKTQDQQARSMIFRTRDLLVRQRTQLVNALRGHLAEHGIIAAQGLAQVKVLAAALDQETTLPPIVRDLGHRYLDHIARLDAEISALDKQLRRYTKEDETAARLQTMPGIGPIAAAAIEAFAPPMATFKRGRDFAAWLGLVPRQHSSGGKPRLERTSKMGQRDIRRLLIIGAMATVGWAARKGAAKGSWLERQMAKKPRLVVAIALANKMARSVWAMLTRGENYRGSALAAA

SEQ ID NO: 445718 - protein, 346 aa, unidentified
MILIGCDFHPSWQQICWLDTATGETGERKLEHAAGEAERFYRGLPGPARIGMESTGNCQWFVELLTKLGHEVWIGDAAKIRACDTRQQKHDRRDAALILKLLVEGRFPRIWMPSSQERDLRQLLIHRDKLVRMRVQVKNELQHLAMNQGITKKRRLWSAAGEKVLSELPLQPWASRRREDLLRLRSLLDEQIALLDEAVKKVAAENEKAQLLMTQPGVGPITAMAFVLTIGDVHRFPRSKQVASYLGLIPREYSSGGHQRFGSISKQGNRFMRMLLVEAAQSVVRCDPGFRNEYLHRCHQKPKGVAKVAAARKLAVRLYWMLKTNTAYPEIARVESSSRVPLASAG

SEQ ID NO: 445719 - protein, 394 aa, unidentified
MDFLKYGVGIDMAKEKFDACISIIDKLQHVIIRAQCSFGNNKNGFEAFFLWATKNTKLTIPAVYLVEATGVYYEQLAWFLHNKNYSVSVVVPNKAKKYKEALGLKSKNDRIDAKGLAQMACEQNNTIWKPLTSNIYLLRLITRQIQSVSQQATVLKNQLHALQYGMYRDKAIEKMYTRQLTLVKKDKESLQLRVEQIVENDEILKKKFENICKIKGIGLQNLAVIVAETNGFTAFENIAQLVSYAGYDVVENQSGKRSGKTRISKKGNSHIRRCLHFPAFNMIKYEVAPFKNLYERVFEKSKIKMKAYTAVQKKLLEFIFILWKKDEAFDPNYQDKTSREEEPESSFTLVPKEPEILGKKNEGLVNTNQKITPAITRVTQDKHPSKYRRMSSFT

SEQ ID NO: 445720 - protein, 319 aa, unidentified
MNKVSHDKVIGIDVSRDWLDIHCLPDGQRLRLPNTEIGHNRLVDLARPVGALVCFEATGGQEWRLWSVLDGAGVMTRQLPPAQIKAFAASRGTRAKTDRIDAEFIAWFMMFRPDAGRNLPHEKLRLLRGLVSKRGQIVETRKRLLAQIKAHGKLGSADMFETMDAELKDLLDRQIAELEARIEQTIISDDELATTADILRSVPGVGPVASTMLIAEMPELGQITGEQAAALTGLAPIAHDSGAMRGKRAIGGGRRLLRHVIFQAALVASHHNPVLKAFADRLRAAGKPHKVVITAVARKLVTIVNALCKSRQKWVTQPA

SEQ ID NO: 445721 - protein, 362 aa, unidentified
MQSTPLIAFDQHAATTVAAVLLPGQRTPALHTLTSDSPTILRFVRRVARQAGAVRCCYEAGPCGFELQRAMTAHGISCDVIAPALIPRRPGDRIKTDRRDAAQLAVLFRAGALTAIHIPTEHEEAARDLLRCREDIRADLLRARHRLSKFLLRHGRRFTATKKAWSKRHDLWLRAQTWPLPALEQTHRAYLRTVDEAIARLRAVEQDLRALLDLEPRRPRVQRLRCFRGMDDLTALTIAAELGDARRFATAPSLMAFVGLIPSEHSSGTRQARGAITKTGNAHLRRVLVEAAWHYRHHPFVGDTLRTRQRGAPPAVIAHAWAAQQRLHRRYQRLAARGKPKQHVVTAIARELTGFVWAALTQ

SEQ ID NO: 445722 - protein, 321 aa, unidentified
MNKYKEIYGIDISKDVFDVYGSKSGHNQFKNEAKGFVSFMKHLPKDVLVVMEATGYYHYRLAQFLYKSGVSVSVVNPLSVKRFIQMKLAKVKTDKSDAKAISEYGEMNAVPLYTALTDVQSECLQLFRLLDSYIKHRTATKNKLKGEEVLGIPSKFVYRSLKRNLKHLNKEVESLELRLLDLIKQDQQHQLTLLKSIPGMGVKTALFLIVVTDGFEKFETASQLCSYVGITPTIRQSGSSVRGRSRISKVGNKKLRNLLFLCSFSACKYNKACREIYERLVAKGKSKKLALIAVANKLLKQAFAITKSGRPYDENFVSRLA

SEQ ID NO: 445723 - protein, 316 aa, unidentified
MSKKTAPTTAIGIDVAKEHFDVCFLDEKENTNHQGRYDTEKCKALVKKIAKAKPRIVILEATGGYERGIAAMLLASEVPFRIVNPLRTRQFAQAIGLLGKTDSIDARMLGLYALRNKIEPAAVPNGKTVEIRALLERRRQLVALRSSEKTRQHIEANKTAAKSIKSHLSFLTKEIESLDSVLDELVKGDDEFRHKEEILTSVPGVGEQTARSLIGSMPELGKLNRGEAASLAGLAPFAHDSGKMRGRRMIRGGREHVRQSLYMAVISAVRYNPRFKELYGRLISSGKAKKLALTACMRKLLLLLNALLKKDEVFAV

SEQ ID NO: 445724 - protein, 415 aa, unidentified
MEATVERCAGLDIHQASVVACVLVGPPGCKPRKETRSFGTATRELEALRAWLEGLGVTHVGMESTGVYWKPVHAVLEGGFELIVGNAHHIKAVPGRKTDVKDAEWLADPVRHGLIRPSFVPPPPIRELRDLVRLRRSLAEARSTERNRTLKLLETANIKLASVASEVFGVSGMAMLRALVEGEAAPAEMAELARGKLRSKRERLTLALEGRLTEHHRYVLAFHLRRLAAIEEDLRALDARIEAKAEPFQAQRRLLQEIPGVDALVAVTIIAEVGVDMSVFGNAKRLAAWAGVCPGNHQSAGKRRSGATRRGNVHLKTALVTAAVSGSRRRGSYYKDKYHRLKARRGRLRAAVAIAHKILVAAYHMLAGGVPFRELGEAFLDQQARQRNVRHLLNRLNHLGYDVLLQPRAVEAAGP

SEQ ID NO: 445725 - protein, 338 aa, unidentified
MKTYAAIDLHSNNGVLIVTDETDRVLRQKKLANKLELFVAELEPFRATLQGVAVESTFNWYWLVDGLLKHGFTVKLVNTAAIQQYEGLKYTDDPYDARWLAHMLRLGILATGYIYPREERAVRDLLRKRSSLVQQRTANILSVQNLEQRNRGTKISSREVKKLTEESIGELYDNEDLGLALTTTIKVIEALTEQICCLEKAVLKKARLRDEFKLLLTVWGVGDILGLTIMYEAGDMSRFADAGPFASYCRCVQAQRLSNGKKKGQNNAKNGNRYLAWAFVEAAHYAIRYYPEAKRFYDRKAARTLPVVAIKAIAHKLARASYHVLRDQKPFDPKKVFS

SEQ ID NO: 445726 - protein, 341 aa, unidentified
MNQAQAYHYIGLDIHKRTVAYCEKTAAGTTVSHGTIASRPSDLIEFAQSRSRPWVGAMEATIFSGWIYDTLAPCAIELHVGHPLRLKAMSKNKSDRIDAELLANLLRADLFPCCHMAPPQVRELRRVLRYRNFLVREATRMKNRAAGILMETGVEYTKSRLHGKRYFSALLDGLAEVPSSVLELLRMTRTNIELFSNAQKTLLDALARHDALNERVARLKTVGGVGDVTALTWALEIDDPNRFGSIKKVHSYCGLCSAQHESAGRERRAPLSKERNPNLQHILIETAKPAPRVNDCLRRVHDDALDRGYNRNRATLQVARKLAAYLLAVDKSKKPFTAPKS

SEQ ID NO: 445727 - protein, 353 aa, unidentified
MKKYIGCDAHARYSIFASLREDGRWDPAVRVEHNEGEMERFLKQLPPGSPVALESSGNWYWLVRAMEEAGLDPRLAHALEAKKRMPGRNKTDHLDAKGLAMLLRNGSLPEVWIPPANLLDLRDLMRTRLATRQQGSVLKCRILAALRRYGTRRYSEGADLFAESRQVQLSIAMARLPQECRIATGEEWALLKQLEQHIEALEQRIRQRIASLGWVRLLKTLPGVGTILGSTIYLEIGDVARFRTPEKLASYAGLVPTVHASGGKSWQGPTPRSANHFLKWAFIEAANVVSTRQKAWPEKHVVRLYQRLKAHKCHGKAATAVARHLAESSWWILTKRQPYRDPALGTLSSSKNG

SEQ ID NO: 445728 - protein, 313 aa, unidentified
MSQEKVFVGIDVSKVELDVAVSSLQEREVFAHTEEGLGRLVERLKPLSPALIVLEATGGLEMDVVAALLAGELPVVVANPRQVRDFAKATGQLAKTDALDAQILARFAESVRPEIRPLKSAESRDLSALVARRRQILEMITAETNRLRMAPVCTRKNLEAHIAWLKKCLQDLDKELGQAIRKSPVWREKDEILKSTPCVGQVLSTTLLADVPELGLITGKEVSALVGVAPMNCDSGQFRGRRRVWGGRAHVRAVLYMSTLAGIRCNPVLRSFYQRLRLAGKEHKVAMTACMRKLIITLNAMMKNHSRWSPSHA

SEQ ID NO: 445729 - protein, 326 aa, unidentified
MTQPATAPTRFLGADVGKAEIVVHDTRGNARHTIPNKPKDLAAFAAKADLDATCLVVCEATGGYEDALLAALLAAECPAHRADARKVKAFIRSYGTLAKTDALDAKALAAYGQERHASLARWQAPDPAREKLQTLVLTRADFVATRTAYRNRLAAPGSTLVHAQLETLITALSEQIEALDEAMAKTLSEAAALKRAQKALTSIKGIGDTTAIILLALLPELGRLDRRQITSLAGLAPHPNQSGTTERYRRTKGGRPEVKQALFLPAQTAARFNPVLKEAYQRLLKAGKKPIVAIVAIMRRLLVIANARLRDAYAEEAKMALAAVAN

SEQ ID NO: 445730 - protein, 403 aa, unidentified
MLHDHPKNPTAIRVQFGAIFVSLELSRKTWLITSLSPGKGEKMSKHAVTAGDIAGLMARFAELQRKAAVRTGKSFPIIAIQEAGLDGFWLHRVLQQEGIESHVVDPASIAIPRRRRRAKTDKIDGEALLRALLAYKRGEPRVCSMVIAPSPEEEDRRRLCRERDTLITERVRHVNRIKGLLFAQGIAGYEPVSRNRRKRLDELCTGDGRPLPQYVKAQISRELDRLELVLEQIKTVEKERDRVLLSPAPVAAVNTGPEAACDNPTGASGVAMLTALRGIGANGATKLWSEGLSRHFSNRRQIAAYSGLAPTPWQSGGIAHEQGVSKAGNPRLRTTMVEIAWLWLQHQPQSALARWYFARVGVGATKARKKVAITALARKLLVALWKYVTAGELIEGAIMNPVA

SEQ ID NO: 445731 - protein, 374 aa, unidentified
MRKTEHYVGLDVHKDTVMVAVADGGREGEVRLYGQISNDLHAIEKALRKIGSDGGALHVAYEAGPTGYVIYRRLMQLQIECVVVAASKTPVDKAARRKTDRRDAQMLARLHRAGELTAVHVPDAADEAMRDLTRARADAVHDLTRARQRLKSFLLRHGYRYSGKANWSEAHRRYLRELVLPLPGLKAVLEEYLLAISQCEDRVNRLEQLLELQAPLWRLYPAVEALMTLRGVQLVAAAVLVAELGDIRRFTHPRDLMAFLGLVPKEESSGQTRKLGSITKAGNAHARWILVEMVQHAWLPPKVSAHLSKRQEGQPVHRKELAWKVQLRLHSRAWHLSRRGVMKPKITVALAREMAGFVWAMLKTVDWDHMTRCA

SEQ ID NO: 445732 - protein, 350 aa, unidentified
MTESYDGPQIVGMDLHRRRSVLVRMTEDGRRLATARITNSAPELRREIARAGRHPKVVVEATYGWYWAADTLAAAGAEVHLAHPLGVKAFTYRRVKNDEKDSADLADLLRMGRLPEAWIAPPEIRELRELTRYRIKLVRLRASGKDQVHAVLAKLGIPVTCSDIFGGWGSTWLDELALPQPYAGKVASLRQLIGWLAAEISLLDTVIADLLEQHQAYHALRQLPGIGPVLAAVIAAEVGDISRFSCPARLCSWAGLTPRHRESDLKVARGHITKQGSPILRWAVVEAIQHQPAGSLPRQIKDRIIARRGSQAKNIAKTAAARKLLTCAYYAMRDGHVRSLAVRAAAHQAA

SEQ ID NO: 445733 - protein, 393 aa, unidentified
MKPEMSVRGIDLAKRVFHAVGMDERGKIVLRKRLSRHDLRPFLAKLPPVRIGMAACGGAHYWARRFREHGHEVKLMAPQFVKPYVKSNKNDRRDAEAIAEAVTRPTMRFVPIKDVDQQDIQALHRVRERLIGERTALINEVHGLMHAYGIVMPKGVAKFRQAVVEKLESAKDKLTALSQEMCWKLVEEFAALEKQLASDQEKLDALATTHPACQRLMTIPGLGPLTATALVAAVSDASAFKNGRQFAAWLGLVPRQHSTGGKERLLGISKRGDSSLRKLLVHGARTTLRWVGRQTDRRSQWMRHLVERRGKNRTAVAVANKNARIVWALLTSHQDYPLTTGEGQLLRASVASVRMEYGKVTKEEMPKLLMAMVLDKSMEESCRTMPGGIELMT

SEQ ID NO: 445734 - protein, 569 aa, unidentified
MSTATAVGRTIGVGIDTARYGHHASFLRENFEHAVAPFRFLESREGYRRLEAALSRVVDRHDGDVELHVRIDAAGQYAVNLQAFLRRLDLPIVVSVGEPKRNRDYKNAHFPKRKSDEVDSLACARFALVERPEPTPEVPLPFDQLRDVAAALDAARKRTTQAVNRLHNQLARVFPELVGEAPDLQANWVLVLLDKHPTPQRIAATRAGTLEKIPRVTPERAGRLRQLAKQSVGALQGPVAERMVRSMVAELRQARRNQRDLLELLCEAYDRLPDGPHRQVQTIGGIGPRTAAALVAKIVSIDRFVSPEKLVGYFGAFPEECSSGVDILGNPKAARHMHMSRKGNDLVRGLLWMAAQTAVRCNPAVRALFKRQLAAGKRGDVALGHCMRKLLHLVFAVWKTDRPFDPDHYPWEGGQPRPRPDETPTSETPTSEGKRDGKRDGGAAGRKGPCPDRKAVTADAAASTPTLARAEPDAKPTAELRPAPAKVATADPADETSALDRSGNGASTGARSAPERPEVEDGSVGETPGPRLPSPRGGVEGPDRSGRPRAGKPSPSCRPRRAADGRRPD

SEQ ID NO: 445735 - protein, 346 aa, unidentified
MATAYIGADVDFKMTELAVERGGQIVVRDRIPTDVRSLREFLDDLGGRKVMVIEEGSLAGWLYRNLHPHVDRFVIADPRRNRLVYNDGDKTDALDAAALAALCRSGHVREVYHTTDDGRLELKKSVVLYHDRVKEAVRQINKLRASCREYGIRVRGRAWKNKRVRAQWMRELQQMHPGLIRRLEVHWIGYDAVMSQVKLARSEMARRSKEYPIIGYWQELPGIGLVRAATLFAYLDTAWRFKTAQKLWKYCGLGLKRTASGTDNQGRPRKGYVHLYRQVNRKLKAAVQGAALSAIRQGGNPFSDRYVILIRGGTTTSNARHTVGRKLLSVMWGMWKTQSRYSPSLV

SEQ ID NO: 445736 - protein, 318 aa, unidentified
MDVLGIDVSKADFHAYLIQGAKRGKKSFPNGPVGYRQLRTWLKNRQSSKVHACMEATGAYWMGLATALYEAGFAVSVVNPNRTVMFARSQLRRTKTDQVDAEMIAEFCKTQKPSKWSPPPVEILELRGLLSYRDHLVREKLRLKQVVSQVHVSRELQKLHAKQQKTLEQTIEALERQLRAFLKVHSDISEAVDRLTAVSGIGLLTALAIVAKLPVDRLRNGKAAAAYIGVTPSERQSGTSIHGKPRICKTGNASLRRDLYMPAAVAMRHNPILKAFSERLKAAGKPPKLILIAVMRKLIVLAFAILKQGFVPRLAQAV

SEQ ID NO: 445737 - protein, 415 aa, unidentified
MLFIGDDWAEGHHDVVAQDDAGKALARRRLQEGADGIARFHEMVASCLGEDAEPDPARVVVVIETDRGPWVKALAAAGYRVYPANPKQAARHKETITVSGKKDDFFDAGALADMGRTRRHQMRELAADSDIAEAVKIAARAHQKLVWERTRHLLRMRSALREYFPAALEAYADLTLAGKDALELLAKAPDPESAARLTVPQITAALRRAGRRGDLAQRARDIQAALRAPHLAQPAVIAEAYAASVQAAAAVITALSEQVKIMEAKVSGLFRRHPDAGIYLSQPGIGDITGARILGEFGDAPGRYATAKARRNYAGTSPLTIQSGKKKTVHARYIRNRHLIDPLHAQALSALSVSPGARGYYDGLRARETGHDDAMRRVASRLTGILHGCLKTGREYDEATAWSHRAETPEAAEAA

SEQ ID NO: 445738 - protein, 364 aa, unidentified
MPCAAGCSLGRGWRLGCRRGGGLVTLVMGMDQHRAQISTEWIDTITGEISRARIAPADRGTVREFLARFDGAELEVALEATTGWRFVVEELERVGADAHLAEPAETSGLKGKKRRAKTDWADARHLRELLLIGRLPESWIAPAHLLDLRARVRCRHTLVEQRTEWQQRMHAVLYHHGVPHSRKLLTLANRERIAALKLPAAAREQLTIALEMIDAIEVQVGPVDLALRAYARQQPGCRTLIEEIYGVGPLTSVAILAELGDTRRFQNSRDAVRYAGLDITVHQSDTRRSAGHLSRQGPPALRWALYEAAQAARRPNSPERPYYDQLAARIGGNRACIAVARKLLKRSYHLLRNLGDQALEPVTT

SEQ ID NO: 445739 - protein, 355 aa, unidentified
MLKGNILGIDLAKNIFHVCEMSPQGRVVRRARLSREQLSAWVVCNFQGVIAMEACGGSHYWARLFESRGYDVRIIAAQFVKPFVKSNKNDRIDAEAICEAALRPQMRFVAMRSEAQQDIQNLHRIRERLVCNRTALTNEIRGLLLEYGIVMPKGIQHVRKLLPGILETHKGTRSPLWAKTFMDLYREFCDIDCRIEECDSSLKAISRTNEDCARLEKIPGVGTLGATAIVAAVGSAKHFKNGREFAAWLGLVPRQYSTGGKSSLGRISKRGDPYIRRLLVLGARSAAIAAERKRNHKDPGKRAINRTNQWLFNIADRRGSNRAVVALANKTARHIWVVLGGADFKQPEQLTPLAA

SEQ ID NO: 445740 - protein, 341 aa, unidentified
MDIAVLGIDLGKNSCSVVALDGSGKVTLRRRMLRKTIVALTSKLTPCIIAMEACCGAHHLGRVLSAQGHTVRLMSPEYVRPYVKAQKNDHRDAEAIAEAATRPTMRFVALKSEQQLDMQTLHRARDRAVGERTSLMNQLRAVLLERGVIVPQGRAKLRLRVTELLQQSPEQISSRIRLLIEDMLMRWQALDEWIAGFDGEFAAELKRDEAARRLTSIPGIGALNATALVAAVGDAQTFARGRDLAAWLGLVPRQATTGGKPRLLGITKRGSKYLRKMLIQGARAALPTLSRSNTRLGQWLRGLLVRAHSNTVVVALAAKMARTVWALLRYGTTFEPRAIAI

SEQ ID NO: 445741 - protein, 353 aa, unidentified
MIIIGVDPHKTTHTATVLEGATSTELGTLRITASLEDYQRLLAWADAWAPRQWAIENAEGLGHHLAQWLLAHGEEVLDVPPTATARFRSLSRGGRRKNDRIDAAAAAGSAAVHGDSRRVFPEGHADALALLAERRQSLSQHRTRLLNQLHALLRELVPGGAPRSLTATRAAQLLRRVRPISTADRIRRQLARDLIAEVRHHDRLVATNTEQIQELLSEQPTTLTEIVGIGPVLAARILAGTGDPRRFPTAAAFANYSGTAPIQIASADHSRHRLSRYGNRDLNSAIHSVAIIQIRTRSSAGHAYYAKKRAEGKAPREVIRCLKRQLASTVWRTMIKDCSARSTQVPETVALAA

SEQ ID NO: 445742 - protein, 412 aa, unidentified
MKIPQSTIRLLTGRLVKILLNREVSTMKSNTQNAKIEAITEKTLVLGIDVGSETHYARAFDYRGVEYSKKPFKFSNTEAGFVTFKAWVLDIKEKHGKDKVIPGMEPTGHYWFNLGKFLQDNEMKPVLVNPHHVKKSKELDDNHPTKNDRKDPKVIAGLVREGRYMIPYLPDGIDADLRTASNIRFQLQAELTRIQNRISRWFNIYFPEYKTVYGKPDAKSGILILKEAPLPEDILTLGIDGVNQIWRDAKLRAVGKARAKTLIEAAEHSVGSKEGAVSARMEIRMLLEDYESRNTRLQEVMVLIEELVRKIPMAEKLLEIKGVGIRTVSGFLAEVGDISRFNNPKELQKLAGLALVENSSGKHKGETTISRRGRKRLRYLLFEVAMSLVAKNPEFRELHNYYTTRRHQKSNN

SEQ ID NO: 445743 - protein, 413 aa, unidentified
METMVERCAGLDVHKDTVVACVRTPGAKGQRQVEQREFGTKTGELLSLRDWLSEQGVTLVGMEATGVYWKPVYYVLEDALECWLLNARHLRNVPGRKTDMQDAAWIAQLVEHGLVRPSFVPPKPIRELRNLTRYRKAQIEERTRESQRLDKILQDAGIKLSSVVSDLRGVSSRGMLNALVAGETDGQQLAELARGQLRKKRPDLQAALRGRFSRHHALLVGEILTKLDYLDELIARISDEVGQAIAPFAEQVQLLDTIPGVDRRMAEALIAEIGVDMSRFGSSARLASWAGLCPGQHESAGRSRGGKTRKGSKWLRAHLTQAAKAAARTKGSYLAAQYARLRGRRGASVATIAVAHSILVAAYHILDGLVPYQDLGGDWFVRRHSPEQHARRLVRQLALLGYQVALTDEEEAA

SEQ ID NO: 445744 - protein, 336 aa, unidentified
MGVDLHHDSFVVCVRSGQGQQWQRWAMSEMGSFVKQLGKPDAVAVEATGNTRWFCRQLQGGAGRIVVVSPHQFRVISQSVKKTDRRDAALLAEYLEKDLLPEVRIKTDQESEVAQMAASRDQLVKMRTMLKNQVHGLLRSHGVLVSKQQLASRKGRMQLREVELPAMAMLQQEVLLEQITAVSKGIGQLQKSLREAAQKLPGYDNLISIKGIGELSSAILLSAIGRVQDFSDAGKLAAYFGMVPRVEQSNQRQHRGRITRQGNKLARTTLVQCALVAKRYSPFLQGFYKRIQQRRGTGKAIVATARKLLTIVYYTLKNHWVFDDFGAFALAESPSH

SEQ ID NO: 445745 - protein, 471 aa, unidentified
MSTTPIGAKRRPKVRIVSKHKIPLPPQLKRVNLNAAGIDIGSEEHWVAVPPGRDSGGQDVRRFGAFTGDLGALADWLKQCEIETVAMESTGVYWIPLYELLVERGFEVLLVDARQAKNVPGRKTDVLDCQWLQELHTYGLLRGAFRPIDQVCILRSYLRQRSMLVTYASHHIQHMQKALEQMNLKLAHVVSDISGLTGMGIIKAILNGERDPAKLAKLRDPRCKNSEAVVARALEGHYREEHLFALKQAVELVEFYQHQITACDCQIEACLQQFEEKSTQTAVTTRRRKRRRGGIAFDAHSYLYRMTGVDLTQIDSIEANTALTVIGEIGLDMSRWPTEKHFGSWLGLAPGSKVSGGKRLSSRTKPSANRAAAALRLAAQSLNQSQSALGAYFRRLKARLGSPKALTAAAYKLARILYRMLKYGAGYVDQGEAAYEERYRDRLLRNLKRRAAELGFQLTAINSSTGQPALT

SEQ ID NO: 445746 - protein, 391 aa, unidentified
MPDVSSNASVKTTRVWVALDVHKNAITAGVLPAEGGQVELAQLENSEKAIRRLIGRLGGPEGLAVCYEAGPCGYQLYRLLASIGVACDIVAPSLTPVRPGDRVKTDSRDARKLARLYRAGELSFVRPPTPQQEGLRDLVRCRDDLRRARTAARHRVGKQLLRYGRIYREGKKSWTLQHRAWVRRQRLDDPLAQAAFEHMLCHLDAIDAQIAAVDRQLEQVAASQPWCDPVRWLSCFRGISTLTALGLLAEIGDFRRFATPRELMSFLGLTVSEYSSGERRSRGSLTKTGNRHARRLLVEAAWHYKHPPRLSTRIKANEPHVPPEALARAWQAQIRLHERHRHLTANGKLPTVATAAVARELCGFLWATMTRQPLRDDHHAQTHTRKEALAA

SEQ ID NO: 445747 - protein, 340 aa, unidentified
MGQVVRIGLDLAKSVFQVHGVDEAGEIVVRRKLRRSQLLAFFAKQPACLVGMEACASSRHWARELIALGHEVKLMPAQYVKPYVKRSKNDAADAEAICEAVTRPTMRFVAIKSPEQQCAMMLHRVRLVLCRQRTQLSNALRSHLAEFGIVAPVGRLGLERLIEIVADPADRRLPAGARISLRMLVAQLAVVKEQILENDRRIMADARSTELGRRLMTVPGVGPLLASALTATVADPRIFRSGRDLAAWIGLVPRQNSSGGKERLGSISKAGHRYLRQMLVVGSMAVIRYAERSARQRPWLAQLLARKKAKVAAVALANKIARIVWAMMITGDRYREPVAA

SEQ ID NO: 445748 - protein, 415 aa, unidentified
MDILYPRCAGLDVHKDSVVAAVRLATAGAVKTEVRTFDTTTPGLLALSVWLAEHGCTHVAMEATGVYWKPVWHILSDGDLTLILANAAHVRNVPGRKTDVADAVWLSDLLAHGLIRASFVPEPATQAMRSLLRTRKQLVREQASHVQRLQKTLEDANIKLSSVLSSVVGLSGRDIIKAIIAGESDPDQLLTLVHRGVRTPREKIRAALQGRVTNQHRFLLRLHLRQIDALDAAIVEIDAEVDRDLDPFRQAVRLLRTHPGLSELSAQVVVSETGIDMSRFPTAGHLVSWVGLCPRNDESAGKRRSNRLRKGAPWLKTMLVQCAWAAVRTKGSYYQAQFQRLRHRRGPKKAICAVAASILTAIYHMLRDGTVYKDLGADHFNRSPEVQAHRLAKQITKLGFTCTITPIQQAEAVSI

SEQ ID NO: 445749 - protein, 340 aa, unidentified
MPNPAVIGLDIAKNVFQVHGADAEGRCVLRRRLRRAEVITFFARLPKALVGIEACPSGHHWARELRSLGHDVRLIPPQYVRPFVKTNKNDAADAEGICEAVVRPNMRFVPIKSVAQQAAMMLHRTRALLLRQRTQLINAVRGHLAEFGLVARRGARNIRELAELVRDTGSDKLPDAARAMLVLLLEQIREVQLRVQKTEHALEAWAKQSDACRRLMTIPGVGIMSATAIVLAMDDPKRFRSGRHFAAWLGLVPRQSSSGDRQVLGGISKRGDGYVRTLLIHGARSLTRWHRESWGWLAGLLMRRPTNVAAVAIANKTARTAWAILARDRQFQPTRRAEAA

SEQ ID NO: 445750 - protein, 382 aa, unidentified
MAPKSVLARLNTRDKIMYSWFVIGRTKDLTLVLSSSLKNTQRLTMNNCTLLDISKSTINVHIPNGSLDLEIENSKKAISSLFSKLKKIYKKEASNLVFIYEPTGSYSFALTQFCALKGVKAFIINPKQSHNFSKAIGQRGKCDKVDAKMLSRCISIAREGEVRIPCVNSVEQEVRELIGYYKFTTKQRVQTSNHLEAIKIKEGSLYVAKELQKEIKALAIKEKEIITKIKELIEKDDNLSSRFTNIKSIVGIGDIGAVALIHLFIKYPHASQREIVSLSGLDPVERTSGSSVRGKSAISKAGSKLYRGSLFMSAMSAVRHNDELKEFYDRLKANGKHTTVAQVAVIKKMIVIAHALYVNNCAYDAVFYKKQCGVNREIGVCA

SEQ ID NO: 445751 - protein, 445 aa, unidentified
MRNEVNDRLSNCCQHRPTELKTLKFGSDAAGYQRLQRYLERCSADPADFLVLLEPTGGYYGLSLILYLLGKGYRILQVDNRTVKEYREKVFGLETKTDDVDARLMARMGFLHEMVGEEFSIQPVYLVDGDAAALRVMVRDLEKLTREITRRRNQLQQIAAATFPEIKTFFRGSTASFAPRALLARFPTPQALAEAETDQVADVLRSANAYKHAKRATELQELARSSAGAVMLSHHQWRQGWIIRQLDGLEAARGELLDQIRQLLATHPYTPIIESLPMKSPIWTATLIAAIGDMRRFNDHRAFKRYLGWTPEVAKSGSSTDKSKLARSGVRIARGALGQMALILLAPSVRNTAFREDYQRMIERHVRPATAVGHLAGKLSTVLYGMLRTMTAYDEAKHRREMGLPPLNDANRPAEAPLEIEMDLVDQIELQDEQDPDGAVSADPA

SEQ ID NO: 445752 - protein, 344 aa, unidentified
MSNLDTCGIEVSAKELVVRLRRQGDLEPLRNFTNTPEGREMVVRYLRRAGRVVRVCLESSGLYGLDLALALSAAPGMEVMVANPRAVRHFAHALMKRSKSDPVDAGVLEEFAARMPFQAWQRPSSVALALHALARRLRELVDIQAAEKNRQHAAGLTETTPTAVRRDLARSLRAQQRAIERLTRQARKLIAQDPQLRERFELLDSIPGIGESSAVQLLGELAVLAPDLQARQWVAYAGMDPREHTSGSSVHKKPRISKAGNKYVRHSLFMPALVAVRHDPYLAAFYQHLLAKGKFKMQALVAVMRKLLHAIHAIFKHHQPYDGSKLFRLSSISAQEVPDVPVAR

SEQ ID NO: 445753 - protein, 385 aa, unidentified
MAPIRMPEAVIGLDVGKSSHWACVATRDGEVLLSAPVANREGDLDSLFGRFPDALVVVDQSRNIGALALARARAAGMSAAYLPGLAAHGAARLFAGDAKTDERDAMVIAKTALGIPDALLPVGDPGPTIAAARALAAQRNFLTCENTRNKNRLRSILLESCPAFEALVDLSDGPQLRLMASLGGAWSVADAGPRRAAALTRGAARGKIEALVRSTASSTRPDAAAIAAEDRAVRLLARRISENSAEIDVITAEISALLEGDDTYRCLLTVPGIGPKTASELAISIDIEDFPSHDRLASYCGLAPRNRQSGTSISSVTASRQGNKRLKNLLILSCNCLTRTEGRWGDYYARCRERGMPHGKALKALARKRLKVIYAIMRDRVPYAA

SEQ ID NO: 445754 - protein, 344 aa, unidentified
MKFIRFIGIDVSKKTLDASIFVAGEVINRFPHTQVRNEKTGFKELLRWAKAQGVDTKDTLFGLEFTGYYSDALEQFLTGKKLCYTMLPTTVVKHYQRGTRDKNDKTDSAKIADYLFRFNGTECIRLRVLPSKAMQELKALKSERKFYVQQRVACENRQKVAKSEQERKHLQKLIDLCKEEIEQVEKQIEDVVTSDEDIYTTFRLLTSIPGIGFVNAVNTIANTQNFTAFETARQYAKYVGVAPSEHSSGTSVHWRRRPSPHADLQAKADLSMAALHSIELSAEMRQLYERKLGNRPKDKDIQRKALNAVKFKLIREMFAVVKQARLFELRGLDKAQTKTHSTEK

SEQ ID NO: 445755 - protein, 361 aa, unidentified
MAKVRSWAGLDVHARSVVAVTVDGASGEMRSRRLSGTTSEVVAFCASLPGPTRAAYEAGPTGYGLARALHAAGVGCVVAAPGKIERPAQDKVKTDQRDAERVLRLLMIDALHAVRVPSVEEEALRDLVRAREDLRGDLMRARQRLGKLLLRHDIRYDESASTWTAHHRAWLGRIDLGGGAQLTLLDYLGAIDALVIRRSALQNSIDEVVPGSPWAQTVARLRCLRGIDTLSAVGLCCEVGDFERFDRPGRLMSYLGLVPCEDSSGPRRRQGAITKTGSRHARRLLVEAAWQYRKRPARGKALERRQEGQPGAVIAISWQAQQRLHRVWRRLEGQRGKRRTIVAVAVARELAGFCWAIAKAD

SEQ ID NO: 445756 - protein, 403 aa, unidentified
MNSVGIDISKGRSTVAVMRPFGEVVISPFEVRHTDSELSELARQLKSLDGETRVVMEATGNYHTPVAKLLHDAGLYVSVVNAKLVHGYGNNDLRRVKTDKKDSVKLANYGLDRWLALTRYVPEEDTRLLLKNCYRQYRQYSKVQTVLKNNLISLLDTVFPNVNRLFSSPAREDGSEKWVDFVAEFWHCRCVSEKSEKAFANKYQRWCRKYGYNFNEAKAHTIHAEASGHIGVMPMSETTKLLVDQAVAQLRATSTALAALKHEMQALTSMLPEYPVVMDMFGVGPTLGPQLIAEIGDVRRFYSKKALVAYAGLDAPPNDSGDVTGRHKSMSKIGASSLRRTLFLVMSVYLQTAPLDEPVYQFMDRKRAEGKPYRVYMMASANKFLRIYYATVKAYLESLEHTA

SEQ ID NO: 445757 - protein, 339 aa, unidentified
MKELKLIAIDTSKHVFTLHGVNERGEVALRRELRRQQVAPFFAKLPATDVVLEACGGSHHWGRTLSAFGHRVRLIPAQYVKPFVKRGKNDRADAAAISEAAGRPAMNFVPVKSAEQQAEAMVLSARELLVKQQTQLVNALRGHAAEFGVIAAKGTGHIEALLERIAADPAVPAAAQAVFVELGERIGELTTRLAAIDRKLAMLHKTNPVSQLLAAVPGIGPITALSLAMTVDASQFQSGRHFAAWLGLTPKQNSTGGKPRLGGISHQGNERLRQLLVIGATSVVRLAKPGHRFGTTWLLGLLQRRPKKVAAVALANKMARVVWAMMTNGEAYRPQPAIG

SEQ ID NO: 445758 - protein, 353 aa, unidentified
MSNIKYVGMDVHKSITVIVVLDAAGQVESRSQVKTKAENLRDFFRGISGKVNVVFEEGTHSAWLYKLLKPLVASVTVCDPRHNKLIEDGNKSDDEDAETLARLLRLGAVKAVYKGDDQQQQLKEICRAYDNLVEDSTRVQNRLKALYRGRGIDCSGHALYRTDQRSDWLEKLGEEAARFRAESLLEQLESISQLRKQAKQRLVAQARAHADYRLLVELPGFGPVRVAQLIAEVGTPHRFRTKRQFWPYCGYAVVTRSSADYQFVEGKIVKQRKKVSTRGLNRNHNPQLKQVFKGAALTALRHEAVKAYYQRLIDSGARPELARVSVARKLASIALTIWQRREEFDAKKAFAQV

SEQ ID NO: 445759 - protein, 422 aa, unidentified
MLAESDDQEEIIAKVAALDIGKAELVCCARLPAPDGRRKRLQEVSTHSTMTASLTELANHLVELGLQRVVMEATSDYWKPVFYLLEAHGLDPWLVNARDVKHLPGRPKTDVIDAVWLCKLAERQMLRPSFVPPLPIRRLRDLTRYRVDLVAARTAEKNRVEKLLEDACIKLSVVASDIFGVSGRVMMAALIAGERDPKVLAQLARKRMRTKIAQLEDAFNGHFDDHHRFLLARMLGRIDSIDADIAAVDEQIEAHLAPFAEATARLDEIPGIGPIAAAAIIAEIGLDMSRFPTAGHLCSWAKFSPGINSSAGKTKGNGSTGHGNRYLARSLGEAAVVAGRTDTFLGERYRRIAKRRGKKRAMVAVGRSILVIVWHLLANDHATFTDLGPDHFTRHLNPDRHKRNHIRQLEALGYTVTLTPAA

SEQ ID NO: 445760 - protein, 429 aa, unidentified
MNNTQNKKIEQVKETTMIVGIDVGSEKHYFRAFNWRGIELTRKPVAFSNSMEGFNSFYNTIVELMQKSELEEALVGIEPTGHYWFDLGQFMCEKDIKFVMVNPHHVHKTKELDDNSPSKNDRKDPRVIAGLVRDGRYFYSYMPTGAYAELRNASNRRFVLVEEQTRAKNRLQKWIAVYFPEYKGIYTHIDAKGGMLVLKKAPTPEEIVRLGVEGIIKIWKDAKLRGNGHKKAMLILAAAMRSIGLKTGLTEARMEIQDLIEDYELQTKRLERVNDLIKGLCQQVRYADKLLEIKGIGITTVAGFIAEVGDITRFDSTKELQKLAGLELVADSSGKHNGKTKISKRGRKRLRYLLFEAAISVVGKNEEFKEIHRYYTTREKNPLKKMQSLIAVACKLIRVFHAILTKGIRYDASKMLKDIRHPGEQLKAA

SEQ ID NO: 445761 - protein, 412 aa, unidentified
MDATYYVAGIDVHRTMLAVVVANVSERELQFECRRFGTTVGELRNLSAWLQAHAVQEVVMESTAQYWKPVWLALEGQFQLWLAQARSNRGPRGRKTDFRDAKRCVSRLLSDDLRLSYVPDAEQRCWRTLTRTKYQLRRDRVRLQSQLESLLEECQIKLSSVVSDLLGASGQRILRAIAAGETDPAQLGALGDKRLHASDAQLKDALSGQPQPTHRTLLTLYLQRLDLIDVQMAELERMIADALKAHEAAIVRLSELPGLGVDSAQQIIAEIGPRAEAFPSAGQLASWVGVCPGREESNGESNSNRSAKGNRTMRRLLNQLAHAAVRKRDCYLQIVFKRLSVRLGYAKAVWAVAHRLCRLIWKVLHEGVRYVERGPAVTALTLRRRKQRLVTQLKKLGYSVQLTPITASEMTL

SEQ ID NO: 445762 - protein, 473 aa, unidentified
MSKGSGNGTTRGDRRRNARRERLRGLLPRDGAVIGIDLAEDKQALAVVDHDVRVLARKTVKVKAFRLGEALDWAVAQAKVKGFKQVAVACEPTGPRWMQVQRLCAERGLPLVCIQPLVSHIAREQQDYTPHKTDESDCVLIGRLAAELHCYIPEELDETWAQLRHLGRRRAQLITAATASVQRIGDFLSVTWPVVTEVCAQPFKPVTWLAALQVVTSRCGGDPARLAAMGPEEFTAVVRAAVPAWGGTKGWGTICGRVFAALTDTEGVVAWSRRGLLRRVADELGDLARTRAQLRAVAADMVMVLSELGLSRLGDIPGLTAVGAAAILAETGDPRRYDSSSSLVKHAGLSPSENASGALVGQAHISRRGRPGLRLTAWRAVWPMLRLNPVMAAKYAAMTQAADAAVASDAGSQPARAAASAARARRARARVACAASLLRWIYSMVVHGTSWDAAVASGAAACQHAPRCQPEAA

SEQ ID NO: 445763 - protein, 339 aa, unidentified
MKVSTLGIDLAKNVFQLHGVGCNGQTVLKKKLTRDKFLPFLMQLEPCLIGMEACASSHHFARVLRQYGHEVKLIPPQYVKPYVKTNKTDAADAEAICEAVARPNMRFVQIKTAEQQAILVLHTERNILIRERTACANSMRAILAEFGIIMPRTLSQLYKKIPEILEEYDNELSAFVRCSVARQLEHLQGVEDQITLIEQELSRWAKTQPACQRVMKVPGVGLMTATYLVASVGNGQQFHSAKQFAAWLGLVPREFSSGGKQRLGRISKRGDRYFRYLLVHGARAVAAVIERHKDNMPWLYRLLNKKAYNVAVVAQANKTARILWSMLVHHTEYRTLSVV

SEQ ID NO: 445764 - protein, 346 aa, unidentified
MFFAGLDLSRKRLDVHVVDVAGRTVLETAAPPDAEGLRGLVERVDALGPVRAAIESMNGARFVHDRLEQLGWKVAIADAQKVKGLAPLACKTDRIDAWVLAELGRRDLVPAIWLPDPAVRAERERARWRLHLVRHRVQLKNRVHATLIAFGTPCPVSDLFGQGGRRLLDRLQVPDPWCSDVLAAVALIDELDRQIDGCERELRRLGADHRYVPLLMSAPGIAWVLGYTIAAEIGDIERFSSPKKLAGYTGLCPRVYQSGGRDHRGSLAKNGPKFLRWALIEAATHAARHPCYRDHYQRTAQRLGRQRGKKVARVEIARKLSEAIWHMLTRNQPFAPAGPTSCSLAA

SEQ ID NO: 445765 - protein, 340 aa, unidentified
MQAIRFGIDLAKSVFQIHGVSATGEVVVRRQLRREQMLKFFAKQPPALIGMEACGSAHYWARELAKLGHDVRLMPASYVKAYVRRNKNDARDAEACCEAVSRPTMRFVPIKTVERQCGRAIHRARDLLVRQRTQTANAIRGLLYEMGLIASKGREGIGSLIEQIEAADAPIPPPLLVSLRPLAAQWRALDAEVARLDQAIAHQVRQDPLAQRLMTVPGVGPVTAHAVICAVGDGRQFGSARDFAAWVGLTRLNHDTGGKTRLTGHISKAGDQSLRKLLVLGAQSHLRRVRASPTGGSAWVRGVLARRPVKVAVVAQAAKTARIIWALLRSDQTYRAPAAA

SEQ ID NO: 445766 - protein, 419 aa, unidentified
MDVVVERCAGLDVHKDTVVACVRVPAPGGGRRSETRTFGAFTVDLLALRDWLLAHGVTLVGMESTGVYWRPVFYVLEDVVECWLLNAAHMRNVPGRKTDVADAAWITQLIEHGLVRPSFVPPPPIRELRALTRYRKTQIEERTRETQRLDKVLQDAGVKLSSVASDILGKSGRDMLDALVTGTRDPDVLAELARGRLRAKIPMLGQALTGRFGPTHALVVGEILAHIDYLEEAIGRVSTRIEEVIAPFTAERDLLTTIPGVDQRLAEALIAEIGVDMTRFGSASRLASWAGMCPGQHESAGKSRSGRARHGDSWLQRHLAVAAMAAGRTKDTYLAAQYARLVGRRGKARARKAVGHSILVAAFHMLAGGVPYEDLGGDYYLKRNSPERRARKSLSDLKAIGWTVTENPDSVTCRPPRAA

SEQ ID NO: 445767 - protein, 315 aa, unidentified
MTQTNITTAGIDTSKSKLDIAVYGRAERWQVPNTLPGWRLLVSNLAKTGVTRVGIEATGGYERGVVEHLRAAGFMVLVLQPMQVKAFGRVHLRHAKNDALDAILIAACAAAMGPPRIAPDPRLADLAGYLTFLEQIEEDLARFKTRLEHIDEPRLRSLVGSDIRRLKARRKAQIRTIAKLLRGHDDLASRLDLVLSIPGIGERTALALIIRMPELGQVSREEAAALAGLAPFDNDSGLRKGQRHIAGGRGRLRKSLFAAALPAAFRWNKALIALYARLIANGKAHNTALIACARKLLVYANTVVQRGTPWVENAA

SEQ ID NO: 445768 - protein, 358 aa, unidentified
MAPAKDPPVLKSRPKYEYYAGLDIAAKTFTAATCYRDAEPTRAVSLSQSPEGYASLTKLLLKADHPLDQILVVMEATGTYWIELATYLQGEGFAVSVINPKQAHDFAGALGLKPKNDRFDAQLLARLSATLQPARWTPPPQIYRELYQRLTHRLSLLEARQQFRNQLHALSVAQPVEGVVTSLENLIATLTERIKQVDKEIKEFLKLDQEWAASVTLLQTITGIGRLTAVWLVVVTLNFTNCSSAEGLTLFTGLAPIERSSGTSVRSRPMIGKGGHSRLRALLYMAAGSAMRFNPVIKAYCERMQKTKGRAYKEVRCAAARKLIHLGFAVVKSGQPFDPAYQPSSQKKAGASLEAKAS

SEQ ID NO: 445769 - protein, 407 aa, unidentified
MTYFAGLDWGSAAHAVCVVDERGHVLSQLEVQHDAEGLAKMLASLARLAPPTELPIAIERPSGLVVDTLVDAGHPVVPIHPNALKACRPRYRAAGGKSDPGDAYILADVLRTDGHRFRALRPASDEIRALRALVRTRDDLIAERVSLANQLRALLHSFWPGAAAIFADVDSPIALDFLRRYPTPASARGLGEKRLAAFLARHAYSGRRSTTDLLDRLRAAPAGLAGPIEEDAKGDAVLDLVDVLSTLVARIRRISCAVEHAVAQIPAGQVVMSFPRSGKVNAAQILAELGDDPARFLSDDHLAAEAGVAPVTHASGKSRGVVFRFACNKHLRLAITCFADNSRHESAWAASVYASARSRGCNHQHATRILARAWVRILWRCWTTGVPYDPALHRAAQPFLQTAEQAA

SEQ ID NO: 445770 - protein, 394 aa, unidentified
MEKGNTFVGMDVHKETIDIAIADGGRDGEVRHYGTIGGDLESLDKVVKKLRAKGQKLHFVYEAGPCGFHIYRHLTRQGEECAVVSPSMIPKRSGDRVKTDRRDADGLARLHRAGELTAIYVPGVDDEAIRDLVRAREDSVCGCTQAKQRLKALLLRHGIRYRGKANWSIAHRRWLAGVTFAQPAQQIALQEYVSAVEEAERRVERLEGQVRQLIPTWRMAAVVEALQALRGVSFVTAAGLVAEIGDIGRFDNPRELMAYLGLVPTEYTSGPSTRRGAITKAGNPHARRLLAESAWAYQATPRVGRQMLRRQETLSKAVRDIAWKAQLRLTGRFRRLVARGKAKPKVATAVARELCGFVWAIAREVNPRPGMKRADSRYHLQLVPAPARASEGLL

SEQ ID NO: 445771 - protein, 386 aa, unidentified
MQSYKRKESVVNQVSKFVGLDVHKETIAVAVASAAGGPAESLGTIPADRDAVVRLVRRLGPAGDALWCYEAGPCGYWLQRLLAEHGVSCVVVAPSLVPTKPGDRVKTDRRDAQKLARLLRSGELTPVWIPGAAHEAFRDLTRARQSAQGDLTRARHRLTKLLLRLDVVAPARAWSKAYRIWLETLKLTEPLQQIVLDDARLTVAQMEQRVERLTAELARAAEHGPLAVVIQALQCLRGVRLVTAATLAAELGDVTRFRSARELMGYAGVVPSEHSSGGSQRRGRITKTGNAHVRFVLVEAAWHYRHGPRLTKTLRARQQGQPATVVAIASKAQHRLNSRYRRLLARNKTKQQAVVAVGRELLGFIWAIAWAVAPDQQLRPTDRRAA

SEQ ID NO: 445772 - protein, 402 aa, unidentified
MKVCGLDVHKDSIFCSIYDGKTSSEVKVFDSTTRFIYEMGEYLMTEGVNQVAMESTSIYWIPVWNILMEMGFELTLVNPFLIKQMPGRKSDIKDAQWIATLLHKNLIRGSMIPNSTIQELRFYSRKYMRMQQDKCKLLTKMDRIMVMANIRISSCVSKLTNKSVIIVIEALIKGETNPDNLVKLVYGNTKNKQSGKLREALTGYIMDHHRKSLKWEKESYDILERQILECIKEMERICNEHYKDEMLLLQTLPGVSKISAICLIAETGPDMSVFENSGKLTGWAGLRPRNDESAGKFKSKAITKGNKYLRAILIQVAWGASRTKGSYFMEKYHRLAMRKSNKKAIVAIGRKILVIIWNMLKEKKPYNPNLVSIYDPIKIERQLAYHRKEMEKAAKLLHKEII

SEQ ID NO: 445773 - protein, 364 aa, unidentified
MYDSTTTVTVGLDVHARSVRLAAVRADELLEERTLPYDEQAVEQVLRRWPVVRCCYEAGPTGFGLQRFLVERGIDCSVVAPGLVPQRPGDRVKTDPRDARKLARLLAGGLLEPIHVPSRELEAARDLVRGREDARLDRMRDRHRLSKFCLRQGRVLPTSSWTVMRRKWLGEQRFEFAAQQITFDSYVHTVDLVDARIEQLERAIRETAEQEPWRGLVARLRCLRGIETLTALALVTEIGDFDRFTTAEELMAFVGLVPSEHSSGEKRRQGSITKVGNSHVRRLLVESAWHARRRPKVGYELARRQRGQDAVVVERTWRCQQRLYQRWQRMAGRGKPQQKIVVACARELAGFVWAIATEQPLRNT

SEQ ID NO: 445774 - protein, 336 aa, unidentified
MKKEIIKQNVGVDVSEANIEAALSYLTTDYRVVVCSTRKFANTVKGFKQFEDWANSKKHSLEEVHFTMEATGVYYEQLAYFLYEQNYCLHVVLPNQVKKYGQSLGIKSKTDGIDARTLAQMGLERELRLWQPISPALLELKQLTRERDALVRNRTTVANHLHAYRHQGKPNKDSIARSIKHITFLDKQVKQIEKEIKDFVNRNKKLKTGIEYLLSIPGVGLLTAATIVAETNGFAAFESIKQLTSYAGLDVRIAESGKWKGKSKISKRGNSYIRKALFMPSLSKIRHNQQTKQFYERLKEKKGIGMIATVAVERKLLGLIFSLWKKEEMYRPAPNK

SEQ ID NO: 445775 - protein, 376 aa, unidentified
MRTIGAERPDTEPAVILGLDTHLDFHVAVAMDDLGRRLGESSAPTTVKGYEGLLCWAEGFGSVRCAGVEGTSSYGAGLARHLRARGIEVLEVERPERRQRSSRRNLKKSDSSDAEAAARAVLAGEASGVPKSGDGRVEMIRTLRAARRSAIKARTQAANQLQGLRVTAPEELRRRLRGLSTKELVSVAARFRLRDDLRDVPSATKFALRSVARRYEALSREIVELEAHLDRLVAQAAPELVSLAGIGTDSAATLLIVAGDNPQRLRSEASFASLCGVSPIEASSGKVVRHRLNRGGNREANRALYMICLARMRRDLRTKEYVARRTKEGKSKREIIRCLKRYIAREVYRVLISCGARSSPTVPMDEAHIATGSSAA

SEQ ID NO: 445776 - protein, 334 aa, unidentified
MENIALIGIDLGKNSFHIHCQDRRGKAVYRKKFTRPKLIEFLATCPATTIAMEACGGSHFMARKLEELGHFPKLISPQFVRPFVKSNKNDFVDAEAICEAASRPSMRFVQPRTESQQAMRALHRVRESLVQDKVKTTNQMHAFLLEFGISVPRGAAVISRLSTLLEDNSLPLYLSQLLLKLQQHYHYLVEQIKDLESQLKRKLDEDEIGQRLLSIPCVGTLTASTISTEIGDGKQYVSSRDFAAATGLVPRQYSTGGRTTLLGISKRGNKKIRTLLVQCARVFIQKLEHQSGKLADWVRDLLCRKSNFVVTCALANKLARIAWALTARQQTYVA

SEQ ID NO: 445777 - protein, 315 aa, unidentified
MTKHFPTVNVGVDVGKSQLDLYLLERGRAMTIPNEEPDISNLIRALRRFRIERIVVEATGRLEQPFVRAALAARLPVIVVSPLKIRRFAEVIGQLAKTDAIDARLIAQFAATVKPAARPASDANARALKDLVVRRRQLTSLRTMEKNRRQVMPPELKSSIDRIIVMLNRELKLLEQLINNAVDQHATSRHKRELLTSMPGIGNTVAATLIGDLPELGSLDRREIASLTGVAPFNRDSGTLRGKRRIRGGRAQSRTALFLSAMVATRFNPDIKRFYERLLSTGKHKKVALIACIRKIVTALNAMLRDNVPWRSAIA

SEQ ID NO: 445778 - protein, 338 aa, unidentified
MKTYAGIDLHSSNNYIGVINTKDKRLYSKRHDNRIDDVLKVLGKFKASLQGVVIESTYNWYWLVDGLMDQGYTVHLANPNAIQAYNGLKHTDDKWDSFWLAHMLRLGILPEGYIYPKHQRPIRDLLRRRLMFVRQRTSQILSLQSMITRNRGLNFSGAQIKRFRDEFIDKLFSDRHLVFTAKKNIAAIRFLDQIVSEIEIEVVSQIKLKKEFISLLTTPGIGNILGLTIMLEVGNIGRFPKAGNYSSYCRCVESKKTSNGKKKGENNKKNGNRYLAWAYVEAANHAIRCCPKAQKFFQRKMAKSQRVLATKALANKLTKATYYIMRDQVAFDEDKLFG

SEQ ID NO: 445779 - protein, 358 aa, unidentified
MKHFNRTATRNTIGLDLSDRMSVYFVVDHQGGFAGEGRLPTNPAAFKKHFGSLEPALVALETGTHSRWASRVISACGHEVLVGNARELKPIFETMNKTDRNDAQKLARLARVDPKLLHPIEQRSEEAQVDLTTLRARSALVEVRTKLILHVRGTVKPFGKRIPDCSAPAFHFRAAECIPEELSPALQPVLDTIAALTALIREYERKVDGISEEKYPETKRLQQVAGVGPLTALAFVLTIGDPRRFRHSRQVGVYFGLTPRKNDTGESHPQLRITKAGDGCMRTLLVGAAHYILGPFGPDTDLRRFGKALAQRGGKNAKKRAVVAVARKLAVLLHRLWITAEDYRPLRTQQRTHVESTN

SEQ ID NO: 445780 - protein, 373 aa, unidentified
MPKYSTAFGMDVHLRSTTVCALDADTGEAVTRRFPGNPWGEIAGWMDGFPGPSLAAYESGYLGFAPQRELAGLGVECVVAAVSKIPRSAADSASKNDRNDAARMAKAILAHDISPAWVPSPEVEGIRDLAGAYDGATARLATAKQRLLAFLAKRGFVYGGTTPAGNPRKYWTYDFLRWLDKVRPEDDGGVRALAALRNEVEAAAEARADLLSEYRAAVDASPIAAEVAALQSIKGCAFALAAAFSAEVGDFTRFRSGRQVTAYFGLAPSQRSGGGSVRLGGVSGAGNALVRKLAVEGSWCYAAARHQPKLMPRDTGVPLEIRMHGRKGSERLLRRREEMLARGMPAAKANAATAAELVRWLWALGMMCREGAE

SEQ ID NO: 445781 - protein, 360 aa, unidentified
MNEPEAAIIIGVDCHKKMQVCVAINRQGRALAETIVDATDTGHAKALRWAQTKFGRQPTMWAIEDVRVLSRRLEFHLLDHGQVVVRVPTKLMARTRNSSQERGKSDRLDATCAAMAAIRYPQLQRAHHDQTSYELKLLVDRRRTLVEDRASQISRIRWRIHEIDPEFRCGPYLTCDKHRVHLRDFLLTQQPTVLTRITLAEVEDLARLTREIRELEKEIRARITAIAPNTLAVPGCGYLSAARLVAEAANVTRFRTEAQFAMHVGLAPIPHYSANQPRFRAGHSGHRAMRSAIHKVAVAQIRSSGVGRPYYDRRLESGDNKPAALRALRRKITRVLFNALRRDYLLRTVGQPTGVPVASG

SEQ ID NO: 445782 - protein, 344 aa, unidentified
MPIVGGLDIHRKQITFDYLDTGTGEVRRGQIAPADRAHLRAWLGRLAGRDGAAFALEGCTGWRYVAGELAAAGIAARVAEPAEAAFARGRKRRAKTDRTDSRNLRELLEQGRLPECWIPPEQVLEARALLEAYHDLRREHTAWVQRIHAVFFHQGAPALGQGSLRTQAQLDALRAAAAAHLSAAGQLQVTVALGMLEAVDDRAGMLRAQLLAAARSLKGARVLAERIYGVGPLTALALTCWLAGAGRFSSARKAVRFAGLDITVYSSDARRSPGHLSRQGPEILRWAVYEAAKTYGRASAPGHGYYAAVKDRADGKIAALSQARKIIRQACHILSELGDDALAP

SEQ ID NO: 445783 - protein, 436 aa, unidentified
MRGCRCSMIMGFTKPIEHFNLQRKKVITMNTLYVGIDVSSKSNVVYLMLPNGDKHSNFSVANSHEGSTLLVKKIYSALTSHSLDTVLIGLEATSVYGDNLVYFLREDATLAPFNRKIHVLNPKQVKKFHDTYNDLPKNDYVDSFVIADCLRFGRINKEVYMGEYRYKALQNLTRARFFAVQNLVKEKQRFMNVLFKKYSTMTQEKVFSDAFSTTALAVYDEFESAEALANMDLHELTDFIIEKGKNRFPDPDAVAKAIQKAARSSYRLPKTVNDSVNQVLSISITSMKALESQIKEFDKAIKALMELLPNVLISIPGIGPVYSAGIMAEIGDINRFDNQASLAKYAGLAWKQHQSGGFEAEVTRLIPSGNRFLKYYLCEAAFSLVRCDKEYSDFYRLKYKEVNRCQHKRALALTARKFVRLVFRLLKDNRLYCPAK

SEQ ID NO: 445784 - protein, 354 aa, unidentified
MSQDILLTVDYHDRACVIRRLDRGADREQVFTEIPTTAASLGQVVDQARRDLGRRGRVVWIQESTTGWARVRELLADRVEFNLANVLQMPLPPKARRRKTDKVDTARMQREYLAGTLPLAYQPPAAWRQLRRLVAYREGLVSRRTAVRNWIDRYLAHETWFDRTGLWSPRGQRRLRALLEGWPRTDRVILAEKLDELARLEGQLGVALKELVAAYRDCAEAQRLDAILGIDVVSAVSIVARIGPVERFGNAEALIAFAGLAPGIQESDRTRRDGRIGGGGTDRHLRHYLIEATVWARKLPRYQTTYERMKKRRGSKVGRLVVARMLVRSISKVLKDEVAFDPGVPPRTTPAAAR

SEQ ID NO: 445785 - protein, 385 aa, unidentified
MYCLVAETGEIIFMPAKSPHTKSGFQWILEKLNGIEQKDIAVIMESTSTYHLKVERFFRENTDCEVIILNPMISKNHKRNLRKTKTDKEDCLNLVDIFFKGEYNCQVRHEEIYAEMQFLSRQIQHLQEGATRTRNRLRQLLSMLNPAYFDAFRNDFMYSETGLRFIAAWPHCDLLNAATAEDIAISLASTHQRSPGYYRRKAERLKTFAANCYPAVSKESVMTDCLAETALRLLAQQQEIEVLKSRLVALGSSTELYDLFISVPGIGPYLASSLIAELKDIRRFENHKKLIAYCGFDPTIIQSGKSIHYNGPISKRGNSTARKILFYTVSIILVVARKTNRQMPLLLYYEKKRGEGKHHHACLVACCTKLLRILLAMSKQNTPYS

SEQ ID NO: 445786 - protein, 415 aa, unidentified
MNNHESLFFAGIDWGRSSHQVCVVDHEGSVIGEKSFTHSGSGLLEMAQWMRRISDSEAYDIAVAIEVNHGPVVESLCEQGFMVYSINPKQLDRFRDRFCVSGAKDDRKDALVLASALRTDRSHFRRIEPQDSNVIILREFNRIREELVSERIRCVNRLRALLWRYYPQFGELLGSAVRPWHLELWELMPCPCAAKRKRVSTVQNLLRRNRVRRIDAKEVLRILRGKKIELSEATVQSCIEHIRTIIERMKVVDRQLKEARDSIRRVIETMNSKLRTEGEGPTDIEILRSIPGVGTVVLATLIAEAWSLVRRRDFAALRCLGGVAPVTRQSGKTKLVIKRRAVCKSLSAAFHVLGGIAVKHDPVSRTKYEELRGKGHGYCRSVRTVCDRLLFVARVILKKGELFDKEFNKPLRDAA

SEQ ID NO: 445787 - protein, 340 aa, unidentified
MRQLYVASDLHGNNNLLGIIDGEGKRIFKKKLPNDALLIKDILKPFKEEIVGIVVESTYNWYWLVDALMEEGYKVHLANPAAIQQYSGLKHTDDKHDAFWLSEMLRLGILPEGYIYPKEERPVRDLLRKRGHLVKLRTSLILSLENIISRNFGRKLPVNDVKGLRKDHVTPLFEGKEDLGLAGRVSKETIDFLTYQIRQIEGVVEKRITLKEQYRNLLTIHGVGKILGLTIMLETGPIGRFETVGDYTSYCRKVPSQWISNGKRKGSGNRKNGNKYLSWAYAEASDFARRLHPESRAYYNRKMQQSNPAVAHSALSHKLARAAYYIMRDQVAFRPEKLFG

SEQ ID NO: 445788 - protein, 400 aa, unidentified
MLSIGIDVSKGKSTVCGMKPGGEIVYTPFEVQHTREGMSELVSLLRGSGEEVRAVLESTGSYHCPVVAALLENGIFVSVINSLRMKRFCSQSIRKVKTDRIDAMQIALYGLAYWQELQPARLPEDTYRELQLLARQYYQMTSMLIKAKVDFNALCDQVLPGMQELMNDHAGRHKLSDFVLRYRHTTHILEMGETRFRKDYCKWAEKKGYRNCERMAVLIFATAQNGIPVLPNAPSTQIVITEAIRVLHTVEASRDAILTQMQALAKTLLEYSLVREMPCIGDTLAPRLIAEIGDVRRFHSKRALIAYAGIDAPPYQSGKFCANNRHISKRGNRYLRKTGYEVMQSYVMHKPANDPIFTFIEKKRGEGKSGKLAMVAGLNKFLRVYYGKVTELYRSLPTIE

SEQ ID NO: 445789 - protein, 346 aa, unidentified
MLHVGLDLSRKRIDVCLISDQGELIDRFAATPDRDGLHGLASRVAVYGEPVRGVVESMNGARFVHDELVAHGWEVLVADAQKVKGLAPLACKTDKIDSGVLAELSFRDLVPAIWLPTVELRSEREISRWRLHLVKHRSTLKNRVHSTLITFGHQRHMSDLFGVAGRRLLGELEIPEPWRAHVDASLVLIDDLEARITAIAKDLRRSGADHRYIPILMTAPGFGWITSFTVACELGDIKRFSSPVKLTGYTGLCPRVKQSGQMDQRGPLSKHGPKYLRWGLMEAAIAASTHPLFRDRYQRTKRRLGKQRGPKVAQIDLGRQLTEAIWYMLTRNQPFAPAGATFRLAA

SEQ ID NO: 445790 - protein, 355 aa, unidentified
MPSSAETAVARTIGIDTGKNTLHMIGLDEKGAIVLREKVSRTRIAARFVNLPPCLVGIEAGMASHYVARELAGLGHEVKQVPPAYCKPFRQSHKNDFRDAHAVAEAVERPSTRCVPIKTDGQLDLQALHRLRSRLIGNRTAAINQTRGFLLEHGIPVRQGHHFLRQQLPQILATRTDVLSPRMVRIIGDLMTDWKYLDERIEGVTDEIEALAHADEGCQQLITVPGIGPIISSAMVAAIGNGAAFCKGRDFAAWLGLVPKQRSTGDRTILGRITKRGNRYLRMLFIQGARAVLLRPASWAKHGFGSWLTAATRRLHRNVLAVALANKLARIAWTVLAQGRRYEARVEPRVEPAAA

SEQ ID NO: 445791 - protein, 341 aa, unidentified
MKNLFIGVDFSKEKVDVAIIFADGLTETAPRVFNEFKTTVSGYKQLVKWVEQNSYGIDSSLWLFCGENTGDYSKGLCNFLYGKGYDMWLENAKSIKDASGLRRLKSDRADASMIAEYAMRNYDKAIMYEPLSESLAQLRELFLYRQMVVRHRCSFQVRRGEKRLTMEKSPVKTMISQSGRHIVSELNKEIEKIDKRITALIKSDKELTEVFTIVTSVPGIGTQNAVCLMVYTDNFRRFNYDSRKISCYYGIAPFGKDSGTSVHSDPHVHYMANRQIKAMLTQAALAAVNFNPVMARYYMRLVERGKKKQVALNNVKNKLVHLVTAMVRNRQIFTPEYKISA

SEQ ID NO: 445792 - protein, 335 aa, unidentified
MKKIHVGIDISKEKCNLCFRSGLEIVREEECSNDVKALKKAFKAALKVLGASVDEVLVCAEYTGRYIYPLTVACQELDIFLWLDDPTRIKNSMGLARGKNDVIDAARIAEYAFRYSDKAVRYCIPDAALVSMKNLLADREFLLIDRKRYQSQLTDQKKYMAPGDFKHKSGRWKKVIKSIDEQIAAIDTEIETLIAADPVLTRQKELLVSIDGIGERIAINMIAITGGFTRFQNARQFCSFAGLTPYKYDSGTSVRSKAKISKRANQTMKALLHLAAVSAATHMKEGEYKDYFERKTKEGKHVMCVLNVIRAKLVHRMFSVIKRDTEYTKEYKPAC

SEQ ID NO: 445793 - protein, 317 aa, unidentified
MEEVSFRQVVSRGCGIDVHQKVAVATIGGEALRTQTREFGTTTSSLTEMKEWLLGNGITHVAMESTGVYWKPVYNILEPSGIKVWIVNARHIKYVPGHKTDKKDSAWICKLLLAGLLKPSYVPPKAQRNLRDLTRYRNKLVQNVASEKNRIIRILEDCNIKLSSVMSSTSGVTATKLIDKLCDGKIVTREDIDEVYHGKLQCSKDDLYEACQGFITDHHIFLLQAIKRDIESTESIISELSSRIKESLSEYDNAMEVLRGIPGLNRKTVEDLIAEIGLDMSVFPTEKHLASWAGMCPGNNESAGKKKAEESPTGTNR

SEQ ID NO: 445794 - protein, 355 aa, unidentified
MEGSSMAHRNLPRPAAVYGIDIGKNIFHVVGLSCDGTPVQKVRFRRDTLLQFFARADPSIVGMEACAGSQWLARKIQALGHKVRLIPAQFVKPYVKSNKNDIIDAEAIAEATTRPTMRFVAVKETDQVDLQALHRIRDQMIGSRTRLINQMRAFCLEYGVPLRQGAGLFKLDLPHALNDEENDLSPAMRRLLGDLFADLSRLEERIRQVTMEIEAIADREEVARRLMTIPGIGALGATAVLAAVGNGLQFRKARDLAAWLGLVPRQYSTGGKQTLLGISKRGNRYVRKLLVHGARSCFRHLDRTRDRLGSWLDGLEARMHPNKAVVALAAKMARIVWVVLNKSGALYERRDPAFA

SEQ ID NO: 445795 - protein, 471 aa, unidentified
MPRRKRASSRPDPATTALLQTLNPHAAGIDIGATELWVCVPPSAVTAPPAPSAPAVLPLHVRCFGSFTADLYAIAAWLRQCQVTTVAMESTGVYWIPLYDVLESEGFQVLLVDPRQVQRAPNRPKTDVHDCQWIQRLHSLGLLTAAFRPEEPIRVWRAYQRHRATLIDDAGRHLQRMEKALEQMNVKLPEVVSDITGLTGMSIIRAIVRGERDAQALATLRDRRCKESAATIARALQGTWQSEHLFALQQSLALYDYYHEQIQACDRVIEEHLKGMALPEVPPLAPKRRVRRRRDNEVTFDARQRLHHVAGVDLTAIEGIEESTALIVLSEIGIDMSRWPSEKHFGSWLGLAPNPKKSGGRVKSSATRPGVNRAAQALRLAAKNLQRSQSALGAFFRRIAARRGLAKAITATAYKLARIIYAMLKHGMAYVAQGLAAYEMAYRERVVRQMKRKAAALGLMIVERDVVAQPS

SEQ ID NO: 445796 - protein, 338 aa, unidentified
MAIVTLGIDLAKNVFALHGVGPTGKPELVRPEVRRSRLLEVVASLPPCLIGMEACSGAHHWAREFQKLGHTVQLMAPKFVAPYRMSGKRGKNDANDAAAICEAVTRPNMRFVPIKTIDQQADLFVHRARQGYIEERTALINRIRGLLSELGIALPLKISAMRREALAVLEDLPGWCNTAIGDMLSHLGRLDERISEYDKHLVYIAKQNDRARRLMKLAGVGPTTATAIVASIGNGHDFKNSRQFCAWLGLTPGQHSSGGKARLGSITKTGDSYLRTLLVMGARSLLMKAAAHSDPVSRWALQLKQRRGFGRAVVAIAAKNARMCWAALRLGDAFKVPV

SEQ ID NO: 445797 - protein, 408 aa, unidentified
MNTLYVGIDVSSKSNVIYLMLPNGDKHSNFSVANSHEGSTQLVKRILSALTSHSLDTVLIGLEATSVYGDNLVYFLREDATLAPFNRKIHVLNPKQVKKFHDAYNDLPKNDYVDSFVIADCLRFGRINKEVYMGDYRYKALQNLTRARFFAVQNLVKEKQRFMNVLFKKYSTMTQEKVFSDTFSTTALAVYDEFESAEALANMDLHELTDFIIEKGKNRFPDPDAVAKAIQKAARSSYRLPKTVNDSVNQVLSISITSMKALESQIKEFDKAIKAQMELLPNVLISIPGIGPVYSAGIMAEIGEIDRFNSQAALAKYAGLAWKQHQSGGFESEVTRLIPSGNRFLKYYLCEAAFSLVRCDKEYSDFYRLKYKEVNRCQHKRALALTARKFVRLVFRLLKDNRLYCPAK

SEQ ID NO: 445798 - protein, 431 aa, unidentified
MPHIATRMGLRRFNASAIAPGKDSAMITVGIDIGKEKHAVAAIAATGEIVMPPRFFAQTAEGFADLFAQLGRLGKTADIRIGMEATGRYWLPLRHALAGKGYRVESVNPLITSAEISKDVRGRKTDKADALAIAHALLRNRHNAAPAEDAATDALKALTRHRTFLVRQNSGAKRCVHAALDVTFPEAGSAFTSIFSPTALTLLETFPSARLLSGANLKTLTALVAKASRGRLTAGYARSIRDAARNSVSAGIVNEGDEAALVSLIRQIRFTEGQIENLEERIKAMPAPETAHSLASVKGVGPILSRVIASEIGDMERFRNPPSGKPPRDMDKRILAFAGCEPRLRESGKWKGRTKMSKRGSPALRTALWQAASTCRLNTPLFAEVYERQKKRGKPHSVALFYVARKLIEVLCGMYKTGMPFSPQTMGGAIC

SEQ ID NO: 445799 - protein, 336 aa, unidentified
MVQIYGIDLGMSSFDVSFLSESGSVRHLSGVKNTVHGISKFLLSLPSSAVLCAEHTGVYGDLLLRLCTLNRTCLCFVPGYQIKHSLGLQRGKSDPLDACRIREYAERFYDLLRPCFYAGEEMSELQELYRTRSLLVESRKRLDTLNIGDNCKSSVSLAADHARRAVLAELNTQISGLDHEIEALIQNSSEFSRNYQILTSIVGVGPVTSCELIIKTENFRKLDTAKKCAAYAGIAPYPKESGKMKCGHKISPMGDKQLKTLLFLCARSAKEHNKEIRLYFLKKHKVEKKHFFVAMNNIANKLLRLIYSLIQKQQTYDRDYIQRDPRCVVISDTNKC

SEQ ID NO: 445800 - protein, 403 aa, unidentified
MRSIGMDVHRHFAEVAIIEGKEERQLRITTEPEALREFARSLGPDDQVVLEATANTWPIADLLAARAGKVVVSNPLRTRAIADAKIKTDKVDARTLAQLLAADFIPEVWVPDPKTRALRGRLARHRTLVQQRTRLRNQIHAALIRSLVRCPHSDLFGRSGRRWLAQLTLATHEREGVESALRLHDGFELEIAKLDRELTAMALANADARLLCTISGVGAVTALALGALIGPIERCGRPSRLVGYVGLDPSVRQSGDHAAWIGHISRAGQAHARGLLVEAAHGAVRSPGPLAAFHARIAERRGPGIAAVAVARKLTVIIWHLLSERTEYRFAAPTRLADKRRRMELAAGAPRSRSRTSASVPRPQRLRSERADLEQAERVYRELVRERSRRRKRGAAAATGERP

SEQ ID NO: 445801 - protein, 370 aa, unidentified
MDTITYVGLDVHKATVAVAVAQGGRGGEVRQLGVFENRSEILTKLAARLSKPGRRLSFCYEAGPCGYGLHRLLTGGGHDCVVVAPSLIPVKAGDRVKTDRRDALMLAKLHRAGELTPIWIPDAAHEAMRDLVRARATAGRVLSKARQHLQSFLLRHDQIYRGARAWTLAYRRWLTTVRFAHPAQQIVLQDYIHAVQDAEARLDRLTRQIEELLPSWAMAPVVAALQAMRGVALVVAVTVVAEVGDFRRFANARQLMAYLGLVPSEHSSGASVRRGGITKAGNVLARRVLIEGAWTYRMPARVSRKLHDRNEKLSPAIRDIAWKGQIRLCSRYRRLAAAGKPKVVVTTAIAREMVGFIWAIARIAQPALEG

SEQ ID NO: 445802 - protein, 331 aa, unidentified
MSCRFYLGIDVAKAKLDCLLLDMSNAKRKSKSIANSPDGVAALLSWLNKQEVAIQDVQVIMEPTGVYHERALFALAQAGLAVSLVNPAQLRKFAQGIGVKTKTDAADSAVLARYGAANHPPAWQPPSASARELRALLARRDAVAEDLQRERNRTEKAATAIDTPERVKQSLNEAITFLQKELAELQRAIDQHIDNDPELRRIWTLLHSIPGVGERVAGHMTALLAARQFQTAEQLAAYLGLVPVEWQSGSSIHGRARMSKAGPAHLRALLYMPAVVAKTYNPHIRALYERLLAKGKPKMSAIGAAMRKLAHLCFGVVHSGQPYDANWAIKA

SEQ ID NO: 445803 - protein, 339 aa, unidentified
MRLYGAIDLHANTNVLAVIDETGKTIVTRKLQNDSQLIVNFINPYKKDITGIAVESTYNWYWLVDALMDEGYRVHLANPSAMRKYSGLKHSTDIHDALWLADLLRLGILPQGYVYPKETRPLRDLLRKRAHLVKLRASLVISLQNIVVRNFGLRLKNNTLQYHKENRVRPFLGDNEDIVLAGMATKEAIDFLTGQIKKIESVINTKSRLLPAYHNVLTIPGVGRILGITIMFETGPIERFAKVGNYVSYCRKVASKWVSNEKTKGKGNTRNGNKYLSWAFSEAASHARRHHDASQAFYNRKLKKNNVAVAHGALAHKLARAAYYIMRDNVPFDEAKLYG

SEQ ID NO: 445804 - protein, 383 aa, unidentified
MLIIGCDYHPSVQQIAWADAETGECGEKRLMHSNGEAERFYRELKQRGVQVRVGMEATGHARWFERLLAELGFELWVGDPAEIRATRVRKKKNDREDARLMRKLLLENRFPRIWVPSPENRDVRQLLLHRHRLVGMRTRVMNQLQAIAMNEGLRRKSGLWSKKGRARLESLSLAPWASRRRQELLDLLDRLSPMIDELSKAIEQEAERRPEVQLLMTHPGVGPITALAFVLIIGTPERFHCGRQIASYLGVIPCEDSSADHWRLGHISKQGNALMRFLLVEAAQTVARCESEWRQHYFHLLLRRGRAIAKVALARKLAVRLFWMWRKGQNYQQVKKFGSDAGQLETPNGVKSITDKLMERPAPLMAWESSNWSTIIKVVIVRI

SEQ ID NO: 445805 - protein, 409 aa, unidentified
MEVLHPRCAGLDVHKDTVVACVRLAQGRRAAQHEVASFGTTTRELLRLSDWLEAQGCTHVAMEATGVYWKPVWHVLEGSFELLLAHPQHVRAVPGRKTDVNDATWLADLLAHGLVPASFVPPTAVQELRTLTRTRKQLVRERSQHVQRLQKTLETADVKLASVVSDLTGASGRAILRALIAGETDPERLAELARGSLRGRRGELAEALLGRVTRHHRFLLRLHLDHVETLERLVEEVERELEVAIEPFRAQIQRLRTVPGVQELLAQTILAEIGADMTRFPDAGHLLSWAGLCPRSDESAGKRRSTRVRTGNAWLKTALVQAAWADVRVKDSYLRSQFLRIKSRRGPKKAILAVAASILTAAYHMLRDDADYRDLGANHFDRRERLRRTRTLVRRLRELGYEVELRSAA

SEQ ID NO: 445806 - protein, 330 aa, unidentified
MKNYHDVIGIDVSKLTIDAHIHKRGLHRVFSNTPKGYKALLLWIDRCLGAQFYFLCFENTGHYSTNLSVYLSENTIDYVEENPLAIKRSTGIVRGKTDRLDAGMIARYAWLHKEELVISTPKEQDIQELGRLLSFREQLVRDRTGKISSLKEMQSLLSSPSTDSCCKIITKTIHYLTKQIEALEDRIKVLMKKEASLKKNFELLNTLKGVGLVLSCQLLYHTNNFKRFNSWRQFSSYCGVAPFEHSSGTSIRRKNRIHHIGDRKMKTLLTLASVSAIQCDKELKYYYKKKVAEGKPKLVALNNVRNKILSRAFAVVKRGTPYVPMQQFAA

SEQ ID NO: 445807 - protein, 408 aa, unidentified
MNPLYVGIDVSSKNNVIYLMLPNGDKHSSFSLANSHDGSTQLVKRIFTAMTSNNIDSVLIGLEATSVYGDNLVYFLKEDTTLASFDRKIHVLNPKQVNKFKESYNDLPKNDYVDAFVIADCLRFGRINKEVYMDDYRYKALQNLTRARYFAVTNLTKEKQRFINVLFKKYSTMTQEKVFSDTFSTTALAVYEKFESAETLAKMDLQELTAFIMEKGKNRFSDPDAVAKALQKAARSSYRLPKTVNDSVNQVLAISITSIRALESQIKAFDKAITKQMELLPNVLISIPGIGPVLSAGIMAEIGDINRFQNQAALAKYAGLAWQQHQSGNFEAQTTRMIHSGNRFLKYYLCEAAFSLVRCDKEYNRFYHIKYKEVNRFQHKRALALTARKFVRLVFALLKDNRLYRPAE

SEQ ID NO: 445808 - protein, 342 aa, unidentified
MSEYVGFDVSEEETSFCVKDVSGKILARGKVATDPVALFEVLRAHCVCPERIVLETGTLSGWLSRELGKLGIAVEVIDGRQAHAVMKLQHNKTDANDAALLAEIARTGFCRPVCVKREAAQADRILLKARAHLVGQRRATQNTIRGLLGSLGIRFAKGSGKLAGLVREALEGRDELRATIDPLLRAAAALEREIARLDKAVSGRAKDDPAVRLLMTVPGIGPVTALAFAATIGDAERFAKSRTVGAYIGLTSRRWQSGEMDYSGRISKYGDAMLRALLYEAANSLLTVVRKAHPLKDWARRIRKRTSHKKACVALARKLAVILHRMMITGEPFRWPQKEAAA

SEQ ID NO: 445809 - protein, 356 aa, unidentified
MKRQCIGIDIANDDFKVALAKRGEDDKLIYSTVKKFTNAKVGFNQLVRWATSEMDKDVPVLFLMEATGVYHEELAHHLHRIGKQVHVVLPNKFKHFAASLNVKSKTDAIDAKLLARFGVDQEHRPWSPAEPVLKQMRHLSRYRVQLNEQKTAISNILHSKDHSHAVSADIKQSTKRIIAVLDKEIKKLSKEMEIVVKSDPVIASKVNKLCTIPGCAITTVTAIVAETNGFKEFNSAKQLTSYAGYDIVHNESGTSVLSKTRISKKGNRYMRYHMYMPALTASKYIPEFNALKERIKDRTKIPMKAQVAIQRKLLILMYTLWKNDSEYEKDHHPQKIARTEAQATQDSALEQLPLEV

SEQ ID NO: 445810 - protein, 313 aa, unidentified
MSYTSRFVGIDISKSSLDVCVLPDGQMAAYQNTPAGIADFLTFVVSLEGIERLVLEPTGGYERHVVAALQAARLPVAKVNAKQVRQFARAGGQLSKTDRIDAFILADYARRMETRILLQRSSRERVLADFVSRYRQLSHMIVQEKNRREKASGQTKDWVEESLNFLLDQRQTVVDAMTACLKADADLGRKAEVLMSLKGIGLRTACFILADLPELGHIDKGQIAKLVGVAPLNRDSGLMRGKRMIAGGRRHLRDALYVAVLPAIRFDPDMKAFFLRLKQKGKPSKVALVAVMRKMIIILNARIRDANATVFDT

SEQ ID NO: 445811 - protein, 358 aa, unidentified
MSTYYIGADVHSNNTELAIEKRKKIVARYSVPTTVPAISNVLDSLQGKKLLAFEEGPMSGWLYRNLNQKVDKLIVCDPRRNKLISSDGDSDDKIDAAKLALLLRGGYLRAVYHSENEERTELKHWVALYHDRVRDAVRHINKIRARCRMYGVQIPRSVLRDPSRRNQWLTKIKHPDLVKQLNMLWIGYDATAKQARVAKQQLILLSKKYSIIRFWKELPGIGLIRAATLFAFIDTPWRFKQKNKLWKYCGVGLQRTASGTDKKGRPKPARLQLPWAVNRTLKNAILGAALSTINQKSNAFKDYYERMVKDGVITSNARHAVARKLLTVMWGMWKQRSRFDENLLSAESIRPTASSLSR

SEQ ID NO: 445812 - protein, 318 aa, unidentified
MNTTLEYVGVDVSKDCLDVALLGEGEPLLVQRPNALPGFDELVLLCRKHSIKRIVLEATGGYEKPVARALAAAGLPVVVVNPRQVRDFARALGRLAKTDRIDAVVLAMFARAVRPEIRPFPAEKAAELQEKLARHRQLVQLHTAEENRLAHAQTEAVRASIQSVLTLVEKQLQEIDADSDRLIRESPVWREQETLLYTVPGVGPQTARALLAELPELGQCSRQQVAFLVGVAPLNRDSGTMRGARTIWGGRAHVRQALYMATLVATRCNPILREHYQHLLGLGKKKKVALVACMRKLLCTLNAMLRDHKPWKYQPKTT

SEQ ID NO: 445813 - protein, 346 aa, unidentified
MLYAGLDLSRQRLDVHVLDEEGRTVEVLAIHPDADALRSLAGHVLLHREEVTAAIESMTGARFVHDTLERWGWDVAIADPVKAKGLAPLAAKTDKIDAHVLAELARRDLVPEIWLPTPGVRAERERARFRIHLVRHRSALKCRIHATLMSFGHPVPVADLFGTAGRQLLAGLELSEPWATTLATSLAMVDELDERIDECGREIARLGADHPYVPLLLTVPGVGPLLAYTISSEIGDIARFASPKKLTGYTGLCPLVRQSGNRDVRGPLAKNGPKYLRWALIEAATHAARDPRYRDRYERNKRRLGRQRGAKVARVDIARQLAEAIWHVLTKNEPFAPAGPAMKLVA

SEQ ID NO: 445814 - protein, 372 aa, unidentified
MTSIIYVGMDVHTTNYTLCCYSMEDDRFFAEVQVEPDAKNILKYLARIEKQQSRDCRIVCGYEAGCLGYSLYHQLHAHGIGCVILAPTTMMTKPGKRIKTERRDARLISKCLAFHTYSPVYIPTEVDDAVKEYIRMRDDANSALARVKQQIIAFCIRHGKIHDGKSYWTNKHLEWLSSLDLGNKILSEVLQEYLIRYYQLREQVDMYDMRINELAQAEPYRQKVEKLGCFRGIAAHTALSFCVEVGDFRRFATAQQFASYLGLVPGECSSGDKQQYTGITKAGNSHLRKLLVETAQVFGRSATKSRKSVALKERQARCDSLTVAYADKANARLKKKYFKIAMRSKVNIAKTAVAREMACFIWGMMTDNISCA

SEQ ID NO: 445815 - protein, 354 aa, unidentified
MPRTSQSASTALSVIGVDIGKDVFHIVGFDRAGKIGLRRKIKRSALVETFEALPRCVAGLEACLSAHFVSRTLRHLGFKPRIIPAKYTKPFVKGQKNDYNDAEGIAEAAMRPNLKMVAEKSQEQLDLQALHRVRSRLVSRRTATINQIRAFLIEQGITVRTGARALRNSLFAILKNRESEISPRMTSIILGLYEDWIALDKRIESVTLEIEKISGVETNCERLMSVPGIGPMISTATVAAIGTGEAFDRGRDFGAWLGLVPRQYSTGGKPILGRISKQGNRYLRTLFVQAAHIILMRPKNWLKFSFGRWLEQASMRMHKNKLATALANKLARIAWSILRNGGTFGTHIRTAEAI

SEQ ID NO: 445816 - protein, 410 aa, unidentified
METIVERAAGLDVHKAQVTACVRLPGRGRRRQEELAEFPTTVRGLLALRDWLQAYRVTQVAMEATGVYWKPVWAILEDDFDCLLCNARHVKQVPGRKTDVSDAAWLCQLLEAGLLQRSFVPPKPIRALRNLTRYRKAQIGERQREANRLHKILEDTGIKLDCVATNILGVSGRAMLEALVRGTSDPEVLAELARGRLRAKIPALKEALEGRFDAQHALIVSAILAHLDFLEEQIDLLSEAIEEQLRPFAAAVELLCTIPGVQQRTAEAVIAEIGVDMSRFPSARQLASWAGQCPGNDRSAGRRRSGRTRHGSKWLDTALTEAAIAALRTQDVYLAAQYQRLRARRGHGRALGAVKHSILCACWHILTTGELYHDLGGDYFTRRNPERATRRLVAQLERLGHHVTLEAAAA

SEQ ID NO: 445817 - protein, 367 aa, unidentified
MEKDSTAVIGLDVHKESVDIAIADAKETRLFGRVGGEAIAVERAVRKIRSVHRDPLFVYEAGPCGFWLYRRLKSQGVRCMVVSPSMTPRRSGDRVKTDRRDALMLARLARAGELAPIYVPDAHDEAVRDLVRAREDAVCMQRQARQRLQALLLRNEIRYVGRSAWTQAHRRWIASLKLPEPAQQIAFEEYVQAVEEAGRRLERLEASIQAQLEHWRWRPVIEALQALRGVSAIHGVRIVAELGDLTRFESPRRLMGYLGLTPSEDSSGKRRRQGGITKAGNSSARRAFIEAAWAYAHPARVSWVIARRHTGLSNQITDLAWKAQLRLCARFRRLAARRLPRNKVVVAIARELSGFVWAIAQQVKPAH

SEQ ID NO: 445818 - protein, 416 aa, unidentified
MFKIIKFNCCGLDVHKTWIFACIGITDPNFRTEYFEARFSSFPKDLRRLAAWLQEHKCEEVCMESAGKYWIPVFNALETTCKVTLAHPKYTKPQKGNKTDRKDAKWICDLFMCNMIKPSFIPPPDIRHLRDLIRYRTKLTNMLTSEKNRAQNCLTASSLKLDDVFTDVFGKSARSITEYILAHPGEKFDVTPFIDKRCKTPVDQIQDAVDGAICPEQAAKLRECLDHIDELNAHRDRIEQEILTLVEPYSVHLDLIRTVPGMNKDPMTAILILSEIGSDMSVFPTSKNLVSWAGCCPRNDKSAKHVKSTRISQAGSCLKPRLVQVANGLVNSKDHPEIRERYRRIKSHRGHKKAIIAVCKMLLTAIWNILSTGEAYNASGYLIQTPRPTDETMVLTQKQALDLLRLRGYVIKEESA

SEQ ID NO: 445819 - protein, 296 aa, unidentified
MHRYVGVDYHKRYSYLAVMDESGKIMREGKVENGREAVAEFLATAGCNGNSSAVLEASRNWCVMHDWLEEMVEEVHLAHPLKVKAIAEAKIKTDKIDARVLAHLLRTELLPEAYVAKPETRQIRSLLRQRMFLVRLRTMVKNRIFGMLDRYPELAQGRPTEEVFGKEGLEYLRQIPVKEIDRRMLDEDLELLEELNRHIGRSEDWIEGLAEEDERVRLLKTIPGIGKFFSVLIVYEVDDIKRFRHEKKFFSYMGLVPSTYSSGGRTFHGRLTKQGNKYLRWAMVEAVWPAKRKDHE

SEQ ID NO: 445820 - protein, 383 aa, unidentified
MRSVALDLAVRKISYCEVEVGHVVARRTVTSLSSLKELLGPECLPARIAIEACREAWHVHAELTRWGNEVLLVDTTRVRQLGVGERGRKTDRIDAEILAKAVEKGSLPKAHLLSKPRQQLRLELSVRRTLVETRSQYVTTIRGLARTRGVRLPSCDTNAFVSHLRKARLDQDLQELIEPMSQVLEKVDADLARAEMRLQSIVEKDSKIQLLMTVPNVNVVVAAVFVSVIDDAHRFRNAHQVGAYLGLVPSEKSSGEHRRLGSITKEGNSYARATLMQASWGLIRLGRSDDPLQQWAKAVAHRRGKFIAAVALARRLAGILWAMWRDDTVYDAARVGFRSAAGLEQRAQETKFRATAMQSAAKKAQRRARPHERKLEHLKEMNL

SEQ ID NO: 445821 - protein, 387 aa, unidentified
MARKRTLSTLDTSIAYEAVGLDLAKEDTAIAAFGPDHEGPYLIDRMPYDKLYELLADMAPTLVAMEPCSGAHQIAEQIQELGHEVMMISGRHVQAWVKDHCNGQKTDLNDAFAILNLAYDRWLTPIRGKTREECRLLALQASYRQLKGQRTKTMVHVKATLHAWGFPIRAGSFNQKVLHELIDANREAFGDEVAETLHLMINRVRDLDNDIATVLKLLTEATKRDPRASLLRSIPGFGVLTTSRWCAVIGDIARFDFPKQTMAFIGLVPNNRITGHHTETSSGREARGQGRMSKRGDKMLRSLCIMGAGSLCLMVRNDRLPDCPFVASIKERLASPRPWFKVLVYVAAKLVRIATALLKYGETFSFEKAGISKAVLKQWELEQAKAA

SEQ ID NO: 445822 - protein, 310 aa, unidentified
MQDTIGIDISKDTFDIHRLSDRRHERFGSDKAGLASLRRWIGKAPVRIVYEATGRYHRDLEAVLGAAGHDLVKVNPTRARRFAQAISQGAKTDRVDAAMLARMGAVLELDAKPVRSETMHEIRELHIARRALNKDRTACRNRLEGARNKVVLTQLRARLRQVDSQLEQIDAELARLIAEVPALARRQAILRSIPGIGAVTATAMIVEMPELGTMEAKEAASLAGLAPITRESGKWKGRSKIGGGRRGVRNALYMPALVAIRHNLHLAETYRTLVDAGKPAKLAIAAIMRKLVILANALIRDDRTWTETAP

SEQ ID NO: 445823 - protein, 523 aa, unidentified
MATRPGSKKRRRTQPHAIHKPRGVLHPRVQAVGPEHFGLVSVDCAKARSKWMLADFYGRVLVPPTVVDHTRADFEAALRALRDAIGRHALKDLVVAVERTGRYHHPVRDAFAGAGFEVRIVHPFATKQFRQPADPGNKTDDTDLSAIHRAAVNGFGLLEHEPDPLYVRLQLLARHRRDLVDKSVALRNQIHEHLQAITPGYARRFGDVFDCQTPLWVAREFGSAAAVLEAGLTGLAQRLRQAGVRAHAPTLEKVVAWARTAPEAEGLAPLHQRFLIESDDDRLSKLRSIRAVEGELAGLLVQTPYVLLLGVPGINVVSAAEFAGEMGPIGRYPDARAITGRAGLFPARHQSDQVDRRDGALIRCANRNLRQAIMRIADNLIQCNDHFRVLAAGWRLAGKDPRDIHVKVGGRFCRIAYQVVAGRAAYRHPCCRQRHYVLDKLIKFYNDHDIECAQVLRGLDAAAAQLPRSEHRAEAAPLADELARAQTMRGAGPRRLGEILPAVLAKLGVHLVKSPESGETDPT

SEQ ID NO: 445824 - protein, 355 aa, unidentified
MNSEKYIGLDVHQATIVIAVTDSTGKLIMESILETEAATILQFFAGLRGTLYVTFEEGTWSAWLYDLLHPHVDKLVVCNPRKNALLKDGNKSDRIDARKLAELLRGNQLKPVYHGETGVRMLRELSRSYLTIVKDLSRVMNRLKAVYRSWAIPCAGRDVYYRRHRAQWLAKIREAGVRRRAERLYEQLDMLQHLRQQARRELLAESRKHTITAKLRQIPYLGPIRSALAVALIQTPHRFRSKRQLWAYSGLALETRISAEYRLVEGQVRRSKKLLSIRGLNKDHNHDLKGLFKAAATMASVRPGPFQDFYQAALAKGIKPTMARLTLARKIAAITLTLWKKGENFDAEKLKSQAA

SEQ ID NO: 445825 - protein, 325 aa, unidentified
METRKLCCGIDVSHATLDVCYQNNLGELFHIKVGNNSKGFEKILEHTGQDYHFVMEATGVYYIRLAFYLHHKGCCLSVVNALSIKRYIQMHLERNKSDKKDAGWICRYAIEQCPSYWEMPDSAYFEGKQLYNTIREYAEQIKRFNNQLHSLRLLPVPSKDTIRSLEKIKHQLEKQIEVLEQKLEVLLQQWQPGQLKSVSSVKGIGKRATAMLIVFTQGFKYTKNHRQLISFAGLSPTEYSSGTSVHGKPRIYKRGGKNLRDVLYMCAMNAIKTNTACKALYERLRANGKTGKQGLIAVCNKLLKQVFAVAKNNTLYQPNYCSAKP

SEQ ID NO: 445826 - protein, 381 aa, unidentified
MTTAVTHHEPENTIEATLFVAFELSEKTWKLGFTTGHGQKPRERTVTARQQERVLDEIVQAKRRLGLPETATVVSCYEAGREGFWLHRFLQGHGITNHVVDSSSIEVNRRRRRAKSDGLDVRKLLSMLMRYHHGERQVWQVVKIPSVEAEDQRHLHRDLETLKQERASTMTRIEGLLSSQGLRVTSLTKLPEQLDALRLWDGSPLPPGLRRRVLRVYAQYTFLSEQIAAVEAERRALLQTSPEASIDKVRQLMQLKGIGINGAWLLVMEFFGWRAFKNRREVGALAGFTPTPYQSGESAREQGITKSGNRHVRWMTTELAWSWVRFQPDSALRCWFRERFGGGGKRLRRIGIVAVARKLLIALWRFLETGVLPAGAVLKEG

SEQ ID NO: 445827 - protein, 428 aa, unidentified
MNCNTQNAKIASITEKTLIVGIDVGSETHYARAFDWRNYEYTRKPLEFSNTEAGFQTFKAWMEDIAAKHGKTAVIPGMEPTGHYWFALGKFLQDSGMRPVHVNPHHVKKSKELDDNNPNKNDRKDPKTIAALVNEGRFSYPYIPTGIYAEIRSLSNLRFQTQEELTRIKNRIARWFAIYFPEYKDVYGDYKAVSGRMVLKEAPLPEDIQKLGVEGVNKIWRDAKLRGAGMKRAKTLVSAAEHSVGSKEAPGAARMELKNLLNDMDVYTSRLEELLLKTEEKLKEIPYVDKLMGIKGIGMVTVSGFIAEVGDIGRFDNPKQLQKLAGYAIVANDSGKHNGESRISYRGRKRLRYVLYEAAISLIGKNAEFRAIHEYYRTRKENPLKKMQSVVAVACKVLRVFYTILTKGVDYDAGKLMGDIRRPQVQAA

SEQ ID NO: 445828 - protein, 355 aa, unidentified
MNNCTIIGIDLGDKKHAVVGLDDKANIVLKRWIPNTKADLEALFRRNRRAVFGMETGTHCRWVSALCGQCGCEVYVGNAHHLRSIFGNSHKNDMRDAEEIARLLHGDKRHFHPVQLRDAEHQNLVQLVKMREIVVSQRTKSANAIRGMAKANGIRLPDSDADSLHKKLAAVVDTLPESMQTLLGPQVGLLEKLCAAIDEYDRAIRDYRNAHFRKECNLLETIPGVGPVNAAAFVAFTGDVTRFRHARDVGPYYGLTAGRDQSSSKDEPKKITKEGNGFVRHLLVNAANLIMQGRGRNTELRQFGLRVWGNRGKVAKRKAKVALARKLAVTMAAMLRSGAPYNGIMEENENGQSNA

SEQ ID NO: 445829 - protein, 394 aa, unidentified
MAAVRLAIDGKVTAEVKTFMTTTAGLLALSDWLSENGCTHVAMEATGVYWKPVWHVLSDGDVELVLANASHVKNVPGRKTDVSDAAWLAELLAHGLIRGSFVPDGATQDLRALLRTRKQLVREKTRHSQRIHKTLEDANIKLDAMLADVLGKSGRAILDALVAGESDPVRLAALAHAGVKCPQEKLREALRGRVREHHRFLLRLHLGQVDALDAAIATIDQEVEANLAPFCDAVELVATVPGVKALSAQGIICEIGTDMNRFPTAGHLVSWAGLCPRNDESAGKRRSTRLRKGSPWLKTVLVQCAWAGIRKKGSYLQAQYLRLKSRRGPQKAICAVAASILTAIYHMLKDGTLYQDLGADHFHRRSKTTQTQRLVRRLQHLGYAVEIKPIPIAT

SEQ ID NO: 445830 - protein, 460 aa, unidentified
MILRLGIDIAVRAPHQASLADEQGRLLWSGHRFRTTPADLERLWSKIPHDTVEGLTVVMEPTRNAWVPLAAWLRRRGAHVVLVSAERSADLRAYYAKHTKSDRLDSVLLARLPMLHPEGLHAERGLGPGDPLRRATKLHSTLVKRRTTSLARLDALLEILGPDWHTALSGDLANKTPLRFLAAGYADPHTVKRLGRARLVRFFRRHSRGAWGEPEVATIMAAAKATDDLRGEELDYPDLAEDIAVEARLALALTEELKEVDERIATLVADRDPAGIITSAPGIGAVTGAVILGRLGDASRFSSLAAARSFSGLVPSLDSSGVSGRHGGPTKRGDALLREALFISANQARRIDPTLAAKYHRLMVETGKHHNSALCHIATTLLTRVVSCWRNQTPYELRDVDGRHVERDEARAIIADRYQIPEHIRRARTTTTGTGRRSKESQRAPSTDPSTTNARRHGAA

SEQ ID NO: 445831 - protein, 327 aa, unidentified
MNSSVAALGIDIAKLKFDVCLIKENGKAKHKVFANTKHGFEQLVAWLGSHQADCLHICLEATGSYGQALAFHLFDAGHVVSIVNPAAVKAFAASRLSRTKTDKVDAELITRFCLAQEPQAWHPPEPQVRQLQALVRRLESLVEMRVAEDNRLSSGISIEAVKHSLEEHIAYLLEEIKHTELLIREHIGNHPHLKEQSELLDSIPGIGATTAALLLAEITDFKQYKSARQVAAYAGLVPRERRSGSSVRGRTCLSKIGNARLRKALYFPAMTALRCSGFFQQWASGMRERGKSKMSVIGAAMRKLIHLAYGVLKTGMPFDPNWTAKAA

SEQ ID NO: 445832 - protein, 347 aa, unidentified
MLYLGLDVHCKWFTVNGFEKTTGECFHLKRVNNEPEAIREAFTQLPTPRCGALEAGTNALALHRVLAPYFEKLIIVAPNKMWDRRRDPSAKTDSRDAFALAEALAEGRLRGIYRPDQVLQVGRSLVRGRLQVTRDINRLVNQLYAVIRSYGYLVQKKALTKKGRAWLGEVTLPEEAATVLKYMLERLDLLQTQQRQLEAEITRWAAADPICRRLQTIPNVGTFTALVLRVEIGDIRRFKSADALINYTGLIPRVYKSSERVRYGRLTKAGNALLRYVAVLFAQNVTRNRQDTPFKRKYYRLCHTHDRNELKIILARDFLAVVHSMWAKESNWQYPRPAVVRETVSVA

SEQ ID NO: 445833 - protein, 400 aa, unidentified
MLSIGIDVSKGKSTVCGMKPGGEIVYAPFEVQHTREGMSELVSLLHNSGEEVRVVLESTGSYHCPVVAALLENGIFVSVVNSLRMKRFCSQSIRKVKTDRIDAMQIALYGLAYWQELQPTRLPEDTYRELQLLARQYYQMTSMLIKAKVDFNAICDQVLPGMQELMSDHAGRHKLSDFVLRYRHTTHILEMGETRFRKDYCKWAEKKGYRNCERMAALIFATAQNGIPVLPNAPSTQIVITEAIRVLHTVEASRDAILTQMQALAKTLPEYSLVREMPCIGDTLAPRLIAEIGDVRRFHSKRALIAYAGIDAPPYQSGKFCANNRHISKRGNRYLRKTGYEVMQSYVMHKPANDPIFTFIEKKRSEGKSGKLAMVAGLNKFLRVYYGKVTELYRSLPAIE

SEQ ID NO: 445834 - protein, 322 aa, unidentified
MTRIICGVDVSSAWLDASIGRTGNPQRFANTSEGIAELAALCHAHQVDLVAMEATGGYERQAFALLSERGLPVAILNPRAVRQFAQSMGKLEKTDSIDAAMIAWFAEVKRSQPNVLSQPGQQQLRALVTRLRQLTDLRTAQKNQQRLITDPRIQASFTEILALLNRQITGLAEAIAEHIHADPLWSELDLAFRSIKGVADRTVARIMAEMPEIGTLSNKAASKLAGLAPLAQDSGKHQGKRAIRGGRATVRDLLFIVASVCGRHEPDFVAFRERLAAAGKPPKVIRIALAHKLLIRLNAKARDTRHKLQTNPAHSIATAQAA

SEQ ID NO: 445835 - protein, 449 aa, unidentified
MSRPQVIDDEEHERVHERVAAVDVAKDSGMVCTRTPHPSRPGARRSTVWTVKARMGAVRQLGRQLKNDGIEVVTLESTSDYWRIWFFVLEACGLAVQLVNAAQARNLPGRPKTDKLDAQWLARLTELGLLRASFVPPKAIRDLRDYTRMRTRLVQERTRCWQRLEKLLESALVKVSSVASKLTTESAKDMVKAMIAGQRDPRQLAGLARTRMKAKHDDLIQALDGMFDDHHGELAGLLMDQIAVLDGKIAQLGARAAELAAAIPAAWGINADGTTGPDAGTGPDAPALNAVARLAEIPGISPDLARSIIAETGLDMSRFPTAGHLVSWAGLCPSARQSGPRTRAGKKGQGNGYLRGSLGQAAIGAARTATFLGERYHRIARRRGKAKAQVAVARSILVIIWHLLTDPAARYTDLGPGYYQARLDTDRKLPNHIRQIQALGFDVTLTKAA

SEQ ID NO: 445836 - protein, 362 aa, unidentified
MTAATMTATTAGPILALDLGKYKSVACAYPGDPADARFESLTTDREHLRKLFAKHRPALVVFEACALAGWVHDLCAELGLPRRVANTASEAWKFKHTRRKTGKDDARRLAQLQALGQLPTVTVPPTQTRQWRALIACRQALVGRRCAAQNRVRALLVGQGLPAPRGARAWTESGLGGIARHAKPLADCAADELWRGLLELALTEYRQAKALIDRAEAKLDALARADAGVRLLQTIPGVGPRTAETVVAYLGNAGRFGSGKQVSAYGGLVPRQYQSGESDRRGRITRRGPALLRKLLVECAWVMLRYNAWARAVYARLSRGKARKKQAIVALARKLLVRCWAMLRDGTPWRAEPGAEAPAAPA

SEQ ID NO: 445837 - protein, 377 aa, unidentified
MNHFTRFAVGLDTSDREMHIVVLEPGGALFHETALPLDAGVLSIYFRDLSELDPVIAVETGTHANWIYDLLKSLGFADVIVADARKLKMISQSDKKSDRRDAQTLAKFVQSCPELLHPVQPRGEQARQDRRLLGARQVCVETRTKLIAHVRGVVKSAGGRLPSCDAANFPGLAGALPDSLKEILTPVLEIIRQINGTISRFDEQIKQRCKNDPIIERLTQVAQVGPITGLAFAATVEDPKRFRRNRAIASFLGLRPKLDQSGEIDKQLPITKAGDGYMRQLLVISAQGTLRKNSPPSDLKRWGLAIARSGGKRGKRRAAVAVARKLAVLLLSLWKSGADYEPLRAQASKDAPRPKRITRSSKPVPPQRKSSRLRKAA

SEQ ID NO: 445838 - protein, 345 aa, unidentified
MKKGITIGMDLGDKKHQVCVLDKTGKIIAEEKVAGTRAAMASFFKRYRGAVVAMETGTHSRWVSQVAEAEGLEVLVGNARKLRMIWQSRQKSDTRDAVMLARIARMDPELLCSIRHRGERAQMDLEIIRARDLLVRERTQMVNHVRSVVKNTGERLAVSSAASFGHKAKIPEALNEALKPILEMIQVLTRKIHAFDLMIKEAMASKYPETERLRQVGGVGPLTALAYVLTLEEPERFAKSRMAGAYLGLVPRLDQSGQIDKQLRITKHGDGYLRRLLVGSAHYILGPFGPDCDLRTFGLKLMQRGGKNAKKRAVVAVARKLAVLLHALWRSGAIYEPKRIKPLAA

SEQ ID NO: 445839 - protein, 406 aa, unidentified
MRLFVGDDWAEDHHDVEVMDATGRVLASRRLPEGVAGMARLHELIGQQLGEAGEDAEVVIGIETDRGPWVAALVAAGYVVYAVNPLQASRFRERLGVSGAKSDPGDSHMLADMVRTDSHQLRVVAADSAEAGGIKVVARTHKTLIWERARQVQRLRHQLREYFPAALEAFEDLAAPDALELLGKAPDPARAARLTRAQVSAALKRARRRAIADKTTQIIAALRSQQLGQPAALTAAYAVTVRALAAVITTLNEQVKALESQVEAHFGQHPDAEIYLSQPGMGRILGARVLGELGDDPHRYPDARARKNYAATSPLTRASGKKKTVTARYIHNDRLIDALMAQAFSALNVSPGARALYDDLRARGIEHNDALRRVANRLVGILHGCLKTRTLYDEATAWSHRQNLAA

SEQ ID NO: 445840 - protein, 337 aa, unidentified
MDYFAGLDISMEETHICVLDREGAVVYECKSASVADAIADELSKAPSCRRIVFETGRMAPILFHGLSQLGLPVVCVESRQAYQALKSLATHKTDRNDARGLAHLARTGFFKPVHVKSLSAHAVRSLIIARKKLVGQRVTLENQIRGLAVVFGIRLPRALTAAFIDQALKASEGVAGLSAAMRGLIAVRTAVMTAVAAIDADIRRMTTASEACRRLMAIPGVGQLTALAFVAAIDDPSRIRRSRDVGAYLGLVPKRYQSGEVDYVGGISKCGDRRVRTLLYEAANVMLTRYKGQLKLKDWAFAIAKRSTMRKARIALARRLAIIMHAMLRDGTEFAPA

SEQ ID NO: 445841 - protein, 316 aa, unidentified
MQTALVCVGIDISKAQLDIAVEPGGESLTVPYNGPGLATLITRLSQLAPRRSVVEATGGLERALLRALVDAALPVIAVNPRQVRDFAKATGQLAKADALDAAILARFAVVIQPPERALPDPQTQELAAVLARRRQIPAMRRAEQNRLDRASARVQKRIEAHLRWLNAELARLDEELDGMIAQRPVWREREDLLQSVPGIGPVMSRTVLAELPELGLLNRKQEAALVGVAPFNRDSGRLRGQRTIWGGRAPVRTALYMATLVATRWNPVIRKFYQRLRTAGKPPKVALVAAMRKLLTILNAMVHHGTPWRSAVVQGA

SEQ ID NO: 445842 - protein, 364 aa, unidentified
MNKCHLNTELSSLEGTRSEFNRSKAIIKLGIDVHQDYYVVVKQEDGTNPKPAQRFQKEAFLHWAAKLKSQGAEVHAVYEACGFGFGLQRQLSALGIRCYVVCPQKLDERNKRVKTDGLDAKALCLKLDRFVQGNGDALALVRVPTEEEEQKRAIHRQREQLVKTRKVLEAQGRSLMVNHGMEPLSNWWKRRTFAVLRVPPWMKELLSNSQTILIALEEKIRALTAQLQGAAAAKQPRGLGLLSSVVIDREVGNWDRFKNRGRVGSYTGLCPGEYSSGNTRLQSCVTKHGNPRLRAALVEAAWRLVRFQPEYRAVKKWRHLLAKGALATGAARKKAIVAVARQLAVDLWRIRTGRLSAEKLGLIN

SEQ ID NO: 445843 - protein, 386 aa, unidentified
MFAKVRDAVSVGKTPRGGDKNILTKDSIIIGMDVHKYAHQAVALNCLGQELSQLSFTNDELAHCRTWLNGLGAQEAIVVGLEDVNGVGTRLSQFLLQEGFTCRYVPAILTERERKHSVQHDKSDYLDAKRVGKVILTKSEETLPVSTILTQENTYIKELDLLLQERQELVREQTAVKNQLHVLLHRYYGNTYRQEFKHIFSQKALTWYKKDLRIIQSDTKGAALLAAAILRRVERLQLILSQVAAIDKTLNGTSKTIHEVAVLTKELVGCGNLTACKIIVEVGTIHRFNSKDKLAKYAGIAPVRDQSSSKNRFYTNSGGNRKLNQAIHTVALSQIGAGGYEDAKKYFQKKVNEGKSKLWAIRCLKRQISNRIFLLLKNASNTKRTN

SEQ ID NO: 445844 - protein, 342 aa, unidentified
MNGDYDGRQYVGIDLHRRRSVIVRMTEQGEQLGWVRIDNDPVALGLELAKAGPDPEVVLEATYGWYWAVDALQTAGAHVHLAHPLGVKGFAYRRVKNDVRDAADLADLLRMHRLPEAYIATPHERELRELVRHRAKLVALRSGLKAQVHATLAKQGRLPAASDVFGRAGMAWLRSAPLELVYRQRIDSLLELIDAYDGEIETFRTMIANRFTGHRGYRAIQQISGIGPTFAAVFVAEIGDINRFSRPEKLCCWAGLTPRHRESDTTVHRGPITKQGSKLVRWAAIEACQHTRAGTKLSADRSRIIAARGRNVGIVAAARRLLTLVFYGLRDGEIRALAARAG

SEQ ID NO: 445845 - protein, 434 aa, unidentified
MAAVKARRQRNLDLITSSTLIVGVDGHAKSNTAAFTLARGTEALSPKKFENSRKGFLWLLDKVDCIARKHNLDNVIYVLEPNGPYWMLLARFLAERKLVVKVVNAYQVKMNRATEDPSPDKNDARDARSIADLGRQGKFNDTTLPESIYEDLRMLARQREGLVEAQSAQKHRLRAMLVRNFPELSSLVSDILGKSVCALLKAAPTAEAVASLGVEGVEQIVKGASRGRFGVKKAKQILYAAQESVGYCRATSAVCTAMAVTLNTIEGLRQQIEIIEDEMRRLLSQTEEGMLVLSIPGIGEVTAAIVLGETGGLRQYQNPNQIRKLSGLDLCGSQSGDRQSEKRISKRGRALLRKSLYQAAVACIRSNDILGKFYRGLIDPARRKTLAKKKALIAVMGKLVEIMFSLVRSGSGFNPAYKWISPGQYRPAVQAMAA

SEQ ID NO: 445846 - protein, 354 aa, unidentified
MKRPEDTLHAGIDLHSNNLVIGIVNQEGQRVAHRTLECNLKEVLEFLKPHKAQLASLAVESTFNWYWLVDGLRKEGYPIDLANPAKIQQYNGIKHAGDKHDAFHLAELQRLKILPKGHVYDPELRPVRDLLRRRMGLVQKRTSLLLSFKSLFARTTGQALELKELKKMEPKEAPQLYEHPANQLIAKIQVEHIQGLDRSIGRIDKAVLGCAREIPLYDKLLTLPGIGKVLGMTITMEVGEISRFKTDGGFASYCRVVAAQRISNDKRKGDNNSKCGNRYLAWAFVEAANFARRYDENCRQWYDRKAAKTSKVLATKALGCKLAKAAWHVMAKSCDYDEQRMFPELAHQKMKKEQ

SEQ ID NO: 445847 - protein, 340 aa, unidentified
MNYMGIDHHKQYSQMTLMDEEGKELKNERVWNFRSEVEKFLQGAGDEVKAVIEAGRSSYTMVDLLEELGVDVKIANPKEVKAIAKAKIKTDKRDSRILAHLLRADLIPEVYQRSGENRRRQRVLRQRAFFVGTMTRVKNKIRALLAQQKEEIGIEISRVKNLFSRKGLEALNGLDLPDTDSELVDGLLKMYQQLEERIKESDELVENLYNKMPETQLISTVPGFGKFFSVLVATEIADVGRFSRVEKLHSYAGVIPSTYSSGERHYHGRIIKEGNKWLRWAAVEAVWPAIKSDFDLRLFFDKHAKRKNINAAKVATARRLLTIIYRILKERRSYVPYKRS

SEQ ID NO: 445848 - protein, 359 aa, unidentified
MKKISTVEVFGNEILTGQKLTIGLDLGDRWSFYCVLDEAGKILLEQKVATTPEAMKQTFGKIPRSLIALETGTHSPWVSRLLTELRHELIVAHAQKVELITKSNRKDDRHDARTLARLARIDPQLLGPVRHRSAKAQIHLTVIRARAELVSARTALVNAYGQRLPKCGTQQVSRELGAGLPAELREVLEPLLKEVESLNERIQEYDERMEKIAKEVYPEVSLLKQVKGVGTQISLTYVLTIEDPYRFPKSRAVGCFLGLRPGRRNSGESEPQKGISKEGDRYLRTMMVQGAHYILGPFGEDSDLRRWGLKLAERGGKNAKKRAVVAVARKLAVLLHRLWVSGEVYEPLRNSQKAMRAVA

SEQ ID NO: 445849 - protein, 367 aa, unidentified
MKRVYIGIDAHKESNVLALAFAGTAVPEMYGKASADLKAFEAVLRRIMKKYELAKEEIAICYEAGPTGFVLARRLIKLGFECIVVAPSKIPTQSGDRVKTDRRDARKLARLYRAGELDGIHIPSVEDEVIRDVCRGRTDAVNSMARTKKQLLSFLLRNGYRYKGKAHWGEPHMRYLRELVLADPAQKMILEEYLQRIDFAVKQVERIDGQMETLLQTWSRKPLVEALMGFKGFKRTAAMVIVSEIGHFGRFKHPKQLMAYLGLVPSEDSSGGRRKQGAITKCGNSHARWMLVESAEHYRKPPKIAKGLSVRQEGLSREVRILSWHAQNRLNKRWNKLIFRGMHPNKIRVAVARELSTYIWDLAKIVG

SEQ ID NO: 445850 - protein, 355 aa, unidentified
MTFVGLDLHKRYITACALDANGVVLAEVRQMAVSLDALGSFLSAVPAPITVAMEACLYWQWLHDQLEAAGHTVRVADARQVKVIWQARSKTDPIDAKKLAELVRVNLLPTIWIPDADTRRRRQLLHGRAFLVRQRTQVKNRIHGRLTAENLLFPRSDLYGRAGRAWLATAPMSAMLRTHADRLLRIHDALTTEIEQLDDEVKRLRRDHPMIERLHTIPGVGLFGALFLVAEIGSIERFTSSHRLTAYAGLVPSTRSSGGKTSHGGTGHASNRWLKWILVEIVQTLKRAPGPVGDHYRRLLRAKGKPKATTAAARKLCCYIYWMWRDGLSYEAWLAQHHTDHKSEVRPGQLLGAVA

SEQ ID NO: 445851 - protein, 347 aa, unidentified
MLHAGLDLSRKKLDVCLLSDGGEHLDQIAVPPDVDSLRRLACRIEEVHCQPVCAVIESMTGARIVHDTLEQQGWSVEIADAQKVKGLAPLACKTDKIDSKVLAVLSHRDLVPAIWLPDPSVREERELARFRLHLVKHKSALKNRIHSTLINFGKPCPVTDLFGVEGRRLLKRLEVPEPWRGNITASIELIDDLERQIAEINRRLKEGHAEHPYVPLLLTVPGIGWVLAFTIAAEIGEIERFSSPEKLTGYTGLCPRVNQSGEKDHRGPLTKHGPTYLRWALLEATMHALRHPAYSERYQRTKRRLGKQRGAKVAQVDIARRLSHAIWHMLSRKEKFAPRGAAFRLAA

SEQ ID NO: 445852 - protein, 356 aa, unidentified
MNHVNKLDFSGQSIYVGLDVHKKSWSVSIFSEQCEHKKFTQPPEVDKLVHYLKRNFPGAAYYAVYEAGFSGFWAHDQLRDQGVNCIVANPADVPTTNKERTTKRDRTDCRKLARSLRSGELKGIYVPSRPKLEDRSLVRTRQSMVRKRTRCKNQIKSLLFFYGIDLPEEIVRSSWSKKFLRWIEDLRMERTSGDLALKAHLEELKHLRPIIASVNRAIILLSREGEYRDSVRRLKTVPGVSTLTAMILLTELCELARFATLDHLASYVGLIPDTKASGETEHIGNLTYRRNSQLRAVVIEAAWTAARKDPVLLLAFNEYCKRMRKTKAIVKIARKLLNRIRYVLKNQAEYVPGVVQ

SEQ ID NO: 445853 - protein, 346 aa, unidentified
MQYHAGIDVSLEQSSVCVVDATGKIVKEVKVTTDPHVLVTFFKGLGFPVTRIGLEAGPLSQWLYAGLTQAGFDVVLLETRHVKAALSAMVVKTDRKDARGIAQLIRMGWFRAVHAKSASSQEIRALLTARRLLLDKLRDVELSVRGILRGFGLKLGKVTQRGFETRVHELVANHPMLQQITRSMLLARATLQREHNMLHKALLKIIRGDKVCRQFMTAPGVGPIVAITYKTAIDDPHRIKKSKGAGPLFGLTPKRYQSGETDVIGGISRIGDAMVRAMLYEAANVLLSRTTRFSTLKRWGLVIAKRRGMKRAKVAVARKIAMILHRMWIDGTSFRWSNKEKVAAHA

SEQ ID NO: 445854 - protein, 314 aa, unidentified
MKKAVEVYVGIDVSKAWLDEAVHEQKEVTRFSNDDAGIANLVKVLKKRKPKLIVLEPTGGFEMLVVAELSQAGLPVAVVNGKRIRDFAKATGQIAKTDKLDARVLAHFAAAIRPEVRPLRTEEEEQLTALLTRRRQILDMLTTEKNRRVSVRAKVRADLEAHIHWLSDNLKELDQEIEEFVKGSPAWKEKDTLLQSVPGVGPVTSATMLGMLPELGLLNRQEIAALVGVAPMNKDTGNKQGKRRIYGGRADVRSVLYMAALSAKKHNPFIRKFYQRLIQHGKEKKVALTACMRKLLVILNAMVRTNQPWRSQTA

SEQ ID NO: 445855 - protein, 388 aa, unidentified
MTQVNDLSHSLIAFEQNSTLVVVVEMSQSSWLVAGVVPGIERRPLKKLDPNPLALLQLMERWRDQGTKAGRAITRIVLAFEAGRDGFWLARWLRVRGIETFVMHSTSVAVSREHRRAKTDRLDTEMLIRVFLGWLRGEPRHCKMVAIPTLEEEDARRPSRERESLVGERTRIINRMKAALVRLGIRGFKPGLLTAPQRLDALRTPEETLIPPNMLDEMRRDMARLAWVREQINAIEQARLERLEQAPATGRYAMVRMLARVIGVGVETADMLVQEVLSRNLRDRRAVARYAGLTGSPDESGAKRREKGLSKAGNARVRRGLIQLAWRFLRFQKDSALGQWYRERTEGAVGKRKTTMIVALARKLLIALWRMVTTGEIPVGVALRTAAA

SEQ ID NO: 445856 - protein, 439 aa, unidentified
MKAREIHKMKNKTDLRLEEITAGTLIVGVDIAKHEQWARFVDYRGVEIGKAFKFKNDLQGFESIVAKICEICKMKTLKYPIEQVIIGMEPTGHYWKPLANYLIKAGYRVVGVNPYHTKKAKELDDNSPTKSDKKDAITIARLVKEGRFFDPYLPEGIYSELRGLANARTSANKRLSAIKNTITAILDEYFPEIYEVFKKTLTGKASRQVLKSCPFPTFILELGEDGILAEIRKAVKKSVGMKKVRHLIDAAKESIGVQYGLDAARMRLKMLLEELELIERHMCDIEQAMESALYKTGYAEQLLGIKGIGVVTAASFLGEVGDPLRFQNARQIANYAGYNLTEDSSGQSKSGTCISKRGRKQLRSILYQMAFTMIGNNAEMKELYQYLTTRKNNALKKKQALVVISKKIITVIYSLLKKQEFYKPELVLGAVRKEFMKAA

SEQ ID NO: 445857 - protein, 349 aa, unidentified
MNIITVGIDLAKNVFAVHGVNENGKAELVKPKLTRDQLLPLIAQLPPCVIGMEACSGAHHWARLFRQHGHTVKLMAPKFVSPYRMGGKRGKNDAADAAAICEAVTRPKMRFVPVKEEHQQIILCLHRTRQGFVEERTATYNRLRGLIAEFGIVLPLKVACLRQCIGAHLEALPGYANQCIGDLLAHADQLDVRIADYDKAISQAAREDARSKRLMERPGIGPITASALVACIGNGHDFKNGRQVAAWIGLTPGQHSSGGKARLGRITKAGDSYLRSLLVMGARAVLNGCGDKQDGFSRWARSLQERRGYWRAVVAHRRQECAPGVGGVALWRGFPSDSEQGVRTSQKRL

SEQ ID NO: 445858 - protein, 347 aa, unidentified
MLHAGLDLSRRKVDVCLLSDEGEHLDQLAVAPDVDSLRTLAKRIDEVHSEPVCAVVESMTGARLVHDTLEQEGWSVEIADAQKVKGLAPLACKTDKIDSMVLAVLSHRDLVPAIWLPGPRVREERELARFRLHLVKHKSALKCRIHSTLINFGKPCPVTDLFGVEGRELLKRLEVPEPWRGNVTASLALIDDLERQIEAVNRRLKNGHADHPYIPLLRSVPGIGWVLAFTIAAEIGQIERFSSPEKLTGYTGLCPRVNQSGDADRRGPLTKHGPTYLRWALLEATMHALKHPAYAERYQRNKRRLGKQRGAKVAQIDIARRLAHTIWHMLTRNEEFAPRGAAFRLAA

SEQ ID NO: 445859 - protein, 342 aa, unidentified
MSISYVGVDLGSSKFHQVAINHSGAHTLNREFVTSEATLVKSFTDLRGEIHVHLEAGELAPWASEIIRPLVTRVVCSHPQTNAWIARDRDKCDRIDAYKLASLLRLNEFKEVHYPREQSRRDFKTLVQHYDELTQQQARWKTKLKARLRMQGIIVRGEEVFSARGRKAVLEQVKSNVVRTAIKQLYAVLDQSIASQTEAQMLMLRAAQALPEIRIMRTAPGVGPIGACRFSAYIHTPQRFSSTRKLWKYCRLSVSHRSSNGKPLRRPRLDRMGCGRLKDVSRKAFEAALRRRDNNGFKRAYQRALETTHDATHARLTVQRKIVSTLRAMWINQTPYCDELMR

SEQ ID NO: 445860 - protein, 363 aa, unidentified
MGESRDHPQRDWKPAAVSDVTPRMSLVLQPFLPYPNSCQGTSPHQQGWDTKMAELSFGGIDVSKDCLDVLLLPTGLYFSVRNNAPGWTELVARLRPFPVAAIGLESSGGYERGIIRTLLAAGLSARRINPNKLRQFARARGVLAKNDRLDARLIAEYVAAMPTRVVQRDEAVERLAEIVTMRRQLCDEHAAAMNQATHLEDAMLRRLSRRRLMRLEADISLLDKRLAELVAADPRLEHRYRLLVSMPGVGPTLAYTLLASLPELGQLDRKQIAALVGLAPYDFDSGKFKGHRCIYGGRMPVRNVLYMAALSASRYNPHLKAFSKRLAAAGKKSKVIIVAVMRKMIVTLNAMLRDNAEWRLTVT

SEQ ID NO: 445861 - protein, 347 aa, unidentified
MARIARIGIDTSKSVFQLHGVDEREKAVLQRKLRRQHFLTFLNKLEPTLIGIEACGGSHYWARELQALGHTVVLVPPQYVRPYVARGKNDAADAEAICEAISRPRVAQRFVPVKTADQMAAQMLLGVRESLIRRRTQLSNAIRGHAAEFGLVAAKGLSKVDPLLARIAADDALPTLAKDMFATLGQELAELAPRIAAVEAKLMAWHRGNELSRRLAEVPSIGPIGACLLPIKIANPHAFRSGRMCAAWIGLTAKDHSTAGKQKLGGITRAGDESLRATLVAGATAYIQQVKRGRTKPSPWLAELLRRKPPKLAAVALANKTARIAWKLMTSGQRYHRPPPAPAAAAA

SEQ ID NO: 445862 - protein, 341 aa, unidentified
MKNLFIGVDFSKEKVDVAIIFADGLTETAARVFNEFKTTVSGYKQLVKWVEQNSYGIDSSLWLFCGENTGDYSKGLCNFLYGKGYDMWLENAKSIKDASGLRRLKSDRADASMIAEYAMRNYDKAIMYEPLSESLAQLRELFLYRQMVVRHRCSFQVRRGEKRLTMEKSPIKTMISQSGRHIVSELNKEVEKIDKRIAELIKSDEELTEVFTIVTSVPGIGTQNAVCLMVYTDNFRRFNYDSRKISCYYGIAPFGKDSGTSVHSDPHVHYMANRQIKAMLTQASLAAVKFNPIMARYYMRLVERGKKKQVALNNVKNKLIHLVTAMVRNRQLFSPEYKISA

SEQ ID NO: 445863 - protein, 321 aa, unidentified
MTYVGIDVSKATFVVAYSSAKSSKTKTFKNTTKGVHEFIQTLSADDYHCVLEATGNYSSLLVYLLSQAGITVSLENPLKIKNFARVMLSVTKTDETDARLIALYGEKMHPAPYKLRSDAILILKQKRTVIRQLKKQLIATRNLKGSMEALPFFDSKCKKTIEKTIAFLERQVKDLEEELANLAQGEYRKQMGLLTSVKGIGVTLAAALIMATGGFAYFDNAKQLTRYLGLSPTYQQSGTSVNVKGHINRNGDSSLRSQLYVAAFSSLRCNTECKACFDRLRSNGKPGKVVVIAVANKLVRQAFAVVTQGKPYVDGFKSEKP

SEQ ID NO: 445864 - protein, 375 aa, unidentified
MIRFFGIDIHKDVAYVCAVDGQGRIVLSLAVPMNHAFDQFAAQLTKADHVAVEASTNAFAIHDVLARYAGEVVVVNPIKTRLIAEARIKSDKLDAQNLAQLLRSGFIYQVWVPPTEIRELRSLVGQRTGLNKQRTQVKNALQALLRTHRIEYETGKVFTQAGRRWLRSLELPGLATFQRDQHLTLLESIEVNLAAYDKEIARLAGDNPVAKRLMQQTGINYYSALAIYAEIGDIERFSSPKKLCSYAGLVPTLDQSGKKCRVGRITKAGRKRLRWILVECAQVACNHDPSLKKCFDRIAQKKGRNVAVVAVARRLLVRIWHLWHEDENHRHMKKDLWTRKLQDLAYDIGCRELGKQSTDFIQDTAQELEGKLTEE

SEQ ID NO: 445865 - protein, 443 aa, unidentified
MLSDALHVCNPHAAGIDIGEAEHWVAVPPGRDPQPGRRFGTFTVDLDALADWLIDCGVITVAMASTGVYWMPLFELLEARGVQVLLIDPRQAKRAPGRPKTDRLDCQWLQRLHAYGLRAGAFRPDDQVCVLRAYLRHRQRLLTYAAHHIQHMQKALQQMNLKLTQVVSDLTGVTGMAIIKAILAGERNPQHLAKLRNPHCHHDADDIAKALQGTWRAEHLFALRQAVELYEVSHQQMAQCDQQITRHLETFADKSDGQPLPPKARRHKKTNEPRFDARTPLSRLAGVDLTTIEGIEENTALILLSEIGTDMHRWPSVKHCCRWLGLCPQHKISGGKVLSRRVRPGAHRVTVALRLAARRLHHSQSALGAFFRRMKVRLGTPKAITATAHKLARLVSSLWQHGSAYVQQGLDAYEAQYRERKVTTMAKQAKALGYTLVLLAAQG

SEQ ID NO: 445866 - protein, 351 aa, unidentified
MPSKKDAAVIRAIGIDTGKNTLHMVGLDEKGAIVLREKVSRNRITARLVNVPPCLIGIEAGMATHYMSRELVALGHKVKQVPPAYARPFRQGHKNDFRDAQAVAEAVQRPSTRCVPIKTDDQLDLQALHRVRSRLIGDRTAVINQIRGFLLEHGIPVRQGPRFLRQQLPQILATRTDVLSPRMVRIIGEIVDDWENLDERIERVTDEIEGLARADVSCGQLMTVPGIGPIIASATVAAIGNGTAFAKGRDFAAWLGLVPKQMSTGDRTILGRITKRGNRYLRTLFVQGARAILLHPASWAKHSFGPWLTSAARRLHRNVLVIALANKLARIALTVLVQGRSYETRVEPAAV

SEQ ID NO: 445867 - protein, 319 aa, unidentified
METKVCVGIDISKDSFAVALPLAEKRCYQHLKFNNTTAGFKKLCTHLSVASHCVMEASGVYYLPLAVYLHQAGMQVSVVNPLTIKRFSQMRLMRTKTDKKDAAIIAEYGKVENPALWQPRPAHMLQMQQLQALQDNLTGQLTRLKNQQQTFQRSGVENKFAHHLLVLEINHVKKQIALLQQELVRLTQAFHQDLFTRLQTIKGIGKRAAMTLILISDGFSRFENSKQLCAYVGLSPRIFESGTSVKAKAKICKMGMSRMRQLLYLCAMRAISCNKACKEMFERLKERGKNGKLALVAIANKLLRQAFAIGKSQMSYQEI

SEQ ID NO: 445868 - protein, 347 aa, unidentified
MAYIGVDLHTNSFTICRLDDNGDKTLETYQLCQADLDRFCLSLDADDEIAVEATGNSAYFRDQVISCVGRVVIVNPSHFQVIRKSVSKTDKNDARALALFLSKNMLPKTRIKSKAHGELASLTHTRDLLVKQRTRLINKIHALYNRHGIKIKKEKLGSRRALANLDMAVFSELERLELGIVRDQALSLTGSIKELDRHVETYAEPMEGYQGLTSIKGIGSRSAAIFLSAIGDVNDFESADKLAAYFGIVPRVSQSNDTDHRGRITKRGNKLVRTTLVQCTLIAIRYSGYLNSHYRRIKERRGAGKAIIATARKLLKIIFDTLTNGWVFEDFTTFTLAENQIAAGHSS

SEQ ID NO: 445869 - protein, 403 aa, unidentified
MNNVAGIDVSKGKSMVSVLRPFGEVVAKPFSVGHTGSELKELADYLKSLDGETRVVMEHTGRYYEPVARFLHEEGVFVSAVNPKLIKDYGNNTLRKVKTDKADSRKIARYGIDNWAELRQHTPMDTIRMHLKTLNRQQSLYTKTKTMMKNNLIALLDQTYPGVNALFDSPVREDGSQKWVDFATAFWHVDCVRNMSLAAFAERYRKWCKRHGYNFSQSKAVEVHAGAQDLIVMLPKDALTKTMVRQAIDALNAVSASLERLKAEMRTLAAQLPEYPVVMAMHGVGDSLGPQLMAELGDVTRFTHRNAITAFAGVDPGADQSGTHEAKSTRVSKSGPPELRRALFLVMDCLLKTQPQDDPVYRFMDKKRAEGKPYLVYMTAGANKFLRIYYGRVKEYLASLEGN

SEQ ID NO: 445870 - protein, 412 aa, unidentified
MRRVIGIDTHRTFGEVVIWEDGRLRHVGRVDMTRTALEGFGKKLLATDEVVIEATGNCMAVSRVLTPFVKRVVIANPLQVKAIAHAHVKTDKVDAGTLASLYAAGYLPEIWTPDAATERRRRLVARRYQVVRHRTRIKNEVHSILYAHLIPRCPHADLFGRLGRTWLTSQPLPDDERAAIERHLRELDRLGDDLRVLDQEIAQSALDDAAIKRLITITGVNLTVAAGLVAAIGDIGRFSSPQKLVSYFGLNPRVHQSGLGAAHHGRISKVGRSHARAMLVEAAWATAKAPGPLHAFFVRIRARRGHQIAAVAVARKLAVLCWHMLTKQTDYHWARPALIANKRRAMELQAGRPQKKGNKRGSTYAYNVKALRDQEMRLAQQAEQSYENLVAHWQPRPAKKQARGRLKPAGLD

SEQ ID NO: 445871 - protein, 391 aa, unidentified
MTYFIGIDIAKYKHDCFIMDQDGSVIRDSFSFPNDSAGFCLFLSVLDSLDPSYEKRIGFESTGHYGLNLKCFLEEHDLSFMEINPILIKRFSSATTLRRTKTDKADAALIASYLTTVEYITYPTQSYHIHNLKSLTRSRDALVKLRSGQLVMITNVMDKIFPEFKPFFNKSLKSSTAMYLLRNYTVPSKMASMNSESYRKMSSKLKKTISYARFSKLRELAKNTVGREDPCLTFELNTYLDIYQSLDFKIKEMEAHIEEEFKKIHSHIQTIKGIGWMSAASIYSEYGGIENFQTPNQMLAYAGLDPSRSESGEHAYKGHMVKHGSSHLRYVLLNCAEMVILHNPVFYDYYRKKREEGKHHRVALSHVARKLVRIIFFLEKNNVDYDPKKMR

SEQ ID NO: 445872 - protein, 373 aa, unidentified
MYYVGLDIHQRSTSVEILDCNGRLVKRAEWKLPWPQLADQLKKDAPGPFAVCYEASCGYGYLHEQFSSVAQQVKAAHPGSLRLIYKTKRKNNRVDAGKLAKLLYLDAVPSVYVPGRETRLWRQTIEFRQSLLIRLVALKNQIKASLRERGITPMKGLWTVKGMAWFKTQGESDDAWALRRDLLIQELSELRQKIKRVELQLKKMSDPRPGAALLKTIPGIGPRTAEALVAYIDNANRFSSVRKAGSYFGWDPCQDSSADKNRLGHITRDGPPTVRKLLCEAAWQGVRRSPTIKAFYDRVTRNDPDRKKIAIVATAHYLTRVAVSMLKSGEVWREDPRLNATVENQTDSKDHALGGSAPKPPPRKPLPPGGGVL

SEQ ID NO: 445873 - protein, 322 aa, unidentified
METVTFEQVVSRGCGLDVHKETVVATIDGEGIERTTREFGTFTRSLTELKDWLVENKITHVAMESTGVYWKPVYNILEPTGITVWIVNARHVKNVPGHKTDKKDSRWLCKLLLAGLLKPSYIPPREQRELRDLTRYRKKLIRDVASNKNRIIRILEDCNVKLSSVLSDTSGITATKLIDRLCEGKQVTIEDIDEVYHGKIGATKEELWEACNGNITDHHIYLLGTIRSNNRHIESLIEELNQKIRQMLSPYENVLELLKEIPGLSHKTVEDLIAEIGLDMEVFPSEKHLASWVGVSPGNNESAGKKKAVEPPTETNKPKQRW

SEQ ID NO: 445874 - protein, 350 aa, unidentified
MNKPKKFVGIDIGSETFFAAIGAMENTGWKIIVRPTEFQNTVDQLPQFVGWLNKQNLTPKNCILCMEATGVYGEALAYFLVSQNYQVVVEPPLKVKRAFKVAGHKSDPVDSCQIAEYAYRFCDQLRFWQPREEIYEQIKALLTLREQCVVQRTAHKNANHALKRKVVRTPLAERIHEQAIEELNHHIKEIEQEIEHLINQDPPSKGLLKNIKSIPGIGSILAVHFLVSMQTAPDPYCPKNLAAYIGICPYEDSSGTSRHRLDTSRHYGPSAMRRLLYLAAMSAREHQPKFRQYFLRKVAEGKPKQLVINNIANKLLRIVCAVARTGNPYIEEYRSIHPDLLRIDLPLTVS

SEQ ID NO: 445875 - protein, 327 aa, unidentified
MNLSTVVLGVDIAKLKFDVCLIKETGKAKHKVFTNTKHGFEQLVIWLNSHQAGSLHVCLEATGSYGEALALYLFDAGYRVSVVNPAAVKAFAASRLTRTKTDKVDAELIARFCLVHEPQAWQPPAPAVRELQALVRRLESLIEMRVSEENRLSSGVSIEAVRDSLEEHIAYLVAEIKQTELLIREHINNHPNLKQKSDLLDSIPGIGATTAARLLAEITDFTQYQSARQVAAYAGLVPRERRSGSSVRGRTCLSKIGNARLRKALYFPAMTALRCSGFFQQWASGMRERGKSKMAVIGAAMRKLIHLAYGVLKTGKPFDPEWTTKTA

SEQ ID NO: 445876 - protein, 326 aa, unidentified
MEHELHYIGIDTAKEKLDVDVLRPDGRHRTKKFANTTKGHDELVSWLKGHKIDHAHICIEATGTYMEPVAECLYDAGYIVSVINPALGKAFAQSEGLRNKTDTVDARMLAEFCRQKRPAAWEAPHPLERALRALVVRHQALTDMHTQELNRTETALEVQRPSIDAHLLWLEAELKRLEKQIKDLTDDDPDMKHRRKLLESIPGIGEKTSAVLLAYIGLKDRFAHARQFAAFAGLTPRRYESGSSVRGASRMSKAGHVSLRRALYMPAMVATSKTEWGRAFRDRLAANGKKGKVILGAMMRKLAQVAYGVLKSGVPFDASRHNPVAA

SEQ ID NO: 445877 - protein, 339 aa, unidentified
MGLYGGLDLHGKSTFLGLVDGEGKRVYRKKLPNDPGIILGELHPYREEIIGLVVESTFNWYWLVDLLMDHGYRVHLANPAAIQKYTGLKYADDEHDAFWLAEMLRLDILPEGYIYPKEDRPIRDLLRKRGHLVRLRTSLILSLQGIIARNCDVRLSVNKIKARRTNQVGPLLAGNEDLALAGAVSKESIDFLGENIRKVEGVVERRVELREPYRYLLSIPGVGKVLSLTIMLETGPVRRFPKVGNYASYCRKVRSQWLSDGKTKGKGNSKNGNKYLAWAFSEAAEFARRYDEEARTFYNRKKGKTNFMVAHNALAHKLARAAYYVMRDQVPFNSAKLFS

SEQ ID NO: 445878 - protein, 347 aa, unidentified
MMRILALDLGKYKTVACEYEAESGQHRFATVLTTPKALHDLIVDREPQRVVIEICSIAGWVGDLVRSLGIELQVANTSDERWQWRKVKQKNDRRDALKAAQLSAVNQLCPVHVPELTMRQWRALIAYRSKLVQRRTKVKNHIRDLLLREGQLLPRGRTAWTQAGMATLAALAQPFATLDSEQLWRGELGLELAQLNELQQQIMTVHAKLDELAAADARVQLLRTIPGVGPRLAEAIVTMFDEVTRFSTAGQVGAYIGMVPKQFDSGETQRSGRITRHGNRLVRSLLVEIAWASLRHNPWARQTFQRISGGKKSRRKIAIVAVGRKLLVRCWGMLRHQTPWHWQPGVA

SEQ ID NO: 445879 - protein, 362 aa, unidentified
MVGHIFVGIDLGDKNSVARIAVNRAKSERLGFINTRSGRGRLFREVKQHAEKVGGAEIVMAYEASACGFVLRDEAVAHGIRCEVLAPTKMEKSSEQKKNKNDDRDAEDLVERLRGHVLAGNRLPVVWIPDAPLRDERELTRLRTDLTEKATQIKSQIQMLLKRWGQEKPADAGASWTQPFRHWLAALTESGPLGQGARQTLGSLLRQLHFHEVEIERMEKPIYELAGTPRYKRIVESLCQEKGVGLLSAMIFSTEIGYAGRFSRGRQVGKFSGLTPSSHESGQQNDHKGHITHQGPPRMRKMLCQSSWIHIRHDQDSREVYLRLVDRNPKKKKIALVAIMRRLAIRLWHRMRNAELEMAKAA

SEQ ID NO: 445880 - protein, 416 aa, unidentified
MKIVRPICCGMDVHKNIIVATIGITNKKTRITEYIQETFSTLNPDLLNLKQWLINHKCFDACMESTGKYWIPIFNILEDEINIYLVHPKYVKAIKGKKTDKKDSKWICDLFKHDLIKFSFIPPKEIRALREISRYRYKLVGMRSSERNRYQNCMTVSNIGIGSVFSDPFGKSAQAIMKEVLESDIIEDEKILKCIHGSCKNKDKILDSIKHCNIETDQRFKMNESMTHMEELQVHINNCEIEMMKRAAPMFDQFMHITQLPGISTLSAILIISEIGVDMKQFESDKQLTCWAGLAPANNESANKKKSVRISKAGQYLKPLLVQCALGAIKDKEGYFGIKYSRIKKRRGHKKAIIAIARMMLVSIYHMILTGETFNPSDYESFRNPKPPIKQQDLTEESAIEFLKKSGFDVSKLTKP

SEQ ID NO: 445881 - protein, 331 aa, unidentified
MKSKELIGIDVSKNVLDVFILAVSYHFTVENNPSGFARLLEISCSRLNTLPSNLFLCFENTGRYSRLLSVFLQESSISFSMVPAMDIKQSKGMVRGKSDRKDAQMIAQYAFRKRDELIPTVLHSAEVSQLRQLIALRDKLIRNRTGYKNSIKDLQDFYYTGESDFIRDTQERLINHFNIEIDAVERQIDFIISSIPGWDKNYKLIQSVKGVGPVLSRYIIIYTENFARFTDPKKFACYAGVAPFEYSSGTSIKGRTRLHPCANKQLKSLLNIAAMGAVRLKGEYKTYYDRRTEEGKNKMSTLNIIRNKLLFRIFAVVKRQTPYVDLTMFAA

SEQ ID NO: 445882 - protein, 411 aa, unidentified
MEVVHVRCAGLDISKKDAKVCVRVAGAGRRKTVETVTTWSSMTSQILALREHLIAERITCAVMEATSDYWKPFYYLLEDAGFDVLLVNSRHVKNLPGRKTDVADATWLAQLGAHGLVRASFVPPEPIRQLRDLTRTRTAITRERSREVQRLEKLLEDAGIKLSAVASDIVGVSGRAMLESLIAGNSDPAALADLAKRRLRSKIPALTEALSGRFTDHHAFLARVHLDLIDQHTAAIDEITIRIEELIAPFHGFRDLICTIPGISTLTADVIIAETGADMTRFPTAAQLASWAGTTPGNNASAGKVKSSRTRPGNPYLQGALGAAAMSCAQNPRTYLGARYRRIASRRGPQKANVAIQHSILIAIWHMGTNGCLYDDPGADYFNRLHPDRAKKRAINQLEAMGYQVTLTHAS

SEQ ID NO: 445883 - protein, 413 aa, unidentified
MKYEIITAVGIDVSKGKSTVAVRRPGGEVVLTPFQVNHDAAGLFSLVKTLQDVGGNIRVVMEHTGMYWRPIALALKEAGFFVSVVNAMLIHDFSDNSLRKVKTDKADSMKIANYALSFWAELRDYSPEDETRQMLKMQNRLYLRTQKSSVTLRNGLISLLDQAFPGVNTLFDTQPKRSNGHFKWVDFVKRFWHRDCVAGVSLAAFSDAYRKWCARSGYRFSPSDAEKLHTAARNAVTTFPKNDSTKLLIAQAVDSLNAVYDALYILRGEMLRLASLLPEFDVVMAMQGAGEVTGPQLMAEIGDVRRFTHKGALVAFAGMDAPPFQSGTFDSKSRRISKRGSPNLRKTLFMVVSTILQHSDPANPIFQFMDKKRAEGKHFYVYMVAGAAKFLRIYYARVKAHLMALDAEASTAA

SEQ ID NO: 445884 - protein, 398 aa, unidentified
MTESSDYESVQVFIGVDVGKDTHHAVAINRSGKRLFDKALPNDENKLRSLISDLKQHGQILLVVDQPATIGALPVAVARSEGVLVGYLPGLAMRRIADLHAGEAKTDARDAAIIAEAARTLPHALRTLKLADEQIAELSMLCGFDDDLAAQTTQASNRIRGLLTQIHPALERVLGPRLDHPAVLDLLQRYPSPEKLASLGEKKLAAQLCKLAPRLGKRLAADIAQALAEQTVVVPGTNAAAVVLPRLALQLITLRKQRDEVALAVEQRVLAHPLYPVLTSMPGVGVRTAARLLTEVACRAFASVAPLAAYAGLAPVTRRSGSSIRGEHPSRRGNKALKRALFLSAFAALRDPLSRAYYTRKMSQGKRHNQALIALARRRCDVLFAMMRDGTFYTPQAS

SEQ ID NO: 445885 - protein, 351 aa, unidentified
MEYQQTAQPKLFIGIDIHKRSWKVHCATDLFAGKSLSMSSDPEQLRRYVSKHFPDYEVSTAYEAGCCGYYAHRCFEGYGWRSLVVNPADIHRKGKEKHTKTDRIDAQLIARELKDGRLESIVVPDIEREELRSLFRRRNDLVKDFRRIKSYIKMQLLYFGIKEPEEFDNDHWSHKYRAWLDDMDFKHPTARATLDSRMRFFRFVDQELRDVSTQLRRYCKVHYKKDYLLLRSIPGIGGIVACGILCELGDLRRFNSVKHLAGYVGLAPGVYQSGGTSRVMGITPRAHRLIRSYFVEASWQAIRADPVMQSYYRKHQGKNVKSIIIKVARKLLSRTLAVIKTEIPYTIGVVE

SEQ ID NO: 445886 - protein, 418 aa, unidentified
MKSNKTEKVKIINEKTLIVALDIGKNVHYGYFRTPKNKDVKPFPIYNTGQSFKKFWGKLCRFKEEHMLDEVVVGFESTGPYAEPITNYLRKKPVNLVQVNPMHTKRIKELTGNSPNKTDKKDPRVIADVISLGHSLTVVIPEGAAAQLRRLTHARERAIGRRTAMSNQLQDLVFVIFPELGSIIKPSTKTGMYLIKNYPDSESIASIGIENLSDITRRVSRGKFNKDRAEELYNAAEQSIGITEGKESVILETSHLVSNIENENRYIESLEEQMIEHLEQIPYSHSILSIKGIGHVTAAGLIGEVGDFNKFNTISEITKLAGLDLFEISSGQFKGQRRISKRGRPMMRKLLFFAAINTVKSTGIMHKKYKQMLDRGMLKMKALIAITRKILGIIFAIVHNNTVYIENYTKQNHYKLAA

SEQ ID NO: 445887 - protein, 402 aa, unidentified
MNAVGIDVSKGKSMVAIMRPFGEIVSAPFEIKHTASGINSLVELINSVEGESRIVMEHTGRYYEVLAHQLSKANLFVSAINPKLIKDFDNDSLRKVKSDKADAVKIARYALDKWQNLKQYNVMDELRNQLKTMNRQFGFYMKHKTAMKNNLIGILDQTYPGVNTYFDSPARSDGSQKWVDFASTYWHVDCVRKMSINAFIDHYENWCKRKKYNFSKSKAEEIYGKAKELVPVLPKDDITKLIIKQAVDQLNSASITVESLRTLMNETASKLPEYPVVMAMKGVGTSLGPQLMAEIGDVSRFTHKGAITAFAGVDPGVNESGSYEQKSVPTSKRGSSDLRKTLFQVMDVLIKTHPQDDPVYQFLDKKRAQKKPYYVYMTAGANKFLRIYYGRVKEYLASLPES

SEQ ID NO: 445888 - protein, 309 aa, unidentified
MLTCAGIDVSKDVLQIELDPQGMGAVFPNDINDFSKMVDWLKCHQVSRALLEATGGYERRAMKALQAAGFEVLRVNPCRAKSFAKAMGLHAKTDPIDARLLAQFAAVIHSPESRITNAEQDNLRALVQQRENFVQQRDDDKRRLKTTVSEIVKPALQSHIDYLRKAIKSIEKLMGQSAEQLDGEKVARLCSVKGIGLVTAASLMSYLPELGEVGRHEIAALAGVAPYNDDSGKHKGKRHISGGRFAVRRSLYMASWIVIRYQPEFNARYKALRDKGKCAKVALIACMRVLLIRLNAMIRDGSEWKEHIA

SEQ ID NO: 445889 - protein, 499 aa, unidentified
MADYFLGCDISKGYADFTILDSKKHVAESDFQLDDTFEGHSCLCNILERFFKAHPDSTLYAAVESTGGYENNWLNLFYRLSGLMNVKAARLNPVGVNAYNKASLNRNVNDSISAKNIAGYLISYPEKIPYSQEDTRSSLRKQWNFIAMLKKQRTQLFNQLGFHIYTANTAILKYCKNGLPRWVLYLLERYPTSLKLSRARVSAVSKIPYISQERARDLILAARKSIASSGDEVTEFLIKETVKQIINLGKSIELQEKYLEKHCDIPEVNILTSFKGIGTLSAVGLSLNIVTIERFPTVKHLASYFGLHPVYKESGDGMWGFHMSKQGRIEPRAILFMAARSAINSNPLIKEIYIKHVQRGMSKMAALGVCMHKILRIVYGMLKNQKAFDPEIDRENSRKVLSTKETRESKKKDARRRYQKQDDSAPVSRRQGIKRKERKKSQSNNVTKNGIIASSPSIQEAMHLKGGKRPYQIFKERANELTHCYYMTLRELYPFQQKV

SEQ ID NO: 445890 - protein, 338 aa, unidentified
MKLYGGIDLHSNNQVVALIDEQDKVMYQRRMPNDLEVVLSELIPYRSTLEGVVVESTFNWYWLVDGLMEAGYRVHLANTAAIQQYEGLKHTDDPYDARWLAHLLRLGILPEGYIYPKEERSLRDLARKRMQLVRQRTTQVLSMQNLLVRNTGSKPSGNRLKQWMESDVDAQLSHPDLALAVKANLRVRRCLDEQIDILERRILEQAKLKPVFKPLLTVYGIGRILALTVMLETGDIGRFEKVGNFASYCRCVDSKKLSNGKRKGSGNTKNGNKYLAWAYVEAANFAVRYYPRVKRDYQRKCAKTNGAVAIKAVAHKLSRACYYVLRDQVNFDVNKAFA

SEQ ID NO: 445891 - protein, 361 aa, unidentified
MRMIGVDLHTRQQTLAMLDSTTGEVVEKTLMHEASNVRNFYSTLSRPVCVGIEATGSMQWFLNLMEELGIECQVGHPTEIRAAEPRKQKHDRRDADLILKLLLENRFPSIWLPSKELRDLRALLLHRHQWVRMRTRVQNALQAIALANGLRRGPSLWSQAGQHTIASLPLAPHTAHRRAELLALYVRFEAEIGKLNQRVEEQAWERPGALLLMTHPGVGPVTALATDVFLGDPTRFADGKTLASYVGMIPSEYSSGGRQRLGGLSKQGHPLLRFLWCEAAMHAVRRDPQLQRFYRRKLIQKGLGKARVAAARKLGIRLWIMLRDQIDYNEFCRRGQIRQKNGGACAGMPDTAHGAKQSPTE

SEQ ID NO: 445892 - protein, 385 aa, unidentified
MSQLSGSRQAALDYNSTIIGAVELSEKKWVVAVQLPGVGRHSRHMLEACGDGLASFVERLKARCAAAGHRITRVVLTHEAGRDGFWLARFLARRGIEVHVIQPSSLPVDRRARRAKTDIIDVEMLLRTLMAWLRGEPRVCSMVPIPSEADEEARRAYREREDLTGERRSIVNKIDGILATLGVKGYKALRRDRREQVTALRQPDGDPIPQKARARIERLLDRLELVLKLIEQVESARDAVLKKDAPADEAERMIRSLTDLRSIGPDFATLLVREAFVRQFRNRRALGGYVGLGGTPFSSGGSEREQGIGKDGNRRLRAAMVELAWMWLRWQPDSALSTWFRARVGAMGGRIRKIMIVALARKLLVALWRYVKDGVIPDGAKMKAA

SEQ ID NO: 445893 - protein, 381 aa, unidentified
MISETTHSDQYNRLGSCLYLAFELSQKQWKLGFTIGIAQRPRIRNIMARDLQALEHEIQAARQRFGLPGDAPVLSCYEAGRDGFWIHRYLATNGIQNLVVDPASIEVSRRARRRKTDKLDVNKLVAMLIRYHSGERKVWRVVHVPSRQAEDARQLHRELLTLKTERTRHINRIKGLLISQGVSVPVRTNLPDLLESIRLWDGSQLPEALGMRLAREYQRWLFVNQQIDQLSAHREELLKSSQQPSVEQVRQLMRFKGIGVNSAWLFVMEFFSWRNFRNRREVGACAGLTNAPYQSGDTSKDQGIEKAGNRFIRAMAIEIAWSWLRNQPESKLSQWYQQRFGQGNTRLRKIGIVALARKLLIALWRYLETGTVPEGAQFKLA

SEQ ID NO: 445894 - protein, 508 aa, unidentified
MRYKVNGSADMTDPALVRAVASPLESMVRESSPTVVSAAMRIPFRRSSRIRRFLWRCRSLTILEQMMAMRKREEEVVFPNAAAIDVGGSTHWVAVPRDRADQPVQEYGAMTDDLHAMANWLIACGVDTVALESTGVYWIPVYEVLERRGLKVWLVDARQMKYVPGRKSDVQDCQWLQKLMSLGLLRAAFRPDDEVCVVRAVARQREVLLAEQASWVLRMQKALVQMNIQLSEVLTDVMGMTGQAIIRDIVAGERDPAVLARHRQSRVKASEADIRRALTGNWRDEHVFVLAQSWAMYDSLAQRVTECDAKMQALLTPLGCHEVNLHGPGKRAGTNTPAFDLRMALARWAGVDLTRINGLALTSVLTILSEVGPELSRFTSVKHFCSWLGLCPGTKVSGGKVLSARTRRSTNRVRQALKLAAMSLSRNSSALGAFYRRMCARMDKPRANTAVAHKLARMIYFMLTRGEDYVDQGQQRYEEQQRQRSIAALRRRAADLGFAITPTGAAAT

SEQ ID NO: 445895 - protein, 326 aa, unidentified
MGYTAGVDVSKQRLHLAVRTPEGKWVVEHQSFPNSETGFRTLVQSLPETDGIIQLGVEASGGYERPLVSWLMDESKLEISRLNPRRVKDFAKSKGRRAKTDAVDARTIAHFVATHDPNPAEDPDSTQEKLKRLSRHLDHLKESRARKKSYKESLSDPYLEDQVQETIEGYDRQIDEVKERIEELQDQDQMVSQTIDYVATIDGVGDETACQLLPELANGFDPESIEPRSEAAHSGLTPEIKQSGTSVDHQSMSKRGNSRIRKLLYYPTLSAIQCNPVIKDFYERLIDRGKDEMVAVVASMRKLLHIIVGVIKNQAEFDPNWETKKA

SEQ ID NO: 445896 - protein, 347 aa, unidentified
MEHFVGLDVSAKATSVCVVDDAGKVLLEQKVPTDPADIIAILTSLGVSFGRIGIEAGPLSQWLVNALTAAELPVICVETRHMKALLTAQQINKTDRNDARGIAQMMRVGLFKPVHVKTLVAQQQRMLLTSRKLLQRKLLDVEADLRGTLRNFGLKVGAVSGSRYEARVRELVEGFPGLAAIAEPLLNVRRVMRQQFAVLHKMLLDRVRGDPVCRRLMTAPGVGAVVALTYRATVDQPQRFVHSRAVGAHVGLTPKRYQSGEIDYDGRVSKCGDALLRTMLYEAAQSLLTHSTKWSWLKAWGMRVAQRRGIRRAIVAVARRLAVVLHRMWVDGSEFRWRKDSAVPATA

SEQ ID NO: 445897 - protein, 326 aa, unidentified
MTLSHSTDNTFVGIDVGGAGLDVAWHRGDSAHYANRPDAIATLVERLRTGPEVTRIVLEPTGGYEKALVKALRQAQLPVEVIHTTRFNAYRALVGVKAKSDTSDAKLLASYAAAPDEVRGRKAGHVELPEDAVREELSELASRRDQLKHMIHAETCRLGTVRNDELRQMITTHLATLRAEDKQVHRMMLELVRQRDDLRRDQRLLKTIKGIGVKSALVLLASVPELGRIDNKAAAALIGVAPFVRKSGTMNAPARIHGGRAPVRSILYMAAVTASKHNPLLSPFYDRLIAKGKPPKVALIAVLRRLVVFANAVLRSGQPWKGASAT

SEQ ID NO: 445898 - protein, 418 aa, unidentified
MRNSWTPYKFTFGGTRMYNAVGIDVSKGKSTVAVLQPAGVIIRKPFNVNHTSSELDELAKYIGSLEGETRVVLECTGRYHEPVVKTLSEAGLFVSAVNPHLIKNFGNNSIRKVKSDPADAKKIARYTLDNWIELRQYSSMDNTRTQLKTLNSQFSFFMKQKVAAKANLIALLDNTYPGVNKLFDSPVRDDGSEKWVDYAYSFWHVDCVRKIGLKTFTERYQAFCKKHHYNFQPAKPAELFLASKDLIAVFPKEASYKLLIQQSIQQLNLASSHVEELRSKMNELASTLPEYATVMGMYGVGKTFGPQLIAEIGDISNFSHREALTAFAGVDPGVDQSGTHNSKSNKASKCGSNHLRKTLFQIMSTLLQTAPEDDKVYQFLVKKRAEGKPYYVYMTAGANKFLRIYYGKVKECIRNLEQ

SEQ ID NO: 445899 - protein, 482 aa, unidentified
MKHKRHEKTKKAICGPTQGNWQQMNRKQRREMTRKIQSEDISLEVIHPDAAGIDIGNESHYVAVPPPRDSQPVQRFGCTTAELKDMAGWLKQCGIRTVAMQSTGVYWIAVYDILEEAGLEVYLVNARDTKNLPGHKSDVQESQWLMKLHTYGLLRNSFRPSQEIRTMRTYWRQRNDLVQSAGRHIQRMQKTLTQMNLQLANVLSDISGVTGQAIIKAILAGEHDPDKLAEFRDPRVKARKGQIARSLEGNWQEDLLFVLQQEQDGYEFCQKQMTECDQRLEHYLQQRDDRSAGASLPEEKRKERRKKRKGNKPRFDLRTGLFRMTGTDVTRIDGIDVMTATTILSEVGWDMSKWETEDHFVSWLRLCPDNRTSGDKIIGKGRLPTNNRVSTALKMAASTLRTSQTYLGAQFRCLRSRLDTPVAIKAMAAKLARLVYRMLRYGMKYVDRGAEFYEAQHRQRQIKHLKSKASKLGFQIIQVPAA

SEQ ID NO: 445900 - protein, 334 aa, unidentified
MENIALIGIDLGKNSFHIHCQDRHGKAVYRKKFTRPKLIEFLATCPATTIAMEACGGSHFMARKLEELGHFPKLISPQFVRPFVKTNKNDFVDAEAICEAASRPSMRFVQPRTESQQAMRALHRVRESLVQDKVKTTNQMHAFLLEFGISIPRGAAVISRLSSILEDSSLPQYLSQLLLKLQQHYHYLVEQIKDLESQLKRKLNEDEVGKRLLSIPCVGTLTASTISTEIGDGKQYGSSRDFAAATGLVPRQYSTGGRTTLLGISKRGNKKIRTLLVQCARVFIQKLEHQSGKLADWVRELLCRKSNFVVTCALANKLARIAWALTTRQQTYEA

SEQ ID NO: 445901 - protein, 354 aa, unidentified
MSQIPNSAIAVIGIDIGKNSFHVVGHDARGAIVLRQKWSRGQVEARLANVPPCLIGMEACVGAHHLSRKLASLGHDARLMPAKYVRPYSKGQKNDFNDAEAIAEAVQRPTMKFVATKTAEQLDLQALHRVRERLVSQRTGIINQIRAFMLERGIAVRQGIGYLRTELPTILATRTDALSPRMLRVIEELAGDWRRLDQRVDGLSREIEGLARQDQACSRLMTVPGIGPIISSAMVAAIGTGDVFSKGRDFGAWLGLVPKQISTGDRTILGKISRRGNRYLRVLFVQAAWVVLVRIKDWERYGLKSWIEAAKRRLHHNVLAIALANKLARIAWAVLAKGRAFELTRTDDAGVRPA

SEQ ID NO: 445902 - protein, 340 aa, unidentified
MQITTIGLDIAKNVFQVHGIDATEKVVVRKQLRRGQVMKFFEALPPCLVGMEACASAHYWARELTKLGHEVRLMPAKDVKAYVKRNKNDAADAEAICEAVRRPTMRFVQVKSAEQQGRLMQHRARDLLLRQQTQVINALRAHLAELGIVAAQGREGLKQLLTIIADEKDARLPIDARASLIVLAAQLQALHTMIGSIEKRLIVQHRANEASKRLASIHGIGIIGASAIAATVTDPKAFQSGRDFAAWIGLVPRQDSTGGKHKLGPISKQGDRYLRRILVVGAHSVLRRAKHNPQKYPWLTQLLARRPFKVVAIALANKMARIAWALLASGGHYRPRLAAA

SEQ ID NO: 445903 - protein, 343 aa, unidentified
MRHYAGLDVSVKETSVCIVDESGKVCRETKVPSHPEDLARALHDRAWCLERVGLEAGPLSQWLFSGLAATGLPVVCIETRHTKAFLQAQVNKSDRNDARGIAQMMRVNLFRPVHVKTLTSQKRRALLTARKLLQEKALAVDNDIRGLLRNFGLKVGPIGASRFETRTRELVDGIPELAEIIDPLLEARRKLRELFAVLHRKLLAIVRDDTVCRRLMTVPGIGPVVSMAFTATIDVPARFKRSKAVGAALGLTPILNQSGESKRLGRVSLCGDGMTRTLLYEAAQVMLTRTTKWSWLKAWAMKVAARRGIQKAIVALARRLAVILHRIWVSGTDFRWTREVQST

SEQ ID NO: 445904 - protein, 355 aa, unidentified
MTSTKYIGMDVHAESISMAVRNSVGKVVMESVIETKASMILQFIEGLRGDLHVTFEEGTAAAWLYDLLKPHVARLVVCNPRRNALLKVGNKSDRIDARKLSELLRGNQLHPVYHGEHGLRALKELVRSYLTISKDLARVMTRVKALYRSWGIPCSGTQIYSRLHRVTWLSKISEPGVRLRAAFYFQQLDALRTLRQEVRQELLAESHKHSAWKRLCGIPSIGPIRAAVALGVLQTPHRFRTKRQLWSISGFAIETRSSADHRDVNGQLKKVKKRVSIRGLNQNHNHDLKNLFKGAAVIASTKPGPFQEFYTALLAKGMRPEMARLTLARKIATIVWIVWKRGVSFDAQYLKPQTV

SEQ ID NO: 445905 - protein, 322 aa, unidentified
MQGRAEGIVARKGLLVFAGVDVSGHWLDLGTSDGRYERYPQSEEGIRQLTEALLIVDVALVVLEATGALERPVARALAAAGLSVAVVNPRQVRDFARATGRLAKTDRIDAMLLARFAEAVKPPARVLSDDAGQELKELRARRRQLVEMIVKEKNRLHRASPLVRPDIEEHLEWLEGKVKEVAERLARLIESDPIWRRKVDLLCSVPGVGQTIATALVAELSELGEANRREIASLVGLAPHNRDSGNFTGKRVVWGGRASVRSVIYVATLVAARYNPVIRSFYQRLQAAGKPKKLALIACARKLLAILNSIIRADSPWSLTAP

SEQ ID NO: 445906 - protein, 426 aa, unidentified
MKLEEKEQEKSIRAWIGIDWADEKHDVSLYDIATEKQEIATIRQSPEALQEWLGQLRRRYEDGYVAVVLEQGRGGLLNALMSCEFLVLYIINPKSLSSFREAFYGSGATSDPVDAELMREMVRQNPSRFRAWRPDDVMTRSLRLLTEGRRNLVNQSTALTNQLTALLKGYYPQALAWVGRLDTAWACDFLGQWPTLQSLRASSRRQILRFYEKHPRASLDLSEQLKQIQNARALTQDEAVLESSALMVQALVSQLRPLLASIVEFDRKIAMIFRKHPDRPIFESFPGAGAALAPRLTAAFGTDRDRFQAAKDMQELAGIAPVTEKSGKKKFVHWRYACPKFMRQTFQEFADHSRRWCKWAKVEYELLRKRGKSHNAAVRALAYKWIRILFRCWKDRKPYQDEIYTKALLLHGSPLSSLLAECVENP

SEQ ID NO: 445907 - protein, 370 aa, unidentified
MGEYSEAFVAFDTSKMKHAVAIADGGRGGEVRFLGDVASTPARVERLTRKLAERYARLHFCYEAGPTGYGLYRQIRELGHDCMVVAPSLIPKKPGERIKTNRRDAVTLARLLRAGELTAVWVPDATHEAVRDLVRGRAAAAQDLRRKRQQLLSFLLRHGRIYDGRQHWTLAHRRWLAQQSFAHPAQQIVFQDAIEAIEDAVARLRRLEQQLVAIVPHWSMAPVVDAYQAMRGASFLVAVTVAAEIGDLRRFDNPRQLMAFLGLVPRERSTGDTVRRAGLTLAGNRHARRVLVEAAWSYRHPARVTETLRARLEGLPKPVRDTAWKAQIRLCGRYRRLSAAGKKLPVVIAAVAREMAAFLWAIAGQVAPVA

SEQ ID NO: 445908 - protein, 388 aa, unidentified
MQIAADRPQASTAIRTDLGAIFVSLELSRSTWLITSLSPGGGEKMSKHSVRGCDVAGLLERFAHLREKARARTGQRFPIIVIQEAGLDGFWIHRMLNAEGIESHVVDPASIATSRRRRRAKTDRIDGEALVRTLLAYKRGEPRVCSMVKAPTPEEEDRRRLCRERKVLTAERVLHVNRIKGLLFSQGITGYEPLRRDRRERLEQLQTGDGHALPDHLKGQVRRELDRLELLLDQIKAVEAERDALLAAERAAARTPAAMLLDIKGVGPEFAAILWSEGLFRHFDNRRQVAAYAGLAPTPWQSGSVDREQGVSKAGNPRLRTTLIQLTWLWLRNQPHSALTLWFHERVRRNGGRLRKTTIVAVARKLLVALWKYVTAGVVIEGAVMKPT

SEQ ID NO: 445909 - protein, 331 aa, unidentified
MKKQALVGIDVSARSLDVALERGKTSRQDLVFENTAEGHRKLAKKLTRGGMRARICLEATGVYHLDLSLALHATNGIEIMVVNPRAAKDFARAQLQRSKTDRVDARSLLEFNRRMEFVPWQPPSRTILALRALSRRIQALLVNRAQEKNRLHADEVVADTTPAIQESIERHIQSINDEIAALTQAALDIVRADAELKSKFDHLVSVKGIADASAITILAELAVLPDNMTVRQWVAHAGMDPRCVESGTSVRGQVRISKVGNRHLRAALFLPAMVASQHEPQVKAFYQKLIANGKKPMQALVAVMRKLLHAIHGMFQHDENLIGEKFYAGNA

SEQ ID NO: 445910 - protein, 407 aa, unidentified
MATGIFRHNFPQVDELQKKADEADFVIGLDLHKKTTAITVVDVNRQEKPVFQRKRLKNSELMEVLLRFQGKKMIIAEAAYGWFPLRRAFEGIRDITFVLFDPRKTSAWIKTSGIKNDRIDSEVLAYSCLKGGLPALAVYMPDELYRSRFKLVSFRDHLVSQRTRVKNQLKAIERDYGVNTYTGEVIDLPDEAVFMRDLLEGQLEDLNHRVQETEKKIAKVSQGDPAVALLRSVPHIGPITAFALRCKMENVKRFQSAKHLCSYFGFGIRQRQSGDGNFTGKLTKQGNSLIRKLLIQGAQGLRSNYPDYPQLYFPQLGRPGQTQNRKHANKLAAAIARKHLTFVYYAWKNARPFEIKVYRELRREQQRQQQEFTESKNPRPLNGKEGDAGFKTADPDYALGSNAVLTV

SEQ ID NO: 445911 - protein, 375 aa, unidentified
MVLGWTAPNGIAMCQSEFVEGLNRGRPPVEKITRIGMDTSKSVFQLHGVNAAEQPVLRKKLTRGQMIGFFENLAPTPIAIEACGGSHHWARLLGSFGHEVKLIAPQLAKPYVKRGKNDAADAEALCEALSRPTMRFVPAKTADRQAALMLIGMRSRLIHNRTQLANAIRGFAMEFGLTTGTGIYRIEPLFERIAADEALPGLARELFALHAREYAQLRKEIEKVDDRLMAWHRESECSQRLAQIPGIGPIGASLLMLKTPDPGLFKSGRDFAAWMGLTPRDHSTAGKVRLGAITRAGDEQLRSVLVVGATAVVRHARKGKGRNATPWLVGLIERKKPKLVAVALANKMARIAWKLMVTGEQYRRNTVPSPLARAA

SEQ ID NO: 445912 - protein, 341 aa, unidentified
MSKVLERDQAMVFTGIDVSAARLAVAVQQEGREGFQQREFANSAAGHKQMIAWLLKAGGRVRVSLEATGTYSLDVALALDAAEGIEVAVLNPKTVNRFAQTLRRSKTDAADAQALAEYSRRMEFVPWQRPSRCGLELRTLSRHIATLTEDHTRWGNRLHAVEASKTTPRCVLDDLKRGRAAIARRILKLRRQAVAMVAQDTELARKFEQLKSIKGVGETSAVQLLGELAGLDPEMTVRQWVAHSGLDPVHQISGSSVRKQTRISRHGNSHLRRALYIPALVGARHDPHMKAFYELLQARHKTKLQTLVAVARKLLHAIFGIFKTGTDYNGAKLFPQLIPPS

SEQ ID NO: 445913 - protein, 345 aa, unidentified
MQSMYYIGLDVHKKSISYCVKDGSGRIHAEGAIPATRSDLDRWMRTLPQPWTAAMEATLFTGWIYDHLKPHATALKVAHPLMLRAIAAAKKKNDRIDANKITDCLRCDFLPECYMASTEIRERRRTLRYRNLLVRQAVQLKNKIAVLLMEAGVSYNKQKLHKVGYFRELLATNQDIDDGLRSLLRMCRETVVRLGRTESALVRSLGRDPLLVERVERLMTIPAVGPVTALTWVLEVGDVRRFSSIKKAISYCGLCGAEKSSAEAIKRTPLSKQRNKHLQSVLIEAAKQAPRRSPELALVYDQEKQKGNANRATLAVARKLVAYLLAVDRRQKEFLTVERENRTAA

SEQ ID NO: 445914 - protein, 413 aa, unidentified
MEVIYQCCCGLDVHKRTIAACVRRLLENGGMHQETRTFGTMTRDILALADWLAAESVTHVALESTGSYWKPVYNLLEGRFKMLLVNARHVKHVPGRKTDVKDCQWLAQLLQAGLLRGSFIPERPQRELRDLTRHRSQLVGERSRAANRIQKILEDANIKLASVASDILGASGRDMLRALIRGETDAEKMADLARRQLRSKIPELRPALEGKVTAHHRFMLGELLHHLEYLESRIEEFSRRIEEVSRPFALAIARVATLPGFDQRSAQNVVAEIGVDMEVFPSAPHLASWAGVCPGNNESAGKRKSGKTTKGNRWLRAALSQSAWSAARKKDSYFQAQYRRLAGRRGKKRAIVAVAHSLLTIIYHMLKNASDYQELGCDYLDKLNARSLLPYLLKRIKDMGYQVSLQELSQEAA

SEQ ID NO: 445915 - protein, 311 aa, unidentified
MNSEAYVGVDVSKDLLDVKVLPNNELLQFENTDTGITKLVKRLKKIGAQLIVLESTGGLEMAAVSRLIEHQMPVVVVNPRQIRDFAKAIGRLAKTDAIDADTIARFAQDVRPAVRPLKDEHCQLLSALNARRRQIVDMLVAEKNRLHTAPKPNKKSIQKHIQWLERSLADINDDIDKTIKKSPSWRENDKLLQSFTGVGPVVSATLLCDLPELGILDRKKIATLVGVAPLNCDSGRFRGKRRIKGGRANVRRKLYMAAVASIRHNPMIKSYYKRLIEAGKPPKVALTACMRKILVILNAMMKNQSYWIAPC

SEQ ID NO: 445916 - protein, 399 aa, unidentified
MLEQAWAGVDVGKEHHHCVVIDAEGRRLLSRRVANDEAVLLALISDVTGLAGQVRWAVDISTGEAALLLALLAAHDQPVSYLSGHQVNRAAGGYRGSGKTDAKDAAIIADQARMRRDLAPIRVPDEVIVELRMLVARRRDLQSDRVRAVNRLHETLLTISPALEKALDLTNQGPLILLTGYQTPAAIGQLGVTELTEWLRARKVRRAGELATRAVAAANAQRIALPGEALAAHLAGQLAEGVMALDEQIKHTDKLIEGRFHRHHAAPVILSMPGIGFLLGAEFLAATGGDTAAFATSDRLDGYAGLAPAPRDSGRVSGNLHRPKRYNRQLQRVFYTSALISIRCCPESRTFYDRKRAEGKRHNQAVLALARRRVNVLWALLRDHRPYQARPPASTATAA

SEQ ID NO: 445917 - protein, 438 aa, unidentified
MSNKVIFNLDELFISVGIDVGADFSWMSIALPNQQFVGKPFKILHNSIDSLTTAVSKIKEAEELYSLESRIFLESTGIYHYPLFCYLRDKGFNCSVINPIITKNSTNINIRKVHNDRFDSKKAALVGLKPDLKVSLMPSDLALNCRNLCREYYDLMDNRSAYVNKLQGELRMAFPQYLGIFSKVTINTSLTLLETYTSPSAFLEADKQEIIDIIKSTARFGLTYAQNKYNAIIQAATDANQFGYIIDSNIKRIRLYISFIRKYDEEINSILESLHELVDANEDTDFVKQIHLIKTFKGAGFLSAVSIMGEIGDFSAFSKPKQLFAYFGLDPAVKQSGKFEGTKVQMSKRGSAIARRVIHTLTLQSISISRNGEAKNPVLREYYLKKCDSKPKLVAMGAVSHKVCNMIFAILRDNKPFKIIAPQEHIKQYNSAKCDIAA

SEQ ID NO: 445918 - protein, 451 aa, unidentified
MQNRNVKMEVINPNAAGIDVGSRSHFAAIGQGKEEIKEFGVYNEDHQQLIRWFLDSEVQTVAMESTGTYWQNLYSALIAAGFRVILCNGKFTKNIRGKKTDVKDAQWIQKLHTIGLLTGSFLPDQATEQLRTYCRHRSNLVHQSADTTRKMQKYLRLLNLRLDVVVKDVTGLTGLAIIDAICKGEKSPEKLAELRHGNCKKSEEEIAKALQSNGRKDYLFGLKQEYQLYVNFQQKIKECDVEIEKLLNEQINNDDEKKQHCIDKKVYKKINKNTPKNLDINLLSYQYLGGVDLLAIEGVSHATALSLMSEVGNGIHKFETAKQFASWLRLAPNNKISGGKILSNRIPKGSNRLKIALRNAANAIGNLKDTALSNFFNRIAYRKGRPAAISATARKLAVIIWNMIVKAVPYRPENNYEFLDQKRKRKVQEMKKLIHKFDIKTDELGLQLSNL

SEQ ID NO: 445919 - protein, 376 aa, unidentified
MKARLLRQRRLTVEIPFRKEKESRMSEYIAFDSHKRYSLVEREDVASGKIVQQVRLTHAPGAVRRYLARCAPGTAVALEATGNWYWIVEEIEQAGLQPRLVHPRKAKLMMGLINKTDKVDVHGLNRLQRNGTLPTVWIPPRLLRDLRELTRTRLVLVEQRTRLKNHLTATLAKYGVPPSEYSDAYGKSARAELEARIEPMPEQTRWVCKQLLAQIDFLVRQIRQLEQRLEDLVEVTPEMERLTTLPGIAEILAATIALEIGDIGRFPDAPHLASYAGTTPRVHASGGRVRYGRLRADVNRYLKWAFVEAANSVAVNHRRCPERHVSQLYDRLRQRKGHHKAIGAVARHLAEAAFHVLRRQEAYRDPVLERGCTGEV

SEQ ID NO: 445920 - protein, 315 aa, unidentified
MTQTSTTTAGIDTSKRKLDVALHGRAGHWQVPNSLAGWRELTVKLVEAGVGRVGIEATGGYERGVVDHLRAADLTVLVLQPMQVKAYGWAHLRRAKNDVLDAVLIAAFTASLDRIKAAPDPRLAELADHLTFLEQIEEDIRRYKTRLEHIGEPGLRRMVLGDIARLKARRLTQIRHLAKQLRAHRDLAVRFDLVLSIPGIGERTALALLIRMPELGQVSREEAAALAGLAPFDNDSGQQRGQRRIAGGRDRLRRSLFAAALPAASRWNTALIALYTRLIARGKAHNAALIACARKLLIYANTVVQRGTPWTEKTA

SEQ ID NO: 445921 - protein, 359 aa, unidentified
MAQIVERVTDRYDVVVGVDTHTDTHTAAVLDRFGAVLAQVTVSTDADGLSRLLAFAAAHTPPDGRRLWAVEGTRAHGQGLCRLLTAAGEPLCEAPKPAAAARRRGGKSDQLDAVAAAHAVLALSADRVAVPRSDGPREALRLLLVCRRHHSDTRTATVNLVKALILTADDTLRHALRGLSTTHQIARLAALDLPESTHLPIEEHTRRRELSTLARHIHTLDAALADNHRRLRALVTDLCPPLLDQPGVGPVTAAIALTAWSHPGRVRSEAAYATLAGAAPIPVASGRTDRHRLNRGGDRTLNSALHTIALTRRRIHPETRDYINRRRTEGRTTREITRCLKRYIARQLYRIITTHHRTS

SEQ ID NO: 445922 - protein, 354 aa, unidentified
MIIIGVDFHPEFQQIASVDTDTGEFQEKRLTHCEEAEKFYGAVAASGQKVRVGMEASGHARWFERLLAELQIELWIGDAAEIRAKRVRKQKTDRQDAQLILRLLLEDRFPQIWVPSWKNRDLRQLLWHRHRMVQARTRIMNQLQAVALNEGLRCKKRLWRERGRQQLESFRLAPWASRRRRDLLELLDRLNPTIAELSLTIEQEVEKCPEAQRLMTHPGVGPLTALTFVLIIGEANRFQCGKQVASYLGLVPLEDSSGNRRRLGHITKQGSSMLRFLLVEAAQVTARSLPQWRSKYLHLMMRRGRKTAKVAMARRLAVRLYWMMRQGWDYQQWSKFGSHAGQPGNRDGVPSNTE

SEQ ID NO: 445923 - protein, 371 aa, unidentified
MGYATILGLDLGKFKSVCCVMNAATGTHAFATAATTPAALHELLVRLAAGADPAQTLLVIETCDAAGWVHDLAVALGVTVTVIHTSGDERWRWRRVKRKTDRDDALKLARLARLGELPQPPVHVPAPARRQHRRLVLHRRSVVTRRTQSRNAIRAIYNQQGLTLARGNKQWTRAGLAQLRADARPLEGCDDVDALDLWRGRLHAELALMDAADAQLRVLDARLDQLADTDPRVALLQTVKGVGPRLAEAVVLHVGDDPRRFRSGDHVASYAGLVPKQLTSGETVRLGHITGRGPALLRSLLVEAAWVVYRHNDWAQAFVAKTSRRSRARRKLAIVALARRLLILLWGMLKTNQPFRAPQVRTPKAAAMAMA

SEQ ID NO: 445924 - protein, 367 aa, unidentified
MKKVSTAAAQPSRIFSQQKLTIGLDLGDRNSWFCVVDETGKIQLEQQVRTSTKALQQVFGAMPRSRIALEIGTHSPWISRLLGQWGHEVIVANARKVRLIGESRKKDDRLDAQTLARLARIDPQLLYPVKHRSVQAQADLMTIRARAGLVRARTALVNTARGLAKSYGERLRGCNVRNLDREKAESLSPELQAALEPLLAAIESVSERIVEYNQRIEALAQQSYRQVAVLKQIKGVGTLIALTFLLTLEDPHRFRKSRDVGGYLGLQPGRRKSGQSEPQLHISKEGDPYLRTLLVQGAQHILGPFGVDCDLRRWGLKLAERGGRNGKKRAIVATARKLAVLLHHLWVSGEVYQPLHNGTPTTVAAAA

SEQ ID NO: 445925 - protein, 357 aa, unidentified
MKKIVIGIDISKEKIDATAIDVRDTQQGVVKLDYQVYKNRPMGFRRMLVWARHLIKGVGLEDVLFCCETTGGYDRCLCDYIYAKGFDIWREAALQVKCSMGVRKGKDDKADSLMIAEYAMRHIDKAVIYETPDEKVRELKALFLYRYKLVQERTEKKVRASELKATAAKSDSMRFIVRDAMKGVRSLDKSIRDCEKQIMAIINDDEELKRNYGHIVSVPGISIVNATAFIAYSNNFHSITTANKIASYWGCASFRERSGTSIDKKAYVKCYSSSLLKATLTQAAECTIKEHGIYRGYYLRLKAEGKPYGIIVNNVRNKLIHLVFSLVTNNMDYEKNHEVLRERRKNDRKSAQLEIIN

SEQ ID NO: 445926 - protein, 347 aa, unidentified
MLYVGLDVHQKRSSLCILNEEGKTVKQELVTGRWPKLIERLGQIDQPMSVCYEASCGYGYLYDQIRRFASHVAVAHPGHLRLIFRSKKKHDRVDASKIAKLLYLGEVPSVHVPGIDVRSWRKLIEFRQKLLGKRTAVKNQIRAILRGNGVESARWPWTKKGLRTLKALPIATEGERLGIELACEELEELSAKIRRVEKELARIAAGNPGVQLLMTIPGVGIRTAEAFVAYVDDVKRFARNRQVGCYFGLVPCLDSSAGKDRLGHITREGPSTVRKMLCEAAWIGIRRDAGLRVRFERIVNGDPDRKKIAIVAIAHYLCRVMAAMLRTGEVWRDPVAAKIEGRPSAGG

SEQ ID NO: 445927 - protein, 393 aa, unidentified
MPRKRILVKSIDTSISYQVIGIDLAKHLVSVCLITGAGEIFGIDRLTYDDLLKSAERMSPTLFCMEPCPEVHYLAEKLQGYGHHTKVIDGAAVKEYIKTHFGGQKTDLNDAQAIAFLSLDTNLPEITPKNTSNSVLSSIQAVREQFRKEYIQSFVSLKGICQRWGLPISKGVMNKNKVEELVSESKKIPQEVKDWLLELLQSCRELQKRLNKISKYLKEYADNDEICQKIMSVPGIGPITATRLKATIGDIQRFEKPKSIVAYYGLVPKSKATGHNEKKGGITRRGDRVARSLLIEGAGVVLNLAAKGFLRSKPLNKWIEKKRKLKMPWGKLCCALAAKMLRIVRAILIQGTSFNAKIAGVARCSLPKESRNNVMGNNKLSEIPSPNGSVYIH

SEQ ID NO: 445928 - protein, 386 aa, unidentified
MIWDALATVAVQKHITDRRTQMDKAYYSTIGMDVSDRKTQVCVMAKAGVSPKIVMETTIPTTKEGLSKFLAAQDKASPVVFETGMHCRWMSEVAEGIGFKVYVANPCRLRMITESKTKNDVNDARLLARIALSDPGLLHPVKLRGKEHQKMLNLHEMRNLLLKQRTGIIVQLRAVAKSMGFRIERSSTSSFHRIDTRTWPKEFRDIAWPMLKNLEQLAVTVKTYDKQIKELSETPTFKSQVERLMEIRYVGLYVATGFVAVTGGDMDRFEKPRDVGPWLGLVPKQDQSGNIDRQCHITKAGSPFMRRLLVESAQMILRDGSYDTDLKAKGLRICARGAKIAKRKAIAAVARSLAVLMVAMLKKPDATYIPLSGRCEKELHALRATA

SEQ ID NO: 445929 - protein, 411 aa, unidentified
MEVLFARCSGLDVHKRSVEACVRIQHDDGRLEVSRKRFGTTTKELWSLADWLVSLNVTQVAMESTGVYWKPVYNILHPALDVWVVNARHLRQVPGRKTDEKDAEWIAKLMSYGLLERSFIPEESQRDLRDLTRYRTRLKQEKSSAANRLHKILEDANIKLTSVASSIQGVSARLMLEALIADEQSPEEMAQLAQKRMRSKIPQLVDALTGQVREHHRFMLQELLYQLDSLNQRIEALDQRIAKLTEPHADLMERLDAITGVGPRTVEVILAEIGPSVESWSSAKKLASWACVCPGNHESAGKRKSGKRRKGQKWLVSALVEAAWAASRTKETYLAAQFHRLRARRGPKRAAMAVAHSILTIVYHLLDDPTRTFDDLGGDFLLKRNKEQEQRRALKTLQTLGFDVALTSITA

SEQ ID NO: 445930 - protein, 347 aa, unidentified
MEDDGMRLFIGLDVSLDKTAICVISEHGEIIREAEAASEPEVLSRWLAELDGRVAVVGLEAGPLSQWLHRGLMEAGLDAVLMETRQVKGALNAMPIKTDRRDAEGIARLLHLGWFRPVHCKSVSAQETRAVLGARKAIQQNMIALEMSLRGLLRNFGLKVGAISRGRFEVRIRELADGNPMLETATAPMLRARETLRQELATLEKHVRQFAQDDPVCRRLMTMPGVGAVVALTFRAAVDDPTRFRSSKRIGPWVGLTPSRNQSGERDVSGGITKAGDVNLRRALCQAATVMMNRGRSTWLRTWGAQLAQRRGRKIAMVALARRIAVILHRIWIDGSVFQPDAAPKMI

SEQ ID NO: 445931 - protein, 347 aa, unidentified
MLADEVDAVIGGDTHRDSHALEMAAPNGGTIGTLAIGNDETGYADAIAWITQNSPGPRLIVGLEGTRSYGVGLTRALQAAGFLVLEVEQPRRADRRRGKSDPIDAHLAALQVLRMPADRKALPRSDGDREALRILLIARREMTTVKTQQINRLRALLLTGDDADRELCRGPMSDAHLQLIARRRRSLGDTNPQQIWRGEARRLALAIRQATSELAANKKQLAELVASFAAGLLDKFGVGPVSAAQAIVSFSHPGRCRNEAAFAALAGVSPLPASSGRTVRHRLNRGGDRQLNRALHDIVKTRWRDCPRTHAYIAARRAEGKSDPEIRRCLKRYVARELFRALTAARG

SEQ ID NO: 445932 - protein, 310 aa, unidentified
MERIFVGIDVAKQHLDIHVRPTDAHFRLLRDEAGLGNLVERLRPLGPVLVVLEATGGYEVPVAAALGSAGLPVAVVNPRQIRDFARATGQLAKTDTLDALIIALFAEAVQPEARPLPTAQAQALGELVARRRQLTDMLGAESNRQQQAHDPRLQRRIATHIRWLTKALAELEADLDDTIRSSPLWRAQDNLLQSVPGVGGVTAFTLIADLPELGHLDRRKIAALVGIAPLNRDSGAWRGRRMIAGGRPTVRCVLYMAALTAIRFNPVIAHFYQRLTAAGRPKNVALIAAMRKLLTMLNAILRDQRPWQPA

SEQ ID NO: 445933 - protein, 347 aa, unidentified
MTTVTRFVGLDYHQDSIQVCVMNQEGEILVNRKTGNDAAKVEKIIRETALQDSKEVTLTAKISIEACSGAANLSEELMLNAGRDVRLAHPGIVNRMKQNPDKSDKTDAYILADLIRIGYLPKVWLAPKEIRQLRTLVRYRAQKVKERTKTKLRIRAILREVRMKAPVDVNAWTISWMNWLRTLELDEVNAFVRDEHLDDLERLNQKIKDVEKQLRCMTKEDVVLKKLMSLEGIGFITAVTMRAEIARFDRFNSGKQLSRYCGVTPRNASSGTRQADAGLVRAGNSNLRIVLIQAAQRLVNSSATWREFVERLRAKGKPRNVIVAAVANRWLRRLYHEMQPEQLAVIN

SEQ ID NO: 445934 - protein, 436 aa, unidentified
MGRVVFVRHCKANKDSMGVDSGRSLVRLGLLIHHRPMSLGRPFAETAAIHTQLGAIFVSLELSRSTWLITSLSPGGGEKMSKRAIKAGDVAGLLARLAELRRKALERTGTSHPIIVIQEAGLDGFWLHRVLEREGCESHVVDPASIATPRRRLRAKTDKIDGEALLRALLAFKRGEPRVCSMVRPPTPEAEDERRICRERAKLIEERVRHVNRIKGLLFSQGVRDYAPLRRDRRKRLDALRTGDGKPLGPHLKAQIERELDRLELLLEQIKAVEAARDRLLDRLAESQGGSREAPAPAGAQPSPVALLLRLKGIGSELAASLWTEGLSRPFANRRKAGAYPGLTPTPWRSGQLDHEQGVSKSGNQRLRTKMLELAWLWPIHQPDSALARWYRQRLPGMTGKAARRRLTVALARKLFVALWKFVSAGVVIEGAVMKA

SEQ ID NO: 445935 - protein, 369 aa, unidentified
MRKRSKDQPNDQLASNAGAPAASRLWIGVDLGDRKSEICVLDDQGKVQLRDSVPTTRAAVQEYFTPFAGAQIAIETGTHSPWMDRVLTDCGLTVTVANAREVRKIHKSDRKNDRSDAEILARMLRLDPKLLVPIEHRSATMQVDLSVIRARDTLIRSRTTCINSVRGLAKSYGERLPKCSADAFVHRVSACVPRELEPAIAPLLEAIAALTTQIHDMDKRIENLASKSYPQTALLTQVAGVGPVTSLTYVLTLARTDRFAHSRDVGSYLGLVPRQYDSGDQHSQLRITKAGNGLLRRLLINCAQHILGKFGQDCLLRRFGQRLMERGGKNAKKRAVVAVARKLSILLHHLWSTGAVYEPFHGMPIQAAA

SEQ ID NO: 445936 - protein, 415 aa, unidentified
MSEIEQHESVEVFVGVDVGKGTHHAVALDRKGKRLLDSALPNDESKLRALIGRLKEHGQILLVVDQPATVGALPVAVARAEGAWVAYLPGLAMRRIADLHAGEAKTDARDAYIIAEAARSMPHTLRSMKLADNEVAELTMLCGFDEDLAGQINATSNRIRGLLTQIHPALERVVGPHLDHPAMLDLLERYPSPAQLGSLTQKQLTNRLVKLAPRMGKTWAADILQALSEQTVVVLGTQAASIVLPRLARQLTALRAQREEVAKEVERLVLAHPLHPVLTSMPGVGVRTAARLLIDVVSRAFASAGHLAAYAGLAPVTRRSGSSIRGELPSRRGNKQLKRAMFLSAFAALRDPISRAYYTRKISQGKRHNQALIALARRRCDVLFAMLRDGTFYSPPQPRKLIDNHIGAPPRPKLR

SEQ ID NO: 445937 - protein, 333 aa, unidentified
MVEGTKGSHHKEGSKKMSKNSTVCAGIDTGKYKLDVAIDESADQLQVDNSPAGYRCLSAWLRQRRVERIGIEASGGYEQAVVSFLRADGFVVIVFQPVQVRAYAKFVLQHAKNDNIDAVLIARCTAAATDIHEPPDARLAPLAQRLTMIEQLTQDVAQVKTRREACWDQRIREFWKQEIDRFKRLLQAELKQLVAAIREHRDLSTRLDLIASVDGIGLRTAVAILVRMPEIGRVSREQAAAIAGLAPYDDDSGQRRGLRHIKGGRQRLRQSLYAAALPAVFYWNAQLKALYKRLIAAGKTHKLVLVACARKLLIFVNTVVARGTPWKSAPATT

SEQ ID NO: 445938 - protein, 371 aa, unidentified
MKHNSIFIGMDVHKNSIDIAIAESGRTGQVRHYGKINGTLAALNKAVGKLVGKGDRPHFVYEAGPCGYQIYRHLTARGFDCAVVAPSMIPRQSGNRIKNDRRDSLMLARLHRAGELTAVYVPLPEDEAIRDLSRAREDAKSDEKRSKQRLLAFLLRSGHRYSGRSPWSQAHMRWLADIKMAHPSQQIVLQEYIDTISQCTLRLQRLTEQIRQLLPQWRLFPVVQALQSLRGVSLIVAVTTVAEIGDFKRFQNPEELMGFLGLVPSDKSSGEKIKHGSITKAGNSHVRRMLVEAAWAYRFRARVSRALLKRQEDLPQPICDIAWKAQLRLCARYRHFWAKGKVKPVIVTAIARELCGFIWAIAIKTDIPVAV

SEQ ID NO: 445939 - protein, 354 aa, unidentified
MSQTPNTTIAVIGIDIGKNSFHVVGHDARGAIVLRQKWSRGQVEARLANIPPCLIGMEACVGAHHLSRKLASLGHDARLMPAKYVRPYSKGQKNDFNDAEAIAEAVQRPTMKFVATKTAEQLDLQALHRVRERLVSQRTGIINQIRAFMLERGIAVRQGIGFLRTELPTILATRTDALSPRMLRVIEELAGDWRRLDQRIDGLSGEIEALARQDQACLRLMTVPGIGPIISSAMVAAIGTGDVFSKGRDFGAWLGLVPKQISTGDRTILGKISRRGNRYLRVLFVQAAWVVLVRIKDWERYGLKSWIEAAKRRLHHNVLAIALANKLARIAWAVLAKGRAFELTRTDDAGVRPA

SEQ ID NO: 445940 - protein, 406 aa, unidentified
MRYVGLDVGRDFAHVAVVEEKGTARRLPRVPMGDAFREFAATLGPQDVVALEASTNTWALAELLGRHAGRVVVSNPLRTRAIADAKRKTDDIDAATLAELLAADYLPEVWVPDEATRRLRRLVSLRAGLVRDRTATRNRVTAVLSRRLLRSPVSDPFGVAGRRWLTALELPPDERLALDSALRLDALLSEEIDTVARAIATMVVDDPRIRRLLTIPGIGLVTAAGILAVIGDVGRFSRPAKLVSYLGLDPRVRQSGDRPAWGGHISRQGQAHARGLLAEAAHSAIRSPGPLAGFHARVKARRGGGVATIAVARKLAVIAWHLLTRDEDYREARAALVRAKSRALERMAGRAVSGARPPQRGATTSGPDRGRTRLRGGDDPHHPALRHAVDRVRPDDTPGRAADARA

SEQ ID NO: 445941 - protein, 386 aa, unidentified
MRKSNDLSRCLAALEQDSTLIAVIEMGKSSWLVAGVVPGIERRPLKKLAANEGALLALLYRWRDEAKKAGHPIKRICVAYEAGRDGFWLARWLRKRKIEAYVIHSTSVCVSREHRRAKTDRLDTEHLMRAFIGWLRGETDHCRMCAIPTLEEEDGKRPSREHEHLVGERTRIINRLKSCLARLGIRDFNPASCKAPERLAKVRTPEGTPIPPNSLDELKHDMAHLRFISDQIDEVEKARLARLQKAPKKGPHAMVRLLASIHGLGIETADTLVHEVFSKNFRDRRGAPRYAGLTGSPEESGERRREKGLARAGNTRVRRSMIQLAWRFLQFQKESALVQWYYKRTADGRKDTRKTMIVALARKLMIALWRFVTTGEIPAGVQLRAA

SEQ ID NO: 445942 - protein, 410 aa, unidentified
MKMAGIDVHKKVLMVVVVDASVPEEKPVRRRFVTLPSELQRFRIWLQEQGVEEAVMESTAQYWRSVWLELEPHMSLHLAQAFSNRAPRGRKHDFKDAERLVRRLMADELILSFVPKGEQRIWRSLTRMKVQLTRDRVRLQNQMECLLEEMRIKLSIVVSNLLGASGLRILHALAQGETDPKRLAELGDERLHCTQEQLVDALTGRVQPMHRGMLALQLQRLQLIDQQMTQLNSMIAQAMKSHQDAVIRLAEVPGLGVDSAQQIIAEVGAQASTFSSAAELTAWVGTCPGKEESAEQNHSSRSAKGNKYLRRVLNQAAHAAVAKKGSYFQGVFRRLMPRLGYKSAIWAIAHRLCRVVWRILHEGVRYIEQGREVGPREKKQRAQMLARALRKLGYEVTITPINQLAPKPAI

SEQ ID NO: 445943 - protein, 359 aa, unidentified
MQTQNNKLSFKNQDLYVGIDIHKKQWTISITHMNRTIHKKTVIDPLAKTLLTFLNRRYPEGNYHAVYEAGFCGFQAARDLNELGVNCIVTHPADIPTKQKERLNKNDRVDARKLSRSLSSHDLEGIYIPDKISEEYRYLSRYRYSLIKDQTRMKNRIKSALYQFGIKMPLEYEDRRWSGQFIDWLSGIRFETEYAQYAFDDQISQLIQMRLRLTQTLMKMKTMVSTVAPMSPVYRYLLSVPGIGPITAVALLTEIIDIHRFKKTDQLVSFVGLAPCVRSSDEKEKMHGITPRHNKHLRSMLIEAAWKAAGVDPVLTMKFGQLCRRMPKNKAIVRIAKMLISRIHYVWKNQTAYVEGVLK

SEQ ID NO: 445944 - protein, 341 aa, unidentified
MTITTIGLDLAKSVFQAHGIDESGATVLVNKLHRKQMLPFFSKLSPCLIGVEACGTAHYWARTLAAMGHEVRLIPPSYVKAYVKRGKSDALDAEAICEAVTRPTMRFVPVKTVEQQGILMAHRARSLLVRQRTMLANATRAHLAELGFVANPGIPNLAKLAEQALADKGTLPAYARRALEILVRQIMSISGEIAVLDQQLAAWHADSEASRRLAAIPGLGIVTATAIAATVTDPDQFRSGRQFAAWLGLTPQQHSTGGKTRLGGISKQGDRYLRRLLVVGATAVMRHVKDKPTPMADWIRKSSEKKPFRLVSVALANKLARIAWVVLTRKEAYRPYNELTA

SEQ ID NO: 445945 - protein, 369 aa, unidentified
MPENTNVAALTSLRKRKPLGRMTIGIDLGDRKSHFCVLNDQAQVIARGFLPTTISAFRREFECLPPSLIAIEACGHSLWASQVLKVCGHDVLVGNPRKIRLITESDRKNDRVDAETLARLARADRLLLAPIQHRTQEKQVQLAVIRARQVLVRSRTALINCARGLVKPMGLRFRACSADAFAKRAAATPLPEVLRIALAPLLKQIEALNESIRDYDRQIEELAATQYPETCLLKQIKGVGTLISLTYVLTLEDPHRFARSRDVGAFLGFLPREKQSGERAPRLGISRAGNEYLRTLLVQGAHYILGPLGPDTDLRRWGLQLASRGGGGAKKRAVTAVARKLAVLLHHFWKTGEVYEPLRKNQLSDTAAA

SEQ ID NO: 445946 - protein, 453 aa, unidentified
MKKETLKKSVVKMGTGLPVFNPHAAGIDIGDTLHCVAINDGNGGHEVKTTSAFTCDLHEIVDYLKSNGVTTAAMESTGVYFLPLYIMLEEAGIEPYLVNAKHVKNVTGRKKDDTDSIWIQKLHTCGLLQKSFQPDNEIRVLRNYTRQRGKLILLSSDAVRRMQKSLELMNIKIHTVISDLLGKTGIAMVKAILAGERDPQILSLLCDPRIKASQEEIIKSLQGIWNDEYLFILEQALENYEFHQNQIKRCEEKIREQLLKQVAIIKEGDITCLEETQKKKSKAKPKKNQFHFVLSPYLKAITGVDLCKIPGINELTALEFISEVGTDMTKWKSAKHFAAWLNLVPNTKITGGKIVSSKMQKKKNKAGQILRQGASCLSSNKTPIGDSYRQMKARLGGKGAAITIGHKLARIIYTMLLKKTEYNIGLIIENQEKYREEKIKRLEKQLKKLKLAS

SEQ ID NO: 445947 - protein, 397 aa, unidentified
MYIVGIDIAKRKHEAAVIDGEGTVIIKPFSFTNNCSGYNRLLAMLTKAKLPLDEVSFAMEATGHYWLALFTRLQKEGFRVQVINPVQTNSIRSFYIRQVKTDPRDALLIAEVIRFGHFSESTLHPENIYELRELCRGRHAIVSMQADVKRKVVALLDQVFPEYETAFTNLFGDTSMTILQTCPTPKELSEMPLEELCHLIEVSSHKRFRMAKAQELQALARNSFGFAMAGDVFSTMIRLYAKHLDFLKQQVREMDRKIAEIMETLDTPITTITGIGPTLGAYILSEIGDISRFSSAAKLAAYAGIDPTMRQSGEYNGVRNRMSKRGSPYLRHAIWLAASSAVLHDPALKLYFQKKRDEGKPYMASVGHACRKMVSIIYAVMRDNKAYTPYIPNEISA

SEQ ID NO: 445948 - protein, 345 aa, unidentified
MMYVGLDVSSKSFVGHAINERKVVKYRGEVTPTRDGLKEMISEIGAEKKLVVLEAGNQLKWIALSLKKMKGVEVHVVHPNELKWISESNGKTDRIDARKMAELARGDLLPRKVHIVEGHIRELRELISGRSLLQSKRVSLVNAIRGNMLQEGYRLPEKFFQRADWEVRLEKAKLDTTTRLIVKTTMQAIEALKASEDVLTEKIIAIKDERADLLETIPGIGPLTSRVILSALDDARRFDDRKAVAKYGALTPTVYQSGGVVHMGHINRNGRHEVRRVLLQCAHTVARMKSHGSAPLREFFERVMKRRGKKIAVVALARKLLTTAYGVLKSGEAYDPKMLLPVSSR

SEQ ID NO: 445949 - protein, 412 aa, unidentified
MEGETVIAGVDTHKDVHVLCLLDGLGRKIWSGSFGADPEGYDRLAEAIGDPGSCAVVGVEGTASYGAGLTRRLVELGYNVVEVLRPKRDKVRPGEGKSDPLDAERAARKAASGKGCSVPKSQDGWVEAVRQLYVARRLAVATSTSCVACAKSMLTTAPSALRERFRGRERPKDLMPLLARGRKAGDALEESVLASLRSVAAVWKEARSQVESLDERIRALLEANAPALLGVEGCGTTTAAALVVAAGDNPGRLRGEAAFSMMCGASPIPASSGKTDRHRLNRGGNRQANWALYEIAIKRMAYDERTRRYVARRTSEGKSRREAVRCLKRHIAREVYHVLMDPNPDGAAPEGPELAKMRKAMRVTQKKAAAELGLSAATLGHLERGKRRSTKLERRYYELLCELERALPQTAS

SEQ ID NO: 445950 - protein, 342 aa, unidentified
MYYVGIDYHLEIAVVCITDEHGKEWKLVELPATPEGMDVLINIMKGKKYRVLGEAFTFSIDLHNYLIGRGITSDLVRPTDLVAITKCNKKTDKHDSRTIAWYLRLMDKGEIDLTPSLILRDEQRVFRDLCRLREDVADNLSVISQRMRSHMRINSEYLPVEIFGDRPDLGTKRVQQFVITEFGDDFTLQELLRQQAFYVERGKAIEKELEKCQYDTKAVELLMTIPGIGKLSAMELMSMIVDIKRFPDADSMRSYFGMAPRVRDSGETIHHGRITKQGDPMMRKILERAVSSHMRWCKESKISKMYNSVKTRSAGGVAMMAAANKLLDIIHSVLVNQRPFYS

SEQ ID NO: 445951 - protein, 369 aa, unidentified
MGEYNEAFVAFDVAKIKHAVAVAEGGRTGEVRFLGEIENREGPIERTVKKLAGRYGRLHFCFEASPTGYGLYRQLQTLGHECMVVAPALIPKRPGERVKTNRRDAVTLARLHRAGELTGVWVPDAVHEAVRDLVRAREAAADDLRRKRQQLLSFLLRHSRIYSGSGHWTLAHRRWLASQAFEHAAQQIVFQDGIDAIEDAIARLRRLEEQLVAIVPSWSMAPVVEAYQAMRGASFLVAVTFAAEIGDVRRFDNPRQLMSFLGLVPAESSTGDTVRRKGLTLAGNRRARRALVEAAWTYRYPARVSETLRARLEGLPKAVRDIAWKAQVRLCARYRRLSATGKKLPVVVAAIAREMAAFLWAIGREVAPG

SEQ ID NO: 445952 - protein, 359 aa, unidentified
MDGSKQQPQMTAGLDLGDKYSYLCLIDTQSGEVVEEGRLRTTPEALRRRFASEQPLRIAIETGTHSPWVSRVLEECDHEVVVANARKLRLIYANKRKTDEVDAENLARLARLDPKLLYPIEHRGEDSQAHMAIIRSRQALVGSRTQLVNHVRGAVKSFGARLPKCPAVSFHKRASEHIPEALLPALGPILEQIGSLTERIRDYERKLEAISKERYPETDLLRQVEGIGPLTALTFVLTLEDPYRFAKSRSVGAYLGLVPASEKSGDRDPQRRISKEGDEMLRKLLVGSAHYILGPFGSDSDLRRHGEKIASRGGKNAKKRAVVAVARKLAVLLHRLWITAEVYDPLYNAHRSQEREEAA

SEQ ID NO: 445953 - protein, 317 aa, unidentified
MTQKQVIVGIDIAKEKIDAAIRFGAQTSFANSAEGRHELLAWLKEHGVRKAVMEASGGYERSWARLLREAGVEVAIVDPKRVRHFAKSAGQLAKNDPIDARMIAWFGEVFGHASGQPHDGERQELDQMVTARMAMARLKEQIEGWGEHEQPKAVQKAHQALLKAVVTQLDKLEDVIAAKIDKTEHFAQRAEIIQSVPGLAGTAAAGIIAFLPELGLVDRQAASALLGVAPFNDDSGKRHGERHIQGGRRKLRKLLFMPIVGAATQHNPVLKACYQRLIAKGKKAKVAFIACMRKLIGILNTMLARGEKWDPAKHAIA

SEQ ID NO: 445954 - protein, 341 aa, unidentified
MRYIGLDVHKDNITACVLTSTGKPKFEKDFIKDSESWNLSELMEYGDKDGFCIMMESGTYAYQPFRFFSDQGVETHVVHAQALKVITQSDKKTDKKDAYTIARMLRLWKRGEIDLQMAFIPTREQCELKDICRYREEISRKIGDETRRIKSHLSRNCEYLPESFNDFQTQRARNYVRFNFSSDITLMNRMTELERLFEERDSIQKEVESRLPGSRDVEILMTVPGIARQTAVQIMSMIVDIDRFDDAEKLCAYFGLVPRVRDSGGKEHHGRMTKNGDKMMRAIMERVTQSHVQNCDSSVTRYYKRKCSEMGTKKALITASRKMLSVIFAMLKSGSDFRLAG

SEQ ID NO: 445955 - protein, 314 aa, unidentified
MFIGIDVSKARLDVAIRPSAEKLSVSNDEAGIQALVTRLSEIKPALIVLEATGGLERSVSGTLGSAQLPVVVVNPRQVRDFAKALGQLAKTDRIDAEVLARFAEAIRPPLRPLPDKVSLELRSLIARRRQLIEMMVAEKNRLSTASKAVRKRIEAHIRWLETELDRADKDLDHSIRQSPIWCENEDLLRSVPSVGPVVSRTLLAELPELGRLNRKQIAALVGIAPLNCDSGTFRGRRGIWGGRATVRAVLYMAALVASRRNSVIRNFYKRLRDKGKAPKVALVACMHKLLTILNAMIKHKTRWSEIIPQTSLDF

SEQ ID NO: 445956 - protein, 366 aa, unidentified
MTSVAPAGERIYLGMDVSRDKIAVAVLRPGQDVPAVEMISHDGEMVRRLIGKFADRSVLAACYEAGPGGYELHRLLTSAGVACDVVAPALIPKAAADRVKTDRRDCVRLALSHRAGMLTAIRVPSEPEEAVRDLVRTRADLVDDRKRMMQRIGALLQRHGRVWRAPRWTCQHRAWLDRQSFTEPALEAALRTYLAALDARDAELAVLERQLRGCWASVDPLASMVRQLGCYRGIAELTALTLAAEVADFRRFASAPAFMGFTGLTPSEYSSGARPRRGGITKAGPQLVRGALVEAAWSYRHRPAIGATLRRRQAGCAAETLARSWKAQQRLHATYAKLTRRGKIPSVAVTATARELAGFVWAEMTS

SEQ ID NO: 445957 - protein, 408 aa, unidentified
MEVLHARCAGLDVHKDSVVAAVRCVSPPPHHEVRSFATTTQGLLALGDWLASHRCTHVAMEATGVYWKPVWHLLEGRFELVLANAQHIRNVPGRKTDVNDAAWIADLLAHGLIRSSFVPPAAIQELRDLTRTRKQLVREISQHSLRIQKVLEDANLKLGSVLSDVLGQSGRAMLAAIIAGQEDPERLADLALGTARRKKSALIEALRGRVTPHHRALLQLHLGLVDALDAALAEIDQRVGKALEPIRASAQRLTTMPGVSDLVANVIVAEIGFDMSRFLTSGHLISWAGLCPRNDESAGKRRSTRLRKSGPWLKTTLVTAAWAAIRVKDTYLHAQFLRLKARRGAKKAILAVAASMLTAAYFMLRDGVEYKDLGPDHFDRRDRTKVIRRLVRRLHDLGCDVFVTTEAA

SEQ ID NO: 445958 - protein, 387 aa, unidentified
MAQVNDLSRSLTAFDPISTLVVVVEMSKANWLVSGVVPGVERQPLKKLEPDATALLRLIERWRNEAVRAGRPVSRIALAYEAGRDGFWLARWLIARGIEAHVIHSASVAVSRERKRAKTDRLDAAMLMRVFLGWLRGERGHCGMVAIPTMEEEDARRPSRERESLVDERSRITNRMKSGLARLGIRGFKPHLRKAPERLVGLRTAEGTGLPANIIEEFRRDMARLALVREQISSIEKTRAERLERAPDTGPHAMVRLLARVIGIGIETADMLVQEILSRKLRDRRAVARYAGLTGSPDESGLKRRETGLAKAGNARVRRGLIQLAWRFLMFQKDSALAQWYRTRTEGPSGARKTTMIVALARKLLIALWRLVTTGEVPDGVELRPAA

SEQ ID NO: 445959 - protein, 352 aa, unidentified
MNAMTVAVDLAKDVFEVAVANRAGRIVERKRLTRRQFAHFIDALPAGTTVVMEACGTAHYWGRRCLAHHLSVRLLPPQYVRPYVRRNKTDRSDVEALLEANRCGGIHPVAVKTVEQQTLQALHRLRAQWQATRTARLNAMRGVLREYGVPLAAGARTALKRIPLVLADPTLGLPAEVSAIIAMLLEDVRSLEARVAAIDQQLARVAREHPIAQRLQQVPGIGLITATAFVGAVGHIHSFRRGREFASWLGLTPRESSTGNRRRLGRISKRGDVYLRCLLTHGSRAMLLGAQRAVRMTPDRATAFQHWAVALMTRRRHNKAAIAIANKLARVIWAVWHRDVDFDPQAPCRAVA

SEQ ID NO: 445960 - protein, 318 aa, unidentified
MNTNTLQSINIGVDTGKAQLDIFVRPLNLFFTVSNNDKGIKDAIKTIKKHSPERIVIEATGRLEMPFVLACAEAKLPIVRANPIHIKRFAGAIGRRAKNDRLDAELIAHYAEAIKTDISIIKAENIRLMSDLVIRRNQLLSMQTMEKNRIQVLPKSLHSTIKPMLTAMKKQISNIEDKLVKLIESCPDYQTKNDILQSVPGIGNITSASIISNVPELGYITNKQAASLIGVAPITRESGRYKGKRVIQGGRAQVRTVLYMAMMSAMQCNPVFKATYTRLVQSGKPKKVAIIACVRKMVVILNSMLRDGVMWDENTAKN

SEQ ID NO: 445961 - protein, 344 aa, unidentified
MNNYVGLDVSLRSCALCIIDTNGKIILERELACEVEVIVECLSQCEFRIERIGFEAGALSQYIYFGLKSAGFDVVCMEARQVNAALAAMRNKTDKTDARGIAQVLRTGWFSPVHMKSREAHGQRALLSTRKALLKKTMDLANEVRGLLKIFGIRLPKAVKHGSFDGVVRPMIEMDDILAHALVPLLDARLVLYQHYLELDRRVKRAASRDEVCMRMMTVPGVGPIAALSFKAAIDDPARFKRSRTVAAHFGLTPRRYQSGEHDNPGRISKAGDQDVRAALYAAANALLMRTMAGSQIKSWGMKLMRTKGRRRAVVAVARKLAVLLHRMWVDGTVFRQVHVGGTL

SEQ ID NO: 445962 - protein, 353 aa, unidentified
MIHVGIDLHSRNMTLVAINDNGKLLVEEKLTNTPANLGRFFGRFTEPVQAVVECTSYWYWVADWCDANEVPLTLAHAKMLKAISYAKVKTDSVDARTLAELLRVELIPEAHQCRREQRDLRELTRGRLRMIERRSGLQSSLWQLAAKYNVLVQDVGWRYLDRLGEFLHHQLPGVAWAEAQLLLDQIRLNQKQIGRLEKAIEEQVEFTEEVERLKVLPGFGVVCAWTVVAEVGDITRFPSAKQFVSYCRLVPGSKDSGGKHRHRSRNKDGNRYLRIAFNQAAIIAYRDYPVVKEFYKKVTRRSGKHVARTVVGKELAKIVWHMLSKDQAYKGFKGRMTRITTQTYWPQPISPRA

SEQ ID NO: 445963 - protein, 416 aa, unidentified
MNAVGIDVSSRKSTVAVLRPLGEVVCLPFDVTHDIAGLASLVEKLKALDGETRVVMEHTGRYYEAVEKALHEAGLFVCAVNPLLIKEYGANSLRRVKTDKADAVKIARYALDNWADLRDFTPMDAIRYDLKTLNRQFQLASKQRTASANNLIALLEQSFPGIRKCFDSPVRSDGTQKWVDFAHSFWHVDCVRKQPFAAFCERYRKWCKRHAYLFKLSNAEEVYALAKRAVVLTPKSKVVKVLVQEAANQLISISRSVEVYRAEMDRLAAMLPEYPVVMAMYGVGKSYGPQLMAEIGDVRRFERKQALVAFAGIDPMPNQSGDKNVRSNKSSKRGSPYLRKTLFNVIRTYLQCAPQDEPVFQFLNRKRAEGKPFYVYMLAAANKFLRRYYAKLRDYFASLDTLQPVAPIPTILKAAL

SEQ ID NO: 445964 - protein, 344 aa, unidentified
MSNLDSCGIEVSAKQLVIRLRRQGDLEPLREFTNTPPGHAMVVRHLRQAGRVVRVCLESSGLYGLDLALALSAAPGIEVMVANPRAVRHFAHALMKRSKSDPIDAAVLEEFAARMPFRAWNPPSAAALALHALARRLHELVQIQTAEKNRQHAAGLSQTIPTVVRRDLARSLRAQQRAIERLTAQARKLIAQDPQLRERFELLDSVPGIGECSAVQLLGELAVLAPDLDARQWVAYGGMDPREYSSGSSVHKKIRISKAGNKHLRHSLFMPALVAVKHDPYLAAFYQHLLARGKFKMQALVAVMRKLLHALHAMFKNHQPYDGSKLYRLSAVTTQEVPHAPLAG

SEQ ID NO: 445965 - protein, 327 aa, unidentified
MNLSVAALGVDIAKLKFDVCLIKETGKAKHKVFTNTKHGFEQLVIWLNSHQAGSLHVCLEATGSYGEALALHLFDAGYRVSVVNPAAVKAFAASRLTRTKTDKVDAELIARFCLLQQPQAWQPPAPAVRQLQALVRRLESLIEMRVAEENRLSSGVSIEAVRHSLEEHIAYLVAEIKQTELMIQEHIGNHPDLKQKSDLLDSIPGIGATTAALLLAEITDFKQYKSARQVAAYAGLVPRERRSGSSVRGRTCLSKIGNARLRKALYFPAMTALRCSGFFQQWASGMRERGKSKMAVIGAAMRKLIHLAYGVLKTGMPFDPNWTAKAA

SEQ ID NO: 445966 - protein, 445 aa, unidentified
MAFKSLQQKRQFVNGKYIIGIDPSKIKHQAAVLDTNGIQRGKAFTFKTTHQGYHHDLWKRLDQIIPSDVDNDHIVFAVETACNLWQTLAFYLKAKGYTVLLVSPLSTKHTRPVMNHDFSKTDPKDALIIANNARDGYFDYYQEFTPLVNAMHRLSITYCKLNKNLTQNKQRLRSLVEQIFPEFITVLPPDTKTAIYLFKTYMTPQDFLNIDICKEAEQIKRISRHNHGIKTLLRLKEQAEHSIGIQLKNEEIIAERLSLTAWITMIETIEGQMESIIEQLITLAQQTPYWDVLISFKGKGVSEKLAALFIAETRDLDQYNHHKKIEKFAGYNLRQAQSGNYVGPRRMSHIGNKRLSWIIYKMTEETTKYLPEVRMKYLRRQMNTKSKYRKNIIACSSPLLNLIVALVKQRRPYELREEKVKELQQLEQKYQAYKQSKKSKRKKAA

SEQ ID NO: 445967 - protein, 315 aa, unidentified
MFPTIGLDVSKTTLDVCVLKGKDDREFYKFDNSDQGHQQFLDLLANLKVALVVCEPTGGYEASICAVLHRHNYAIHRVNTLSFHNFAKSLSLAKNDRIDAYKLAYYGVSMDIKANYHQSEYQQQLKDLVARREYLVSQLSSEKKNLKHKEYSNIQTSIVKHITYLEGAIKDLDKQIDDFASTETEQAKKVELACSVPGIGKTLSYKLLAFLPELGDDTFDLNELAAITGLAPYCRDSGNKSGKRFIRGGRKIPRDALYMAVLSGCHKIPLLKNLRARLLSKGKPKKVAIVACMRKLLGILHSIFKRREAFVEQIA

SEQ ID NO: 445968 - protein, 318 aa, unidentified
MPRKELFIGIDVAKDVLDIAVRPTGEEWRVANDEVGIADLVKRLRAVRPTLIVLEATARLHVAAVGALAEAGLPVQAVNPRQVRDFGKATGKLAKTDAIDARILAHFADAVRPAVRPLPDAETQALSMLLARRRQLVEMLTAERNRRAGVSASIRAEIDEHVVWLTARLKQANRDLMQLLRDSPMWRERDDLLEGVPGVGPVVTATLVADLPELGRLSHKQIAALVGVAPLNRDSGQMRGKRAIWGGRSAVRAALYMAAASATRCNPVIQAFYQRLVASGKLRKVALVACMRKLLTILNAMVRTKSPWKVTEQSHLTA

SEQ ID NO: 445969 - protein, 367 aa, unidentified
MKEISTAAAKVTKNFSQQKLTIGLDLGDRSSWYCLLDEVGEVLQEQKLSTTPKAMREVFGSKSRCRIALETGMHSPWVSRLLSELGHEVIVAHARNVRLIGESRKKDDRVDAQTLARLARIDPRLLCPVKHRSAKAQADLSVIRARAGLVRARTALVNTARGLAKSYGERLHGCNVRNMNPEKAEGLSPELQRALEPLLAGIESLSERIREYNERIEGLAQERYPQVALLKQVKGVGTLIALTFLLTLEDANRFRKSRDVGCYLGLQPGRRNSGQSEPQMHISKEGDPYLRTLLVQGAHHILGPFGVDSDLRRWGLKLAERGGKSGKKRAIIAVARKLAVLLHRLWVSGEAYEPLHHNHPRAMPAAA

SEQ ID NO: 445970 - protein, 342 aa, unidentified
MEIRTLGIDLGKEVFHIVAQDEQGNIVCRRKFTRLKLLCYTAQLHDCLIGMEACSGSHFLGKKLQDQGHRVRWIPAQFVRAFVKSNKNDYLDAEAIAEAVQRPTMRFVPLKMQEQLDLQALHRVREQWVARRTGLVNQVRAFMLERGITVRKGRLHLQKVLPEILEDAEQKLSSLIRRLLFEQWQELQSLNARIGEVEAELKRTANGSCACVRLQRIPGIATLASTALVAAVGSGTAFKRGRHLAAWMGLVPRQHGTGDKVRLEGISKRGNGYLRRLFIHGARSILFHLKPDDNTRLGRWVRELSARAHHNVVVVALANKLARIAWVVLAQGDVYEPFLAPA

SEQ ID NO: 445971 - protein, 426 aa, unidentified
MSERDYSKQVARRQRIGNTTLVVGVDVGCASNAVGFMNKEGKVLGSDPNMPNSRGGFEQFVKMTEGLKAKHGLNDMLIGLEPTGHYWRKFAYFAKEKGWEVRFVRTTALKHHRELDESSSAKSDQRDALTITNITREGKYIDTVIEDGSRRQLRTLVKVREKIQKRNVSAKNSLHAALDDYFPELKDIFWSMHSRGLWALLERCPFPVDVVTLKVSVLKELIARASRRRLEASRKATAVYQAAKESIGLRQIGSADRYRLRMCLEEVKRTELMVKDIEREIKRMLKEIPDAQYLLSIPGIGPISAAVFLGELGNPSYFQRARQVVKYAGYDPQESDSGYRVGRRFISKKGRWLLRKHLFFMSMRVVVLSRYFQQYYQRKLQTKNRFGQLPRKKEVLCAVAIKLIKVIFALLRDKRNFEDTVAYSVE

SEQ ID NO: 445972 - protein, 358 aa, unidentified
MYIGVDTHKKTHLLVAIDAQGQMHATQTVANTPQGWVTALEWAGDYRGACRWGIENSGSLGKGFAQFLLAAGATDVREVSPQRTAQYRRRGRTQDKTDVADALAIARLISAEGEQLPLVQADDLSTELRLLSDHRDNLVADRTRLINQLHAQMLQIDPCYMERSGVLTTATGVRYCHALVLPHADGVLRTRLLIVHQLAGQILGLREEIETIETALRQRVQETDTPLLQLCGVGTLVAARLIGELGCTPRIHSAAALAALAGIAPVEVSSGGRHGHRLNRGGNRQLNKAFHVIALCQLRREPLAQAYYAKKRTEGKTARAAMRCLKRRLVDVLYRLLPKSEDRNRLREGHELPIEAAA

SEQ ID NO: 445973 - protein, 366 aa, unidentified
MKKGSTVGGLDAHKVTINVALFVPGKSQPVEWTCANERASVLRMVKKALQLAVGRLVFCYEAGPCGYVLQRWIREAGAECLVVAPSLIPRKPGERIKTDRRDARKLGELLRAGLLTEVHPPSETDEAVRDLCRAREDAHEDLVRCRHRLSKLLLRRGYQWLSGKRAWGKAHRLWLHSLRFEQPADQFVFESYLLAIEHVEERMKALDEQIEQASQLPQYAPVVAALRCFRGIDTLTAMTLVAELHDFMRFDHPRRLMAYLGLVPSEHSSGGHARRGEITKTGNCHVRRLLIEAAWHYRHRPSVRSLEIRRRGQPPHVIALADRAMQRLHRRFTRLLERGKPRPKVVVAIARELTGFIWAAMHPQAA

SEQ ID NO: 445974 - protein, 457 aa, unidentified
MRSSEKPRRKTAARMLPVLHPDAAGIDIGAEEIYVAVPADRAEHSVRSFGTFTRDLHDLCDWLLDCKVRTVAMESTGVYWIALFQLLETRGFEAFLVNASHVKNVPGRKSDVSDCQWIQYLHSVGLLRASFRPSDEICVVRSLWRHREGLLQMASEHTQQMQKALTQMNLQVHHVLSDITGVSGIAILDAVLAGERDPIRLAALCNRRVRSSRDIVAKSLEGDYRSEHLFTLRQSLAAYRFYRGLMADVDKEIEKFLGAMSSSANVQPKRPTGTKKRIYQRAGNEPAFDLKSELYRIAGVDLTDVPGLSTLTAHTIIMEIGPDVSRFKSASALASWLGLCPEKKVSGGKVLHSGTRHVKNRAAIALRLGAQCLYHANNHLGEFYRKAKWRLGARAAVTATAHKLARIVYHLLATKQPYTEEAFQKADTQARTRSEKRLRQQAATLGFRLSPAVNATL

SEQ ID NO: 445975 - protein, 310 aa, unidentified
MTVTHYIGFDVHKKHINFCAKTATGEIIDEGRLTAERATLRQWAANQCQPWRGAMEATLFSAWIYDTLKPYGEWLEMAHPAMLKAITAGKKKSDHIDARTIADLVRCNLLPTCYVASSEIRELRRLLRYRNLVVRESVGMQNQIAGLLMETGTPFQKEKLHGKKYFANLLRHLEEVPESVKDRGAMEMFQATQKQLIHRLLANPSLGQRVERLASISGVGEITALTWALEIGDPYRFSSWSKVMSYCGLTAALRSSADKQQRRPISKQGNQWLQTALIEAAKLAPRWNPQLAALHPATWNVDIATARLSP

SEQ ID NO: 445976 - protein, 346 aa, unidentified
MLYVGLDLSRKRVDFHALGAEGELVDRGAVPADADGLARLVHRLGGCDREVLAVIESMNGARFVHDQLELAGFEVEIADAQRVKGLAPLACKTDRIDAWVLAELARRDLVPAIWLPAPAVRAERERARFRLHLVRQRTRLKNRIHATLIAHGHACPVSDLFGVKGRALLTRLDLPEPWRGTLEASLRLIDALEGEIAGCERELRRLGADHRYLPLLITCPGIAWVLGYTIASELGDIGRFPSPRKLTGYTGLCPKVDQSGERDRRGPLTKNGPRYLRWALIEAAQHASNSVPYRDLSARKRAQYPGPRGTKLANICVARRLAEAIWHMLTRNQPFTPAGATPPLAA

SEQ ID NO: 445977 - protein, 376 aa, unidentified
MLEAPSLSCPTVGFVRASPALATERTGMTTMASTAAAVIGGVDTHADVHVAAACDEIGTVLGTESFPTTAAGYRQLLAWLRSFGELTLVGIEGTGSYGVGLTRFLLEAGVELREVLRPNRQVRRRHGKTDMIDAIAAAQSVINGDAKARPKSHDGAVEALRALKIVHRSANKARTQALNQIRDLITTAPDELRAELRGLRRRQRLAVCAAFRPGDRDDLLAITKLTLRTLARRVAELDEEIAQLDARRRRITKTIAPALVAAHGIGPDTATGLLLSAGDNPDRLGSERSWAALLATNPIPASSGKTKRHRYNPGGDRQGNSAIWRIVMVRMASDPRTKAYVDRRTKEGLSKPEIIRCLKRYVARETFDLLPRELLV

SEQ ID NO: 445978 - protein, 403 aa, unidentified
MPLFAGLDWGGARHAVCVVDETGKVVADFEVAHDAEGLNALLKRLGKLKPAAELAVAIERPTGLVVDTLVAAGHPVVPVHPNVVKACRPRYRAAGGKHDAGDAYLLADVLRTDGHRFRPLVPQSDAIKALRALVRTRDDLVAERIALANQLRSLLDSFWPGATAIFSDIDSPIAPAFVRRYPTPQSAAHLGEKRLAAFLAQEQYSGRRPVSDLLARLRAAPPSVASEVEAEAKGELVKALARLLETLAVELARLSSRIEHKVASLADRRLVLSLPRTGRLNAAQILAELGDVRERFQTEAQLAAEAGVCPVTYESGKSRGVGFRWACNHRLRRAITTWADNSRHASPWAADVYARARARGCDHPHAIRILARAWVRVLWRTWTNRVPYDAALHGGARKLLATA

SEQ ID NO: 445979 - protein, 482 aa, unidentified
MKKRNIYQNRSQELLSLFEKAGNSAKVMCVPMDYAKKDHLVMFCNGHGDILRKPFSVKNSPEGIEYLLDQATRSSHRRGIKKDHVFFGGEDANSYAENFVNTLRSKGWVVAGVNAHDAKKQRANLQASTDCLDLMGIATMLLNCRANCCPAQSGIYRNLRTLVRHRRKLVVMSTEVKNRIHGVVDRLFPGFLNEGKTGIVPFTSSSLYLMEDRFSPKQIRRRKREKLIEILKRFGTSKAEETADRLQQYAAQVLHTPADYVDTLQLSLAQHVKHLRCLQESVNQLEKEIAVNLAQTQGAFLTSVRGIGIVLAAGATAEIGDPNEQKPLNNLVSYSGIIPRVKQTGGADGKTYTGKVAKRCNRILKDYVVKSALHIGLHGPQDLMADYKRRDASGQHADFSMGRRYLRMAMSLMRTSQIYLPRRLRKAEAKMEERAGYYLTTWPYLRCKWKKLGALEFAFGKNRPLGQWRQIVQELYDIRLKL

SEQ ID NO: 445980 - protein, 366 aa, unidentified
MCVCGVALDVHKLSVVAATLPPSAGRPEIIRVENTSKALRRLIERLGGPAGLAVAYEAGPTGWAIKRLLDGLGVACDVVAPSLVPVRPGDRVKTDRRDAITLARLLRAGELAGIWVPDEAHEAIRDLVRARKRAKEDLREAKQTLQSFLLRHERRFAGRAGWSKAHWRWLGEQAFPFPHQQLVFEEYKQRIREIEARCARLDAALAEAIAGWKLHPLVDALQALRGIALVAAAALVAEIGDLRRFANPKQLMAWLGLVPAEHSSGRRIRRGEITKAGNGYARTMLVEAGWCYRLPAREERRYLERVAGLPEDIRRIGWKAQVRLCRRYRHLSAAGKPLPKVITAIARELAGFVWDIARRVQPAPQV

SEQ ID NO: 445981 - protein, 411 aa, unidentified
MEVVYRRCAGIDVHKGSISVCVLLMEEEGPKKQVRRFGTMTGDLLELSQWLQQLGVTHVAMESTGVYWKPVWNLLEGQFELLLVNAQHIKQVPGRKTDIRDCEWIADLLQHGLLRGSYVPKPEQRDLRDLTRYRVRLCEDKVRLANRIQKVLEDANVKLACVATDVLGVSGRAMLQAIAAGEHDPQKLAHLARKGLRKKLPQLQMALQGRIRDHHRFLLGQLLEELTFIEEKINKLEQRIQERMRPYQHVITLWTSMPGIREVTAWSLVAEIGTNPEQFPQASNLASWAGMCPGNNESAGKRKSGKTRKGNRWLRRALNQAAWGAARTKNTYFAARFHRLAAKRGSKRAIVAIGHKILVLAHYLLKHNCLFRELGGDYYQRLRAPSLSQSLVRRLQRLGYQVTLTPAQQAV

SEQ ID NO: 445982 - protein, 392 aa, unidentified
MEVQDETGRRLAKARLPEGISGIARLHALVGRFLPEDGDPAGVKIGIETDRGPWVAALVASGYQVYAINPLQSARARQGQDVSGAKSDAGDAHVLADLVRTHSHQLRTVAGDSEQAGAVKVLTRMHQSLIWDRTRQVLRLRSSLREFFPAALEAYEDLASPDVLELLTKAPEPSSAARLTRAQITAALKRARRRDREAKSTAIMAALRTQHLTQPPLIAAAYGATVRALAALITASNEQITALEGPVEACFGQHPDAEIYLSQPGLGSILGARVLAEFGDDPTRYQGARARKNYAGTSPITRASGKKKIVLARYVRNKRLADAVHRQAFSALSGSPGARAYYDALRDRDIGYNAALRQLGNRLVGILHGCLKTHTRYDEATAWNQHIQQAAA

SEQ ID NO: 445983 - protein, 400 aa, unidentified
MLSIGIDVSKGKSTVCGMKPGGEIVYAPFEVQHTREGMSELVSLLHSSGEEVRAVLESTGSYHCPVVAALLENGIFVSVVNSLRMKRFCSQSIRKVKTDRIDAMQIALYGLAYWQELQPARLPEDTYRELQLLARQYYQMTSMLIKAKVDFNAICDQVLPGMQELMNDHAGRHKLSDFVLRYHHTTHILEMGETRFQKDYCKWAEKKGYRNCERMAVLIFATAQNGIPVLPNAPSTQIVITEAIRVLHTVEASRDAILTQMQALAKTLPEYSLVREMPCIGDTLAPRLIAEIGDVRRFHSKRALIAYAGIDAPPYQSGKFCANNRHISKRGNRYLRKTGYEVMQSYVMHKPANNPIFTFIEKKRGEGKSGKLAMVAGLNKFLRVYYGKVTELYRSSSAIE

SEQ ID NO: 445984 - protein, 344 aa, unidentified
MTNIQPKETAHEAKPDLFAGIDVGAEELILVIRKNGKPLDPQKFANTPADRDRLVKKLVKLPGIIVCLEATGVYHFDLSLALHDAGVLLMVVNPKASHNFAKVLMKNSKTDTVDANTLAEYAARMDFVAWTRPSDETIALRSFARRINALTGQKAAAKNHLHALNATSETPKAVLKDAKLAISQLEKRIDRLTAEALVLIGKHPELKRILALLIGIKGVGETSAIALMGELLLLPPGLSHREWVKFAGLDPRAFDSGKSVHKKTRISKAGNRHIRAALYFPALSAKQHDKHVKAYFQHLMDNGKTPLQGVCAVMRKLLHAIHGMLKHNEPFDNTRFYAIPASAE

SEQ ID NO: 445985 - protein, 340 aa, unidentified
MRALYAGSDLHSNNNLLGIVDGQGKKIFKKRLPNEPRLVLDVLKPYQEEIVGIVVESTYNWYWLVDALMDEGYKVHLANPAAIQQYSGLKHADDKHDAFWLAEMLRLGILPEGYIYPKQERPVRDLLRKRGHLVRLRTSLVISLQNILSRNLGRKVNVNDVKALREDRITPLLEASEDLALAGRVSKEAIDHLTHQIYKIEDWLQKRIALKEEYRYLLTLPGVGKILSLTIMLETGPISRFATVGDYVSYCRKVPSQWISNEKRKGSGNTKNGNKYLAWAYAEASDFARRFYPEPRAYYQRKMQKTNSVVAHSALAHKLARAGYYVMRDQVPFRPEKLFG

SEQ ID NO: 445986 - protein, 334 aa, unidentified
MQNVTLIGIDLGKHSFHVHCQDKHGNALLRKKFSRTQLIHFLGSCQAATVVMKACGGAQFMARQIADLGHEPKLISPQFVRPFVKSNKNDFVDAEAICKAASRPSMRFVKPRTQDPQAMAALHRVRDSLIRQRVKTTNQMHAFLLEFSVSLPRGIAVIRRLSAVLEENDFPPYLARVLSRLHRHYVYLCGEIDEVDKELKTHLAEDENAQRLLTIPGVGPVTASLLATRLGDGKNYASSRDFAASTGLVPRQYSTGGKTTLMGISKRGDKNLRRLLVQCARVFIQRLEHNPGRLAEWVRKQLANHHSNVVACALANKLARIAWAVTAYQAAFSQ

SEQ ID NO: 445987 - protein, 400 aa, unidentified
MNAVGIDVSKGKSMVAIMRPFGEVVATPFEIKHTEIELKKLVCILEKLPGETRIVMEHTGIYWQPIAKALHDAGLWVSVVNALLIHKYGNNSIRKGKTDKLDAVKIANYCLDHWLDLDRFTLINPIRQELKTCHRQYDQYIKLKVNLKNNLITLLDGTFPGLNTLFKSAPRDVDGHEKWIDFAIKFWHRECVCGCTEKSFTNQYRKWCTKAGYRFNEAKAASIYAHAAAQVNTLPMSDAIKRLVILAASQLNTIIETLSVIQNEMITLASKLPEFPVVMKMFGVGPVLGPQLIAEIGDVRRFHHKQSLVAFAGVDAPPCQSGTFESKNRHISKRGSPRLRKTLFQIMSTIIQHAPADNPVFQFLDRKRQEGKHYYVYMTAAANKFLRIYYGTVRAYLEDT

SEQ ID NO: 445988 - protein, 349 aa, unidentified
MREYISFDSHKYYTVMEREDIQTQVARQRRIEHAPDAIRAALRGCEADTPVAVEATGNWYWIVSEIEQAGLRPLLVHPRKAKLMMGMINKTDKLDVHGLNRLQRNGTLPTVWIPPADLRDLRELTRTRLMLSAQRTRLKNRLTATLAKYGRQHSEFTDAYGPRARTELRQRLEVLPTQTRFVSELLLQLLDFVQQQIQTIEQRLQELVQITPEMQLLQTLPGIGVILAATIALELGQIDRFASAAHLASYAGTTPRVHASGDKTRFGALRTDISQYLKWAFAEAGNSVALYHQRRPQRHVSQLYRRVRLRKGHGKAIGAVARHLAEATFYVWSRREAYRELTGGRSKAV

SEQ ID NO: 445989 - protein, 360 aa, unidentified
MGKRVSKKESWFKENNFTAEDEIYVGVDVHKCNYHVAIWHNGRIGCAYSMTSDNNKLLRDIQQVRSSLKNIVYEAGPTGYSLVRLLRSANLPAEVVAVSKTPRMTDTSAKTDRLDCQQLAEYAAKGLLTFVAIPTEQQEADRQVVRLRDQLTSKRKRIMHQVKSFLLQHSISWPGGNWSKILIERLRQLDISSELRFTLAQYLDEYEFFCSKIAETETKLRQIFSSERHSAAIEIFKSHPGVGNIVAWEYRAEMFNITRFSESKQISKYTGLCPRISRSGQTCHQGPITKTGRRQLRAMLVQAAWAWYRRDPHARQIYNRLLHNTGNGKKAIVGLAKRIAIHLWRMLCDGCLYDAKVVKV

SEQ ID NO: 445990 - protein, 346 aa, unidentified
MMIIGCDFHPSWQQIAWLDSETGERGEQKLVHASGEAKQFYQQLAAPALMGMEATGNSQWFIEMVEDLGHTIWIGDAAQIRASYVRKQKTDKRDAGHILKLVVEGRFPRLWTPDREQRDLRQLVLHRHKLVEIRTRVKNELQHLSMNKGMQKKRTLWSQAGQKLLRELPLKPWAACRREDLLGLLAMLDQQVGKLDGAVQQAADEHPQAKLLMTQPGVGPNTALAFVLTIGDVGRFPRGKQVASYLGLIPREESSGGRQKLGAISKQGNRWLRSLLVEATHNVVRCDPGFRKQYLHRCHQKPKGVAKVAVARKLAVRLYWMLRTQVAYPEIVRIESSPAVPLVGAS

SEQ ID NO: 445991 - protein, 336 aa, unidentified
MNYVGLDIHKKFTLGVIKDKEGNLLNKSKFENTQENFDLFLKDCKPEETKIVMESTGVWEFIYDLLESRKYEIKLANPLKTRAIASARIKTDYVDANTLCDLLRANLVAESYIPDKETRKIRDVVRQRKSIVKGRSQIQNKIHAILTRYGIKLPYATLCDSAVIWMLEEGMNDLPSVKTTLISYINLLQKYTEELDAIDGRIKEIANTSSKTNLLMTVPGIAEIRAVEIMAEIADINRFENSEKLCSYAGLVPSIHQSGDTLKFGNLIKQSSRSLKSVLIEACWNIVKTKEENQLQIFYMKLCFRKSKQKAICATARKLCCIVYAMLKKNREFHYS

SEQ ID NO: 445992 - protein, 428 aa, unidentified
MKYNTQNAKIKSITEKTLIVGIDVGIETHFARAFDWRNYEYSKKPLEFSNTEAGFMTLKAWMADFAEKYGKNVVIPGMEPTGHYWFNLGAYLQDNGMKPVHVNPHHVKKSKELDDNNPNKNDRKDPKTIAALVNEGRFSYPYIPTGIYAEIRSLSNLRLQTQEEITRIKNRIARWFSIYFPEIKDVYRNPDSVSGLMILKEAPLPQDIVKLGVDGINKIWRDAKLRAAGLKRAKILVTAAEHSIGSQEAPDSARIELKNLLNDYEIYKNREEGLMSVIEEKLSEIPHIDKLLEIKGVGLKTVSGFVAEVGDITRFDDPKQLQKLAGYAIVECSSGKHKGESHISYRGRKRLRYVLYEAAISLIARNEEFKEVHRYYRTRKENPLKKMQSVIAVACKVLRIFYTILTKGVTYDGAKMLQDIKRPQMLAA

SEQ ID NO: 445993 - protein, 346 aa, unidentified
MMLIGCDFHPSWQQVSWLDVETGETGEQKLVHARGEAKQFYEQLAAPVLIGMEATGNSQWFIELVEDLGHEIWIGDAAQIRASYVRKQKTDKRDAAHILKLLVEGRFPRLWTPDREQRDLRQLVLHRHKLVLIRSRVKNELQHLSLNKGMQRKRRLWSQAGQQLLRELPLKKWAACRREDLLGLLTMLDEQIGKLDGAVQHAAEENPQSKLLMTQPGVGPNTALAFVLTLGDVGRFPRGKQVASYLGLIPREESSGGRQKLGAITKQGNRMLRSLLVEAAQVAVQHDPGLRKQYRHRCHQKPKAVAKVAVARKLAVRLYWMLRTNVAYPEIVRIESSSGLPLVGAS

SEQ ID NO: 445994 - protein, 367 aa, unidentified
MLYLGIDQHKRQLTVNLRGEDGTVILQRQVSTQWEKVRAFFADLAEKSGPEGGFLAILEVCGMNPWLLEMLREYGCRETVVIQPTERSKQKTDRRDAGVLSHLLWVHRQDFLEGKHPLGVRRVVPTTPQEADDRQLTALRARLTKKRTAVLNGIHKLLRKHNLEQHSPAKKFQTQKVRRWLAEIALPALDRLEMNLLLPQWELLDEQLQAVEARLAERAADDEQVKLLESMPGMGHYSAVAIASRIGNIERFKRPDSLANYFGLTPGCRNSGEATQRLGSITKRGSKLVRYLLGQAVVNILRFDATMRGWFKRIKKRRGAKIARVAVMRRMTTILWHMLKKKQKYRYDGTLKKHQEFVEYEGATEAP

SEQ ID NO: 445995 - protein, 359 aa, unidentified
MREQRNKISFRGQKIYVGIDVHLKSWSVTVLSETSVLKKFSQHPSPEALYGFLTRSYPGAEYHSVYEAGFCGFWIHERLTALGIDNIVVNPADVPTKSSEKLRKTDTVDSGKLARSLRANELKGIYTPDSVSLEMRSLIRLKNSITKDTTRQKNRLKSQLRYLGIEIPQEFLTPFSNWSKRFFAWLKEIETLTPSGRQALDIHIRHLEELRRQKLEMTRALRTLAKTDRFREPLRLIMSVPGFGQATGMAFLSEICDITRFRNAEQLAAYIGMIPMCHSSGEKDGTGDITIRKHAVMRCNLIEAAWVAVRQDPAMTLFYTEQCKRMPKSKAIVKVARKLVNRLFFVLKHQTEYVNSIVS

SEQ ID NO: 445996 - protein, 375 aa, unidentified
MATIARLGIDTSKSLFQLHGVDDREEAVLRKQVRRGQFLAFVAKLEPTKIGVEACGASHYWARQLQALGHEVVLLPPQHVKPYVGRNKNDKIDAAAICEAMSRPRVRERLVAVKSAEQSAGQMLLGTRDGLLHRRTQLSNTIRGHAAEFGLVTPKGLAHIKPLLERIAVDQTVPALAKELFATLGEQFSELGPRIAQLDKKLKAFQRSNELCRRLVEVPTIGPVIASSMVVKIANPAAFRSGRRCAAWLGLTPKDHSTAGKMRHGGITRAGDEGLRAALVSGATAYIQQVKRGRTRPSPWLAALLKRKPEKLAAVALANKTTRIAWKLMTSGERYDRARAEAREELGATQHGGSAPSPSLQRHTADQGASTMTAA

SEQ ID NO: 445997 - protein, 348 aa, unidentified
MKSITTIGLDLAKSVFQVHGVDADGKVLVRRKLRRTELLDFFGRLPPCLIGLEACASSHHWSRELERLGHTVVQMPGEYVAGYRQHGRKTDAADAEAICEAVSRPRRRVVATKSIEQQTTSMPHTVRNQLVATRVALANMLRSLMAEFGIVAASGEAGFSWLMGIVTDEARDELGAAQRAALAPVAALIIDTDAAIEVASAQIIAHARRCPTARRLQSAPGIGDIVSSAFSSLVDASLFKSGRAFSAWLGQTPKLNGTGGEVRHGKMSKAGNEYLRRLLFMSAASRLAHTIRFPAKADPELVELLGKWDFKKAACVLSNKMARMIWALMVRGGTYVKHHRPSAYAGNA

SEQ ID NO: 445998 - protein, 458 aa, unidentified
MYRELQPFRKALRKELKADLFPAAAGVDPDKLLETYLDRLTMYTGVDVADQTFTVLAIDAGREILGSLEGCANEPDGFQHFVTWARDLRDQHGLRIMAVAGETTGIYYWALWDFLDEQPDIGRVLYNPRTTEHMGEVLSKKVRNELVDALLLAEQLRLGSTPEVLVQKDADLLAARYYSRGARDLATQINRKKNQLRALLRAYCPPLSQVFPGSKLHHPAVYALLEEYLFPDEFVRAGAEAIAAILADHCRDAFGLAEAQMLVDISKKALLRPVERDAIRHLVQGHCQDITTFQQRKSFYLKTGYALIEKRQETKLLRTVKGAGISNTLALVSELGDISRFPSGEHLASFLGLTTSKHISGATLYHSKRITKQGSPNGRYAAVNIALHLSNRVPRYQAMYQRIKGRKPPRKGHFVALVAIARDFVTQVLYDMWCNQRPFFVKDEDYRKYRQKQSHSEG

SEQ ID NO: 445999 - protein, 355 aa, unidentified
MKQDTKLSFKGQSIFVGIDVHIKSWHVTLLTENIELATKSFPPCAKTLGSYLRRMYPDAEYYSVYEAGYCGYWVHENLIREGIYNIVVNPADVPTKDKEKKRKTDPVDSRKLARELMKGALESIYIPDKQQQEDKLLLRTRYSIVKKQTSCKNQIKSTLSFFGIALTDEKINSHWSKAYLDWLRKLCEDCSSKALRLKAFLEELESLRKIISELTKQIRSLSQQERYKENVMLLNSICGISTLSAMTLLTEFGDIKKYCKLDNLSSYVGLPGDEHTSSTKEKKLGITKRGNKYLKKALVESSWVAIKKDPALLLAYKNYNKKYPGSQSIIKICRKLLNRIRYVLVTRKAYEIQTV

SEQ ID NO: 446000 - protein, 420 aa, unidentified
MKAYNVDDFAALIGIDWADKKHDICEHPKNTKQYHYTVIKHKPEALHKWAMELKLRYPDQKIAIVCELKKGPLIYALATYDHFVLFTVNPSAVANYRKAFTPSGAKNDPTDAFIQVEMIKLHIDKLSVIVPESTSMRALAQLVEYRRSLVQDSVDLSNKITATLKNYYPQALEWFKEKDTFIFCDFISKWPSLSAVKKARKQTLLDFFNRHNSHYETVNNARLLSIKEAVPLTEDEGVIAPNQLLMEVLIAQFKVLLMGIEQLDKAIKQLYKKQQDKAIFDSLPGAGPQLAPRLLVAFGHNRERYTDASQMQKYAGIAPVIESSGKKTWTHWRYSCPTFLRQTFVEWAGFSIRYSFWAKAYYEQQKSKGKPHNSIIRSLAFKWIRIIFSCWKTSTPYDESKYLEALKRRGSPLLKFAITS

SEQ ID NO: 446001 - protein, 349 aa, unidentified
MLADEVDYVVGVDTHRDQHVLAVVVASSGGVIAQRSVRSNARGYAEALRFTGDHAPGMRIWAVEGAGHYGAGFARYLSSRGETVHEVSRTARGERRLQGKDDLLDAIRVARSALASTARALPRSGERQEALRLLLLARRSAVDVRRVAIVQLRSVIVTAPESLRDELRRLPLGELLRRCSRFRRSSSRTPDELATILVLRSLARRIEAATEEARELEREILGHVRALVPELLNEAGVGPIVAAQLIVTWSHRDRVRNEAAFARLAGVAPLPASSGQTIRHRLSRGGDRQLNRALHTVILHRRQHDPATRDYIARRIAEGKSTRDATRILKRYLARHLYRVMQNASPTMT

SEQ ID NO: 446002 - protein, 345 aa, unidentified
MQVTTMGIDLAKNVFQVHGVDASGKVVVRKALRRSQLLPFFEDLAPCLIGMEACSSAHHWARELNALGHTVKLMPPSYVKPYVKRGKNDVADAEAICEAVTRPTMRFVPVKSTDQQAVLMLHRTRALLMRQRTMAVNALRGHLAEFGLVAAQGAKSLAELIESVFEGSGTDDDAVPPLARRALAPLVAQLRQLQAQIKAIEVELLAWHRATDASRRLETIPGVGFITATAIAATVTDPSHFTSGRQFAAWLGLVPRQNSSGGKERLGSISKMGDRYLRTLLVVGATSVMRYARSKNAAGAQWVNALLARRPARLVLVALANKTARIIWAVLVRGETYRAPASAAV

SEQ ID NO: 446003 - protein, 390 aa, unidentified
MNTIIGIDVSQKSSSFHLLAAGGKGTDGSFPMNHSGFAALLQKTEGLENPRFVMESTGRYHITLANWLLHHGQSAFIVNPVLVKQFSRAHTLRRTKTDTVDARVIAQFAAQDTKALAHPGREMDDERLSVARRREQIAEDIARAKTQLKADLTVAFPEILELNVFTAGMLDLLVHLPSAQAVWQASDTELAGFFTGTRGRSLTFGPERVRGLAVDSIGVASYGPLVSDSAKNLLSLLARQKLLTQRLIDLVSRTQADDLAIITSIDGIGQVTAAHFLAEIGSIGRFERYQNLIAFCGTDPGIYQSGNSLVSGRITKHGNANLRKYVYLMAEGTLLHNPFFRAYYDKTRTEGFAHRKAMVALMNKLLKTLFALLTKREMFMVPEHSISHSL

SEQ ID NO: 446004 - protein, 492 aa, unidentified
MKKSKANQSVYRNQSSLIRALFDCAGNARKVLCVALDYAKRKHVALICDGNGDVLKSSFPVENNTAGIKHLLKEISATARHRKIPQNQIFLGGEDEAAYVANFTQALRLKGYLVVRVNAYEAKENRENLLASTDGLDLLGIAKTLLSRRARVTGDAANANPAYRHIRDLSRCRRTLVRQQTAASNRIHALAEQLFPGFLNGSKSALTPFTEASLELMRERFSAPQIARRKPAALANLLRRHRVHHPDQTAAEIILLARQALPPAAHRVASLQRTLAATVDLYACLRRNALELRAEAALLLATTPYAMLTSIPGIGFVLAAGLAGELGEPSGLSKLDSLCAYAGIVPRTFQSGGPDSPAIQGHASPRCNRILKDWTVQSAQKIHLYGPPELKDRITRWNAEGRHGLFAAARHNLRLASALVKNEIPYLAPEGRGRHATPEQIGTAAQATWAILLKKWRTISGGPDLILDQAHPLGRWRKLMLELHGIDLPGRP

SEQ ID NO: 446005 - protein, 398 aa, unidentified
MMRSIGMDVHRSFAQVAIHDDGAIVDSFRVGMEHDAVVAFGRSPKADDEVVLEATGNTARIVRLLTPFVARVAIANPLQVKAIAHARVKTDKVDAKILAQPHAAGFLPEVWAADDETLALRRLVSERAAVVRSIRRSKSRVQAVLHANLIPKYAGHLFGKGGRRWLVKAPLPKTERNLLERHLDELDWLAGRLETLERDLIRISLDDPQMRKLMTVAGISAVIATAVMASIGDIRRFATPEKLASYFGLTPRIRQSGDRGAIHGRISKQGNATARTMLVEAAWAAASVPGPLRAFFLRIKDRKGANVAAVATARKIATLIWHLLTKDAPYQWARPAFVAMKMRRLELRAGAPKAHGKAGPGRDYWIKEIRHREMELVANAENAYARMVEAWREKPPNP

SEQ ID NO: 446006 - protein, 382 aa, unidentified
MECTLVTSIHVIRKSGGTLYAPLVLQDRRVAEGPPEPFPERLPTLNSCWERSTTTDSANKDRSATMTDTYVGVDVSRAWIDTFCPLTNQHQRLTMDPAILDTFAAGLSSKGVVVVLEATGGCERALLHALTIHKVGYARVNPRQAREFARATGRLAKTDAVDARMLADMGAKFALKADDPIDPQRARLADLVARREALIGYITKEKQRLGTTVDLFIKDDIATTLTFLKTRLAALTKEIAVHIKSATQLAKLDAALQSAPGIGPVVAATLVAGLPEIGTTNRRALASLAGLAPHACDSGIRRGSRHIWGGRAQIRRALYLAAFIASSRDPVLKEFRTKLSNQQRPFKAIIIAVARKLLTHLNAMIRSGQPWSNQINAELTPA

SEQ ID NO: 446007 - protein, 390 aa, unidentified
MPQSRDDLGRSLVGLDQNSTVICAVELSSATWLVGGIVPGIARDPLKKLVPDQDALLKLLHRWRDEAIRAGRQIKRIVVAFEAGRDGFWLARWLRARGIEAYVIHPTSIPVSREQRRAKTDRLDIGLLKRAVLGWLRGEKKHCTMAAIPTVEEEDAKRPHREREQLVGKRTAIINRMKAAFVRLGIRGFNPKLRRAPQQLATLRTPEGRPIPPNTLAELQREMAHLGFVNEQIKQIEDARLKQLKEAPRRSSNAKVLQLERIYGLGIETADMLANEVFSRELRDSRAVARYVGLTGSPDESGQRRREKGLAKAGNARARRGMIQFAWRFLNHQKDSDLAQWYQARVIAGKKRKTMIVALARKLLVALWRFVTTGEVPQAIVLRPASCLAE

SEQ ID NO: 446008 - protein, 360 aa, unidentified
MDITGTVDRQPLDHKKTVGEQGSPCRIKKARTVDRSVYCETVSCKEGRKPMVEKHYVGIDISKDYLDVMVLPEREKRQYTNDQEGMNKLIPWLKRIPVEVVVIEPTGGYEALVAAALSSRHVPVAVVNARQIRQYARATGKLAKTDSIDAEVMAEFAQAVKPEVRKLPDKETKDIRMVVSRRRQLVEMMTAEKNRKSTADDSLKPGIQAHIDWLKKEVEDLDRDLRKRIESSGVWRVKDNLLQSIPGVGKVLSSTLLAELPELGKLNRREIAALVGVAPYNRDSGMMRGKRVIWGGRASVRRVLYMATLAGITFNPVIRDLYNRLVERGKAKKVALVACMRKLLIIMNAIIKTETPWQYA

SEQ ID NO: 446009 - protein, 441 aa, unidentified
MRVMYERCCGLDIHKASITVCALITEKGKTQEERRRFGTMTADLRELAGWLQQKGIRHVAMESTGVYWKPVWNILEPAGFELLLANAQEVKVVPGRKTDQKDSQWIADLHKHGLLRNSFVPPRAIRDLRDLTRARAILTQEHTSVCNRIQKVLEDANIKLRSVASDVFGASGRAILRALMKEENDPEALANLSKGKLRNKIPQLRRALEGQVTAHHRALITGHWNRMEFLERQIADLETQIAERMKPTPAEMAPTMQNASEDAPVPLSPREEAIQLWMEIPGLGWTSACSMVAELGVNMDQFPSAAHAASWAALCPGNNESAGKRLSGKTRKGNIWLRRTMCEVAWAASHTNDSYFAAQFRRIASRRGSKRALMAVAHSILVTAYSMLKHKRHYKELGAGFFDGINRDKVRERLVQRLAKLGFDVTLKSKGTVESAADVTE

SEQ ID NO: 446010 - protein, 376 aa, unidentified
MREKLRFLGLDVHAETIAIAVAEPGGEVRSLGTIANREDSIRKFIKKLGSPEQLRACYEAGPTGFVLYWQLTQLGVDCVVVAPSLVPKKPGDRVKTDRRDALKLARSHRSGDLTAVWVPDEASEALRDLVRQREAAKQDQLRARHRLTKFLLRTGQRSPLGLKPWTERYMRWLAQVRYTQPAQEVTRLDCMNEVEHMSARVKRLEEAILEVVKLAPQPMQEVIRGLQALRGVAHISAVTIAAELGNISSRFESARKLMGYSGVFPSEDSSGNRIWRGGITKAGNAHLRRIVVESAWCYRHLPRVGEKLRKRQQGIPAEITEIAWKAQNRLHKRYRALTMAGKDQRKVMTAVGRELLGFIWAIAIKIEAVCRQPVAA

SEQ ID NO: 446011 - protein, 341 aa, unidentified
MEQYAGIDVSLECSSVCVVDGTGKIVHEAKVASEPQALIAWFGSLGSGLERIGLEAGPLSQWLFAAMKATGLAVELLETRHVRKAFEAMPVKSDRNDARGIAQLMRLGWFRPVHCKSISAQETRSLLTARKLVQSKLRDVENSLRGILRGFGLKVGKTTGQKFAGRIEELVTGHPHLQMITKALLTVRAVLRSEFAAFEKQTRRMVQSDKQARLLTSIPAVGPIVALTYASAVDDPARFKSSKQAGAHFGLTPKKYQSGETDYTGRISKIGDASVRTALYEAAHVMLTKPVKGCSQLKSWAMRIKRRAGMSKAKVALARRLAVIMHRMLADGTPFNAAAAA

SEQ ID NO: 446012 - protein, 315 aa, unidentified
MERASAAPVFVGIDVAKDRLDVHLRPSGEVLAVGHDGTGLTVLVERLAELAPALVVLEATGGFEVTVAAALGAAQLPLAVVNPRQIRDFARATGRLAKTDRLDAEAIARFAEAIRPEPRPLPDAAARALGELVARRRQLVEMIGSESQRRRQLRDPRLIRRLDAHLAWLQKELSEIETDLDDAVRTSPAWRATEDLLASVPGIGRTSARTLIAELPELGSLDRRKIASLVGVAPVNRDSGAFRGRRMILGGRASVRKALYMPTLTAIRRNPAIRALYARLVARGKPAKVAITAAMRKLLTILNAILKSQTPWQQA

SEQ ID NO: 446013 - protein, 385 aa, unidentified
MTATTRRFDPIALENMLCLSFELGEGGWTLSFTSGFAAPVHRRRVPARDRDAVLQQIEAMKERLGLAASCRVVSCYEAGRDGFWLHRFLEAHGIENLVVDSSSIEVSRRSRRAKTDRLDGESLLDLLLRHLAGSQKKVFSVVRVPTVEQEDRRHLHRELQSAKQDRTRVTNRMKGLLANQGLPLDLKRDVSTQLASLRRWDGSPLPEGLRARLGREWERVVFCTALIERLEAERREILQRGKDPVLEKVRQLNLLRGIGTNSAWLYAMELFGWREFRNRKQVGAIVGLTPTPHTSGMQERERGMSKAGNRHVRAMAIEIAWGWLRFQPRSALSQWYQRRFGMGSKRLRKIGIVALARKLLIELWRFLETGVVPEGAMLKAEVRVR

SEQ ID NO: 446014 - protein, 315 aa, unidentified
MTQPVYLGIDISKRTLDIATVDRYIGQVDNDDAGYEQLLKQLASLGQLHIGIEASGGYERPLLKYLLTAGFHVYRLEPARVRHFAKSINWHAKTDKIDAQLIARFVQTTGPRPTSKPDKNAEKLRVLRDRRKQIVEDRVREQNRLESCDDASIRRMINQSIARLQKFESQLDAQLTRCLNKSPKLKAKAAVLTQVIGVADQTAATLLAHLPELGTVNRQQIASLAGLAPYAHDSGRYQGKRRIRGGRAAVRTALYMACLCAVQHDAVMRTFYQRLIAAGKLRKVALTACARKLLVHLNTLCAQAQALPGKKAAGA

SEQ ID NO: 446015 - protein, 482 aa, unidentified
MKKRNIYQNQSQELLKLLEGAGSSDKEMCVPMDFAKKDHLVMFCNGHGDILRKPFSVKNTPEGIGHIDDQVTRSCQRRGIKKKHVFFGGEDANSFAKNFVSTLRYKGWIVASVNAHDAKKQRVNVQASTDRIDLMGIATMLLNCRANCTPAQAGIYRNLRTLVRHRRKLVQMLTEVKNRVHGIVDELFPGFLKEQNSGIVPFTQSSLYLMEDRFSPKQVRRRKHQKLIEILKRFGTSKAEHTAAKLQQYASKVLHAPVEYVDTMQLSLAQHVKHIRCLKESVVQMEKEVALNLAQTQGAFLTSVRGIGLVLAAGVTAEIGDLNDQKPLNNLVSYAGIVPRVKQTGGSDGKTYTGTVAKRCNRILKDYVVRSAYHLGLHGPQDLMADHKRRDASGQHADFGIGRRYLRMAISLMRRSQVYLPPNLRKDDYTLEERAGYYLMSWPFLREKWKKVDALEAAFAKDRPLGLWRQIVQELYDIKLKL

SEQ ID NO: 446016 - protein, 343 aa, unidentified
MQRNKISFKGQKIFIGIDVHAKNWEVAIAPEVGIAKRHSQKPSAKALFDFLKKNYPDGEYLAVYESGLSGFSTYYALKETGIDCMVIHAADVPTTQYEEVMKTDRVDAVKLARSLKAGLLKGNYVPEKQYIDDRSVVRIRKTIQKQLGGYKSRVKHLLHCHGVEFPERFSKKQTHWSRAFITWLMKDVQLMSDTRASLDLLIRQVEVLRGTLLEATRHLRRTIPGIGLIVTMCILTEVCDINRFHNENEFAAYLGLIPTSHSSGEKTVHGEKTFRGNKQLGPMIIEAAWITIGRDAGLGAQYFQYKQRMESQEAIVRIARKLSNIIFSVLKNEKEYVPYQTGN

SEQ ID NO: 446017 - protein, 461 aa, unidentified
MAKQLGKRKKDGAKADATEGLPPLNLHAAGIDVGSAEHYVAVPPDRDAEPVRKFGSFTADLHRMARWLKDCRIKTVVMQSTGVYWMALYDVLESHGLEVNVANARHTKTLPGRKTDVQECQWLQKLHTFGLLNNSFRPPDEIRVLRGYLRQRENLVAAAATCIQHMQKALTEMNIQLANVISDISGTTGLAILYDIVRGERDPYKLAMHKHSRIRASRQEIARSLQGTWRQELLFVLEPSLDLYQTYQQKIQTCDERIDGQLRSMELRIDPLSEPIPEPRRGKDARGHQSGFDLRGQLYRITGVDLTRIAGIEVQTAQTIISEVGVDMSRWKTEKHFASWLGLCPDNRISGGKVLKRGTRHVVNRASTALRLAASALLRSQSALGAKFRRLRSKLGAPKAITAMAHMLARLLYRMLKFGHDYVDRGIAFYENKYREQQLKRIAKQAAALRMQLVPLAEVVS

SEQ ID NO: 446018 - protein, 320 aa, unidentified
MERGRMERGRMEMVWVGIDVSKDRLDVHILPDGTAFAVARDGKGLAELAARLHSAAATLVAVEATGGFETVVAAALAGAGLPLVIVNPAQVRHYALAVGQRAKTDPIDAAMIARFVEATRPEVRPLADAATQLLADLVARRRQIIEMIVAERNRERRTAVTRIRKSIARLIAALEKELTEIDAEIDTGVRGSPVWRDKEDLLASVPGVGSITARGLIAELPELGSLTGKQIASLAGLAPYTRQSGQWKGKSMIAGGRKTVRSALFLAALVAGRHNPVLKAFRQRLLDAGKPKMVTVIAVARKLLTILNAILRDQKPWKTA

SEQ ID NO: 446019 - protein, 395 aa, unidentified
MSAEGEAIRSNDYRKDTTVKAPSTRPAAVLGLDVGKSSHWACLIDRDGEVLASAPVRNREAELDALFASAPAGTLVVVDQFRNIGSLAVRRARAAGLGVAHLPGLAASRAAGLFAGEAKTDERDAAVIARTALGVPDSLSGVPGRGEALEAARALSSQRDHVVACATRDKNRLRAVLLESCPALEAAVDLSDRRWLELLAGFGGAWGIARSGAEGPRAEAAGEAAAASTAPPPALVEAENRQVRFLAARISEALDEAGALEAETAALLEGDETYACLLTVPGIGPRTAAQLAVSVDIGRFPDHDHLASYCGIAPRVRSSGTSVRSVRASRRGDARLKSLLIFSCNSLVRSSGRYGEYYRACRARGMGHGRALKAVARKRLRAIYAVMRDRVPYRE

SEQ ID NO: 446020 - protein, 385 aa, unidentified
MRFAGMDVGAERHMVAMVGEDGEVLCRSSPFGEDASGYAHLFELLGPPEGCLVALEATGHYWRNLFVALLAKGYAVAVLNPLRTRRFAEEELQRTKTDAIDALGIARFAAQKRPPSAQLLDSATEDLRELARLRERLAEDFASRLRQLHRAVDLGFPEFTRYVRTLESQLAATILSRYPTAASFQGVSVKKLARIIYDGSHKVGEELARTLIEAAEKSVGTHHSEPYRLRIKYLCEDLDVLRRRLKDLARDIERKLDDHEVGKLLTTIDGVGQLTAACLIAELGDPARFRSAGAIASYVGVAPRLRQSGKKRFSGSPTIPFGNARLRKALWMVVLNAVRCNPWLRQYYERLRAAGKPGKVAVIAAMRKLLVAVWSVATHRRPFVR

SEQ ID NO: 446021 - protein, 344 aa, unidentified
MTSMNFIGLDIHKKTISYCVKDAAGEVLAEGTILSTRQSLDVWMRTLCEPWTVAMEATMFTGWIYDYLLPHAAAVKVAHPLMLRAIAAAKKKNDRIDACKIADCLRCNFLPECYMASTEIRERRRTLRYRKLLVRQNVQWRNKVSQMLMESGVVYNKQKLHKVGYFKELMTTNPDIGEGLRPLLTICRETIVRIGKTEGALVRSLARDPLLSDRVQRLMTIPAVGPITALTWVLEVDDVARFGSVKQAISYCGLCGAERSSADMVKRMPISKQRNKHLQSVLVEAAKLGPRLSPDLALVYETEKQKGHANRATIAVARKLVAYLLAVDRSGREFVVAGERREAA

SEQ ID NO: 446022 - protein, 356 aa, unidentified
METAYDGRQVVGMDLHRRRSVLVRMTEDGRRLGTAKITNSPAELRREIARAGKAPKVVLEATYGWYWAADTLAAAGAEVHLAHPLGVKAFTYRRVKNDERDSADLADLLRMGRLPEAWIAPQEVRELREITRYRQKLVHLRTSCKDQVHGVLAKLGVTVTCTDIFGKAGSAWLDGLRLPQPYAGKVTSLRHLAGELATEITMLSEVIASLLAGDRGYQVIQQLPGIGPVLAAVITAEIGEVTRFKNAGQLCSWAGLTPRHRESDTKVARGHVTKQGSRLLRWALIEAIQRIPRDSVIGAVKDGIIARRGKEARNIAKVAAARRLLTLVFYGMRDGQIRCLSRPREDPPPARAARAA

SEQ ID NO: 446023 - protein, 315 aa, unidentified
MATSRGKFVGIDVAKEKLDIAVLGEKEASLVTNDGKGIARLIKKMQKLEPELIVVEATGGYQRAVADGLYRVGLAVAVVNPARVRQFARACGLLAKTDKLDAQVLAVFGERVKPRRYGGKDEKERELSGLLIRRRQLEEMIKAEKNRLRTVQPSLQGSLERIIACLQAEKKSIEERVHQYMAEQDEWQAKKQILESTPGVGVVTTATLLADLPELGKVDRKKIAALVGVAPMNHDSGKKRGYRKTKGGRADVRSVLYMATLVACRYNPLIKPQYEQLVKRGKEKKVAITACMRKLLTILNAMVRDQQPFRVSPTT

SEQ ID NO: 446024 - protein, 484 aa, unidentified
MMRRMGFPVPITLIGPADSDLALIDFADSYLTAADLPPLPPLDLEGKMQTVKLAVVGAHLKDMPLHWQLTSREAKFVGAFDTAPTYRLYAMADSVPPKPALVHSEDGAAIKVDGVDAPSHGGIESCQTGFARSQFNRKEASMSEVSILAIDLAKHSFQVCATTIEGVVVSNRKYSRGKLGQLLAEHPKCLVAMEACATSHWWGRFARDQGHDVRLIPPIYVKPFVKRSAKNDANDAAAIATAVRQPGMRFVQVKSQGQQSQAMLFRTHQTLTRQRAQLMTTLRGHLAEHGIIVAKGDAALLAYEETLESQEDIVPDLVREVARLYYHHMDRLAQTVATLENHMAEAAKQDQDIRRLRTMPGIGPITAAAFLAFAPPMESFRRGRDFAAWLGLVPKQLSTGGKTKLGRVSKMGQSDLRRLLVTGATVCIRWARWKGIRPDGWLGRLLERKQGTLAAVALANKMARILWAMVTKGQDYRGGLVEYA

SEQ ID NO: 446025 - protein, 366 aa, unidentified
MKKTSTVRVNGNMIFKGHKLTIGLDLGDQWSCYCVLDEAGKIILEQKVATTPEAMKQAFAKIPQSLIAMETGTHSPWVSRLLTELGHKVIVAHAQKVQLITKSNRKDDRHDARTLARLARIDAELLGPVRHRSAQAQIHLTVIRARAELVRARTSLVNAARGLVKSYGQRLPKCGTQQVSRELGVGLNAELREVLEPLLKEVESLNERIKEYEVRMEKIAKESYPQVELLKQVKGVGTQIALTYVLTLDDPHRFPKSREVGGFLGLCPGRRDSGESQPQMRISKEGDRYLRTMLVQGAHYILGPFGADSDLRRWGQKLSARGGKNGKKRAVVAVARKLAILLHRLWVSGEVYEPLRNSQKAMSAAA

SEQ ID NO: 446026 - protein, 473 aa, unidentified
MSKGSGLSRSERRRNARKERLRALVPRGGAVIGIDLGEDRQALALVDHDVRVLWRKTAKVKAHQLGGALDLAVAAARAAGFTAVTVACEPTGPRWMQVQRLCGERGLVLVCVQPLASHIAREQQDYTSHKRDESDAVLIGRLACELHCYVPEQLDEWWALLRQLGRRREQLVKAATAAAARVRDFLSVAWPAAETAARVPFKCVTWLACLEVVTGRCGGDPAGVAAMGEDEFLALVTEAARAWGANRAFRGIARNVLAVLQDPDAVGWSRRGLFRRIAGELADLRRLRAQLAATEAEMRAVLGGELGLSRLGGIPGLTLTGAAVILAEAGDPRRYETSKSLVKHAGLSPADASSGAFEGTSRISRRGRPGLRTAAWRAVTPLLLHNPVMAAKYQAMVCAAEDAAAAAAAAARPGSARAAQAGRAARAARAKARVACAAALLRWTCFMTVHDAGWDPAAASGGRITRHDLPQAA

SEQ ID NO: 446027 - protein, 324 aa, unidentified
MHYLYYVGLVAFEDANEMAHRKFANSRKGICSCLHWVEKRHGIRLDDVIFCAEDMGSYISEMAVCASDRTLNFNFSLISPLVIKYSMGIARGKTDRVDARRIAEYAITHYRKIALYLPAEKELCQLRTWLILRAHLAKQRVAKLVLLEKLDYKEKFADVSIQRSMLQEEIAYAETHMKTIEREMKELIAADSNICRNYKLLTSIKGVGPITAIVMLCSTLNFTKITDHRKFACYCGLAPFEHSSGTSVRGGCHTSSMANRDIKVQLNRSALIAIRCDPQLKAYYERKVAEGKHKFSVLNAVRAKIAARCFAVVRRGTPYVALQI

SEQ ID NO: 446028 - protein, 413 aa, unidentified
METMIERCAGLDVHKDTVAACLRVPGPGGGREQVIHTFGTTTVELLALRDWLSAHGVTVVGMESTGVYWKPVYYVLEDAFECRLFNARHLRNVPGRKTDVADAAWIGQLLEHGLVRPSFVPPKAIRELRNLTRYRTAQIEERTREGQRLDKVLQDAGVKLSSVASDVLGVSGRAMLEALVEGTRDPALLANLAKGALRKKLPQLRAALHGRFGAHHALLVGTILAKLDFLDEAIGALSTAIAEVIRPFAVEVELLRTIPGVDHRTAEGFVAEFGVDMARFGAAGRLASWAGICPGNHESAGKRGAGTTRKGSKWLRAYLRQSAKAASRAKGTYLAAQYARLRGRRGPAKATVAVGHSILVAVYYMLTRREVYHDLGPDYFTGRHSREHHARRLVRQLQTLGYRVTLEPVEVAA

SEQ ID NO: 446029 - protein, 465 aa, unidentified
MKHAHRRHRRTPTPHSSLLERINPNAAGIDCGAEEHYVAVPPAREAAPLRSFMTFTTDLHRLADWLTACGITTVAMESTGVYWIPLYEILEARGLDVVLVNARQVKNVPGRKTDVMDCQWLQELHSVGLLRGSFRPTAAIAALRAYLRHRETLVQSAATHVQRMQKALLQMNLQLSTVISDITGVTGLRIVRDIVAGQTDPRALAQHRDARCQASEARIMAALTGHYRPEHVFVLQQNLELFDAYQRQLAACDAAIEAHVHTLATEAPAPAAPLPGPRTRKKPRDNEPRFDIRTPLHQLTGVDLTQIDAIGPYSALRLLAEIGTDMSRWPTEKHFTSWLTLAPHNKITGGRLLSSATLPSANRAAGILRMAAMSLSRTETALGAFYRRLALRVGKAKAITATARKLAILVYRTLKDGLVYRDPGAAAYDAHHRQRIIRRLRQRAAHLGLALVNRETGELIEGAVS

SEQ ID NO: 446030 - protein, 309 aa, unidentified
MKEQLVYCGVDIAKSHLDAAIGKEKRRLPNDATGHRQFIKWIKQIEAQVQVICEPSGGYERRLIRALVGAQIKVSLVQANRVRQFARAAGILAKTDMIDARVLCAFGEAMRPQTFSASALEQERLRELESQRRHLTHLLVMEQNRAARVSEVLVRRLNRRLIHQIKKQIEQLDLLIQEHIEASPELSHKASKLTAISGVGERTAALLLAQMPELGQLNRREVAALVGVAPFNRDSGKWRGKRAIFGGRRFVRHGLYMAALVAARHNPILRPFYQRLRVAGKPAKLALTATMRKLLIVLNSALKPQSIYA

SEQ ID NO: 446031 - protein, 355 aa, unidentified
MTIAKYVGMDVHKESISIAVMNSAGKLVMECVIETKANMLLQFIDGLRGDVRITFEEGTWAAWLYDLLKPHVSEVVVCNPRKNALLKDGSKSDRIDARKLAELLRGNHLKPVYHGEQGLRTLKELARSYLTISKDVTRVMNRLKALYRSWGIACAGIQVYAPRHRSEWLGRISEAGVRRRAEHCYEQLDVLRLLRQQVRRDLLLESKKHQAWRLLGLIPGIGPIRAALLIALIQTPHRFRTKRQLWTYSGLGLETHDSAQYRVVEGQLRSKKSVTLRGLNQNHNHDLKDIFKGAATRVSSSSNGPLHDFYEHLLAQGRKPTMARLTLARKIAAITLIVWKKEVHFDASYLKSQAA

SEQ ID NO: 446032 - protein, 406 aa, unidentified
MYSVGLDWGSAVHTACTMDHDGAVIAGIEVQHTAEGLRKLLSRLARIAPPGQLPVAIERPSGLVVDTLVDAGHPVVPIHPNQLKACRPRYRAAGGKSDPGDAYILADVLRTDGHRFRPLEPLSDEVRALRALVRSRDDLVAERVALTNQLRALLDSFWPGAVALFADLASPIALAFLQRYPTPERARSLGPKRLAAFLARNAYCGRRNPAELLARLRSAPIGLAGPREQEAKGDAVLDLVSVLSTLVNRIRRLTSAVEHAVAQLPAGRLVMSFPRAGKVNAAQIVAELGDDPQRFPSERQLAAEAGVAPVTHASGKSRAVTFRWACNKRLRNALTTWANNSRHQSPWAHQIYSQARARGCDHPHATRILARAWVRVLWRCWRDQRPYDPARHGAARQLQQPPQRAA

SEQ ID NO: 446033 - protein, 320 aa, unidentified
MTGFVGIDVSKGHLDVAVRPGNATWQVTNDAEGVAGLAERLQGIAPELIVLESTGGYELAAVTGLLVAGLPVVVANPRQVRDFAKAVGKLAKTDAIDARVLAHYAEAVQPPLRALPDEAAREFAALVARRRQLVEMHVAEQNRLRGLPRRLQSQVRDHLVALQRYIAELDRDLEDFVRSSPIWAAKDELLQSTKGVGPVLSMTLLAELPELGALDRKAIAALVGVAPLNRDSGTLRGKRTCWGGRADVRSTLYMATLSATRHNPAIRTFYQRLGAAGKTKKVALTACAHKLLLILNALIKNQTPWDPNFAPLPLTPQHSC

SEQ ID NO: 446034 - protein, 392 aa, unidentified
MLFVGIDIAKRNHEASVIAQDGRVVRKAMRFANSQAGYNKFMDMVRGLSEPVVFGMEATGHYWLTLYTHLRNDGFTVHVINPIQSDALRGMYIRKTKTDSVDSVIIADVIRFGRYCETSVEPGNLQAMRELCRQRFYIIDMASDLKRKVIALLDQVFPEYEKLFSDSFGVSSMELLSQYTTPEEMLSVSSQQLAEVLEKASRGRLGAEKAAEIQDAARNSFGIVMASSSFSLIIRQYIEQIRSLESSVDIFDTEIARLLSGFDTQLTTITGIGSTLAAVILSEIGGDIRRFSSPAKLAAYAGVDPTVKQSGDFSGTRMKMSKRGSPYLRRAIWLASTVAAFKDPAIHALYERKRAEGKDHMTVIGHICRKMISIIFAVLRDNTPYVPAGISD

SEQ ID NO: 446035 - protein, 400 aa, unidentified
MNAVGIDVSKGKSTVAVIQPFGVVIAEPFDVIHTDGDLKELVKFIKSLSGETKVVMEYTGTYYEPIADALHNAGIFVSVVNPLLINDYDTNRVRKVKTDRIDALKIASFTLDKWMKLREYIPAETVRQTLKVMNRQCIKLNKILVMQKNSLIALLDCCFPNANTLFTSPRRESDGHEKWVDFVLKFPHVDSVAKLSLSAFKTKYQGWCKKERYKYSESNAEKIHAYARTLVSTLPMTDAVKTVVSESAKLLNSTLEALWTLHSEMDILASQLPEYDTVMNLFAVGKVTCSQLIAEIGDVTKLKCSKSLVALAGIDPPPNQSGKEDPKSRHISKRGSPALRKTLFLIMTIYLQRQPADEPIYQFLDRKRAEGKPYKVYMIAAARKFLRIYYARVKEVMPKE

SEQ ID NO: 446036 - protein, 349 aa, unidentified
MDTAYDGCQFVGIDLHRRRSVIVQSGHDGERLATTRIDNDPFTLAVQIASWGETPQVVLEATYGWYWAADVLAEHGAQVHLAHPLGVKGFAYRRVKNDERDAADLADLLRMGRLPEAWIAPPPTRELRELVRHRAKLVALRSGLKAGVHSVLAKNGVHVPMSDLFGVAGHKLLDGLALPAAYLARITSLRHVIDAFTFEIDLFAGMVRAKLATDTGYTAIQAIPGVGPILAAVFVAEIGEVHRFSAPGQLCSWAGLTPLHRESDTKIHRGRITKQGSTLVRWAAVEAVQRLHGGPVASFKARIVTKRGANIGKVAAARKLLTLVYYGLRDGHIRCLAAQSAKEPAKEPV

SEQ ID NO: 446037 - protein, 344 aa, unidentified
MDYFAGLDVSVKDTSVCIVDDTGKIVREVKVASEPAALLAVLRNTDYHFKRIGLEAGPLSQWLFSALAEADLPVICVETRHMRAVLKAQINKTDRNDARGIAQMMRVGLYRPVHVKTLRSQKLRMLLTHRKLLQCKAIAVDNDLRGTLRNFGLKVGAVGAVRFEARIKELVENLPDLAMLIEPLLVVRRVLREQLGILHRRLLTIVRDDDVCRRLMTVPGVGPVVALTYRATVDVPARFRHSKSVGAVFGLTPARDQSGERDRPGAISRCGDDMMRATLYEAAQSMLVHSTRWSWLKAWAMKIAKHRGMKRAIVALARRLAVIMHRIWIDGTEFRWTRVAMPAA

SEQ ID NO: 446038 - protein, 418 aa, unidentified
MLVAGIDVGAEVHHVAVVDESEAVVTQPTAFAENAVGYAKLFALLGRAGARGGADLPLATARAAPPSTLVVMEATGHYWQNLLAALTAKGFAVALVNPLRTHRFAGEELARTKTDRLDCWQIARFGAQKRPAPSYLPEAAVEELRELMRLRERLVEELVARLNQLHRLVDLGFPEFTRYLKDLNTELATALLHQYPTAQAFRGISRKRLARLSYDGRHQVGTELAQQLIAAAAVSVGSQHSSSHQLGVRYACEDLETLRKRLKRLDGAVAGTLQQHQVGQLLTTIGGIGDTTAAMIIAELGDPARFQSAGALAAYVGVCPAHKHSGKHQPKRSSLTPIGNRRLRHALWMPTLSAATHSNPWLMLFYRRLIERGKPHKVALCAAMRKLLAAIYSVAKHRRPFSMDLNLQSRLRVSYENA

SEQ ID NO: 446039 - protein, 387 aa, unidentified
MRAVCGLDVHKDSVFLCILCETGEIIEKVFGVLTHQLREMRRMMQSHGVSEVTMESTAVYWIPVWRVLEPHFHLKLVNPYFIKQLPGRKSDVKDAQWIAECTLKDLVRGSFVPPERIQQLRQYDRRIFDLDAEIVRKLAKLDAVMQRCNIRLSNYVSNTDTKSYKDVVRKLCEGVTDPEELIKVIYSRITNRHGRETILAALTGVVSDAEKDTMRQLRDELDLAEKHKQECMDKMMYICKTYYPEELRRLMTIPGIKERAATSLIAEIGVDMTKFQTAAHLASWSGLKPRNDESNKKIKSRRITHGNIFLRKTIIECAWGASRTKDCFFSRFSYHQTQVRKKNKMKVLVAVARKLLIAIWHVLHDETDYKDFYAKNDCETSGSESNG

SEQ ID NO: 446040 - protein, 340 aa, unidentified
MTVIIGIDPHKATHTAVAIGCDEAELATVTVRATRQQVDRLLGWAAPFEERTWAIESAGGLGYLLGQQLVDAGEHVLDVPATLASRVRVLGTGKSDKNDPNDARSVAIAALRSPGLRSVQPADHAAVLRLLAKRNQDIGDLRTKLVCRLHAQIASLSAGGIAKELNASDAEGLLGAFEPRSPAEATRHQLALELLEDVRRLDNQLKESHKRMKIAVRASGTSLTEVFGIGPVLACALIGYTGDVIRFTSRDQFASYNGTAPIEVSSGGRAAHRLSRRGNRQLNHAIHMVAICQIRQIHSEGRAYFEKKVAEGKTKREAIRSLKRQISNTVFRHLVLDTKR

SEQ ID NO: 446041 - protein, 417 aa, unidentified
MSKVIERCAGIDIGKRFLMCCVVTGAADEESRSQTLRFDTTVPALERMSEWLNRERVTHVVMESTGSYWVPVFNILEDHFTVVLANPEEVRNRKGHKTDRKDAKHLADLLRHDHIRPSYIPPRATRELRDLTRRRVQLMQDCTRERNRVQKLLEHANVKIAGVLSDVFGVSGQRMLVALLEGESTPDQIAELARGQAKRKIPQLTEALVGHRMTEHERFLIRSCLRHLACLEEELEHLDAEIVRRMGMPPFQNAFALMQTLPGVGELSAAAILAETGTDVASFPTAEQMASWAGLCPGNRESAGIRKGSQTTHGNKYLRTALLQCAWSASRKQGSLFEARFRLFIKRLRPKRAIVAVAHQMLIIIYCMRRGGVPFRGAEGAPHQRRRQRRAHHHLRCLRRLGVTVQVLSDDLSGPTP

SEQ ID NO: 446042 - protein, 400 aa, unidentified
MLSIGIDVSKGKSTVCGMKPGGEIVYAPFEIQHTREGMSDLVSLLRGSGEEVRAVLESTGSYHCPVVAALLENGIFVSVVNSLRMKRFCSQSIRKVKTDRIDAMQIALYGLAYWQELQPTRLPEDTYRELQLLARQYYQMTSLLIKAKVDFNAICDQVLPGMQELMSDHAGRHKLSDFVLRYCHTTHILEMGETRFRKDYCKWAEKKGYRNCERMAALIFATAQNGIPVLPNAPSTQIVITEAIRVLHTVEASRDAILTQMQALAKTLPEYSLVREMPCIGDTLAPRLIAEIGDVRRFHSKRALIAYAGIDAPPYQSGKFCANNRHISKRGNRYLRKTGYEVMQSYVMHKPANDPIFTFIEKKRGEGKSGKLAMVAGLNKFLRAYYGKVTELYCSSSAIE

SEQ ID NO: 446043 - protein, 411 aa, unidentified
MKFIGLDWKDKGYTTRISNKEGADLSGSFEVEKNREGFSEFIYKVRKYCDGDSNILFGIERETDPIVEYLLTLGYKVYLVCPNMMKSLRKRYSSTGKYNDEFDSYIIADTVRTDRNRLTQIEPRDENIRKIEFLLRNREKAVNDKTRLTNRLTCYLKEYFPAFLDLFNDITCPTALSFLKAYPTYYNIKELSREEIRTFLKEHHYHKESGILRIYKAIKKGQVKIDATVIQERSRSAILLIKRIELLNEEIKEYENDLKETTETDKDAEIFRSLPGSGDTLSPGLMVIFGKKRSRYENAEEINSLSGIVPFTKQSGNWETHLFRFGCNHFYRNIITRLAYCSLTKSEWAKGYYNEKKAEGKSHYHALRCLARIWIKVAFALWKKREKYNEDKHMAAVQRHKIRNRLARKSA

SEQ ID NO: 446044 - protein, 358 aa, unidentified
MAGKVTETAVVGGVDTHKDLHVAAVVDQNNKVLGTQFFSTTRQGYRQMLAWMTSFGALKRIGVECTGTYGSGLLRYLQNAGLDVLEVTAPDRMERRKRGKSDTIDAECAAHAAFSGIRTVTPKTRNGMIESLRVLKTCRKTAISARRVALQIIHSNIISAPDELREQLRNMTRMQLIRTLGSWRPDASEYRNVTNVYRISLKSLARRYLELHDEIADLDVMIAAIVDELAPELIKRNAIGYESASQLLITAGDNPQRLRSESGFAALCGVSPVPVSSGKPNRYRLNRGGDRAANSALHIIAIGRLRTDDKTKEYVARRVAEGHTKMEAIRCLKRYISREVYTLLRNQNRQINSIPITA

SEQ ID NO: 446045 - protein, 406 aa, unidentified
MMWFVGIDWADDHHDAVVIDDAGKRVAATRVPHTSDGMTALVAFLRGIGDVDTHPAHLACVVETNRGLLIAALLDAGVPVYPVNPKTVDRQRKPSGAKTDAIDAYLLARTGRSDLADLRRLTPDSPLVAEIKMLTRDQDGLIQGQTRLVNQLTACLKAYYPVALDLFGKLHQGATLAFLRAFPTPDEARAATVERIASVLIAARYATAEAKAHEIGQRVRQPQLTADPVVTRAKARLMLTLAAQLQVLVAEIAAYDREISRVFAQHTDSAAFASLPRAGKRLAPRLLAEWGDDRGRYADAASVQALAGTSPVVFQSGNYASVHKRYACSKPLRNALHQFAWQSTLQEDWAATYYRRKRREGKSHTKAVRALANQWVRIIHALWRKRESYDPAIFVAAQQAHALWAA

SEQ ID NO: 446046 - protein, 521 aa, unidentified
MAASVVPKSLVEANETSVAPPHIRETLLALSQVGEHEIAERRECLAGVGRFIGLDIHKKYVVVIGVDRELNQVLGPIRLSWERWIPWVEKTLTLEDAVAVEMTTNTWEVYDFLVDRVQSVTVAHPPHLKLITAMPVMNDRRSSFALACLLASGLLRPVWVPDPKTREWRSLIAARRDRVDTSTQAKNRLHAILHRHQMDFPEDTKPFSEINREWWLGLAVTPVEKLQIQLDLAVLDLCQAQIHQLESVIFQEAGTDPRLPFLLQLPGVGTLGALTILGAIGTIERFPKARYLVGYAGLGARVHDSGNTRTTGGITKTGRKDLRFTMINAAQGAVRSHAHWEAELNRLAPRIGRNKAITAIARKLLVAVWHILTKQEADRFADPAQVARALGDAVYHDIRVHSLQTGETGPEFVRRNLDTLKLGKELQTFNLGKTDFIMPQSTQEGAAPALKPKSPNRQQNTRATKAARAAEAARKRDELEQQRAEAVARNGKPRKPRSDRGVKRGPRKMKLEAEQTLAVVS

SEQ ID NO: 446047 - protein, 405 aa, unidentified
MFYAGIDWSDTHHDALVIDEAGRQVHAPIRVIHSLEGLEKLHAFLEAIIGFTGKENLACIVETSHGLLITFLLERGWHVYPVHPTTVDHRRSASGAKTDQIDAYLLAKTGRADFAELRRLTPDSNQIAELKALTRDQDSLIQMQTRLVNQLTACLKAYYPVALDLFAKLQQRSTLIFLQTYPTLQAARSASVEQITEVLKQAGHTSAAQVAPKIVETLRQPQLGADEVTTRTKSRLALALIAQLLPLVEQIAAYDKDIEQLFLSHADSQIFESLPRAGRRLAPRLLAEIGDDRQRYADAASLQALAGTSPVVFQSGTYSRIHRRYACVKPLRNALHQFAWQTTQSEPWALEYYQRKRKEGKSHTVAVRALANVWVRLIYAMWQKSECYQAETFEHARQLHARRAA

SEQ ID NO: 446048 - protein, 353 aa, unidentified
MIVIGVDPHKSTHTATAVDQLTHADRGSLRIEARLAEYQRMLVWAKQWPQRQWAIENAEGLGHHLAQWLLARGETVVDVPTTATARVRQLSRGARRKNDRIDAAAAACVAALQGDARPVTPESHVDALGLLDGRRMNLTQNRTRTINQLHALLRELLAGGVPTDLTAAKAAAAVRGLRPASTPERVRLQLCRELIADVRRLDQQLTDNRAEATRLLDEHGTRLREIHGVGPVLAARILGRTGHVSRFATSAAYATYNGSAPVEVASAEHQCHRLNRYGDRRLNSALHTIAIVQVRMPECAGRRYYDRKIADGKTPRAALRSLKRHLSNQLWRTMIADEHHRHNKPDDQSPTAA

SEQ ID NO: 446049 - protein, 340 aa, unidentified
MEIAILGIDLGKNSCSIVGFDDGGAVVLRRRMHREGVIKLAGKLRPCVVAMEACCGAHHLGRVLRAQGHEVRLMSPEYVRPYVKSQKNDDRDAEAIAEAATRPTMRFVELKSEEQLDMQTLHRARDRLEGERTALINQLRAVLLERGITVAQGRRKLERHLAGLDAPGGLSQRMRVLIEDMRLQWCELDRRIAELDKELTKWVRNEEVARRLMTIPGIGVLNATALIAAIGQGESFARGRDLAAWLGLVPRQLTTGGRPRLVGISKRGNKYLRKLLIHGARAALPTLLESPTSLGAWLRGLMTRMHKNAVVVALANKLARLAWAVLRHGETFRFAVSAAA

SEQ ID NO: 446050 - protein, 444 aa, unidentified
MGHRTVGIDLAIRGDHVARILDDGRPHAKSIRFRLTSDSLNGLIGRLRDGLAPASTITAVMEPTGMSWFPVAHWLEQAGVKVIRVKGQRVRALRRYLSEHAKTDSADAYVLGAIPLFGGVPTDAVYVPDAERHALQRLTRQRERLEEELNSIKRRVLDLVRWACPAIEAALPDFRTNLSLAVLHDLLDPACVIKMRRAALRGFVAKHASGNHPHSGPFAERLIDDLRAAAAETHRLHGTAVDFEYLQLEVALEIDRLRLLEAQISKLSREIEVLYDKLHPSDALRTIPGIGEALAPLVLGVLHEARRFAGLHQLRGFCGLFPRINSSGGADQPGQSITQAGNNRIKRALYLAADAARRIDPGLAEVYWRLMVRKGHHHKQALCAVATRLVNRIGKVLRTGKAYELRDTDGRPITVAEGRSIVAERFSIPKEIRDARRRHREERN

SEQ ID NO: 446051 - protein, 313 aa, unidentified
MDAIAPIVGIDVSKDRLDVHVRGPDERFDVARDTEGIAALVERLRALAPKAIGLEATGGLEAVVVASLAEAGLPVLVVNPAQVRSFAGALGKRAKTDAIDAAVIAHFVEATAPEIRPLQDAETRLLADLVARRRQIVAMMTSERQRRAGAPERVRKSIDRLLKALARELDSLDGDIDGAVRRSPAWREKENLLTSVPGVGSVIARTLIAEMPELGSLDRRRIAALAGLAPWTRQSGRWRGKSFIGGGRTSVRTALYMGALVASRRNPALKAFRDRLVAQGKPKMVALVATARKLLTILNAIIRDGTPWHAQNA

SEQ ID NO: 446052 - protein, 392 aa, unidentified
MKKHSYVGLDVHKESISIAIAEGGRNGEVREYGKVGGSLIALERALRKVKKPGVQLHCAYEAGPCGFVIYRRLKKLSIDCVVVAPSLVPRKPGERIKTNRRDAIKLARCHRAGELTAVYVPDARDEAIRDLCRARTDSVRDQRRSRQQLKALLLRLGYHYTGKSSWNEAHLRYLRELEMTHPAQKVVLEEYLIAVSQAGERIARLTSQIELHVATWRMKPAVEALMAMRGMQLIAASVLLSELGDLSRFDHPRQLMAYLGLVSREESSGDSQRRGAITKCGNTHARWFLIECAQHYALPPKVSKELSKRQEHQPEPIKELSWKAQTRLYRRFWALMQRGLLRQKAVVAVARELSGFIWALMRQVPLPAHPPLLEQSLGQKVWGTTVPQHPSS

SEQ ID NO: 446053 - protein, 340 aa, unidentified
MEKNEKFYLGMDVSKLWVDIALMRVQDHKKQPFISGHFNNDAAGMKAFDKWLKKQNVSFDENSLLVIENTGVYHRLVWEYCSAAGLPIYIGNATHLKYSQGITRGKNDKIDSERLCSHAFKYADQIKATPVLNPVFLKLKDMMTSRSRLIEQKNSIKVYLGELKLSNSKETQALIENAHKAAVEGIEASVKFVEKQIKQLIKENAAIQKNYDLLITVPGIGHLTAVYIICCTNNFICKITGKQLACYAGVAPFGNTSGTSIKGKDRVHKMANKELKTLLHMGAVSAITHYPEFKDYYDKKVKEGKHKLSVINAVRSKIAVRAVAVINSQTDYVDKHKKAA

SEQ ID NO: 446054 - protein, 328 aa, unidentified
MQTILHNCCGLDVHKESIVACILKTSNISLDSNNEEVEKEIRVFETFPDTLKELKSWLESEDCHHVAMESTGVYWCPVYDVLEGAFGGDIELLVVNSRHMRNVRGKKTDIKDAEWIAKLLRAGLLAGSFIPPLEVRELRQLTRYRKSIVEDISAQKNRIEKTLQTANVKLSTFLTDVFGVSGRNLINVLVEKGYLSPEDVETETKRISQEKKDEIKRVVNIQLTTHVRNFIKMQLTFLDEMNAHLESVEESIDELSAQFQEEIERLDTIPGIAITAATAIIAEIGTDMSKFPTAEHLCSWAGLSPGNNESAGKKKVHTSPTEAYTSKV

SEQ ID NO: 446055 - protein, 338 aa, unidentified
MIVIGVDVHKESVTAVAVDEAGRMLDEKTISVGSDELIGWAAGLAGERLWAVEDCRQLTRWLERQLLGCSEELVRVPPKLMAPERRAGRMRGKSDPIDALAVARAALREPELGRPRPGEQVFRDLKLLVDHRDDLVDERRRTQQRLRWHLHQLDPTFAVPLRMLGRSSHLERVSRWLARRDQELQVRLARELVTRCRSLTRTIVELDRELEQRTAATAPALLELPGCAAVTAAKLLAEIGPIDRFKSDAQLARHGGVAPLEASSGRVQRHRLDRGGNRQLNAALYRVAITQARYHPAARVYLERKQAEGKSRREAIRCLKRLLVRVVFNTLKASPALT

SEQ ID NO: 446056 - protein, 369 aa, unidentified
MGKYIEVFVAFDVAKKKHAVAIAEGGRTGEVRFLGDVENSPLPIERTIKRLAGRYDRLHICFEAGPTGYGLYRQIQALGHECMVVAPALIPKRSGERIKTNRRDAVTLARLHRAGELTGVWTPDAAHEAVRDLVRAREAASDDLRRKRQQLLSFLLRHSRIYSGGGHWTMAHRRWLANQKFEHAAQQIVFQEGIDAIEDAVQRLRRLEKQLALIVPEWSMAPVVEAYQAMRGASFLVAVTFAAEIGDVRRFDTPRQLMSFLGLVPAERSTGDTIRRNGLTLAGNRRARRALIEAAWTYRYPARVSETLRARLEALPKPVRDIAWKAQIRLCARYRRLSATGKKLPVVVAAIAREMAAFLWAIGREVAPA

SEQ ID NO: 446057 - protein, 400 aa, unidentified
MRAVFGIDVSKTSSEVAILVNGEKVHGYTILNDAIGFNRLLGDLKTVHNPEIIFEATGVYSRRLQAFLEEYSYAYTRLNPLEAKKQLDSLRVRKTDKIDAEKLAKSQLVHNRKPTYVQEEVYQHLRDLSRFYQNMTEDLVRTKNRLHKVLQVTFPELENLLSTPTGEQYWNLVMAFPCKEFVLSLSQSNLCEIIRQSTSKRISEKRVTYLVDKLIKLANQSYCAVKKTSPMLEEVRYYAQELLRLSERRQVVLSDMVALAQPLPEYDILRSIPGIAETTATSIIGELGNIRRFQSTNQINAFIGIDLKHYESGNFLAKEHITKRGNPYARKILFKCIHNIASVSHTNPCHISDFYEKRKRQSTIASTKPHTIASIHRLIRTMYYLITHNKLYDYSLTQNR

SEQ ID NO: 446058 - protein, 363 aa, unidentified
MKIMVGIDLHSNNALCGLMDESGQRLVHKKLPCDLTSILKLLEPYKERIATVAVESTFNWYWLVDGLQDRGYHVVLANPAGMQPYSGMKYTDDVSDAYFLAELLRLNLLPTGHIHDRKTRPVRDLLRRRLLLVRQRTMLILSFKSLNERTLGQRVSLARVKSMKVEEAQARFTAPADQLLSGTEIELVGHLTAAITKLERHLLGVAGKWKTYRRLQEMPGIGKILGLTIALETGEAKRFADAGNFASYSRCVKSLRTSNGKKKGENNRKCGNKYLAWAFVEAAHFACRYDDQCRRFYDRKKKQTNPVIATKSLACKLAKAAWHVMAEDAPYDAARVFGPARKSDLGETGREPAKGSGPPSQKN

SEQ ID NO: 446059 - protein, 337 aa, unidentified
MGLYCGIDLHSNNHVLTVIDEADRRVYERRLANDLAITKAALEPYRAELVAVAVESTFNWYWLVDGLMEAGYAVRLVNTAAVRQYEGLKHTDDEHDAFWLAHLMRLGILPTGYIYPKSERGLRDLARQRMRLVQHRSSLITSVQNQVWRSTAVRLRSDTIKGRGKQPWPEISDPDLALSVKVGRAAIDTLTVQIERLEKLILKRVELSPQFRMLKTVSGIGPILAMTIALEVGDVHRFASVGEFASYCRCVDSQRLSNGKKKGEANRKCGNRYLAWAFMEAAHFAIRILPAAKRFYERKRRQRHALLAVKALAHKLARACFYVLRDQVPFAPERLFA

SEQ ID NO: 446060 - protein, 338 aa, unidentified
MNNIINQQQIQLGIDVGKVDLFCHLIDQDESFSAEFKNTAPGIKRLTAWVHKIANKKTIHTCMEATGHYTRLVSYTLTESFNGQLYVVNPRQIKAFGNRRLRRNKSDKADAKLIAQFLIAEQNELTEFVPKTIDEQAIQEISNQKEYYVREIVKFKTQIQSRDTTFCKKSIERIIKALEKESQKLEDQLNKLIQKDTQKQINKELLLTTPGLADRTVNLLIAQLPQIDQFCSPRQLAAWIGVTPKHYESGTSGRKYTPITKMGSASLRCGLFLPSMSAMTHNPVIKAFADRLRENGKKGKVIVIACVRKMIHIIYAILKKQEAFNPEFNASNLVKKAA

SEQ ID NO: 446061 - protein, 351 aa, unidentified
MRTSQKVTGIVTTIGIDIGKNTFHLVGFDQRGAIILQQKVSRSQLERRVANIPRCLIGMEACSGSHHIGRQLAAIGHDVRLIPAQYVKPFLKGHKNDYRDAEAIAEAVQRPTMHFVTIKTPEQMDLLALHRVRSRLVGRRTGVINQIRGFFIERGITVRQGPMPLRKALSEILRSDTGALSPRMVGLIADLAQDWRRLDERIAAVSTEIEALAEQDHSCQRLMTVPGVGPIISSAVVAAIGNGTGFKQGRDFGAWLGLVPKQESTGDRTILGKVSKRGNKYLRTLFVQAAHVVLERRPSAAMRGLWPWAEQASKRLHRNMLAIALANKLARIAWAVLARGGTYQPRITHAA

SEQ ID NO: 446062 - protein, 436 aa, unidentified
MSERLVLERALVVGVDPHRESLDVVGICFPEEVILDEAFANTRAGHEALWSKAKSLAAEHDLSLVFGLEDGSNYGYSLARCLLCHGCQVKEVNPRMTNRQRDFYGQDKTNRLDALATAAIVMRAHEQLPDLAAVEEATEATQELSRYREQLVRDQTAAVNRLHGYLANQYPGYKSFFHEVHGVSALHFWASYPTAAHLQGVAPQQLADFLYDKSHHRLTRTACLQKATHILHSLDDAPLHEPDLLAQAQAAIISDLAQRLLQLRHSIEEVEAQLQKTLPATGQHLETLRGIGTVLAAVFIGETRDIARFHQDKDRFASYNGSAPATRGTGKHVRQVQNHWCNRRLKSALDHVAHTAYRQDPLSAEYYQSCLNRGLAPSEAHKRLMRRLSDVIFAMMRDRAPYDPEVHRRKQEERKKGKAWHPPSSAAKPCALPSLP

SEQ ID NO: 446063 - protein, 361 aa, unidentified
MRVYNHSHRFYCGIDLHARSLHLCILDQSGAVVFDQNIVARPESFLKAIAPFRADLIIGAECMYAWYWVADLCRQEQLPFVLGHALYMKLIYGAKAKNDKIDAGKIARLLRGGNFPLAYVYPKGMRETRDLLRRRTYLVRQRSALFTHLQILNGQYNLPPFPKKLSFAANRAELQIAERFQDQSVQQSAAVDLTVIDVLDEQIGKLELYLTRTAKVDDVQTYHRLQTTPGVGKVLALVLLYEIHDIHRFASEGQFLSYARLVRPGHESAGKVIGSGGQKIGNAHLRWAFGEAACLFLRASERAKKWKEKQLKKRAENRILAVLAARLARAVYHLWRKQEAFDETRFWQGQGVSGPTQGKGR

SEQ ID NO: 446064 - protein, 424 aa, unidentified
MPYRIAGIDVHKKMLAVVIADVAVEGEYRFQRRKFGATLGELRRLAEWLVEQEVQEAVMESTAQYWRPAWATLEQEWRSVVRQRPAAGPETGALHLAQAQSNRGPRGRKNDFKDAERIVRRLVAQELVLSFVPDPEQRLWRTLTRRKYQLTQDRTRFQNRLESLLEQMHIKLSGLISDLLGVSGRRMLHALAQGETKPTAVAALADPSLRASREQLCDALAACANLAPVYRRLLQMELEQLQFLEEQMSRLGREIAQLLDTHSEAITRLAEVPGLGVESAQQIIAEIGPQAAVFPTAKDLASWVGVCPGENVTAGEPHSTRSPKGNHNMRRLLNQAAHAAVKMKGSIFQVVFHRLLPRMEYKEAIWAIAHRLCRLVWIILHRRARYEERGPSVSAKSQRTRLAKMIRELTKAGYSVQLPSANPA

SEQ ID NO: 446065 - protein, 324 aa, unidentified
MSSPAPANPVHVGIDVAKASLDVCLLPSGRTLSVGNDDPGIAQIIALLQQQQQQQPIALVLLEATGRYERRVASELLDAGFNVAVVNPRQARDFARALGKLAKTDAIDARTLAEFAQLGHVRLCEKEPEKRTLLDDLVTRRRQVVQMLAMEKTRLQVPQNKQTRLMIAKVIRLLEQQREDLDREIAELIESDDDWRNKRDLLSSVPGVGAVTAGGLVADLPELGKLNRQQIASLVGVAPVNRDSGMMRGQRSIFGGRASVRTTLYMATFCATKYNPVIRRFAERLRAAGKPFKVMIVAAMRKLLTILNVMLKENRPWDPKLQMA

SEQ ID NO: 446066 - protein, 423 aa, unidentified
MDVMHERVAGLDVHKETIVACVRIVADGKVGRECRTFDTTTAGLETLLNWLTESGCAQVAMEATGVYWKPVWNILSDGKFELMVANAAHIKNVPGRKTDLNDAMWIADLVSCGLIKASFVPQQEIQELRSLLRARKQLTREQTSHVQRIQKTLEEANIKLDSVITDIMGVSGRRMIEAMINGVRNPFKLAELADRRIKASRKQLYDALHGRLTDHHRFMLRLYLRQYDALAASIAEIDQQVDSAIAKMDAEVAADQATFRTLIGLLCTIPGIGELAAKTIHAEIGTNMGRFPTAGHLLAWAGMCPAQNESAGKRKSSRLRKGSPWLKTQMVQSGWAAARKKDSYYKAQFNRLRGRHGAKKAICAVAASMLTAIYHMLKDGTEHQDLGPNHFDRRSTEIKAKRLAAQIKKLGFEVEIRPQPEAA

SEQ ID NO: 446067 - protein, 403 aa, unidentified
MNTDTTLVQRVIGLDAHPDTFTAALVRGPTPAAAVVEQTFNKVPMAQLQRWATKHTTPEDLIVLEASGNSFQIVRTLAAVERQALVLESCQMGKLKEAHANNDKISAVRIGKAYLAGTAKIVWVPDDRTQERRDWFHAHRKAVKRTTQMRNRLLSYLSDNGVRLKQRAPLNLDSLQQTRDWSARQWQVIEGLHMEWEHAQQQRQHWRSLIAQEVLNDPQLLSIVRLCGVRDIVAFALGALVGDIHRFGSPAKLVKYIGLNPAFDDSGQGTWSGGIGGHGRKDLRCLLIEAAHAILRSRTPLAQWGKRLLARKGQVNLVVAAIARKLAVAVWYLMMDRWTPLEEIDARLSIKISKIISQVGAKGLEQLGKTRQALRQETYHSLKHGHTYVLDPNKKFPLTPSLK

SEQ ID NO: 446068 - protein, 316 aa, unidentified
MNTKTNQSINIGVDTGKFQLDIYIRPLDIYFTVSNDEKGINEAISKIKKHQPERIIIEATGRLEMPFIMACAKAGLPFVIANPVHVKRFAGAVGQRAKTDKLDAKLIAHYGEAIKPSLSQLKPETMQLMSDLVARRNQLLVMQTMEKNRLQILPKELAMTIKPILTAFKNQINKIENKIVKLIESCPEYQAKNHLLQSMKGIGKIAAASIISNLPELGYMTNKQASALVGVAPINRESGRFKGLRKIQGGRHQVRTVLYMAMMSAIQSNSVFKSKYQKLVAAGKPKKVAIIACVRKMIVILNSMLRDGVMWEAPKV

SEQ ID NO: 446069 - protein, 338 aa, unidentified
MKVYAGIDLHSSNNYVGIINDQDQRVYQKRLPNQLEHILEALEPFKESMEGVVVESTYNWYWLVDGLQAHGYKLHLANPSAIKQYEGLKHTDDKWDSFWLAHMLRLNILPEGYIYPREERPVRDLLRRRLLFVKHRTAHILSLQSMVSRNLGTQMSCRAIKGLDEEAPETLFDSPHLLLAAKSNIAVIHFLKERIKSIEKAVKSHIKLQDEFKYLLTVPGIGDILTLTIMLEVGDINRFPQVGNYSSYCRCVKSERLSNGKKKDENNRKNGNRYLSWAYVEAANFARRFCPYAQAFYQRKMAKTNGIVAIKALSNKLARASYYIMRDQVPYDPKKLFS

SEQ ID NO: 446070 - protein, 338 aa, unidentified
METYAGIDLHSSNNYIGIIDDNDKRLYSKRHENRMEPVLKALAPFKKTLRGIVIESTYNWYWLVDGLQEQGFKVHLANPSAIQTYSGLKHTDDKWDSFWLAHLLRLGILPQGYIYPKEQRPVRDLLRRRLMFVKQRTAQILSLQSMISRVLSLNFSGNSIKGFDIDFIERLFDCYHQRFTAEKNLLTIQFLGGIITEIETEVKSQIQLRKDFQMLLTTPGIGNILGLTIMLEVGDIGRFAKVGNYSSYCRCVESKRTSNKKKKGENNRKNGNRYLAWAYVEAAHHSARVCQKAQRFFQRKMAKCNRTLATKALANKLSKATYYIMRDQVAYNADMLFR

SEQ ID NO: 446071 - protein, 463 aa, unidentified
MRRRIGRSIKKRMRQGLVVLEPNVAGVDCGSREHWVCAAAKESGQLSVKGFATMTEQLEALADWLHQQGVVSVAMESTGTYWISLFDLLEERGFEVLLVDARKLKKVPGRKTDILDCQWIQQLHSCGLLEGCFRPPAVIRELRALARERSNLKADSGTVVQRMQKALDQMNVQLHHAVTDLTGVTGMKILRAIVGGERDPQHLARYRDRRCGKSQAQIAQHLKGTWRDEHLFTLESNLERYDHLQTMLEKYEQQIILRLQQLSPPERQDRPVPTHPNARKDKDMRRRGEAPLRTALWRFSGIDLTRIDGLGSAAALRVISEVGFDLTSFPTSKDFVSWLKTCPPLNRSAGKNRKGRAKGFGSSRIAQVLRMGALSLKNSPTALGGSYRRMARRKGSSIAIGATARKLAEHIYRALRWGIQYLDQGAEAYEARFQNNRLKYATKIAKSMGYTLVPLENPNEVSA

SEQ ID NO: 446072 - protein, 318 aa, unidentified
MKKAFFCGVDVSKDKIDVCFLTSIMSEKAKFETLPNNYELIKVYFDSFKNDEILVVFEATSNYHLALQKALSDLSIRYCVTNPYKSSLFLKHLSTIKTDTSDSYGLAVYARTFKSEIAPDKYNAEYLEIKSYNSTLNLLQKINTQLKNFKSSQKTLNNKVIDDVIANLIKEIAKLQAMLQKLAFDLVKKAIPETEEIIKENKGFGIDLALNLFPQLYFNRDKSEKQFISFIGLSPRIFQSGSSVHKSQKINKMGNSNIRRILFMTALCAIRFNAKFKSRYERLLANGKKKMVAVVAVMCAIVRYLKSLFPFNPEIKAI

SEQ ID NO: 446073 - protein, 403 aa, unidentified
MNMNAVGIDVSKGKSMVAILRPYGEIVSTPFEVKHTISDIRSLIEHIQAIDGESRIVMEHTGRYYEPLARELSQANLFVSAVNPKLIKDFGDNSLRKVKSDKTDTVKIARYALDSWAELRQYNLMDEIRNQLKTMNRQFDFYMKHKTAMKNNLISILDQTYPGANTYFGSSAREDGSQKWVDFVTTYWHVDCVRKLSLNAFICHYQKWCKRKKYIFSQSKAVEIYEASKEIVSVLPKDDLTKLIIKQAVEQLNTASQTVEQLRTMMNEAASKLPEYPVVMAMKGVGRSLGPQLMAEIGDVSRFTHKGAITAFAGVDPGVNESGSYEQKSVPASKRGSGTLRKTLFQVMDVLIKTKPQDDPVYLFMDKKRSQGKPYYVYMTAGANKFLRIYYGRVKEYLSSLPK

SEQ ID NO: 446074 - protein, 420 aa, unidentified
MKSPSNLEFTAFVGLDWADKKHDICLQAAGCEAREFDRFAHRVMAIEQWALSLHQRFGSRIAVALELSKGPIVYALQKYPFLVLFPINPSMLAKYREAFKPSRAKDDPTDAELALDLLVRHRERFKPLQPQSEPMRTLAYLVEQRRRLVDDQVRYTNRLGSALKQYYPQALDWFADRDTVLFCDFIKRWPTLMQVKRARKTSLVAFFKAHNMRFPKLIEKRICAIKTAAPLTHDGAVITAYKLQALVLVEQLQVTLQAIGCFDQEIAAITPKLPDYALFRALPGAGSALAPRLLVAFGEQRDRFASAAECQKYFAVAPVTERSGDKTWVHWRWQCSTFLRQTLVEWAGQTINKSFWAGAYYRQQREKGSSHQAAVRALAFKWVRILYRCWQTRTPYDESKYLEALRRRGSPLLKQLGETM

SEQ ID NO: 446075 - protein, 410 aa, unidentified
MSRENDYSVLIGLDWARAKHDVCLQYADGTREFAVVKHSAEAIEQWIVQLHKDHQGQIAVALELSKGPIVYALQKYAFVTLFPINPTMLCRYRRALSPSCAKDDPTDAFIALELLIRYPDKITPLKMSDAKIRKLAFLVEERRRLVDEKKRYANRLINTLHQYYPQPLEWFSHRDSELFMEFIIRWPTLEKLKRAKPETVSRFLTSRGSFAKLVAPRLEAIKKAKSLTNDEVVIESNSLLAITLANQIRPIIAAIRTFDQEIETLFHTMPDARIYESLPGVGKCLGPRLLVAFGEDRGRFESAQEVQKYAGIAPVTERSGKATWVHWRWGCSKFIRQTFIEWSAKTVRYSYWAQLYYEQQRKKGNTHQRAVRSLAFKWIRVLYCCWKSKTPYDEAKYLKVLKERNSPLLG

SEQ ID NO: 446076 - protein, 491 aa, unidentified
MARRKQSTFERLQSGKLNRKQRKELMRKVAAEDPGLSILYGDVAGIDVGNESHMVSVPTDRDEQPIREFGSWTQALQELVCWLKACQIKWVVMQSTGVYWVALYDVVEEAGFRVCLANARDTKNLPGRKSDVQEAQWLRKLFSYGLLRNSFRPSEQTRAIRSVWRLRDRHVKEAAEEIQHMQKVMTQLNVQLANAISDVSGVTGLAIIRAIVDGERDPYRLADLRDYRIQASREEIARSLEGNWREEELFELKQVVDRYDFCQKQIQQCDQRLQGLLAAMPSAPVMPTPVEEQKAEGPGQENGKSKGRKRQPGGGKKARKNQPTGFDLQAELQRISGVDLTRIDGVKLMTVQTFVSEVGTDMSAFQTERHLVSFLGLAPKRKVSGGKLIQHERRKNKNRAAAALRMAASTLKESDSYLGARFRCLRARLGPAKAIKAMAAYLARLIYRMLTRGQAWVDRGAAEFERRRQNRQEQSLRRMAKDMGYVLTPVA

SEQ ID NO: 446077 - protein, 378 aa, unidentified
MKKIMRYVGMDVHAETIAIAVVESNGTERDLGTVPNRPEAIRKCLKKLGRAEELHCCYEAGPTGYMLYWQLVRMGIECMVVAPTLIPTKAGDRVKTDRRDARKLARYLRSGDLTAVWVPDEAHEALRDLVRARQAAKIDEKRARHRLQKFLLRHGQRPALGVRAWSAAHRAWLQALTFAQPTLGVVCSEYLQELLHHEQRVERLDTAIDQAVEEAPETIRAVIAALQGLRGVRRVTAAGVVAEIGQFSRFAHPRQLMGYSGAVPSEFSTGGPGNHRRGAITKAGNAHLRRLLGEAAWCYRFRPAVRYPLKKRQQGLPAAVTDISWKAQVRLCNRYRRMASRGKTKQKVVIAVARELLAFMWAIGVEVERSPTPTCTAA

SEQ ID NO: 446078 - protein, 426 aa, unidentified
MKKADLLSTLFVGIDVSSRENVVCAIDFEQQKRLRFSVPNNQPGAIMMAEKLQQFFSNNTDVNKLVVALESTSFYGVHIANYLSSCETLMPFYTHVYCINPKLVANYKKSYVGLGKNDAIDAFIIADFARVGRITSAPWRGSQFLALQRLTRHRLHLAKSLMREKTYMLSNIFLKFSEFSILDDDKQPFSNNYGTTASAILTDFLSTEDIATMSLDALIDYICKKGKNRFVNPEHTAYLLQQAARNSYRLDKCLYEPLTISIASSFNLISAYEAEMKVINKAIEKTLRGLDPNAYQSLLSIPGIGPVYAAGIIAEITSIEAFKSHEALAKYAGLVWKEHQSGNFKADDTILSKDGNTYLRYYLIEATSHVKNHVAEYAAFYQKKYGEVKTHQHKRALALTARKFIRLIFGLLANHQLYSPSRVSQI

SEQ ID NO: 446079 - protein, 357 aa, unidentified
MTIVANTHPYVIGVDTHAATHTYAVLAGATGAVEDVATFPATRAGMDRALAWIGRRSGGDLDALVVIEGIGSYGAQLARTVAKAGYQVAEPAAIPKALRRSMGKSDELDAQLIARSVLPIATDRLRRPRLGQGDREAMRILLGARDQLNTERSQALGALTALVRTHDLGIDARRALSAGQIKQIAAWRPRQGQDIATATARREATRLARRITDCDKDLANNKRELTDLVAASDSAHITNELGVGAVNAATLLTMWSHPGRIHSEAAFAAIAGTSPLPASSGKTTRHRLNRGGDRRLNRALHTILLTRMRTDPRTRAYVERRTAQGRTLKEIRRSLKRYLARQLYRILNNPPATATAA

SEQ ID NO: 446080 - protein, 400 aa, unidentified
MDDIDDVGVFLGLDVGKSAHHGHGLTPAGKKVFDKQLPNSEPKLRAVFEKLAAKFGTALVIVDQPASIGALPLTVARDAGCKVAYLPGLSMRRIADLYPGEAKTDAKDAAVIADAARTMPHTLRSLELTDEITAELTVLVGFDQDLAAEATRTSNRIRGLLTQFHPSLERVLGPRLDHPAVTWLLERYGSPAALRKAGRRKLVEVIRPKAPRMAQRLIDEVFDALDEQTVVVPGTGTLDVVIPSLARSLAAVHEQRRALETQIGQLLEAHPLSAVLTSIPGVAVRTAATLLVTVGDGSSFPTAAHLASYAGLAPTTRSSGTSIHGEHAPRGGNRQLKRAMFLSAFAALHDPASRTYYDKCRARGKTHTQALLRLARQRINVLFAMLRDGTFYEPRTPRLA

SEQ ID NO: 446081 - protein, 424 aa, unidentified
MNYTQNKKIAQVTDKTLVVGVDIGSDKHFARAILSRGYEVSKKPLEFTNTRDGFEKFVNWSYHLATENQLTKIFVALEPTGHYWFNLADYLKAYDVKIVLVAPQHVKHSKEMDDNTQMKNDRKDPLVIAKLVTEGRYMFPYIPEDVYAELRTAFNRRCDLVEALNRNANRMIRWFDIFFPEYREVYGKANAISGLMILMRAPLPSDILTLGVDGICQIWREAKVRAAGISRAQKLVAAAEKSIGRKGGEAVRRELWQLMEEHDLLSKQLNDIMQIITDLLGQVPGADRLLKVPGAGIITVAGFLSEVGDISRFTDPKQIQKLAGLAVVENSSGKRKGLPGISRRGRKLLRWVLFQLARCMVKNNKEMKAYHQYFTTRKENPLKKMQSLMAIAGKITRIFFGMLKNGTEYDPAIVMKDLNKAVAA

SEQ ID NO: 446082 - protein, 455 aa, unidentified
MKLYIGLDLGSKSQSEAVAIDESGKLIGKPLRFKPIKPSIDEMVATLCGAVAPEDVTFIAEPTGTIWHSMASYLSSRGYQLFLVSPQKTHDLRKFYKRHAKTDTIDAYTLAKMAIVHPEGLFRPSTMEPLWHNLRRGAKKESKIARLIGDTKRAIQAKAEIALPGITSVVKDPDSPIARCLYTRYLDPRKAVKLGRARLTRSLEKAAGPLDETLVLEIWKCIEAAAGIASNCDYEDLRLDIEEDFEILQCLKSQWESIKKRNLRTYRKLDPKRLLCTIYGVGDTLSPAILAGVADGGRFPSVKHFLSYTGLTPRVEESGQREAKGTKMTKAGPPWLRRALYLAADVARQWDPQLAEIYYRCMVEKGHSHTKALCVVATRLAARVYAMVKEQRPYELRDVDGRPLSAREAKAIIQTRYTVPETLRALRRNTTGNRSMKRTGRSRTTHSGRVALPLT

SEQ ID NO: 446083 - protein, 463 aa, unidentified
MKSKKAVRGRTRRSKPLLERVNPNAAGIDCGSAMHYVAVPPDRDPQPVRSFKTFTEDLNRLADWLVACRITSVAMEATGVYWIPIYEILEARGLEVLLVNARHVKNVPGRKSDVIDCEWLQELHSVGLLRGSFRPTAEIAALRSYLRHRETLIQSAATTINRMQKALVQMNLQLHVVISDIAGATGLRILRDIVNGQTDPRHLATHRDARCQASEAEIAAALTGHYRPEHLFVLRQNLELYDTFQKQIESCDTQIEAHLKALATSTTPPAAPSSIPRARRKASSNEPHFDVRTSLHQLSGVDLSQLDGIGPYNALRLISEIGTDMSRWRTEHHFTSWLTLAPDNKVSGGRLLSSRTRPSANRAAAILRMAAMCLGRTQTALGAFYRRLAYRIGKAKAITATARKLAILVYRCLKRELVYQDPGAAEYDRKHRATVLRQLRQRAATLGFHLVNGQTGEILEGVS

SEQ ID NO: 446084 - protein, 425 aa, unidentified
MTTHTQPPPTCQRYIAIDLHKEYLMIGGIDAQQRAVIPPRRLDLDRWRTWAEANLKPTDAVVIEATTNAWHIYDQLVPLVGRVLVAHPSKVKQIAAARVKTDKHGVLVLAQLLRADLVPEVWVPPQHVRDLRGLIAHRQRLLRMRTMCRNRLHSLIHRYNLTPPQGELFAAKHRDWWATLALSSTERLRLDQDLATLDHLEPQIVAVEAELHRLSTTAHWADQVPYLVQLPGIGLISAMVLLSAIGDITRFPAAPKLVGYAGLGAGVHDSGKTHRSGRITKEGRRELRWVLVEAAHNAVRSDPYWRREFARLARRIGEAKAIVAVARKLLTVIWHVLMGRTANLRADAERVAFKLMVWSWKLTDEQRGGLTSRQFICAHLIRLGLGQDLTHITRGGTKRGLATIEEVLALRPELRGLADTASESG

SEQ ID NO: 446085 - protein, 343 aa, unidentified
MDHFAGLDVSVKETSLCIVDDAGRIVREVKVASGPDALLAVLTNPAYCFKRIGLEAGPLSQWLFSALAEAGLPVICVETRHMRAALKAQINKTDRNDARGIAQMMRAGLYRPVHVKTLRSQKLRMLLTHRKLLQSKAIAIENDLRATLRNFGLKVGVVGTVKFEARIKGLVDNTPDLVVLVEPLLIVRRVLREQIGILHRRLLAIVRNDAVCRRLMTVPGVGPVVALTYRATVDVPYRFRNSKAVGAVFGLTPSKHQSGESNRTGGISRCGDEMMRMMLYEAAHIMLVRSAKWSWLKAWAMKIARHRGLKKAIVALARRLAVIMHRIWVDGTEFRWTREVAAA

SEQ ID NO: 446086 - protein, 412 aa, unidentified
MQVLYPCCCGIDVHAKTVVACLIKQGRRQTLTFSTMTDDLLRLSDWLRVEGCTHVAIESTGVYWKPVFNILESVLTVILVNARDAKAVPGRKTDVRDCEWLADLLRHGLLRASFIPPLEIRELRELTRYRQTLIKEHTAVANRIQKLIESANIKLGQVATDVLGVSGRLMLRALADGEEDIERLVELARGSLKEKKSELRRALTSRLTPAQRFVLNELLIRLGELEAATKRVGEQIIKEVAESADPFVPEAVKLLQTIPGIGLRVAEVIVSEIGVDMKRFPTDAHLASWAGVCPGNNESAGKRRSGQTTKGSPYLRAAITQAAWAGSHTKNTYLAAQYHRLIKRMGKNKALVAVAHSLLVIVYHVLAQRADYRELGGDYFDHQHQQTQQQRLVKRLEAMGLKVTVEALPEAA

SEQ ID NO: 446087 - protein, 341 aa, unidentified
MQKNKEYVGVDVSKESLDMVVYSTGETRSFGNDDAGIAKATTWLKQVNSAIIVMEATGGMEVSLYIALQEANLPVAVINPRQIRDFAKSMGILAKTDKVDAKVLARYAATIQPEARPLPDEEARQVNTLVTRRCQLVEMITAESNRATIIRNKTMKQRIYAHIDWLKQELAGIDKDISQMIKENPVWHAKDELLQSVPGVGPVLSATLIAELSELGILNRKKIAALVGVAPFNRDSGKHRGERSIWGGRCRVRQHLYMATLSAVRFNPTIRIFYERLLANGKEKKVALTACMHKLLIILNVMLKHNSYWSCNYAIFNNTCIPDAKTVAFSYTSCNKLLPCP

SEQ ID NO: 446088 - protein, 337 aa, unidentified
MTIIRVGLDTAKHVFQLHGVNESEQPVLRRRLGRKEVERFFAKLPPTAIGLEACGASHYWARVLRGLGHEVVLLPPQYIKPYVKRGKNDAIDAAAICEAMSRPGMRFVAVKSAEQQAALMLLKVRDLLVKQRTMLINAIRGHAAEFGLIAATGPVKVAELLQQAHSEAAGVPALARALLGVLSGQLEALEVKLKALEAWLMAWHKADPVSQCLATQPGIGPIGAVSFALKVTDPKGFRSGRHFAAWLGITPKEGSTGGRCRPGRISRQGDESLRRLLVLGATARIRFAKPGSASTWLLNLLARKPKKLAAVALANKMARILWAMMVRGETYRHPKEA

SEQ ID NO: 446089 - protein, 367 aa, unidentified
MRFYTKQHKFYCGVDLHAKTMYLCILDQEGEIKLQRDIRTDPEVFLRTIARYREDIVVAVECIFTWYWIADLCARENIAFVLGHALYMKAIHGGKAKNDKIDAHKIALLLRGSMIPMAYVYPPEMRSTRDLLRRRMHLVRKRGELIAHVQNTNYQYNLPEIGKNIGKKCNRVGVAERFPDASVQKCIELDLSLIDYYDQLLHRVEHEISLIAKRHGADSYFRLRSIPGIGRILGLVILYEIHNINRFESVQDFVSYCRLVKPARESGGKRLGSSGKKIGNVHLKWAFSEAAVLFLRRNPEAAKYRDKLTKKHGKAKSMTILAHKLARAAYYILKRKEVFHMETFFARQPGEPGRTTGEMRAKSDGCS

SEQ ID NO: 446090 - protein, 383 aa, unidentified
MKAVCGLDVHKDSIYLCILHPDGELFEQVFGVLTFQLHEMCKLLKKHHVSEVSMESTSIYWIPIWRVLSPHFTLRLVNPYFIKQLPGHKSDVKDAQWIAECTMKELVNGSFVPPEISQQLRQYDRRIFDLNEEIVRKESKVDAVLQRCNIRLSNYVSNIECKSYRTVVRRLSEGVTDPQELIKEIHGRIINKHGRETILASMEGVVSQAEIDVLRQLREEIDIAESHKKECQDKMSEICQKYFPEELRRLQTIPGIKERAATSLIAEIGTDMSKFETANHLAAWSGLRPRNDESNKKVKSRKTTHGNSYLRRTIIQCAWAASRQKDCFFSWFSYHQTVVRRKNKMKVIVAVARKMLVAVWHVLHDNVEYIDFKHDCEESANNG

SEQ ID NO: 446091 - protein, 346 aa, unidentified
MTIAEDARVITGGVDTHAGAHVAAALDRLGGLPGVREFPATAAGYAGLPDWLAGFGTVALAGIEGTGSYGAGLARHLAAAGVRVVEAVRAGRQDRRRAGKSDPLDAVSAARAALSGRAAGAPGGRDGAVEAIRALMVARRSARAERTQAVNQARALLVTGPEELRARFAAHAAARLASELAAMRPRPGDVPGYAVRAALREPGRRALFPDAQITRLDELIIPLAAARAPGPLALPGVGPHTAALLLIAAGDHPGRLRSEAAWAHLCGTAPIPASSGKVTRRRLNRGGDRQASHALWRIVICRMSFHPATRAYAARRSAEGRSRTEIIRCLKRYVAREVCHCLRAGA

SEQ ID NO: 446092 - protein, 356 aa, unidentified
MNHISKLDFTGQQVYVGMDVHKKSWSISILTDQFEHKTFSQPPEVGALVNYLKRTFPGAAYKSVYEAGYSGFWIHDQLQEQGIRCLVVNPADVPTKDKERAGKTDRVDCRKLARSLRNGEIEGVYVPTRPKAEDRSLLRTRHSMVRKQTRCKNQIKSILCFYGIHIPDEVANSKWSKRFIAWIETVRMERASGDMALKVHLSELSHIRQTIAELNRAIRALSITDGYRNNVRVLKTVPGISILTAMTLLTELHDIGRFKTLDKLCSYVGLIPNTNSSGETDRKTCMTGRRNVQLRVVLIESAWTAVRKDPALMMSFNELSKHMTKTKAIIRIARKLLNRIRYVLKHQQEYVPAVIQ

SEQ ID NO: 446093 - protein, 341 aa, unidentified
MQITTIGFDIAKNVFQIHGIDAAEKVVIRKQLRRGQVLKFFAALPPCLVGTEACATAHYWARELTKLGHEVRLMPAKDVKAYVKRNKNDAADAEATCEAVRRPTMRFVPVKSAEQQAQLMQHRARDLLIRQRTQVINALRAHLAELGITAAQGRDGIRDLLAIIADEADARLPIDARASLMVLAAQLQALQTLIGSIEKRIVARHRSSEASKRLQTIPGVGILGASAIATIVTEPKAFRSGRDFAAWVGIVPRQDSTGGKRKLGPISKQGDRYLRRILVVGAHAVLKRARLHPQKYPWLTQLLARRPFKVVAIALANKMARIAWAVLAKGGTYRVPRLAAA

SEQ ID NO: 446094 - protein, 468 aa, unidentified
MTPRKRQRLSPEPLRVTNPHAAGIDVHANVHWVAVSPADAPAPPADHPANLPAHVRYFGACTADLIAIADWLAQCGVTTIAMESTGIYWIPLFELLESRGFEVFLVDPRQSRHAPGRPKSDVLDCQWLQRLHSYGLLTASFRPADQVVVLRSYLRQRQMLIRYAGQHVQHMQKALEQMNVKLAEVVSDITGVTGMAIMAGILGGQRDPLQLAKLRHDYCKRTEAEIARALYGNWRAEHLFALKQALTLYEFYRQQLQECDVQLQAHLGIFPDRSKGKPRPKRQRRYGQRSGKRTNEPAFDLGTALYQMSGVDLTVLEAIDVTTALVILSEVGSDVSRFPTVKQFTSWLGLSPQHQGSAGKIRSRRVPRGANRAGRALRMAVQGCYHAKHALGAFYRRVQARAGAPKAIVATARKLAERVYRLLKYGAEYVRQEIEVYEAAYRARVVKGLARRAAEMGYRLEPAMAAGT

SEQ ID NO: 446095 - protein, 362 aa, unidentified
MTINAGVDLHKTQFTVFVKQSGNQFEQYSTEEEGYKKFLARIQRWKKNGMTVRVGVESTGNTRYFKNRVEQVGAEVVVINTLKFKIVNESVKKTDRHDAATIAEFLEKDMLPESRLCSEESEQIRRLLKVRTTLVRTMVTVKNQIHALLTGLGMKDSRATLQSKRGRQKILDTLRKADNELVVQPLFETIEQLEKSVKSIESELEKLTEGDRTVELLMTIPGCGKIGAWTIRAFTDDISRFASAKKYSSYAGLVPWVQNSNETIHHGKITKRGPEELRTALVQVVMGMRRCRSTVSWRLMERYSEMKRNKGSGKSIIATARKLSTIIWCMLNTDQEFDPSLMIDRQLIRKADSMRTTASQSA

SEQ ID NO: 446096 - protein, 405 aa, unidentified
MWFAGIDWADDHHDAVVLTDQGQLLGALRVPHTAEGLDHLTRFLRGGASTSGAAEPVICLVETQHGLLITALLEAGFTVCPVNPLAVGRLRPPSGVKTDALDARLLARLGRNDWPALRVLPPDGPLLQELKTLTRDLEGLLREQTRLVNQLTACLKAYYPAALRCCDGLTRQVTLAFLQAFPTPEAAAAASLDQLTQVLAQGHYPHPRQKAEQLAALLQAPQLHALPGVARAKARLMAALRAQLAVLTTQVAAFDQAIQQLFAQHADSAVFASLPGAGRRLAPRLVAEWGEDRTRYARAASVRALAGTAPVLFQSGAFRGVRRRRACVNAWRQALSHFAWESVLCEPWATASSQRKRAQGKTSAMALRAVANQWVRSIYAMWQARQPYQRAIFLAAQHAHGGMVA

SEQ ID NO: 446097 - protein, 344 aa, unidentified
MEQISRIGMDTSKHVFQLHGVNVAGITVLRKKLRRKEMVAFFQTLPPTVIGIEACGASHHLARLLSSFGHTVKLIAPQLVKPYVKRGKNDAADAEALCEAMSRPTMRFVPVKTAEQQAALMLVGVRDRLIRNRTQLSNAIRGYAAEFGLTAAKGKAHLLPLLERIHADESLPVLAHKLFAIQAKEYEPLQAQIDEVDAKLADWHRADECSLRLAKIPCVGPIGAALLKMKTPDPAQFQSGRQFAAWIGLTPRDHSTAGKVRLGGITRAGDEGLRSVLVLGATAVIQQAQRSGRASPRLAALLKRKSPKLAAVALANKMARIAWKLMLTGEAYNAKSAAALAGAA

SEQ ID NO: 446098 - protein, 425 aa, unidentified
MSKPNVEIAAFIGLDWADQTHAVTLHEVGTDTRQRFTLDQTPEALQNWIQLLRSRFAGRPIAIAVEQKRGALIYALMHVDFLQLYPVNPQTLSQFRKAFYPSGAKDDPVDADLLLEILLTHRQHLRVWVPDDVLTRTIQLLTEDRRHLVDERTALTNQVTAALKMYFPQALEWFGDLHTIRACAFLQRWPSLRDLKRATASSIRKFYKAQGYRGDDKLKQLIANIQKAQPLTQDDAVVLAGSMKVQALVTQIALLSASIQRYDQQIASLFDQHDDSTLFGSFPGAGSSLAPRLLAAFGSDRSRFEFAAEMQQLSGIAPVTEKSGTGIWIHWRLACCKFLRQTFQEFAGCSILQSDWARAYYDEQRKRGKSHHAALRALAFKWIRIIFRCWKTRTPYDEAIYNNSLKIRRSSLADKLSAAEKMALT

SEQ ID NO: 446099 - protein, 342 aa, unidentified
MKFYCGIDLSARDCHVCVIDEQLKVMVQQKLRNELPKICQLLAPYQGNLKIVVESTFNWYWLIDGLQAEGFEVVLAHTLGLYLITGAKVKTDRRDAYSLAKLLLVGVVPAAYIYPVETRPVRDLLRRRAHLVQVRAGEYGSLRRLLLRQGILSSKQQEIKTATEAELEQWFHHPLVRLHASQELQRIELYSQQIAELEKTVLLLAKTEQSYELLLKLPGVGQTIALTILYEVGELTRFANVKVFSSYCRVIPGIAQSGNVTRRGRASKQGNHYLKAAFSQAAVHAVRCYPKVRRYYERQLKRHQGRGRQMICYNIIAHKLAQAAFHVLKEQTEYREELLFGR

SEQ ID NO: 446100 - protein, 351 aa, unidentified
MNYVGVDIHKRYSVLVAVDERGRELGRSRSNGNTAFGFAQFFGGLEGKSKVVLEACWNWGRIYDLLSEIEQVEEVVLAHPLKTRLIADAQIKTDGLDAHALATLLRGELIARAHVPAKPTRQRKEVLRQRLYWARLRTRIRNRIHALIDRQRELKMPQCSDLFGRKGLTALNKLVLSEPNATLLREELGLLELIQGQIKAQEARIVEFNSNDEMTLRLQSILGMGKILAAVAAAEIDSIERFSSAAKLCAYAGLVPRTHASGGKVYQGHLLKSRNKWLQWAFIEAAWVAVGCSAYFGGLYRQHRARGKNANIAITIIARRMCQICWTLLKERRDFIETFPGRSAVRLTAAA

SEQ ID NO: 446101 - protein, 326 aa, unidentified
MYKIGIDVSKAKLHCSLLSNPDLRKSKDKAADNNQAGFSALLEWACRHGKCEAAELHFIMEATGVYHEALAEFLAEAGCRVSVVNPFQVKRFAESHGFKTKNDKHDGLIIALFGHERQPATWTPPPPEVRHLKALLSRLTALETDIRRELNRLEKAQVGRAPAQVMDSLANSLAFLNEEKDRLLKEIRAHFDNHPKLKEKRDLLLSIPGVGDKLASQLLTLFASKDFSRAPEVAAFLGLVPVEKQSGTSVLGRPRLSKSGDSQLRKALYMPAIVATKYNPDVQALYQRLIKGGKTKMAAIGAAMRKLVHIAFGVYKNLTTYQPQNS

SEQ ID NO: 446102 - protein, 334 aa, unidentified
MNQKYFIGIDISKGKLDCAVILSDYTVVAENIIPNNVKKIKSFLKGFTKKHKTEFDQILVCCESTGIYNGPLRQVCSDLSIGLWEEHALKIKRASTDMRGKSDRKDAMRIAEYLVRYRDKALLYKQPSDVLKTLDQLNKVRETLLGSKLAFENQLGESKSFDPDGYKVLLKHYKQMIAQIESQLKKIDLEIQEQLNQHEDIQQNINLMKGVPGVGKQTALQLIIYTQNFTAFKSVKHLACYAGVVPFQNESGIVIKRARVSKMASKKLKSVLHMAALAAVRTKSELKAYYIRKIAEGKNKMCVLNAVRNKILQRIWAVVERQTPFLSNENFRPI

SEQ ID NO: 446103 - protein, 340 aa, unidentified
MVHVGVDLHKRMSQIAVLTEDGEIAQRRLANDPARLEAFFAQLPPRTPIAIEASGTWWWLVDLLERAGHRPVLSNPKQTKAIAAARLKNDRVDAERLARLLRGDLLPTVWIPPAELREARELIRHRVQLVWLRGEVRNRLLAMLARRNLQPTSGQSWLTVRGQRELQALPLTPIATTIRADCRALLPLLDEQIRRLDDDLRTRWGADPRVQRLMTIPGIGAFIAIVLVMELGDIQRFPTAKHVASCIGLTPRVRASADRIRSGHISKEGNRLLRWVLVLAATQAARQPGPLRAWFRTMKQRRGTKIARVALARRLVEIVYHVWKHDCDYFTVLRRGAVRG

SEQ ID NO: 446104 - protein, 318 aa, unidentified
MNNPTFQSINVGVDTGKTQLDIFIRPIGLFFSVSNDDKGIKEAITTIKKHKPERIVIEATGRLEVPFVLACTKAKLPYVVANPIHVRRFAGAIGQIAKTDKLDAQLIALYSERIEPPLSTLKPENIRLMSDLVIRRNQLLSMQTMEKNRLQILPKELAMTIKPILTTFKNQIQKIEEKIIKIIESCDEYKHKNEILQSVPGIGKVAAASLISNLPELGSISNKKASALVGVAPMNRDSGRYKGHRKIKGGRKQVRTVLYMAMMSAMQCNPVFKSTYSRLVAEGKPKKLAIIACVRKMVVILNSMIRDGVMWNENHANN

SEQ ID NO: 446105 - protein, 355 aa, unidentified
MSQTPSTAIAVIGIDIGKNSFHVVGHDARGAIVLRQKWSRGQVEARLANIPPCLIGMEACVGAHHLSRKLASLGHDARLMPAKYVRPYSKGQKNDFNDAEAIAEAVQRPTMKFVATKTAEQLDLQALHRVRERLVSQRTGIINQIRAFMLERGIAVRQGIGFLRTELPTILATRTDALSPRMLRVIEELTGDWRRLDQRIDGLSGEIEALARQDQACSRLMTVPGIGPIISSAMVAAIGTGDVFSKGRDFGAWLGLVPKQISTGDRTILGKISRRGNRYLRVLFVQAAWVVLVRIKNWERYGLKSWIEAAKRRLHHNVLAIALANKLARIAWAVLAKGRAFELTRTDHAGVVQPA

SEQ ID NO: 446106 - protein, 287 aa, unidentified
MVHYVGLDVSLKQTSICVVSETGSVVREGAVDSDPEAIAAFVRSKAPGAVRIGLETGPTATWLWTELKRLDLPVICIDARHAKAVLKMQINKSDRNDAAGIARIMQTGWFKEVRVKGLDSHAIKALLASRALLVKIKRDLENHIRGLLKNLGLIIGRAKFNVFSVRTEKLIEDRPELIAIVGPLLKARKAVEQQIGDLDRKVMKLARYDAQVRRFMTVPGVGPITALCFQATIDDPTRFKRSRSVGAYIGLTTRRHASGEVDWSGAESRSVGTPCSAVIFSKRPAYC

SEQ ID NO: 446107 - protein, 368 aa, unidentified
MNELFIGVDLHKKQFTVYIMNGKEEGVYNQFNTDLDGFSSFTSQIKLCLKEGFKVQVAVESTGNTRYFRNMIESETGVKVKIINTMKFKIVNESINKTDKRDAKTIAEFLKKDVLPESILCSEESEVLRRLVNVRQVMVTTKVKMKNQIHGILLGMGINTKSGQLNSKKGRLQILNELQASNHYEIIRILINNIEDIEKNIKSIEEEMERLTEKDRTVEILKSISGTGKICSITVRAFIDDIARFEHYKKMSSFAGLVPWVKCSDEKKYYGKITKRGPVELRTAIIQMVLGMIRCKNEKDNILMIQYRNIKKRKGSGKALVAIARKFTKLIWTLLTNDDLYVKEKLSKEIYLEKIISMQEAQLQKDAA

SEQ ID NO: 446108 - protein, 405 aa, unidentified
MNAVGIDVSKGKSTVTIRKPGDVVLMSPCDIPHTQSAINDLIKQIKSLEGETKVCMEHTGRYYEPVATWLSDAGIFVSAVNPILIRDFGDDSLRTPKTDKADSKKIARYTLDRWAKLKQYGIMDKTRNQLKTMNRQFGFYMAQKTAMKNNLIALIDQTYPGANDFFDSPARNDGSQKWVDFIHTYWHVDCVRSKSLNAFTEHYQNWCKRKNYNFSAEKAAKIYQISSDLIAVFPKNDITKMLIWQAVALLNTASKTVESLRSKMNELASTLPEYPVVMDMNGVGATLGPQLIAEIGDVSRFTHREALTAFAGVDPGKNDSGKHIQNSVRTSKKGSPYLRKALFQIMDSLIKRSPVDDPVYAFMDKKRSEGKPYYVYMTAGANKFLRIYYGRVREYLSNLSNNETI

SEQ ID NO: 446109 - protein, 440 aa, unidentified
MLLAFGVTQTTVFYFLNVNQLAKTRSFIFVITRIRNCKDHRLKFSLKEVLSMYLIGIDISKYKHDCFIATEAGEIIKDSFSFDNNALGFSQLLDVLQALDSSQTKKIGLEATGHYGYNLKVFLDRHGFDYMEFNPFLVKKLSTALSLRKTKTDKADARFLSMILLSVDYRTYPVKSYHIQELKSLTRYYKGLVKKRSRELVELTNTLDLIFPEFKSFFQNRFSQTAYYILEHYHTPERISRMTYQNFEKLHSISKGHFSYAKFLHLKDLAKHTVGSSSELLVFEMKSCIRLLNDIKQEIKALESLLIAWTHKIDSPVFSIKGIGFVSALSLIAEYGNFISFDSPAQMLSFAGLEPSIIQSGTSNKQGHMVKHGSGYLRDTLMNITIPFMMHNPVIYDYYLKKKNEGKPHLVALSHVAKKLIRIIFFLVKSNQQFNETKLV

SEQ ID NO: 446110 - protein, 408 aa, unidentified
MERVYERCCGLDVHKERVVACVRTPGPRRSRGQVRTFGTTTSELLRLCDWLSENEVTHVAMESTGVYWKPVFNILEGVCEVLLVNAQHIKAVPGRKTDVKDCEWIAELLEHGLLKPSFIPPEPIRDLRDLTRYRKTLIRERASEVNRIQKLLESANIKLASVATDVVGASGRAMLKALISGQLDPQHVANLAKGTLRAKRGHLVEALTGRFRDHHAFMIRQMLTHVEELEQRITECSARIEACMSPFALERSLLETIPGVGRITAEALIAEMGVDMTRFPDSAHFASWAGLCPGNNESGGKRRAARVRKGNLWLKTALVEAALAAKKQPNTYFAALGRRLGGRRGAKRATIAVAHAIGVAAWHILAGAQPYRELGPRHFDNLASDRLRRLYVRRLRELGFNVALEPAA

SEQ ID NO: 446111 - protein, 339 aa, unidentified
MAILYVGIDLAKNVFAIHGVDEHGKAVLVRPSVSRVRLHQFVAALPPCTIGMEACSGAHHWARLFVQHGHAVRLMAPKFVAPYRMSGKRGKTDAADATAICEAVQRPNMRFVPVKSQDEQARLCVHRVRQGLVEQRTATINRIRGLLSEFGIVLPQKAASVRREAAAHLEDLPGWGNTAVGDSLSELHRLDERIADYDRHVVQMAREDQRSLALMKLQGIGSTTASALVSTIGNARDFKNGRQLAAWLGLVPGQYSSGGKTRLGGITKAGDGYLRTLLVLGAKAVLAAAKNKDDRLSRWAMALEVRRGYWKAVVAIAAKNARMAWAVLAKGENFKPLEA

SEQ ID NO: 446112 - protein, 342 aa, unidentified
MEQYVALDVSLKEISVCIIDSKGEVIFEGKTAAEPAMLVELIRSKAPQVKRVGLETGATSPWLFHALAAAGLPVVCMDARHAHAALSMRPTKSDRSDARGLADMLRMGWYREVHAKSVTSHEHRTILGARHQLVTMRSDLDAQIRGILKTFGLILGTGNKDTLIQRAEKLAAGHPVLSGLVAKLAEVRRHVTSQIAAIDRDIRHLVHTEPTLKRLISVPGVGPITALAFRSAVDDPSRFKHARDVGPYLGLTPTRYQSGETDRQGRISKCGDTFTRTCLYEAAHVLLTRVQRFSPLKAWGMRLAKRIGGRKARIAVARKIAVILHCIWTDGTEFWWTREKAA

SEQ ID NO: 446113 - protein, 430 aa, unidentified
MNTNTQNAKIEAISETTLVLGIDVGSETHYARAFDFRGIEYSKKPFKFSNTEVGFMTFKAWILDIKEKHGKDKVVPGMEPTGHYWFNLGKFIQDNEMKPVLVNPHHVKKSKELDDNNPTKNDRKDPKVIAGLVREGRYMIPYLPDGVYADLRIASNMRFQLQAELTRIQNRISRWFSIYFPEYKTVYGQPDAKSGMLILKKAPLPEDILTLGVDGVNQIWRDAKIRAVGKARAKILVEAAEHSVGSKEGAVSARMEIRMLLEDYESRNIRLQEVMTLIEGLVKQIPMAEKLLEIKGVGIRTVSGFLAEVGDISRFNTPKELQKLAGLALVENSSGKHKGETTISRRGRKRLRYLLFEVAMSLVAKNPEFRELHNYYTTRRLNPLKKMQSLMAIAAKLIRVFYVMLTKGVDYDPKKMVSDIKRPAVYQQAA

SEQ ID NO: 446114 - protein, 362 aa, unidentified
MPTVADSVDAVVAGDTHVDTTSLCVVSPVGAVLDEITIDNDEQGYAEVVTWILRVVPSGRFVVGLEGTRSYGAGLCRALEAVGVRVVEVERPSRGERGRRGKSDPGDAVLAARKVLAMPVERAPAPRTGDGVREALRLLVVDREQMTRQRTQLNNQLLAELLTGTAEHQAMRRKGVSRTDLEKLAKARCRGGRPIDEQARMVVLRRKASEIVRLDQQIRDNGKSLKTIIQDVAPQLLEQVGVGPVVAAQLIVSYSHHGRCRDEAAFAALAGASPVPASSGRIVRHRLNRGGDRQLNRALHTIAVTRAQWDERSQDYIRRRSGQLTAKEIRRMLKRYIAREMFKILRTIETLNPAGERAPLAA

SEQ ID NO: 446115 - protein, 355 aa, unidentified
MESVKYIGLDVHQSTISVAALNGEGKLLMQSVIATKATAVLDLLKGLRGVLHVTFEEGTYSAWLYDVVVRHVARVVVCNPRKNALLKSGNKSDQIDARKLAELLRAGMLSPVYHGEQSTRTLQQLVASYTALTEDTGRAMRRIKALYRSQAIGCAGKKPFGTRHRGEWLARLTDSGQRRRAQWLYQELDAVQVLRREARQAVMEECHKNQAAKLLRSMPFLGPLRAAVLIARVQTPHRFRTKRQFWTYCGLGLETRSSADYVEKDGQIMRRRRPVYIRGLNWNYSHELKNVFKSAATTASAMDGPFRAFYESRVANGMLPAMARLTLARKMAAIALILWKKGESFAAEHLKRQAA

SEQ ID NO: 446116 - protein, 343 aa, unidentified
MQAITIGLDLAKHWFQVHGVDAAGKIVVKRRLRRAEVVEFFRGQEPCLVGMEACATAHHWARELMALGHEVKLMPPAYVKAYVKRNKNDAADAAAICEAVTRPSMRFVPVKDVDQQAVLMMHRARNLLVRQRTMAVNALRAHLAEFGVVAPQGLRHVECLVAAIEENKAGLPEMARSILRLIVAQLDDTQAKVRQIEARLARWHRNSRLSKLLATVPGVGIMGASAIAATVSDPSLFRSGREFAAWLGMTPRQNSSGGKERLGRTSKRGDKYIRSLLVAGAVAVLRHARERATKDGEWVRAMLARKPAKLVAVALANRTARIVWAVMARGDGYRAREIVGQAA

SEQ ID NO: 446117 - protein, 325 aa, unidentified
MSRIQEKKPTKKTEGLAVMGVDVSKDQLDAYVLHSNEWHNVPNNRKGVELLLRICRKHQIELLVLEATGRYHWLAHQQLHAAGINTAVTNPARSRNFARSIGRLAKTDKIDAQMLARFGDATRPPTSVPPSPLNAQVTEMIVARRQIVDELTILKQQKSQTKLDHVRAQIEERVRLCRRHCKDLEEQTLALIATDAQMVEKYDILTSIPGIGPTTAATLICELDELGQANSRQIAALAGVAPINRDSGQFRGQRKIGGGRKQVRDVVYMAAVVAIRWNKEMMRFYERLKNAGKPFKVAITAVMRKLLILANTLLRENRPWCEVRP

SEQ ID NO: 446118 - protein, 340 aa, unidentified
MAVTVLGIDLAKNVFALHGVDHKGNTILCKPKVSRAKLLETVANMPPCLIGMEACSSAHFWARLFKNVGHEVRLIAPKFVSPYRLSGKAGKNDAADAQAICEAVQRPHMRFVSIKSEEQQSIQCLHRARQGLNEERTAVCNRIRGLLAEFGVIAPLSPERLRNEFESMKVHLPTLAATCMDELFLHIDNIERRLLKFDRLIKETAEQDERCRLLMQLKGVGPMTASALVSAISDGKEFRNGRQLAAWLGLTPSQYSSGGKPKLGRITKAGDNYIRSLLVQGARSMMASAGRKDDPLSKWVCDVKDRRGYWRAAIALAAKNARHCWAILHYGESFENCYST

SEQ ID NO: 446119 - protein, 350 aa, unidentified
MERYIGLDVHAASCTAAVIDAHGKRLGRAHVLETNASTLIEFLKSQSGRLHVCLEEGTQSTWLAEALGKHVAEIVVAHIKESRGPKSDAGDAFSLAEKLRVGAIDTKVFKQTGPFTTLRQLAKAHHMVVQDTTRIKNRLRAQFRARGIRVDRKLYTKRRREAWLELLPPSSKLATKLLFAQLDAVEAVRSEAHQALVEESHRHPIAAILETCPGLGEVRVAQFIAIVVSPERFRTRSQFWQYCGFGVVMRSTSDWVQTPNGAWARSQMKATRGLNWNFNRTLKQVFKGAATCVIGQHPDTPLHNDYKRSIAAGTNPDLAKLTLARRIAAIALAMWKRKEVYDPARYAKSS

SEQ ID NO: 446120 - protein, 324 aa, unidentified
MLPTLGIDISKTSFHVELSINNKLQHRRFANRKEGFAELCVWLAKHKAGPVHACLEATGPYSEAVALYLHEQGHTVSIVNPTQIKAFGQSELLRNKDERPDAGLIRRFCEKQQPTAWQPPPAHFRELQALTRHLENLLETRQQQVNRLEGTTTKAVLKSLRQLVAHLEAEIKRTEQQIDDHIDRHPDLKQQCQLLESIPGIGKRTATKLLAEIEDISRYKSARQVAAYAGLTPRNSRSGTWRGPTRLSKTGNARVRKALFLPAMVAKRHNPVVRSFCQRLAGYGKNKMQLVGAAMRKLIHIAFGVLKSGKAFDPDHELLSNSVS

SEQ ID NO: 446121 - protein, 488 aa, unidentified
MATTRKQPHRKNGSDARCSALKRKARGSHCHPGKGNRQRSKLTISNPDAAGIDVGAEVHYVAVPEDRAEAPVRSFGAYSAQLDELVQWLKECGIKTVAMESTGVYWIPLFQKLEEAGLEVLLVDARQAKHVPGRKSDVQDCQWLQQLHSYGLLRAAFRPEDSICRLRTLQRHRKDLVECAAMWIQHMQKALNEMNLHLHHVLSDISGQSGLAILDAIVAGERDPSKLASLAHYRVQKSQAEIEAALRGDYRPELLFVLSQSLENYRQLQQQLLKCDLSIEKKMATLAGRATISQGAEPTQQSQDSDGKPPKRKPKDALELSLASHLKRILGVDLTTIPGLNVLAVLTLLSEIGTNMTKWRNEKAFASWLGLNPNNKISGQRVLSSRTRKVANRAATTLRLAAMLSGKTNTPLGSFYRRKRAQLGAPKAITATARKLACLVYRLIKNGQAYKPTDLRTYELKYKQQTLDSLRKRAKNLGFDLVQLPKAA

SEQ ID NO: 446122 - protein, 412 aa, unidentified
MSQPFDASRSLTVLEQDSTIIAVIEMSQSKWLVSAVVPGVERQPLKKLDPDEEALRKLLHRWRNEAGQAGREIKRIVVAYEAGRDGFWLARWLQARDVEAYVIHPASVAVSREHRRAKTDRLDTELLMRAFLGWLRGEKRHCSMAAIPTAEEEDAKRPNRERGNLVTDQTRIVNQIKAILARFGIRTFRPTLRKAAEKLDGLRTAEGTPLLENTRAELRRHLARLRVVREQIRAIEHERLRKFAAAPAGVKGPHAMVRLIARVVGVGVETADMLVNEVLSRHLRDRKAVARYAGLTGSPDESGRRRRERGLARAGNARVRCGMMQLAWRFLRFQKDSALAQWFDARTADGRGSTRKTMIVALARKLLIALWQLVMTGEMPRGVVLRPASEQQHGRRGTTGQPLWQPCARGCR

SEQ ID NO: 446123 - protein, 367 aa, unidentified
MKKHTTMNKPVSATDVSVCTTVAVDLAKKVFQVAGEDALGQLVYEQRIKSREAFQVFLQKLPEGVTVLMETGPGAQAWARLLQAQGNPVRILPAQRVAEHRSGAKNDRNDAHAILRAGRDSSIASVPVKSVAALAMQAWHRVRRGYVRRRTAMGNQIRGLLLEQGIALAQGDVGLKQGVTRVLEDARQPLPALLRELIDEMLNEWQRLGERIAALTGRLEACAAADPTAKRLMTVRGIGPITATALLAKQVEPERFANARQFAAYFGIVPDQHSSGQKVRLGKMTKRGDAYVRSLMVVGSHAVLKQLRPDSEHPDDRRLQRWLQRLGRKGAAVRLANRNLRIAWVLLCSEQTYQRKPNACREMEMSH

SEQ ID NO: 446124 - protein, 418 aa, unidentified
MKIDPKLIPIERYIAMDIHKHYVVVGGMDSQKEWVLRPRKVRMSRFPDWVLKNVNLMDAVVIESTSNAWEIYDLIAPVAGKIVVANPLKVGQIAGAKVKTDRLDVERLLTLLIADIVPEVWVPPHHVRDLRSLISHRWRIQKQITMTKNRLQSFIHRFNLLPPEGKLFSEKNRSWWKGQKFSTMVRLQIEQDLVLLEHLTAHKEAIYQELACLSNRAPWAKDMVFLMQIPGLGVVLSMTVLSAIGDISRFEHAKNLVGYAGLGAGVHDSGLKHQGKGITKAGRKELRWAMVEAAWGAVRSDPYWKAQFEALKKRGKHANQAVVAIARKMLVAVWHVLSRREPRRHSTDEDLAYKMLIWSQRMDEGALQGLTRQQFIKYGLLRLGAGQDITRIVRNGFPRRIASSEEVLALMPELNLLE

SEQ ID NO: 446125 - protein, 364 aa, unidentified
MIKVRTWVGLDVHAARVVACVVDAESGEMSVHRLSVATTGVVAFCAGLPGRVRVAYEAGPTGFGLARALHAAGIECVIAAPGKIERPARDRVKTDRRDAERLVRLLMIGALHPVRVPAPEEEALRDLVRAREDLRGDLMRARHRLSKLLLRHDVRYQDTTSRWGERHRRWLARVELPEPGAQLTFGDYLGAIEQLAIRRETLERAIEGLIPSSPWAQTIARLRCLRGIDTLTAVGLCAEIGDFHRFERPGQLMSYLGLVPSEHSSGETRRQGQLTRTGSRHARRLLTEAAWHYRRPPRLGTVLERRQHDQEPAVIAIAWKAQQRLHRIWRQLEQKRGKRGTIVAAAVARQLVGFVWATATHPPA

SEQ ID NO: 446126 - protein, 388 aa, unidentified
MPVAANQSELPTAIRTDLGAIFVSLELSHSKWLITSLSPGGGARMSKHSVAGGDVAGMLARFAELSRKVVARTGQCFPIIVIQEAGLDGFWIHRVLEASGIESHVVDPASIATSRRRRRAKTDKIDGEALVRALLAYKRGEPRVCAMLRVPTPEEEDRRRLSRERQALTNERVRHVNRIKGLLFGQGVSSYEPLHRDRRKRLEALKTGDGRPLPAHLKMQVGRELDRLELLLEQIKAVEAARDAMLAAAQEVVSPAPAMLLNLKGIGPEFAAVLWSEGLSRHFDNRRQVASYAGLAPSPWQSGAVDHDQGVSKAGNPRLRTTLIQLAWLSRRHQPRSALTLWFEDRVKHNGGRLKKTTIVALARKLLVALWKYVNAGVVIEGAIMKTA

SEQ ID NO: 446127 - protein, 345 aa, unidentified
MTKLIAGMDLHSNNVVIGLMDMDGKRVAHQKVECRLSEVVKFLAPYKKRLEQIGVESTYNWYWLVDGLRALEYPVLLANPAGMEQYNGIKHADDTNDAFFVAELLRLKILPTGYIFDPELRPVRDLLRRRLTLVHHRTALMLSFKSLYTRTTGQQMTLGELKDLGIKQAQDLYDHPANQLIAGMQIKHIEQLAESIEKVEKLVLDCARELPCYSKLTTLPGVGKILGMTITLEVGDIKRLAKPGHFASYCRTVEAKRTSNSKKKGVNNSKCGNKYLAWAFVEAANFARRCDEQCRRWYDRKAAKTSNVIATKALACKLAKAAWYLMAEGTAYDPKRMFGQAASTK

SEQ ID NO: 446128 - protein, 271 aa, unidentified
MADARRFVGIDVAKAQLDVALGPKGERFAVANDERGISALLKRLEPTDLVIIEATGGLEVPVAGALATAGIGVAVVNPRQVRDFARATGQLAKTDALDAQVLVRFGEAVKPQVRALPDAQAQALEALVNRRRQLVEMLTAEKNRRANSPKVIHKSIDEHIRWLEKRLARFDDELAGLVRETPIWRERDELLRSVPGVGKVLSTTLLAHLPELGALNRKQIAALAGLAPFNRDSGSLRGSRCIWGGRAQVRRVLYMAVVSAVRSNPVIKNFW

SEQ ID NO: 446129 - protein, 337 aa, unidentified
MKLYCGIDLHSSNNVVAVSDEQDRPLYEKRLSNDLDTILTVLQPFKGELVGCVVESTYNWYWLVDGLMAAGFPVRLAHTGAMAQYAGLKYTNDFSDARYLAHLLRLGILPTGYIYPKEERALRDLLRRRLLLVRQKTLHHLSLQSLIARHSGQRLTANAIKALTNEQLATYLDAPILLGGQITHQARCWLDEAISRIERELQQRIQPRKDYQLLQSIPGVGPVLGTTIALETGTIQRFSSPGNYTSYARCVKSEKISNGKRKGQGNKKNGNKYLAWAFMEAAHYSAIWNPRIKQYYQRKKAKAHVLVAKKAVANKLARACYHMLKRGEVFDETRAFS

SEQ ID NO: 446130 - protein, 521 aa, unidentified
MVEREGPLLGLRARSRVSSFPPGLSRGLTWCMTPDNHKHDDAWHPAILNKGGNTMKSFYMGIDVSKGYADFVIINQQKQPVVKSFQLDDTFDGHSRLHEIISRFSTDHPQAVMCAAVESTGGYENNWYNTLIRLQASLNIKTARLNPLAVMHNSKADLKKNTTDKISAKNIAEYLIAHPEKVVYQQQDKFASLRKQWGFVQMLTKQCTQLLNQLHSLLYTANPELLNYCRNEMPAWVLKLLLQYPTAAKLKKARDKTVAKIPYVSLTRAKQLITAAKHSVASATDPLTAQLVTATVEQILQLKKTIAAQTSLMAAQCDVPEVKLLKTFTGIGDISAIGLILEIQSVSRFKNVKKLASFWGLHPVYKLSGDGSGAFKMSKQGRVNPRKILYTVSLSAIEHNPVIKPIYQYHLQQGKHKMDAIGICMHKILRIIYGMLKNNTAFDPKVDAANRQRSLPDMTGNPKKNKNRRFQSYDSKAPVSRRQRKKRLEREQSHSVITDTKPGISAPVPIGDIISDMLCNI

SEQ ID NO: 446131 - protein, 332 aa, unidentified
MKKNHYIGVDISKKTIDVAVYKKESVKNNTLCEIFFNSPEGFKEMKKWLRKHAVSLTDSLFCMEATGHYTYELCLFLEQQKVAYSVQSPLHLKRSFGLTHGKSDKVDAYRIAYYAYLHREDIKYSKLASHNVQTLKSLIAERKSLVVEIARCKAQLKEFGIHTPHSGTIERTKALKKFLEDQVETIEKEMHQTIEADEQLKTNYNLLLSIDGIGSVNAINTIIATHNFEMFDNARQYASYIGVAPFEHTSGTSVRGRTHVEAGAKMLKADLTGAVRSCINHDKEIKKYYERKIAEGKAYGVVANAIKFKLLLRMFAIIKRQSPFVRKPAYLI

SEQ ID NO: 446132 - protein, 306 aa, unidentified
MTAAGIDVGKANLDLAVDGRAGVVRFANSRAGIAKLIKRLRALGAERIVVEATGGYEESVLEACCDAGLWIARVNPRQARDFARATGELAKTDAIDARLLALMARLFADRLRPYLAPPPWQRELRGWLRRRGQVLTLLQAQRQQAAMTSPQVRKLAARTIAALARELAAIDQSMKTLIQQHATPALRSSKGLGPVFQATALALLPELGHLDRRQIAKLVGVAPMNRDSGQGQGKRRIHGGRAPVRVALYMATLSAVRWEPEMKAHYQQLRARGKLAKVALVACMRKLLGIINARRRDELREGWIMA

SEQ ID NO: 446133 - protein, 403 aa, unidentified
MIFVGDDWAEQHHDVYLMDGAGKRLASRRLPEGLAGIRQLHELMATHAEEPDQVVIGIETDRGLWVGALTGAGYRVFAGNPLAVARYRDRHHVSGAKSDASDAKLLADLVRTDRHNHRLIAGDSPEAEAIKVLARAHQSLIWTRNRHTNALRNALREYYPAALEAFEDLAHGDALGVLHRAPTPTLGAHLDVAAIQSALKRGGRKRNIAARAREIRATLRTEQLSAPAPVADAFGATTRATVGILTELNRQIGELETSLAAHFETHPDADIYRSLPGLGVVLGARVLGEFGDDPNRYTDTKSRKNYAGTSPLTIASGKKRAVLARHIRNRRLYDAIDHWAFTALTKSPGARALYDQHRAAGDLHHQALRALGNRLVGILHGCLRHRTLYDEHTAWAHRMPAAA

SEQ ID NO: 446134 - protein, 337 aa, unidentified
MKFCGIDLHSNNSVVVVSDEEDRIVFNKRLPNDLAQIRAVLEPHRPDLAGVVVESTYNWYWLVDGLMDTGYQVHLAHPSAIKKYEGLKHSGDFADAAYLAHLLRLGLLAEGYIYPREERGARDLARKRMQLVRYRTAQILAIEGILMRQTGTRMKGEAVKRLTAEQVDGFAFAPDVSLAVEANRAVSQTLSQQIAALEKRLKQRVILRPEYHLLKTVPGIGDVLATTIMLEAGTINRFTQVGNFSSYCRCVDSLRESNGKRKGEGNTRNGNKYLAWAFVEAANFALRCCPQAKSFYDRKKSRSNRILALKALAHKLARACYHMLRDQKPFDVHLCFG

SEQ ID NO: 446135 - protein, 408 aa, unidentified
MAVVMIGIDPHKGSHTAAAIGPGEEPLGQVQVLASASQAGQLIEWARAWPGRTWAVEGATGLGHLLAQQLLAAGEAVLDVQPKLAARVRLLEAGNTNKNDANDARSVAVAALRSATRREVTAEDQAAVLKVWSKRYRDLGRARTQVACRLHAVLAELVPGGFGKEITAGQGARVLQAITPASPAAAARCELAAEFLADLRRLDAQRRDTRTKLAAAVRESGTTLTQVFGVGPVIAAAILGATGHAGRFGNQDRFAAYNGTAPIEVSSGGRKIHRLSLRGNRRLNHAIHMAAVTQIRHSHSPGRAYFDRKIAEGKTGKEALRALKRQLSDVIYARLQADAARPGRGAPAEAEGPGGQSGNGSVSSAAGSHPRRQLFGQATPGPQLSLRPAAPARQAVPATPVKNSRRAP

SEQ ID NO: 446136 - protein, 372 aa, unidentified
MRQISKIRITKKVINNVKENKEHFKGIRIYVGIDVHKKSWYVTLYVENTFYKSYSMSPPSSEQLIGYLKEHFPGGEFHLVYEAGFSGYCLYDDLKEAGMECLVVSPADVPISNKDKKFKTDRHDSKNLAIQLKSESLEGIHVPEPILREYRALLRLRNKLVKDRTRTKNYTKSNLMFFSKDIHDEDGDSIKSWSKEFFRLLSEVEYSTEAGSKVMEELIKITHFYDEQIKGIDKDILELSKQPRFKEDVEILSSVPGISTLSAMIFLVEIGDFSRFEDTHKLKSYIGLIPNEHSSGETEIKTSITRRGNKFLKKVIIEASWVAIRKDKSLLSIYTKATKRMPGTRAIILVASSLLSRIRSIMRQRVLYKVVA

SEQ ID NO: 446137 - protein, 391 aa, unidentified
MKTATVLSEMPTAIRIDLAAIFVSLELSRSTWLITSLSPGNGEKMSKHSVSGGDSAGLLDRLATLQAKAHSQTGHQFPIITIQEAGLDGFWIDRVLKANGIESYVVDAASIATSRRRRRAKTDKLDGEALVRALLAFKRGEARVCAMVKVPTPEEEDRRRICRERKVLTAERVTHVNRIKGLLFAQGVSGYEPLRKDRRRRLDELETGDGRPLPAHLKGQINRELDRLEFLLEQVAAVERERDALLAAKTECAHEAPAPAAMLLAIKGIGPDFATILWAEGLFRHFDNRRQIASYAGLTPTPWQSGTIDHEQGVSKAGNPRLRTTMIQLSWMWLFHQPESALSRWFKERVQSNGGRRKKSAIVALARKLLVALWKYVTMGVVIEGAVMKTV

SEQ ID NO: 446138 - protein, 421 aa, unidentified
MSYHIAGIDIHKRVLMVVVVSVAEEVTDATGAAMEFECRRFGTGASERNHLVAWLQPHQVREVVMESTAQYWKPVWLDLEPHFEKLHLAQAQSNQAPKGRKNDFRDAKRLARRLLAGELMLSFVPEPEQRTWRLMTRGRLQLVRERVRLQSQVECLLEEARIKLSSVISDLLGVSGRRILEALSKGQTDAVQLAALGDDRLKCTKEQLADALRGAPEPGHLQLLKLHLERLQLLDEQISQLSQMSATALQKHPQAVARLAEVPGFGVESAQQMIAEVGVDAEAFASAGEFASWSGVCPGSDVSAEENHSSRCPKGNQYMRRILAEAAHAAVKKKGGHFQNVFRRFLPKLGYNGAIWVVAHRLARLVWKILHDEVSYVEQGQDSDPRARKHRAAKLALALRKLGYSVTLSEINSRPVAEAST

SEQ ID NO: 446139 - protein, 459 aa, unidentified
MTLPPPVLPGLQTGNSGTRRRAPVSDRPGASLAAAGPSLPLPLQGAELSLALPEALFFTGIDWAEVTHAVCVTDAAGKITAEFTIEHSADGIAMLIRRLARHGDPADMPIGIERPNGRLVDLLLEAGHPVVPVSPNAIKTWREGEVLSGAKSDAGDAAVIAEYLRLRQHKLRVATPYSGETKALRTVVRTRDDLVAMRVAATNQLSALLGAYWPGAKAVFADVESPISLAFLTRYPAPALAARLGEKRMTAFLVKNGYSGRRTAAELLARLHAAPAGTADETLTEALRDAVLALVAVLTALNTGVKDLGRSAAAHLGEHPDGKIFTSLPRSGQVNAAQVLAEWGDCRQAYDGPDSVAALAGCTPVTRASGKYRAVHFRWACNKRFRKAVTTFADNSRHASPWAAKIYNGARASGKDHPHAIRILARARIRVIWRCRIDRTPCDPAKHRAATTLLKLKAA

SEQ ID NO: 446140 - protein, 314 aa, unidentified
MNDSMYLGIDISKEWIDAHLLPTGETWHVERTPEALIDWIGALPAGRILAVMEATGGLEIAVAALLIDAGIKTSIINPRQIRNFALALNTRAKTDGIDAMVIARFAEAMKPEPRPFPSKQQKELREMITRRRQLVEARSAEKNRLSIVDDKFIRKNIGKHISWLSRQIGDLEKHIDSIVKSSPAWTMQKEILTSQKGIGDVTACTLLAVLPELGTISRRQISALAGLAPFTRSSGKWKGKSFVTGGREPVRRVLYMALKSARRFNPVIAEFYDRLISQGKDKPVARIACMRKMLTILNALMRDEYYATFSCLSS

SEQ ID NO: 446141 - protein, 412 aa, unidentified
MEGETVIAGVDTHKDVHVLCLLDGLGRKIWSGSFGADPEGYDRLAEAIGDPGSCMVVGVEGTASYGAGLTRRLVELGYNVVEVLRPKRDKVRPGEGKSDPLDAERAARKAASGKGCSVPKSQDGWVEAVRQLYVARRLAVATSTSCVACAKSMLTTAPGALRERFRGRERPKDLMPLLARGRKAGDALEESALASLRSVAAVWKEARSQVESLDERIRALLEANAPALLGVEGCGTTTAAALVVAAGDNPGRLKGEAAFSMMCGASPIPASSGKTDRHRLNRGGNRQANWALYEIAIKRMAYDERTRRYVARRTSEGKSRREAVRCLKRYIAREVYHVLMDPNPDGAAPEGPELAKMRKAMRVTQKKAAAELGLSAATLGHLERGKRRSTKLERRYYELLCELERALPQTAS

SEQ ID NO: 446142 - protein, 433 aa, unidentified
MRIIGLDIHRAFAEAVAWEDGRLRRLGRVDMRRDLLAAFAAKLSPNDVGVIEATGNATSATAVVAPHVKKVGIGNPKQVRVIAYAKIKTTIDADVLAQLYASGFLPEVWIADEPTQALRRQVTRRNQIVRQRSRLKTVIQSILHSHLIPSCPHADLCGAKGRTWLIEQVVPQDERLAIDRHLREFDRLGEDLQVIERDLARSALEDEGVKRLMTIPGVDITVALAMKAAIGDVSRFDDPQKLVTYLGLNPSVQQSGQVRPTMGGSPSRAVVMRAACSSRRPGRPLVLPDRCEPSPCGVRARRGQHVAAVATARKLSVVIWHLLMKGESYAWARPSLHAKKLARCGTQGREQGCARPKGSRARLQHKEPPGRRAPLGGAGRGRLCTPRRRLEPTRSEEGRHGCRKRGATIEAARQGSHLGPCSSPRGRPCATGE

SEQ ID NO: 446143 - protein, 390 aa, unidentified
MFYLGIDIGKNTHVASLIDEKAKVIFKAFSFSNSTDGATRLLEKISPYQANLEIGMEATGHYWLSLYSFLIENQFVIHVINPIQTDGWRKGTEIRKRKTDIIDSVLIADFIRYGNFLETSLADEDIMSLRNLSRFRNYLISSIGDLKRKTICVLDQIFPEYASIFSDVFGKTSKEILMQINTPNDFEDISFSQLEKVLEKITFKKFAKDKIDSISKIAKNSFGITLGIDSFSFQLKLLIEQISFIEKQVTDVEKEIKNILTKINSPITTVPGIGDITAATILGEIGDINRFSSGSKLVAYAGIDATVSQSGEYESKINRMSKRGSPYLRKSLFQAAFIASNCDPMFKDYYLHKRAEGKHHKVAVGAVARKLCHVIHAVLKNNSSYEIRNL

SEQ ID NO: 446144 - protein, 350 aa, unidentified
MYFAGLDAHLKYVTVAVLDRLGALVLETTVPTREPERVLAVLAPFRPLEVVVETCPFWPWLYDLLEPAGIRFHLAHAKRLRAIATAPQKNDRVDARLLARMLLSGLIPEAYPRPGDQRELLRLLRHRTTLVRARTRLAGRIHSQLHQQRLMLPREQLLRQATRGWLRETAWPRLTAEQQAIVTTHLELIDHLTPLIQALERRIAAAADANPTATLLATIPGIGPYRSLLLAAELSPLGRFPRVEHLASYAGLAPVTRSSGGHTRHGSIPQGANRWVRGALVSAIPSHVRSAPHSPVSHAYAQLTARLGWRVARVAAARKLLRIVYIMLRRGEAWRSEQVAGADVRDEVHV

SEQ ID NO: 446145 - protein, 421 aa, unidentified
MPNIEIGVDSMDKENFIYVGIDLHKETHTAVMIDCYNQKLGEITFPNRPADFPKLVTKVKKCNTDGKEVVYGLENAYGYGRALAVWLIDKGYLVKDVNTAISHQQAKHRGAMYRKSDSDDAKAIALATLNMLDKLPDACPNDAYWSLGQLVHRRDNIMKQRTRLVNQLHEQLCIAYPSYKQFFNDISRPTALYFWEHYPSRKYLKGKSVEDLRAELVPVSHNKCSTKTCEKILDAVASDKVKNNAYQDARDMVTLSIVSDLQHYDSQLAEVDKMLEQMYKMLGCTLTTISGVNVITAVKILAEIGDIKRFSNANKLAQFAGIAPLHLSSSGKGKDVATKQGNRRLQATIYFLAIQMVQVSSKGTPRNPVVRAYYEKRKAEGKTSQQALICISRRLISIIYGMLKYGTEYRMPVVENAGEKL

SEQ ID NO: 446146 - protein, 462 aa, unidentified
MGYYFNNIQGKKGSQFSSQLRGVNLEKVLIVAIDAAKYFQKALICNYFGDVLEKPFFFGLDQLGIDLICSKIERSQKEIEAERIFVGIEATGHYYEDIVRELGKRGYKVTIINAATTYEERSSALNWSKTDDLDLYAIAHALIQNKGMENKLPEGHYRKLMTLTRARRSEVRKRALLRVHIRTLMDHIWRDFQGYIEVENNKPKKKLIFSDFWGQSSLFFLEFYPHPSDVLELGIEKLTSIIKEKKLRIRTSTIQTLYQVAQTSIVKEKEEVSVELLLLSMAIQDLKRLSENIKTLEKEIETALLQTDGRLLLTVPGIGVITAAEFYSELGDISNYENAGQLIKKAGTNPIIIQSGGTSGFYGKISKQGNKNLRFIVYTVGKCLAQHNKDLRPYYLKLKERGKHARKAYIALGNKFIRIAFSMLTHKKPFDSKQNGYSIFEEIKKKLNFTKINTYLNIALAA

SEQ ID NO: 446147 - protein, 360 aa, unidentified
MDTKHDTSLSFKDQDFFIGIDVHKKQWTLSIIFMNMLLKKYLSIDPQPSALLNYMQKHYPDGNYYATYEAGFSGFWAARKLNNLGVNCMVVHPADIPSSQKERLNKNDRVDSRKLARSLNNGDLIPIYIPEKIAEEYRYLNRHRLKTVKDQTRLKNRIKGVLHQFGVMIPLHYQERRWSGAFIKWLLSIKFDTEYAQFAYEDLIDQLIQTRARITKHLKKMRVMTKEQKPFNIIIPLLLSIPGIGFITAMTLATEVIDMSRFKTLEKLAAYVGLIPSIQSSDETEINLGISPRRNKYLRTMMIEAAWKAVKIDPALTMKFNQLSRRMNRNKAIVRIAKILLNRIRYVWKNQKPYVLSVVN

SEQ ID NO: 446148 - protein, 322 aa, unidentified
MQDAQTGSSVFVGIDVAKQSLDVASLPSEQSASFSYDETGLRQLLDWLRPQADRLIVLEATGGLERRIAGELIDAGHQVAIVNPRQVRDFARGMGKLAKTDRIDALVLARFAQQAQPRIVEKASEKQVELAALVTRRRQLQSSAVAETNRRETASTSEARKSIEKHLNWLRKEVARIDAAIARLIASDQTWRGQAERLKSVPGVGPATSATLVAELPELGRLNRREISALVGLAPYNHDSGKLRGKRSIWGGRVSVRSSLYMAALSARRCNPIIRDFALRLEQAGKPFKVILTACMRKLLIILNVLIKNNQFWSPEILPSTT

SEQ ID NO: 446149 - protein, 338 aa, unidentified
MTCIGFDHHKKWTQAAAVDDQGKIIREMRVLNDNSSLKGFLKGLPQPLKGVVEAGPTWGWIYDTLTELGVKMIVANPSAVRAIAEAKIKTDKIDARMLASLLRVGLIPEVYVPTEEVRSQKMLWRERIWLVRMHVRLKNRIHRLLNHYHLEVPEFSDLFGAAGRRFLEELKLPEPGNRILNAQLKLLQSYRLQIEEVQRWAVKATQGHPNRAYLESLPGFGKVFAPIVALEIDDPKRFASPGKLASYCGLVPSLYSSGGKSWQGGIGKEGNHWLKWAFVEAAWAAIRSSAYFRVVYQRLRQRKTAQVSIIACARRLCEIAYHLLKERRCYEERPYRYA

SEQ ID NO: 446150 - protein, 344 aa, unidentified
MEHYAGIDVSLERSSVCVVDALGKIVKEAKISSEPAALVAFFEALGFAVKRIGLEAGPLSQWLHAGLTRAGFEAVLLETRHVKAALSAMMVKTDRKDARGLAQLIRMGWFRPVHAKSIRSQEVRALLVARKQLLGRLIDVELSIRGILRGFGLKVGPVTRKGFDARIRELVTGQATLERIAGAMLSARVALKAEYEKLHKIVLAIVRDDAVCRRLMTVPSVGPVVAITYKSAIDDPNRITKSKAAGALFGLTPRKYQSGEKDVTSGITRAGDEMVRTALYEAANVLLARITRFSKLKRWAMDVAKRRGSKRAKVALARKIAVILHRMWVDGSTYRWTETQPIAA

SEQ ID NO: 446151 - protein, 336 aa, unidentified
MTDIEQHDSVQVFVGVDVGKGAHHAVALDRKGKRLLDSALPNDEAKLKALLGKLKAHGPVLLVVDQPATVGALPVAVARDEGVLVAYLPGLAMRRIADLHAGESKTDARDAYIIAEAARSLPHTLRSLKLADSQVAELTMLCGFDEDLAGQITQVSNRIRGLLTQIHPALERVIGRHLDHPAMLALLERYPSPAQLAALTQKQLANRLAKLAPRMGKTWATEILQALSEQTVVVLGTQAASIVLPRLAQQLAALRTQRDEVAKEVERLVLAHPLHPVLTSMPGVGVRTAARLLIDVVSRAFASAGHLAAYAGLAPVTRRSVRRSEASCPPGAATSN

SEQ ID NO: 446152 - protein, 422 aa, unidentified
MLEETQETEEIIQRVAALDIGKAELTCCVRVPSPDAPGKRLQEVRAYQTMTRWLLVMTDRLRELGVTRVVMEATSDYWKGVYYLLEAHGFETWLVNARDVKHLPGRPKTDTLDAVWLCKLAERQMLRPSFVPPPAIRQLRDVARYRADLVAVRTAEKQRVEKLLEDAQIKLSVVASDIFGVSGRAMLAALVAGERDPKVLAQLARARLRAKLGPLAEAFTGFFTDQHAFLLGKMLARVDQLDADLAELDAKLQELIAPFAHAVERLDEIPGVGQVAARLLLAELGTDMTRFPTAGHLVSWAKFAPGVKESAGKPKGSGSTGHGNPYLARVLGEAAVAASKTDTFLGERYRRIARRRGKRRAIVAVGRSILVIVWHLLADPTARYHDLGPGFYDTRINADRAKRNHIRQLEALGYRVTLQPAA

SEQ ID NO: 446153 - protein, 347 aa, unidentified
MRPKLLMENDYILRQCVGIDVSKETLVVTMCMFSFAEEAHYSDVKTFKNNKTGFNQLVKWSRKEAYTDKPLRYVMEATGVYHEELANHLVKIGCTVIIMMPNKAREFAIWEGMISKNDTIDSRVLALVGCVKRSMRPWQPSKEIYYELRAMTRFAQDAKKLRLALKNHLEALKHSHQAEKSVVKHYEAMVSYLDKRLKMNLKNMKEKVASDEALNKKVENIITAPSLGFTSVITVIAETNGFALIQNRKQLTSYAGFDVKDNQSGNVEGTSRISKKGNSRIRAILYMPAVQAQLRSKHLKEAYNRIVQKHPDKKMIAVTAIERRLLLLIYALWKSDKPYDEDHNKKK

SEQ ID NO: 446154 - protein, 505 aa, unidentified
MSPRAKKVDPSSKTTLDPQTPSGRPARSARWEAVNPHAAGIDVGATSHYVAVPPESVAENEKSVRVFEAFTPDLHSLVEWLKTCGVTTVAMESTGVYWIALHQLLEAAGIEVLLVNAKAVKHAPRRKTDVSDCQWLQQLHSYGLLSGSFRPCDAICQLRTLMRHRANLVGSASREVQHIQKGLQQMNLHLHHVVSDVMGATGQRILKAILDGQRDVKQLLSLRDENITKSTIQEMDAALQGDYREEHLFVVRQALETYEFLHRQMDRCDIEVQRVLQIIAATAPAPTALRETGPECIAQGNPTPETTVQKAKQPKKKARQSRKHNDPKIDFTPQLTRIFGVDMSQVLGLRVLSVLVLLSEVGFDLAKFPNAKAFCAWLGLCPNNKVSGGRVLSSRTSKVVNRVSLMLRLAAVAIGRTDTCLGWFYRRRCAQLGPPGAATATARKLAAILYGLITRREQYVEPNLVEYQRRYHRHRTVKLLKQLETLGYEVAIKATSDTETITTSC

SEQ ID NO: 446155 - protein, 407 aa, unidentified
MSTSTDVFVGLDWAVHTHAVCIIDASGAVRDRFEIAHDRQGLAELMRRLARFGASVRIAIERPSGLIVDALVEAGHQVFPIHPNAVKASRPRYRSHGAKSDASDAYLLADLLRTDGHRWAALSPQSDSIHALRALVRSRDDLVTTRVALGNQLQSTLEAFWPGAACIFADITSPIGLAFLRRYPSPASAARLSEAQLLRFCRAQHYSGRRSPAELLARLRAAAQALPGKLTTESMAQVVRSLVAVLNPLVAQISGLTRRIENFVESLPDGQIIMSFPRAGRVCAAQILAELGDVRERFSTFDRLAAEAGTVPVTYQSGKTRSVTFRWACNHRLRQAITCLADNSRHANEWARGIYLAARARGCDHPHAIRILARAWLRVIWRAWTDRKPYDPKLHLGALKLASDTGG

SEQ ID NO: 446156 - protein, 312 aa, unidentified
MTQFAIGIDVSKYRLDVAVRPQGPRFAVSNDAAGSAELIARTSPWTDAEFGLEASGGYEQGCLAALHAAGRKVRLFEASRVRAYARSRGQRAKSDEIDAGMIGDYAASLPPERRHAAPIKPDQLSELVTLRRQIVEQLTRLKNHVEHLRTTTVRALVEQQQAFLRAQLQEVDTELAAAAEAQEGWCERIRRLRTVPGIGTQTAILLLVELPELGQVDRCTIAALVGVAPFIDRSGQRDGPRHIAGGRKHLRNGLYMPTLTAIRYNPVIRACYQRLIGCGKAAKVAIVACMRRLVGILNAMLRDGRDWSPQCP

SEQ ID NO: 446157 - protein, 355 aa, unidentified
MKSSKYIGMDVHTATISVAVRDAAGKLIMESVIETKASTILQFIRGLRGDLHVTFEEGTWAAWLYDLLKPYVTNVVVCNPRRNALLKEGSRCDRIDARKLAELLRTNLLRPVYHGEKGLRTLKELARAYLTISKDLARVMNRVKAIYRGWGIPCGGKSVYHPRHREEWLSKITQASVRRRAELFYKQLDALVLLRKQARQELLAEGKKHQAWKWLRSIPSLGPIRVAVLMAIVQTPHRFRSKRPLWKYSGFGVVTHSSADHRYVQGQLERSKKPVSVRGLDPDHNNDLKDLFKGAATHASTRKGPFLEFYEALVAKGMRPEMARLTLARKIAVITLTVWKKGVAFDAKYLKPQTA

SEQ ID NO: 446158 - protein, 397 aa, unidentified
MSMLFVGIDVSKDYSSGQGLDPEGKKLFYLEFGMNGEGFSRLLNTLKTHCKDLSEVTVGMESTGCYHTNLFAFLCSEGIACVVINPLLISNFARLSLRKTKTDKKDALTIAQFLLAHRSKLAQVSYCQNSQDLKDLARERESLAVMIAGLKNDVRRLLQMSFPELEHRCKLFTETMLRFLMKFPSARVIRTAKATEISKALIHAEGKRKRVFISAEEIINLAKVSVASDSVAKAGYYSEKIETLLYLEGKQKRITEALVEACRSMRVDELDIITSVDGISAITGSTFLAEVGDIELFSSSKHLIAFAGLDPSIHQSGQYEGISRISKRGNRHLRRVVFLMTLCAVRSQNAFREYFLRRKEEGLPPKKAILATAHKLLRVLFAMLSSKSCFRKEVVEV

SEQ ID NO: 446159 - protein, 347 aa, unidentified
MDTIGLDLHKRESQLCTLHADGRITEQRIVTSRERLMAVFAHRPSARILLEASTESEWVAQCLEGFGHEVIVADPNYAPMYATRTRRVKTDRRDARTLAEALRLGAYRPAHRVSAARRHVRAELAVREALVRTRTRYIAIAKAFVRRDGLRVPSSESHLVAKRVAALEIPALLEAELAPLFAVLEPLNAQIVAAERRIAAVEQSDPSVALLATAPSVGPITASAVVATIDDVTRFRSAHQFEAFLGLVPGERSSGEKRRVGRITKAGNARARFLLVEAGWRILRSKSPETAALRGWARKIAVRRGNRIAVVALARRLAGVLYAMWRDNTPYNAAKLRVPQPLVSRAS

SEQ ID NO: 446160 - protein, 363 aa, unidentified
MFTERTSIGLDVHARSVAAAAIDSLTGQVVQGRLTPSYEHIRSWISSLPGPVAVAYEAGPTGFGLHRDLAAAGVRCEVVAPSKLQKPSGDRVKTDARDALHLARLLRLDEVTSVAIPSVDQEAARDLVRAREDCRGDLMRARHRLSKLLLRHGIVYYGGRAWTGAHDRWLRTEAAPQLILPATRMAFDADYDHVLTMQARRRRLDAAIEEMAAASEFTPIVRRMCCLRGVSTLTGFALAVEIGDWNRFTGNTIGSFVGLVPSEYSSGSSRVQGSITKTGNTHARRLLVEAAWHHRPRYHIGAVMRSRWEQAPAAARTRGDDGNRRLHQRWVGFLERSKRPVTANVAIARELAGWCWSLAVMDC

SEQ ID NO: 446161 - protein, 408 aa, unidentified
MEVVYRCCCGIDVHKKIIVACLNQGGEQSLREFGTTTSEIKSLATWLTESGCEMIAMESTGVFWKPLYNLFELMDLDAIVVNAAHMKALPGRKTDVKDAEWIADLLRHGLLKASYIPSREQRELREITRYRKSLTEERCRETNRLQKILEGANIKLDSVVKDINGKSARKLLEKIIEDDVPTSEEEVSKMVHGRMRSKLGQLVTAIEGITTPLQRKLLAQVIDHIDDLNRRIADLDRLVQDYMDEYAAAIAALCDIPGIARRSAEVILAEIGLDMSRFPSAAHLCSWAGVCPGNCQSAGRRKHGKTTKGNKPLKTILTQCAKSARSVKGSYFSAQYQRIAARRGKNRATLAVAHSMLIAIYHMLKNSVPFRDLGSDYYDSFNRDRKIHSYLKRLKALGWEPDALPGSA

SEQ ID NO: 446162 - protein, 318 aa, unidentified
MNIIGLDISKDTIDATLHKTNGSIHYIKFKNNDDGLKQFRLWIKGNRIRKVYIGMETTGIYYEKAADMLSSYYTVYVINPLKIKDYGKSRFNRTKTDKADSNLIADYIKRHQDTLIPYQIPKNKALQKLINLKNQLQQQQKQIKNRLHSTEEDFIRNIHQDLIDTIQDKMEQVKIAISEQIKKQTDYNHYRNLQTIPSIGKDTASVLYAQLTEKHFKTANQFVSYAGLSPAIIQSGTSVRGRGRLSRYGNRRLKSTLYMPALCAYRFNAFPKLINNLKKAGKPKMVIIVAIMRKLAKLAYYIVKTGQPYDAERHRLNQ

SEQ ID NO: 446163 - protein, 420 aa, unidentified
MFKIFRFNCCGLDVHKTWIFACIGITDSSGRTEYKEKRFSSFSKGLRELDEWLTLYSCDEVCMESSGKYWIPVFNVLERNHKVTLAHPKYTKPQKGNKTDRKDAKWICDLFMCDMIKPSFIPPPDIRQLRDLLRYYRKLTNMETGEKNRAQNCLTVSNLKLDDVFSDVFGKSALSITKYMLDHPGESFDVSPFVNSRCKTPIEEIQAAVDGAISKEQAIKLRQCLEHIDQLEGHKQSIKDEILTITKSYSETLELLRTIPGFDKNPMTAITVLSEIGSDVTVFPTAKHLCSWAGCCPRNDQSNQKVKCRRISQAGTYLKPILVQIANALIKSKSHTEFIERYRRLKSRRGHKKAIIAICKMLLTAIWNILSKHVPYTNEGYFTSSPNIKKDKLLTTAQALTLLRLRGYTISDDNNHLTAS

SEQ ID NO: 446164 - protein, 338 aa, unidentified
MNITTIGVDLAKAVFQVHGVDGRGKVVVRRSLRRQQMLPFFARLAPCLVGMEACGSAHYWARALATLGHEVRLMPPQFVRPYVKTNKHDVADAEAICEAVGRPTMRFVAIKSEAQQSLLALHRARSGMVKARTGQANQIRGLLGEFGRVVPRGLGPLLRTLPEWLEDPESGLPEPLRGLLARLYEHLQAVHRHVQELETEIVAWHRQSEASRRLAEVPGIGPLTASALVASIGDIRHFHSGRQLAAWLGLVPRQHASGGKARLLGISKRGDTYLRTLLIHGARAVVRHARTPGDWLQRLLTRRPTNVATVALANKNARIVWALLAHDRRYQADWALCQ

SEQ ID NO: 446165 - protein, 343 aa, unidentified
MQAVTTVGLDIAKSVFQVHGVDARGNVVVRRQLRRRQVLSFFKKLPSCLVGIEACATSHHWSRQLQALGHTVRLMPPAYVKPYLKRQKNDAADAEAICEGVTRPNMRFVATKTPEQQSCLMLHRTRHLFVRQQTAVINAIRAHLAELGIVAPVGRNGVEELLDVVADPNDDRLPEVARECLAALGAQLRMLKAQILEFDRRILAWHRSNETSKRLDEIPGVGPALATALVASVADPKAFRSGRDFSAWVGLVPKQNSSGGKEKLGSITKRGDRYLRSLFTAGALAVIRYAKIHGTKHRPWLTALLARRPTKVAAIALANKIARMAWAMMAKGECYREPVALAA

SEQ ID NO: 446166 - protein, 384 aa, unidentified
MDQTTSTLSANTLHCALELSKNSWLLAIQFRDREQPSLYPIEGGNTDKLMAKLAAARDCWAKVNGALPAITLCYEVGHDAFWLARFLKARGIECLVIDPGSLQVNRRARRVKTDRVDVKMLLRTLIAWCRGERHVWSLVRIPSVDEEDLRRSHRERSRLVRERTAHINRIKGLLFAQGVRGINIKSQYKTLAVDQLVTGDGHRLPPRLVCEVAREIQRLAMVQEQIAKIERERDTAPTPCEATERKRRLLLRLKSIGPAISALLSREVYYRQFANRRQVGSFLGLTPSPYSSGEEERCQGISRAGSGHVRAIMIEAAWLWIRHQPKSALTRWFLERTAGQSTRMRKTMIVAVARKLAIALWRYVEHGLVPQGAILNPPTTGNAR

SEQ ID NO: 446167 - protein, 345 aa, unidentified
MEYYVGLDVSLKQTSICVVDQSGSVVREGVVDSDPEAISVYVRSKAPGALRIGLETGPTSTWLWTELKRLGLPVICIDARHAKAVLKMQINKSDRNDAIGIARIMQTGWFKEVHVKDIDSHSVRALLASRALLVKIKRDLENHVRGLLKNLGLVIGRAKFNVFAVRAEELIEGRPELIAAIRPLLEARNAVEQQVSELDRKVMKLARHDAQVRQFMTVPGVGPITALAFKATIDDPARFARSRSVGAYVGLTCRRHASGEVDWSGRISKCGDAMLRSYLFEAAGVLLTRVPKWSAVKAWGVKLVKRNGLRKAKVAVARKLAVILHRMWIDGTEFNWSKKEIAASK

SEQ ID NO: 446168 - protein, 371 aa, unidentified
MPSTTRICRAGGTAITTIAHTQPARLTVGVDTHKEVHVACAKDQLGRRLATTLVATTSAGYAELLGWAGTLGQVEAFGIEGTGCYGAELARFLRSRGQRVVEVNRPDRAARRRHGKSDPVDAEAAARAVQAGEATGLPKAGDGAVEMLRVLRVARQTAMRARTQTINALKALVVTAPDPLRRQLRDLPTRQLVATTAAFQPDTPATPTMATMVALGALARRYQALDGEITMLSKQLHRLVGLAAPALLAVFGVGPETASALLITAGDNPQRLHSDAAFAALCGASPVEVSSGKTVRHRLNRGGDRQANNALWRIVLVRLRAGHLPTVAYLQRRTAQGKSKREVIRCLKRYVAREIFAVLTTMADQAVTTAA

SEQ ID NO: 446169 - protein, 335 aa, unidentified
MRLYCGIDLHAKNSYLAIIDEQRKRIFKRNVTNDRKLILALLDPYRSELQGVVVESTFNWYWLVDTLMDDGYTVHLANVSAIQQYEGIKYVDDKHDAFWLADLLSLGILKEGYIYPKEQRPVRDLLRKRGHLMKLRTSLLVSLTNTLANVCGTKVPSHRIKGKEDHVSVHLDHDASLALMGQVSKAAIDMLTRQIETIESHVEKQCKFDTPLLSLPGVGKILGLTILLETGPIGRFPAVGNYVSYCRKAESTWKSSEKVKGRGNRKNGNRYLSWAFAEAAEHARMFDTASRKFYTRKLHERNSPVAHAALANKLSRAAYYIMRDRVPDEEAKLFG

SEQ ID NO: 446170 - protein, 434 aa, unidentified
MNVLSKIYPNSAGIDIGSEKVYVSVENQSVRNFRTFTSCYKELSAYLKECSITHVAMEATGVYWITLYDVLEADGFEVTLVNPADSKNLPGRKTDVQDCQWIQQLFSYGLLRKSFVPEDIVRKLRVYTRMREDKLQMASSHVQHMQKALTLMNIRLPEVLSQTHGASGMAMIQAILEGERNPEKLLACCTPSLIKNKGKDILLALEGNYKEEYLFELLQAYDGYMFYIDQVSKCDIETGKVLQDYNNSSNKDYKDGHPVKPIRHNKPNIDQLHQLLLGIHGANPTTLPGLTDYSLMRLTAELGNNIKQWPSIKNFVSWLGLAPGKHQSGKMNKRSKKKPVTRAGQIFKQAAQSILLSKQPGLGAFARRLKAKKGSGIAIKATARKLAELYYRIFDKGMDYVEQGVKRYQEKLKEQQIIFLQKKANELNLQLIEN

SEQ ID NO: 446171 - protein, 392 aa, unidentified
MFFVGIDIGKNNHVASMMDDTGKVVFKAFSFPNTSDGGNALFSKLASYSLKPSDFEIGMEATGHYWLSVYSFLFEKSFLLHVINPIQTDGWRRGTEIRRRKNDIIDSVLIADLIRYGQFVETKLADEDLFSLRTLTRFRTYLVESISDLKRKVVCVLDQVFPEYQSIFSDIFGKTSKEILLQFSSPIDFESVSSETLAQLLAQLSRQKVSATKAEQLKAAASSSFGVTFSKNSFTFQLKALIEQISFIEKQVKETEVEISSIMKKLESPITTITGIGSVTGAAILSEIGDISKFDSPRKLVAFAGLDATVTQSGEFEAAHNVMSKRGSPYLRKAIFQSALIASFKDPVLSVYYQKKRAEGKHHLTCVGAVARKMCNIIYAVLKSNQPYVPKA

SEQ ID NO: 446172 - protein, 332 aa, unidentified
MLYENYVGIDVSKLSIDAFIRESRIHRQFRNEESGFKQLIRWIKEHIGEGWESLLICFEHTGLYSLSLALFLEREHITYAMVPALDIKRSLGITRGKNDQIDAKRIAEFAYRFNDRVTPTSLPAEDIRKLHSLLAMRDKMMRNMGGYITSRNELFRVIPERDLPVLSSVYENIISTLKDEVHDLEREIRSVIMANKELKKTFELITTVKRIGFIVASFLIVYTCNFTRFENWRKFACYSGIAPFEYQSGTSVHARTQVSSIANQQMKRLLHLAAMTAIHFDAELHNYYVRRQSEGKSKMATINIVRNKLIARVFAIVKRGTPFVDIQKYAYW

SEQ ID NO: 446173 - protein, 342 aa, unidentified
MYYIGLDVHKKTISYCIKDVSGQVQREGTIPATRTELDSWMKTLPTPWTVAMEASIFTGWVYDHVLPHAAQVKVAHPVMLRAIAAAKKKNDRIDAGKIADCLRCNFLPECHMVSTEIRDRRRTLRYRHLLVRQMVQMKNRVSGLLLETGVSHNKQRLHKVKYFRELLATNKEVDESIRPLLRLSRDSIERLQKTDYALVSSLQRDPILAERIKNLRTVPGVGPITALTWALEIGDVSRFHSVKHAISYCGLCGDEKSSADKVLRTPLSKQRNKHIQRVLVEAAKLAPRNSHELSLVYEKAKQKGNTNRATIAVARKMVTYLLAVDRGQRPFVPIENFSTAVA

SEQ ID NO: 446174 - protein, 417 aa, unidentified
MSKYAAFVGFDWADKKHDICLVDAATGKKEFCVIKHTPQALQEWATAVRLRFGGRKVAVALEQSRGPLIFALLKYDFLVLYPINPSTLSKYREAFSPSRAKDDPRDAEYAVELLVQHRERLRAWRPDDEKTRVLQYLVEHRRRVVSDRTRASNRMTALLKLYFPQVLEWFDDIRTGLVCDFLLQWPTLEEVKRVRRTTLEKFFREHNSVRQQALEERIKAIKESVPLTTDRAVISSSVPMIKTLAAQMKTAISAIKEFDQQIAALCATHQDYHLFASLPGSGTVYSSRLLAAFGTDRERFESADEVARYAGVAPVMERSGQSCWIRWRYFCPKFLRQSFHEYAGESVKHSFWARAYYAEQKAKGKSHQAAVRALAFKWIRIIYRCWQTRTEYNEVKYLENLRKKGSSLLSYAANHPE

SEQ ID NO: 446175 - protein, 354 aa, unidentified
MSVGEMTHRVTVGVDTHKDAHVAVAKDEMGRHLGELVIPASPRGYRDLLTWAKGYGEVASFGVEGTGSYGAGLARHLTSEGQLVIEVNRPNRQTRRRNGKSDPADAEAAARAVLSGEAATRPKAADDVVEMIRVLRIARRSAIKARTQATNEMQAILITAPEDLRQSLRGLSATRLVRTCAKFRVTEASDPLGAARLALRSLARRHEALEAECSSLQAELEQLTTRAASGLKELFGVGTDTAGALLVAAGDNPERLRSEAAFSALCGVSPMEASSGKTKRHRLSRGGNREANKALWTIAMVRIACKHQPTADYMARRTAEGKTKREIIRCLKRYVAREVYAVLVAGESDASAVA

SEQ ID NO: 446176 - protein, 367 aa, unidentified
MLTSIALTYVGLDVHKDTISVALLRPGDTLPDQEQIANRPEEVRRLVQRWGQPDEVRVCYEAGPCGYELQRLHGSLGVDCTVIAPALVPRKPGERIKTDRRDARKLCRLFRAGELTAIRVPPPDEEALRDLLRLREDLGEDILRARHRLSKFLLRHGRTFAGTSWTRAHLRWVREQRFALELLERLRDEHLAAIEMRLLQRDQIERELLRIAAAEPYAPPVRRLSALRGVKELTALTLLVEVGDFRRFGSAREFMGFTGLVPSEDSSGQRRRLGAITKTGNSHLRRVLVEAAWQYQRTPLRNARRRPRLQDQPAQVLAFALAVEQRLHSRYWRMVNRHKLSTVAAVAVARELAGAVWALMRLGPAAS

SEQ ID NO: 446177 - protein, 359 aa, unidentified
MQRKKINFKGQKIFIGIDVHKTTWEVAVLTESGLLKRHPQKASAKVLFDFLRKHYPDGEYHAVYESGFSGFATYYALKEYGIECVITHAADVPTTQYEEVMKSDRIDAEKLARSLRAGEIKRPVYIRDKDNIDDRAVIRIRKTIQKQLSGYKIRVKHLLHCNGVEIPECFSKPSRYWSKSFITWLKQDVKLLSSTRLSLDLLIRQVEVLRGTLLEATRELRKLSQTERYRHRFDLLMTIPGIGQHISMCILTEVWDVSRFPNERTFAHNMGLVPTCHDSGPHKSNGEMTFRGNKYLGTMIIEACWIAIHKDIGLGSYYSRQRQRMNPQKAIVRVARKMSNIIYSVLKNDKAYEPYQWDN

SEQ ID NO: 446178 - protein, 339 aa, unidentified
MRLYAAFDLHSSNSYLGISDEKGKRIFKKKLPNDPVRIKEALRPFKADIEGIVVESTYNWYFLVDLLKEEGYRVHLANVMKTQQYSGLKYSDDKNDAFWLVEMLRLGILPEGYIYPKEERPIRDLLRKRGHLVRLRTSLIVSLQNIIARNLGSRLKSNDVKVLTTDRVMPLFQGNEDLALAGRVSKEAIDFMTRQIKTIEASIGEKIYLSNPYDRLLSIPGVGKILAFTIQLETGSIERFQKVGNYVSYCRKVPSGRFSNDKKKGTGNRKNGNKYLAWAFSEASDHARLFDAESRKYYQRKLKKTNAAIAHNALAHKLSRAAYYIMRDGVLFMSDKAFA

SEQ ID NO: 446179 - protein, 330 aa, unidentified
MNYSHFVGLDVGKKSFDACLVSSDKELSHHTFPNTPGGIEELLHRVKQHGVEVETALFCAENMGSYVIDLCLSSYQFHFPLALECPLTIKRSIGLQRGKNDRIDARRIARYACLHYRKLRLYELPDKDLVRLRNWMVIRDNLVKQKVSSLKLLELTRETSGLADLVTAMTFLEKQLSLVKEKISYVEQEMEKIISSNIALLTNYQLLTSIKGIGPINAIVLLCVTGNFHRFSDPRKFACYCGVAPFEHSSGTSIRGKTKTSNLANREVKVYLTRAAITAISWDPQIKAYYKRKTGEGKHKASVINAVRAKIIARCFAVIKRKTPFVTLRA

SEQ ID NO: 446180 - protein, 401 aa, unidentified
MVSDFKKGRYNLMKIFVGIDIAKLNHFAAAISSDGEILLEPFKFTNDADGFQLLISKLESFDKDSIIIGLESTAHYGDNLVRYLVAEFYQVCVLNPIKTCQMRKNNVRKTKTDKVDTFVIAKTLMIQDDLRFITFFDLDMMDLKALGRFRQKTIKQRTRLKIQLTTYVDQVFPEVQYFFKSGLHQHAVYALLKEAPSPNEIASMHMTHLANLLKVNSHGHFTKEQAKELRVLAQKSVGANDSAISIQITQTIGQIELLDSQLEKIEAEMTDIMRFNDSVIMTIPGIGYINGGMILGEIGDIHRFSNPNKLLAFAGLDPSVYQSGNFQAKTTRMSKRGSRVLRYALINAAWNVVRNNATFEAYYNAKRAEGRSHYNALGHCAGKLVRVIWKMLTDEVEFNLE

SEQ ID NO: 446181 - protein, 326 aa, unidentified
MEHELHYIGIDTAKEKLDVDVLRPDGRHRTKKFANTTKGHDELVSWLKGHKIDHAHICIEATGTYMEPVAECLYDAGYIVSVINPALGKAFAQSEGLRNKTDTVDARMLAEFCRQKRPAAWEAPHPLERALRALVVRHQALTDMHTQELNRTETAREVQRPSIDAHLLWLEAELKRLEKQIKDLTDDDPDMKHRRKLLESIPGIGEKTSAVLLAYIGLKDRFAHARQFAAFAGLTPRRYESGSSVRGASRMSKAGHVSLRRALYMPAMVATSKTEWGRAFRDRLAANGKKGKVILGAMMRKLAQVAYGVLKSGVPFDASRHNPVAV

SEQ ID NO: 446182 - protein, 396 aa, unidentified
MEERPLNNAWVGVDVGKEFHWAHVLDTSGRMLLSCRVENDEADLLALIEEVFSLAEEVLWATDQPGGSAALLLALLWEKGQKVIYVPGLTVERSRDAYRGESKTDAKDAHIIADQARMRRDLGELLPGEEALAELQLLLARRRDLVADRSRAITRLREALLALFPALERNLDLNNRGALILVAHYQTPAQIRRAGRKRLAAYLRNRGVQGADALAQKALSAAKAQSLTLPAEGVAVRIVAELATEVLSFKEKISALDGELQQRFFARPEARILSSLPGMGPILGAEFLVSAGDLRAFGSADQLAAYAGLVPAARDSGKRTGNDRRMRGGNKVLKRVFYQSAFASLRSAPESRAFYDRKRAEGKRHTQALIALARRRVNVLWAMLRDGTTFETRSAA

SEQ ID NO: 446183 - protein, 469 aa, unidentified
MPDLFIGCDVSKGHADFVVLDEHRQVVEESFRFDDTKRGHTALEQFLEKLVRKYPESVLHIGFESTGCYENNWLRKAQELSVKFPLKSARINPCGIKKFKEAELTRCSTDAVSAVAIASYMQTHPDKVMYDQDDPFYTARRQWKCISLLKKMSVQLQNSLQMQLYTANPGLLLYCKHGMPRWMVPLLSKYPTAKELERARLESVMKCARLTEAKARGIINAVKASVCSTTDETTAINIKHLLIQITSVEESIGVLEAELSKRWADHPLVKLVNTINGIGVFSALGLLINIKDIGLFPSVSNLVSYFGVHPSYRQSGDGSYGFHMSKKGRVEPRIILFMCTLSAIVHNPVIKECYARCLKKKMPKMSAIGVCMHKLLRIVYGVLKNQTAFDPEIDRRNREKGRIVSAIDPEVQRQKKICRYQPMDEFAPVSARQAKKRKGNGSQSNVITENGITTPFEEKNSEKMVLVQN

SEQ ID NO: 446184 - protein, 309 aa, unidentified
MLSSVGIDTAKATLEICIKPQKIRFEVANNSAGFEALLERLKDFNISRVLIEATGGYEKDVLIALASAGLETICINPARARKFADAMGKKAKTDKIDAEVLADFAAHLSAPQGQPVSPEREELRELVKQRAQFVQSRDDYKRRRLQCRSAMAMAHFDEHIEHLKVLIKRLDEEIDQAMVQLDDTRARQLLAVTGIGRVTAANLLASLPELGQLDRRQIAALVGVAPYNNDSGSHRGHRQIWGGRAHVRRVLYMSSWIIIRHNTEFKARYEALRARGKCAKVALVACIRVLIVRLNAMLRDNTPWREQTA

SEQ ID NO: 446185 - protein, 380 aa, unidentified
MKKNIKTSKSKRQQLCHASQVAQPVLPASLGWTVGIDLGDKESHYCILNQGGDTISRGKVATTKSGLRSVFAGMPQSRLALEVGTHSPWASRYLSQMGHEVIVANPRQVKLIGRGGRKNDRIDAERLARLARMDVKLLYPIQHRGEQAQADLLVIRARAGLMKARTMLASKARGLVKSLGERLKPCDVDQMNGEMAAGLSAEAAWAVQGLLSSVAELSRQIEGYDREIEQIEKRYPEVELLKQVYGVGVLVGLTFILTLEDPHRFRHSRDVGPLLGLVPQQHDSGEHQPELRITKAGDGLLRSLLVQGAHCIIRKGAPESDLQRWAAEHQGKSGKGRKKKVVVAVARKLAVLLHHLWVSGEVYDPHYNQKLKERRQKTAA

SEQ ID NO: 446186 - protein, 412 aa, unidentified
MEVVYPCCGGLDVHKKSITACVLWAEAKGKSRKEKKRFGTFTHDLLQLADWLAQCGVTHVAMESTGVYWKPVWNILAERFEVLLVNAQHIKAVPGRKTDQKDSEWIADLLQHGLLRGSFVPPQPTRELRDLTRYRVSLVQEINRIANRIQKVLEDANIKLASVATDALGASGRAILEAMLAGEQDAGRLAELSKGLLRNKIPELKLALEGRMTEHHRFLLRQLFEHLRFTESKRSDIEQEIDKRMLPFEDKVTRLCTIPGVDQVTAWGMLAEIGLNMDQFPSAAHLASWACLCPGSFESAGKRLSGKMRKGNVSLRRCLSQAAWAISMMKNNYLSALYRRIAARRGAKRANMAVAHAVLAIAYHMLKRKEDYRELGADHFDRIDVNRIRRSLVNRLERLGHKVTLEPLAQTA

SEQ ID NO: 446187 - protein, 377 aa, unidentified
MQNKVRFLGLDVHADTIAVAIAEPNGEVRSLGTIANRAESMRKMVNKLGMVDQLRACYEAGPTGYVLYWQLAELGVNCEVIAPTLVPVKAGDRVKTDRRDAERLARSHRSGDLTAVWVPDAGSEALRDLVRAREAAKQDQLRARHRLSKFLLRSGHRPAQAMKAWTQPYMAWVKQIRFPQAAQESTRLDYLTEVEHMGERVVRLEKAITEAVKLASPELQEVVRDLQALRGIAQISAVTIAAELGNITRFESARQLMGYSGAVPSENSSGKRMQRGSITKTGNAHLRRIAVEAAWSYRLRPCVGPALRKRQEGVPEEIKEIAWKAQHRLHKRYMRLSAAGKDQRKIITAVGRELLGFIWFIGTRAEAAVAARQQMAA

SEQ ID NO: 446188 - protein, 387 aa, unidentified
MFICGIDVAKRSHCAVVLDDKGQIVQGAFSIDNDRRGFAALHHALSAWSESVLVGLEATGHYWLALYESLTAAGYPVVVLNPLQIAAYRRSGVRKVKQDTTDAFWIADFVRIANLAPTRRDTPLLLQLRELTRFRSRLVEQIGDCKRKILSILDRVFPEYETLFSNVFIKSSRELLKEAVTADEIAQFDVSELANLLQKASRGRFGSAKAQAIQHAALQSVGIGFLTDAVGVEMRCLLEQIDLLDAQVGQIEEALATLMEQIPQYITSIPGVGLVTGATILAEIGDIQRFSSVEKLVAYAGIDPSVYQTGQFQASQAHMSKRGSPYLRHALWQAATVAIRHDPDLRAYYQARRAQGKPHGVIMGAICRKLLARIFVILKEQRPYQIR

SEQ ID NO: 446189 - protein, 360 aa, unidentified
MTGTMTWAAMDVHARSTYAASLDVVTGELSRQRFDAGAVEPVVGWLAGLPGPVRCCYEAGPTGFGLYRAAVAAGIDCQVIAPSKTPRPSGDRNKSDRRDTDLLLRQLMAGGLTAVVVPSATCEAARDLARAREQVRVDLMRCRHRLSKLLLRHGRVWDRSTWTKVHREWLSAQTFEQVNTELAFIDNLAACDGLTARKDALDERLSHVATDPEFWPLVRRLRAFRGIDTLSALIITLEVCDFARFSRAVQLGSWLGLVPSREQSGESDHHGSITKTGSKYARRILVEAAWHYARPPRIGRTLYERQEGLPDHVLQIARRAQSRLYRIHRRMRERNKPGNVIVVACARELACFLWAAATAP

SEQ ID NO: 446190 - protein, 501 aa, unidentified
MISESVRYVGLDVHKRVVEVCIVDAKGNVVQRERFALNRRTLTLFATKILQPTDHVALEATTNCWAVADALRPHVARVLVSNPMATKAIAQAKIKTDKVDAHVLAQLLRCDFLPEVWQPDEATRRLRELTGRRSALVGQRTAMRNRIHSVLAMRLIEAPLRLFNAEGIEWLKTLEIDSQGRLLIDSDLRQLEFLQKEIDSLDLELARRGHQSDAVKLLMTLPGVDVATAEAMMAAWGDPTRFPDGDHAASYLGLVPSTKQSANHCYHGPITKRGNSHARWMLIEAAQHLDKHPGPLGHFFRRLMKKKTRNVAVVAGARKLAWIGWMMLVTNEPYRYAIPRSTETKLSRLRVKATGQRRRSGPKKGEKAVAKLPGGSRTIKPLAEICQSEGLPAPRPLSPGERRTAADAGCEEFVAQIAATQVLPRRSGGKSRADGNHTQNAPQADNTKTNLASRPKASCQGFRRHRADEQGRSLPPPAPPASLFSALPETTPAVSKSPQTK

SEQ ID NO: 446191 - protein, 393 aa, unidentified
MSTSVGIDIAKDLHWVCAIDASGTVLLDRKLANTPDDLLRLVEELKGLPAPVRVGLDVLGGIASLAQAVLLEAGFELVHVSGLSVNRAREGTVGGESKSDPRDARVIADQVRTRRDLRRVDAHSVLDVELRLLVSRRHDLTVDQTRRLSRLHDLLASIFPELERSIDLTGKTALVLLSTYVTPAELTQMSDARLRRLFSSQANRTYVTELVATARACAQRQPMSLPGEALSARLIKELAREALATRERLAALDTEIEQRLARHPDAALIRSLPGMGAVLTAELIAQAGPITRFKSSDALAAAAGLAPVLRQSGKVRFLRRPSGGNKGLKRVFYQSAFSSLAHPESKAFYARKRQEGKRHHQAVIALARRRVNVLWAMLQNRQPFSPDPSSKRG

SEQ ID NO: 446192 - protein, 350 aa, unidentified
MGLYCRIDLHSNNHMLMVIDDADRRVYERRLPNDLAITKAALEPYRADLVAVAVESTFNWYWLVDGLMQAGYAVRLVNTAAVRQYEGLKHSDDEHDAFWLAHLMRLGILPTGYIYPKSERGLRDLARQRMRLVQHRSSLITSVQNQVWRSTAVRLRSETIKGQGKHPWPQISDPDLALSVKAGRAAIDTLTAQIERLEKLILKRVGPSTQFRMLKTVSGIGPILAMTIALEVGEIGRFAGVGEFASYCRCVDSKRLSNGKKKGEANRKCGNRYLAWAFMEAAHFAIRNLPAAKRFYEPTKMVFLVISLRAVCGHARTSADAVKCKYQIAKDVLSPYDAHNPSPFRALQLD

SEQ ID NO: 446193 - protein, 415 aa, unidentified
MWFAGIDWADEHHDVAIVDEAGQQHGTLRVAHSAAGVEALVTFLRGYSQRTAHADALPAPAPDPEQVACIIETTHGLLITALLEAGFPVYPVNPKTLAHWRKPAGAKTDRIDAYLLARKGRSDLGELRRLEPDSPLVQELKLLTRDQDALVQTQTRLVNQLTACLKAYFPSALTLFGKLHQGATLAFLQRYPTLEQAEAASVEELTAFLRAQPRFPSPAAAAQRIHGCVHQSHLRADPVTTRVKARLTQALVAQLVPVVEQIAAYDAEIERLFRRHPDAALFVSLPGAGKRLAPRLLVGWGDDRGRYTSAQSMQGLAGTAPVAFQSGKYSKAHKRYACIKPLRNALYQFAWQSTREAWALAYYQRKRQEGKSHSVALRALANQWVRLIHAIWHTQRPYDEAVFRAAQQAHALPAA

SEQ ID NO: 446194 - protein, 428 aa, unidentified
MAGVMIGIDPHKGSHTAVALDAREKRLGQLRVRASRRQVEGLLEWAGHWPRRTWAIEGARGLGQLLSQQLIAAGERVLDVPPKLAARVRLLNTGQINKNDDNDARSVAVAALRARELPELAAEDHTMVMRVWARRYHDLGRLRTQAVCRLHTVLCELVPGGVRRQLRTSQAVELVDRIVADSPIARAKLELARELIADLQRIDTQRREAKRHTARAVDASGTSITSIYGVGPIVAGTVLGYVRDVRRFPTRDRFASYNGTAPIEVSSGDRRIYRLSRRGNRQLNHAIHLAAVTQIRHRGSEGRTYYERKIAKGMGGRAALRALKRKISDTLYEHMIDDVHARDKRIGKDPGGQSGNDAISSVAGSHPDRPALRTSHSRAKANSRTATTGGVLRSGPAPDRRRTSRSAAGVQVEPRPGPRRRGHGQDRP

SEQ ID NO: 446195 - protein, 395 aa, unidentified
MFIVGIDVAKRSHEVCMITSDGQTVQRPFSIRNNCTGYNLMLEKIRKHTNIKSQIVFAMESTAHYWLALFTRLRKDGYHVILLNPIQTSAMRDMFIRKIKTDAKDSFIIAELIRFGRYAESNVAQDRLLALKELCRNRFYLVDMAGDLKRKLIALIDRVFPEYEAQFDTIFCKSSVAVLKKYPTPQKLSNAHLDKLTELLWNNSNGHFGEWKARELKELARNSFGVEDCDGAYSTLILLMLDQIQSLSGKADALEKEISRLFQSFDTTVTTIPGVGPIIGAVILSEVGDISRFSSADKLAAYIGVDPSVNQSGEFQAAHAHMSKRGSPYLRRCIWMASQVAVQRDPMFRAYYEKKAAEGLKYMTIIGHVTRKMTAVVFAILRDHKVYEPVLPTAA

SEQ ID NO: 446196 - protein, 343 aa, unidentified
MRLFVGLDVSLEKTAICVISEHGKIVRESQAASEPEVLIRWMGDLDGTIAVIGLEAGPLSQWLYRGLTQAGLDVVLMETRQVKGALKAMPIKTDRRDAEGIARLLHLGWFRPVHCKSVSAQEVRAVLNARKAVQQGFIALEMSLRGLLRNFGLKVGSISRGRFEQRIRELAAGNPMLEAATEPMLRARLSLRQELAGLERRVRQLAQEDPACRRMMSMPGVAAVVALTYRSAVDDPGRFTSSKKVGPWVGLTPSRNQSGERDVSGGITKAGDVNLRRALCQAATVMMHRGRSTWLRTWAAQVARRRGSKRAMVALARRIGVILHRMWVEGTDFRSDGPAPKVA

SEQ ID NO: 446197 - protein, 418 aa, unidentified
MKSNKTEKIKTINEKTLIVALDIGKNVHYGYFRTPKNKDIKPFPIYNTGRSFKKFWGKLCRFKEEHMLDEVVIGFESTGPYAEPIANYLRKKPVNLVQVNPMHTKRVKDLTGNSPNKTDKKDPRVIADVISLGHSLTVVIPEGAAAQLRRLTHARERSIERRTAMNNQLQQLVFVIFPELVSIIKPSTKTGMYLIKNFPDPERIASIGIESLSDIIRQVSRGRFGIDRAEALYNAAKQSVGITEGKESVILETSHLVSNIENENRYIKSLEEQIIEHLEQIPYSHSILSVKGIGHVTTAGLIGEVGDFNKFNTISEITKLAGLDLFEISSGKHTGQRRISKRGRPMMRKLLFFAAINMVKSNGIMHAKYKQMLDRGMLKMKALIAISRKVLGLIFAIVRNSTMYIENYTKQNHYKLAA

SEQ ID NO: 446198 - protein, 358 aa, unidentified
MRSPDSTVSFEGEKIYAGIDVHKTNWKVSIIGEHLTHKTFSQDPEPDTLHKYLTTHFPGAEYYSAYEAGFSGFWAHDRLLALGIHSIVVNPSDIPTTDKEKRQKEDKRDSRKIARSLRNGELTPIRIPSQQNREDRSLLRVRKSILKDLQRNKNRIKSLLFFYGIQFPERFQSSTSHWSNAFIDWLENLSFKGHSGKYSLQLLINTSKYQRNQLLEATRKIRELSRSTYYNEDMVLLCSVPGIGLLTAMTWLTELESMDKYANLDQLCSYIGMVPSTHSSADKERVGGITPRGKKQLRSLLIESAWVAARKDPALMKKYNQLCKRMNPNKAIVRIAKRLISRMRYVLTNRTEYKILTQ

SEQ ID NO: 446199 - protein, 412 aa, unidentified
MTYKVAGIDIHKKVLMVVVTDAAAEEEGEWESRRFGTVASEREHLVAWLQERGVQEIVMESTAQYWKPIWLDLEPHFHPLHLAQAHSNRAPKGRKRDFADAQRLTRRLLAGELILSFVPDAEQRGWRTITRAKVQLVHDRVRLQNQLEALLEETRVKLSSVVSELLGLSGRRILQAMAEGESDPAELAKLGDFRLHCSQEELADALRGQWQPLHRQMLQLFLERLGLLDRQIQQLDRMAAETMQPYEEAVIRLAEVPGLGPDSAQQIIAEVGAQAKSFPSAGEFASWAGLCPGSDESAEHNYSSRSPKGNPFLRRVLTQAAQAAVKTKRSHFQVVFRRWLPRLGYQAAIWAIAHKLGRLVWKILHDGVHYKERGERSHPTVQRRRARRMVQALRNMGYKVEISSLNPQPAQG

SEQ ID NO: 446200 - protein, 351 aa, unidentified
MPRATSSTNVIATIGIDIGKNTFHVIGLDDKGAIILRHKLSRGQVYARFANIPPCLIGMEACVGAHHLGRELSALGHHTRLMPARYVRPYSKGQKNDFRDAEAIAEAVQRPTMKFVAIKTVEQLDLQGLHRIRERLVCQRTSVINQIRAFLLERGIAVRQGLRTLRTEMPIALAKTDKLSPRMIHMIEDLCTDWRHLDKRIETVSKEIETLSEQDDGAKRLMTVPGIGPIISTATVAAIGTGEVFSKGRDFGAWLGLVPKQMSTGGRTILGPISKRGNRYLRMLFVQAARAVLLRPQSWQKHGLKLWIEAAARRLNRFKLAIALANKIARIAWGVLHGGRNFEVRPMNQVA

SEQ ID NO: 446201 - protein, 357 aa, unidentified
MLSSNVKYIGLDVHKEAIAVAVLNGAGKLVAESIVETKASTLLDFLHGQRGELHVTLEEGTWAAWLYDLLKPHVGEVVVCNPRRNALLKEGSNSDKVDARKLAELVRSGMLRAVYHGENGLRALRELARTYQVVSKDLKRVMNRLKALYRSWGIPCTGTRVYSQRHREQWLKKIGEAGVRRRAELFYQQLDALQALRHTVRGELLAESRKHQAVKILRQIPSIGPLRAAQLVAVMQTPHRFRSKRQLWTYSGLAVETHDSSQYRFVDGQLQRSKKPQQVRGLNQNHNHAMKEIFKSAALSATRRAGPFQDFYEGLLAKGMKPELACLTLARKIAATTLTLWKKGECFDARYVKPQAA

SEQ ID NO: 446202 - protein, 353 aa, unidentified
MIIGCDFHTRYQQIAMAREETAEVIVERRLDHESGEAQAFYRSLQNLQEPVRVGIEATGPIHWFERLLTELGHELWIGDSAKIRASEVRKQKTDERDARLILDLLLAKRFPKIWVPTPAERDLRQLLWHRHKLVCLRTMLTNQLHFLAMSQGLCRKQKLFTKKGRAELGSLALGPWASRRREELLKLLGQLDPPIAELDRAVLEEARRREDAILLMTHPGIGPVTSLAFVLAIGPVTRFHRSKKIASYLGLNPSEESSGGKRRLGAISKQGNTMVRWLLIEAANPAVRLDPALRQDYQRLKFRRGHAVAKVAIARKLAVRMYWMLRSGANYAQLVRRQGSPGATLVDASPSLG

SEQ ID NO: 446203 - protein, 402 aa, unidentified
MNSVGIDVSKGKSMIAVMRPFGEVVCSPFEVPHTSSELSALAKQLKSLDGETRVVMEATGNYHLPIAMVLHEAGIYVSVVNAMLVHDYGNNTLRRAKTDKKDAIKLANYGLDRWLSLPKFTPEDEIRMLLKTCYRQYQQYSKVQTMLRNNLISLLDTVFPGVNRLFSSPVRADGSEKWVDFVETFWHCECVSGLSQKAFEKKYQKWCQKHGYHFREAKALEIYTSACGTVGVMPKAETTHLLISQAVSQLIATSTSLAELKKEMLRLAESLPEYPIVQRMYGTGPTLGPQLMAEIGDVRRFHSKKALVAFAGIDAPPNDSGQIVGNHKAMSKIGSSALRRTLFLVMGVYLQNAPVNEPVYQFMDRKRAEGKPYRVYMMASANKFLRIYYATVKAYLDSLEAT

SEQ ID NO: 446204 - protein, 406 aa, unidentified
MRVVQERCAGLDVHKSSVVACAMLPEGKQVRSFGTMTWQLEQLAQWLQGLAVAVVAMESSGVYWKPVFNILEAAGFELLVVNARHIKAVPGRKTDVKDAEWIADLLRHGLLKPSFIPNRAERELRELTRYRRTLIEERAHEVQRLQKVLEGANIKLEDVISNVVGLNGRRFLSALIEGDYDPEAVAATANYGLQRKRELLAQALRGTLGAHQRFLLDQLLSHIDFLEQRIASLDQEVQSRTRPFEPLIARLDQIPGLGTRAAEEILAEIGTDMSRFPSHRHLASWAKVCPGNNRSAGRQRSGYAGMGNRWLRSILVECAWCASRKKDSYFKAQYHRLAARRGKKRALLAVSHALLTVIFHLLRDGVVYQDLGGNYFDQRDRSQIARQAVRRLERLGFHVSLTEGAA

SEQ ID NO: 446205 - protein, 345 aa, unidentified
MEHVAIDLGRPNSVMSEYGKDGRKVRRTFRLNRPSLDRWFKDRPCCRVLIESCTESEWVALHLESLGNEVIVADPNYAAMYGERNRRVKTDGRDADALLEANRLGVYHRAHRRSPEQRNVIGVLGTRDSLVRSRTRVINLTRALLRREGYRVRSGAANSFWLRVAELDPPSELRDLVRPLLEMMEPLNDQLTTLDRQLSDLSSQDLRIRLLQTAPMIGSVTSAAFVALIDDVARFPTAHRVESYLGLVPSEWSSSERRLRMGITKRGDSRVRWLLVEACWSILRSRRLDCRELRRWAEGIATRRGRKIAVVALARRLAGILYAMLRDNKPYDPTRIGTHTRRKAA

SEQ ID NO: 446206 - protein, 314 aa, unidentified
MKKAVEIFVGIDVSKTWLDVGVHEQKDTTRFSNDEAGIIRLVKKLKKLKPKLIVLEPTGGFEMLVVAELSQASLPVAVVNGKRVRDFAKATGQIAKTDKLDARVLAHFAAAIRPEVRSLRSEEEEQLTALLTRRRQILDMLTVEKNRLVSVRAKMRPDLEAHIHWLSNHLKELDQEIEEFVKGSPLWTQKDALLQSVPGVGPVTSATMLGMLPELGCLNRQEIAALVGVAPMNKDTGNKQGKRSIFGGRADVRSVLYMAALSAKKHNPFIRKFYQRLIQHGKEKKVALTACMRKLLVILNAMVRTNQPWRSQTA

SEQ ID NO: 446207 - protein, 352 aa, unidentified
MNKKIVKQVAGIDVAQKELVVCIGRMYDDLTLELYSHKTFPNHEKGFMAFVLWVKKLAVEEVPVRFVMEATGVYHESLAYFLEGKGYEASIVLPNKISNYSRTLEVKTVTDKTASEAITRFGLERKLDPWKRPKKLFKNLRQLTRERDQVVQMRTMAKNQLHAEQAEAEPHPGSVTRIKEQVVFLNKQEAEIKKELLALSRQDTQVQESIKLLCTITGVGSLTATTVLAETNGFELIRNKRQLTSYAGLDVKEKQSGTSVKGKAHISKRGNRYLRKAMHLPALTAIRHDDRFKAIFARLVSKHGIKMKAVVAVQRKLLEMMYIVYKTNTPYDKKYLQRNDENQQQTISGLKN

SEQ ID NO: 446208 - protein, 404 aa, unidentified
MKGPIVSIDVSKGKSDYQAFKEMNVKYTGSRSIKHTKEGFDEIVSLVREMEKKLETEVCVVYEATGVYHRVLKKVLEDNNIKQFIINPLLSAKTRKNDSLRSPKTDKLDPKSIAKTYYSHSLHNSHKPETIYHELRELSRYYEDILVHLRKDKVAFRAQLDVVFPGYDTLYDDLYGPVALAVIEKYPHPEMLQKKKINTVSKVIQSKTCHRQAMSDTMADKAIEYSKTIYSGCDKDDIEVLILQRFIKKLKEDMAEAERTIGEMIKLAQELPDFSIIKSIPGIGDNLAARIIAELGDMTRFKKKNELVAFAGLDPRISESGQNDGDHMHITKKGNKRLRCLLYLVVTCSIRLKRDDNSIKDFYIKKKQQSNPMCSKAAKTACASKLVRIIYSMCKTGELYQYNK

SEQ ID NO: 446209 - protein, 299 aa, unidentified
MSSSNVHIYGIDLGKNWFHIVAMDRQGHILWRKKLNRNQLKTFVINTPPAIVAVEACPGSQYWGRLFNDAGFSVKIIPAQFVKPYLKSNKNDFNDAAAIAEAGSRGTMRCVSLKTNEQLALQATHRVRQRFIVERTATVNQMRALLLEYGITVPVGRKVFERNLPSILEDAENGLPDFIRALVFRLRERWQHLDVQIDEMSVQLQQASIALEKCQLISSVPGIGPIVATGLIAAVGSGTQFKRGRDMSAWLGLVPRQYTTGGKSNLGGISKRGNVYLRRQVIPGAKALKIHMNPHSGGG

SEQ ID NO: 446210 - protein, 423 aa, unidentified
MEVMYERAAGLDVHKATIVGCVRIGTGRKVTRECRTFETTTDGLLALSAWLVECRCSHVAMEATGVYWMPVWKILGEGDFVLVVANASHIKNVPGRKSDMNDAMWIADLLACGLIKSSFVPEEDVQELRSLLRTRKQLGREQTRHVQRIQKTLAEANIQLDSVLSDIMGASGRRVIEAMIEGIRNPRQLAALASARIKATPKQLYDALHGRLTDHHRFLLKLHLRQWDGLDATIREIDLEVEARIARMDKEVKAGEAPFCDLIELLCTIPGVSTLSARTILSEIGRDMSRFQTAGHLVSWAGLCPGQNESAGKRKSARLRKGAPWLKTMLVQCAWAAKRKKDSYYRAQFFRLQSRRGPQKAICAVAASILTAIYHILRDGTEHQDLGADHFNHRSAEGQTRRLVAQLAKLGFDVQLQPTAEAA

SEQ ID NO: 446211 - protein, 403 aa, unidentified
MNMNAVGIDVSKGKSMIAILRPYGEIVSSPFEIKHTSSNIQSLIAQIRSIDGESRIVMEHTGRYYEPLARELSLAGLFVTAVNPKLIKDFGAHSLRKVKSDKADAVKIARYTLDSWTELKQYSLMDELRNQLKTMNRQFGFYMKHKTAMKNNLIGILDQTYPGVNTYFDSPAREDGSQKWVDFATTYWHVDYVRKFSLNAFVDHYQKWCKRRKYNFSKDKAEEIYGAAKELVPILPKDDLTKLIVKQSIEQLNTASKTVEELRTLMNDTAAKLPEYPVVMGMKGVGPSLGPQLMAEIGDVTRFTHKGAITAFAGVDPGVNESGTYEQKSVPTSKRGSSSLRKTLFQVMDCLIKTKPQDDPVYAFIDKKRAQGKPYYVYMTAGANKFLRIYYGRVKEYLMSLPE

SEQ ID NO: 446212 - protein, 344 aa, unidentified
MIIVGCDFHPSWQQVSFFDNETGEVSERKLVNGDGEAERFYRSLPTPALVGIEACGNSQWLIDLLRQLGHDVWVGDAAQIRASYVRKQKTDRRDAAHILKLLMEDRFPRLWTPSAEQRDLRQLLIHRHKLVEIRTRVKNGLQHLMLNRGVQKKRKLWSAAGQQALRELPLDGWAARRRLDLLELLKSLDEQIGKLDQAAQQAAEKHEQARLLMTQPGVGPITSLAFAVTIGDATRFKRGKQVASYLGLIPREYSSGGKQHLGSISKQGNRFLRMLLVEAAQHVTRLDEGFRKQYKQRCHRMEKGVAKVAAARRLAVRLFWMLRTKTAYPEIVRIESSSLVPLVD

SEQ ID NO: 446213 - protein, 424 aa, unidentified
MLGVGIDWAETFHVVALGRPGDGVVQVLRVEHTKPALEALLEQLRALEPDPAEVRVVLETRHGLLVERLVEAGFVVVPVNPDLIARRRGPAKKKDDVEDARIACLLALDRFQPLRPLIPHGELAAELRLLGRDDERACQDERRLLNRLRADLLAVFPAAVQIAGPDMGAPTFLRMLQRWPTATALAATSRQELVAFARAAHSGYPERFADRVGQALGREHFTARQTLAQAKVDTIQLMVTQLLLIGAQRRTWERRMGQLLLGAPRHRGGALPSQAERDRSQAVPGGELYLSFPGLGDRLAARIAGEIGDHPEQFQTPNSLQCYGGQAPVTRRSGKRELRITRRLACNRHLADAVHQWALASLRRSAWAKDSDDRQRDRGKDHHAALRALGNRWLEILWHCLQRQVPDDEAVHLANRTRALHPAA

SEQ ID NO: 446214 - protein, 392 aa, unidentified
MVVSVGIDVSKDKHDCFIVSSEGEVLADAFIIPNTIDGFHYLLQRIRHCTAPQDKIKVGLEATGHYSYNLLGFLLDNGLTTYVLNPLRTNLYRKSLSLRKTKTDRVDARTIASMLLSDAGLKPYTDTAYHNEELKSLTRYRFDKVKERAKLKSSIARLVCILFPELEKLVPSLHIASVYALLEAFPGAKQVANTHLTRLKALLETASNGHYKRDMALKIRNAAKNSIGSQMPAKSLELQHTIRLIRELDREIDEIEEQIKSIMDELHSPITTIPGLGFRMAAMILAEVGDFTRFDSPDKLLAYAGMSPSTYQSGQLKNCYPHMEKRGSRYLRYALYNATKYVCHWDPAFADYLAKKRAEGKHYNIAISHAAKKLVRLIFAMEKSRQPYRSAA

SEQ ID NO: 446215 - protein, 482 aa, unidentified
MKKRNIYQNQSQELLYLFENAGSNDKVMCVPMDYAKKDHLVMFCNGHGDILRKPFSVKNTPEGLSYIEDQVIRSCTKRGIKKEHVFFGGEDANSFAKNFVSTLRSKGFLVANLNAHDAKKQRESVQASTDRIDLMGIASMLLNCRGNCCPAQSGIYRNLRLLVRHRRKLVQMLTEVKNRVHGIVDELFPGFLKEQNTGIVAFTESSLYLMEDRFSPKQICRRKRKKLIEILNRFGTSHAEQTAAKLQQYAAKVLHAPVEYVGTMQLSLSQHVKHIRCLKESIAQMEKEIASNLAQTQGAFLTSVRGIGLVLAAGVTAEIGAPNDQKPLNNLSSYAGIVPRVKQTGGIEGKTYTGPVARRCNRILKDYVVQSAHHLGWHGPKDLMNDYKRRDASGQHANFGMGRRYLRMAMCLMRTSQVYLPSALRKEGYTLEEKAGYYMMNWPYLRGKWKKVDALEEAFAINRPLGMWRQIVQELYGIKLKL

SEQ ID NO: 446216 - protein, 364 aa, unidentified
MTHSNAAATTFTTVQVPTTVGLDLSDRVSHFHVMRGDGHTLATGKVSTQRGDLSQLFERWKGCRLVIEAGGHSPWISRLGGACGLEVVVANPRQVELISKSDHKTDRSDAEKLARLGRNDVELLAPITHRSPQAQAHLAVRDARNAAVSARTSLINFVRGKLKSNGHRAASCSPECFHQRALLAIPPELELALRPMLQLIQQTNRQIKAFDQAIQRLCDEHYPVTQLLQQVPGVGPIVSLSFVLTVDEPKRFRGREVGAYLGLVPRKKSSGQSDPQMHITKAGDREMRRLLVLAANYILGRFGPDCDLRRFGLKLAAAGGPASKKRARVAVARKLAVLLHRLWSNGEEYDRLYLAKKRGELAAT

SEQ ID NO: 446217 - protein, 391 aa, unidentified
MFLIGIDIAKLNHVASCIDSSTNEVVFSNFKFKNDFKGFSAFFNKIKSFDAKNLIIGLESTSHYGENLINFLFIHDFKVALINPLQTSHLRKANIRDAKNDNLDSLNIAKSLIFTKLNFVSKKNIECFSLKKLTRFRSNLIKQRSKAKIQLTSLLDLLFPELQYLFKSKIHSKAIYSLLKKYPSAEEIAALKDDEISNLLYASSKGHFKKEKSIELKSLAKTTVGIKDTSISLHLIQLIELIELYTKQIKDIEIKITDIVNNLDTTLLSVPGISVIACAIILGETNNFENFSSSKKLLAFAGLDPKIRQSGNFNASSCRMSKKGSPYLRYALIFTAWNIVRHSEKFNKYYSLKRSQGKSHYSALGHVAHKLVRILFTLIKKNISYQEERLE

SEQ ID NO: 446218 - protein, 312 aa, unidentified
MDAIVVGIDVSKDRLDVAVRPSGELFVVGRDAQGLQSLIERLARLSPAIIAVEATGGFETVVAASLAAASLAVAVVNPAQVRAFAQALGRRAKTDPIDAAVIAHFAEATRPQVRALPDAETQLLADLVARRRQIVAMIVAERQRQKRLTEKRLQKSIARLLAALQKELSSLEQDIDDAVRGSPAWRDKEDLLASVPGIGKTIARTMLAELPELGSLDRRKIAALAGLAPWTRQSGQWKGKSFIGGGRAPVRSALFLGAMVAARHNPDLKAFRDRLVKAGKPKLVALVATARKLLTILNAIVRDQQPWRPKTA

SEQ ID NO: 446219 - protein, 424 aa, unidentified
MKVTYQTCCGIDVHKSFLVATIVKTTGGIEPSYQKKRFSTFNNSILEFKQWLLDNDCHDVCMESTGKYWVPVFNLLEDEINVVIANPKWVKAVKGNKDDTKDSKWIGDLFRLGLVKGSYIPCKIVRILREYTRYRYKLVSCRSSEKNRYQNALTVCNVALDSVVSDIFGKSSMSIIDYLLEQSGTSINHEEIASKFLRSLKSKEDAVIESVEGYQMTDAQKYRVRLVRTHMDYITAEINDVDKMIENMISSNPDFENAVQFLCTIPGVKRDSAITIISEIGTDMSQFSSSKRLCCWAGLTPGSNESAGKKKSVRITRAGVYLKPALVQCAHAAVKSDKSPYYKKKYESLVKRRGKKRAIIAIARMILTAIYQMLSTGEQWNPSDLYKIDMPVALVEKQKAKAIKQAKKLLQREGILPPDEPLAS

SEQ ID NO: 446220 - protein, 316 aa, unidentified
MKTEPVYVGIDVAKASLEVAVHQSADRWTVEYTDPAVAPLVARLAALTPSLIVLEATGGLEVPLVGVLAAGGLPVVVVNPRQVRDFAKATGRLAKTDTLDAAVLAHFAAAVRPPVRPLPDAATQGLAALVTRRRQLVDMLTAERNRLSCAPKVLHKELQAHIRWLERRITGVDADLDQAVRTSPVWRAQEDLLRSAPGVGPVVARTLLAQLPELGTLSHKTTAALVGVAPLNRDSGRFRGRRQVWGGRAAVRAVLYMGTLAAVRCNPVLRAFYLRLRAAGKLPKVALTACMHKLLTILNAMMKHQQRWDPNYAPTT

SEQ ID NO: 446221 - protein, 438 aa, unidentified
MSNKVIFNLDDLFISVGIDVGADFSWMSIALPNQQFVGKPYKILHSSIDSLTTAVSKIKEAEELYSLESRIFLESTGIYHYPLFCYLRDKGFNCSVINPIITKNSTNINIRKVHNDRFDSKKAALVGLKPDLKVSLMPSDLALNCRNLCREYYDLMDNRSAYVNKLQGELRMAFPQYLGIFSKVTINTSLTLLETYTSPSAFLEADKQEIIDIIKSTARFGLTYAQNKYNAIIQAATDANQFGYIIDSNIKRIRLYISFIRKYDEEINNILESLHELVDANEDADFVKQIHLIETFKGAGFLSAVSIMGEIGDFSAFSKPKQLFAYFGLDPAVKQSGKFEGTKVQMSKRGSAIARRVIHTLTLQSISISRNGEAKNPVLREYYLKKCDSKPKLVAMGAVSHKVCNMIFAILRDNKPFEIITPQEHIKQYNASKCDMAA

SEQ ID NO: 446222 - protein, 392 aa, unidentified
MVVSVGIDVSKDKHDCFILNSEGEILSDVFTIPNSLDGFTILLQRIRDCSSSQDNIKVGLEATGHYSYNILGFLLDNGLPTYVLNPLRTNLYRKSLSLRKTKTDRVDARTIAAMLLSDAGLKPYTDTVYHNEELKSLTRYRFDKVKERAKLKSSVSRLVCILFPELEKLTPTLHMPSVYALLDEFPGAKQIAEANLTHLKAILHNASKGRYNRDKAIDIRESARASIGAVMSAKSLELRHTIRLIRELDDEIVEIEEQIQAIMDELNSPITTIPGIGFRMAAMIFAEVGDFTRFDSPDKLLAYAGMSPSTYQSGQLKNCYPHMEKRGSRYLRYALYNATKYVCLWAPTFAAYLAKKRAEGKHYNIALSHAAKKLVRLIYAMEKSRRPYNSAA

SEQ ID NO: 446223 - protein, 291 aa, unidentified
MDHFVGLDVSVKETSVCIVDDTGKVVREVKVASEPEALLTVLTNPAYHVKRIGLEAGPLSQWLFSALAEADLPVVCVETRHMQAVLKAQINKTDRNDARGIAQMMRVGLYRSVHVKTLRSQKLRMLLTHRKLLQSKAIAIENDLRATLRNFGLKVGMVGKVKFEARIKELDGNLPDLAVLVEPLLVVRRVLREQIVILHRRLLAIVRDDEVCRRLMTTPGVGPVVALTYRATVDVPARFRKSKAVGAVFGLTCSKYQSGEIDRSGKISLRRRDDAGHALRSSSWPIREADI

SEQ ID NO: 446224 - protein, 341 aa, unidentified
MDKELYFGVDVSKKTLDLAYYDGETIDWKNAHIKVSNDDAGFKKIGSWVAKVGKDFDTFLFCMEYTGLYNQNFRLWLESKEYIYGMVEPRKMHRFEPDLDDDQRSLDRIKTDELDAFRIAIYCEQNHKKILRNPSKLPSPVYFKLKRLLAERKQNTKQSVLYKQQLHDICAYDTDLSVERKKLLLKNMKENQKTIDKEIDCYIQEDASISKNYNLLTSIPGIGRIIALENIVLTENFTTISNPRKYACYIGIAPFKKESGTSVRKKTGVSKKGFSEAKADLSIAVLSAIKNNPSIRDYWIRKRKEKCGGIVLNAIKFKLVLRMFAVIKRGTPYVETDAYKN

SEQ ID NO: 446225 - protein, 316 aa, unidentified
MRGTPVFVGIDVAKASLEIAVHASADRWTIAYTETELAGLSARLMALAPTRVVLEATGGREVLLVGTLAAAGLPVVVVNPRQVRAFAKATGHLAKTDALDAAVLAHFAAAVQPPVRPLPDAATQRLAALVTRRRQLVDMLTAERNRLDSAPAVLHPDLQAHIRWLERRLTRVNTDLDQALRTSPVWQAQAELLLSVPGVGPILTRTLLAHVPELGTLAPKALAALVGVAPLNRDSGHARGRRMVAGGRAEVRAVLYMATQTAVRCNPALRAFFQRLTAAGKLYKVAVTACMHKLLTILNALLKHQRRWEPNYAARP

SEQ ID NO: 446226 - protein, 418 aa, unidentified
MSNRIAKNLSEVKSETLLVGIDLGKDRNISVVLNTQAQQLDRFGFPHNRTGYDFLYRQIDRLKEEHEKVEVLMGMEPTNFFWKLLAADLEKHQIPYRLVNAYTVKKHREGDYLDSSKDDPRDAFTVGDLLRTGKFTKTQLLHGPYAELRNYSSLYYRLRSDLGRQKSLIYVAAKQLFPELEGVFKDFTGETARAMLKHHGAAAVIEEMPLEEFIAAVRSDFQGQHLWRKNLTKAHLLARSSVGLREGIKSLQHALTAHVNTWETLSAQYEGVKKAMIEIFNHLPESKYVLSIPCFGPVTGALVLGEIGNPEHYTHIKQWTKLAGSQPVPDTSGQKQSGRTPMSKKGRPRLRTTIFYAVLCLIRRDERFIRKYRYLQQRKNNPLTKMEAIGVLMNKLLRILWSLIKNQTCYDPTYSSSC

SEQ ID NO: 446227 - protein, 452 aa, unidentified
MAQGSGLTRGDRNRNRKIGLLRGVVRRDRAVLAVDLGEDKQAAVLVDHEGRVLARKTVMAKAHQLGGLLEWAAGQAARAGFAGVVVACEPTGHRWKALMGLADAAGAGFVCVQPLAVARAREGDDFTRDKTDHRDARLIGKLAVRLDCYLPERAEEAWARLRHLGARRSGLVADVVACTAQVSDLLACAWPAALGTAARPLESTTWLAAMGVVTDRCCGDPARLRKMGYDRFVAAVRRELPRWGAKRACRKIAAGLWEALADAGGVAAQRRGALERVHLLMGDWRSLLARLADAEARMCAVLDELGLAALAASIDGVSALSAAVILAETGDLSRFATSRSVVKHAGLNPAENTSATLAGATRISRRGRPGLRAAAWRAAWPGLRHNRVLRARYAHLTGRDSGTRLSDGQARAACAATLLRWLWAVITRRQAWDARIAAGPIPAGPATAPAAA

SEQ ID NO: 446228 - protein, 346 aa, unidentified
MGKSITDLSSVTTVGLDLAKHVFQVHGVDASGRVVVAKAIRRNKLLEFFASLPPCLVGLEASGSAHHWARELIKLGHDARIMPPAYVKPYIRRQKNDASDAAAICEAVTRPSMRFVGVRSRENQAALMRHKTREMLVSQRTQLLNALRGHLTEVGVIAPQGLRYARELAELIEACDETIPFEVCEALAPLVVQLRNLDEAIARLDRIIAKLAQKDETARRLMSIPGFGPITASAMAATIQDTCGFAGPREFAAFLGLTPKQNSSGGKPKLGRISKMGNRNLRKLLVVGAHAVLFHRKPHTDPLRMWAKKLIEKKPFKLVAVALANKMARIAFAILRGKTVYREIPA

SEQ ID NO: 446229 - protein, 349 aa, unidentified
MKATTIGFDLAKNEFQVHGVDAAGKPVVRKQLRRAQVLPFFARLSPCTIGIEACGSAHHWARKLTELGHTAKLMAPQFVKPYVKANKTDAADAEAICEAVARPNMRFVPVKSVEQQAILAVHRVRSGLVAERTAQLNRLRSLLAEFGLIAPRGRRALMERLPVLFADETLPGVARTLFERQSARIRQLETEISAEEAVILNWHRNNELSKRLDAVAGVGPITATALVASFGEGREFDNGRQMAACLGLVPRQHSSGGKTRLLGISKRGDTYLRMLLVHGARAVIRTLERRAKAAGSPTDRWLAKLLARRNPNVAAVALANKTVRVIWALLAHGRTYDRNWSGHRAVAAA

SEQ ID NO: 446230 - protein, 338 aa, unidentified
MTEITRVSIDTSKSVFTIHAVDGRDRPVLRRNLRRGEVAGFFSKLPPVEVAIEACGASHHWGRTLQAMGHRVRLIPAQYVKPFVKRGKNDRNDAEAISEASARPGMSSVAVKSAAQQADAMLLSVRELLVRQRTQLVNALRGHASEFGLVGSKGDKGLAQVRADAATDTTLPAPAAEALALLGREIDHIEARLAETDAKLLARHKATPTSRMLAEVPGVGPIGALSMVLRVDFTQFKSGRHFASWLGLTPRDHSTGGKQRLGGITRAGNAGLRQLLVLGATAVIQHAKPGRASAWLLALLERRPRKLAAVALANKMARIVWAMMTCGEAYRQTAPAQA

SEQ ID NO: 446231 - protein, 399 aa, unidentified
MGSQAFIARDYDVFAGLDVDKKSISVTFTDHQGLLKSMRMPYSVDHLVNHVRKHYGDKKVAFAYEAGPTGYGLYDGLVAQQYPCLIASPSMIPKAPGQRVKTNRLDSLGLAENLRGGQLKSIHVPTTLYRELRHLTQLRDALVSEVVAMKQRIKSLLLMEGLEFPPAPPGSQWSFLVKAKLRKLLCSSVVRFKLDQLLDNLEFGEKQVLKVTREIRRFCQNDPELSQCIDYLKSLPGIGWIVASQMMARIGDWRQINNIRELPAFLGLVPTESSTGERTTRGSITHNGDPRLRSKLIQASWSAIRQDGELREFFRTVAKKHPRHLGPRVAIVAVAHKLCVRAAVVLMKQRPYEIREKVQSAPLTQEETVPQGTTRRRRVPGEKTPEGSTLETEIPGRSA

SEQ ID NO: 446232 - protein, 445 aa, unidentified
MYSLFFMEPYRKEHIMHNKNYISVGIDVGSAFSFMTILAPDETVILKPFKITHNNKDSLERAVSEIKKAEELYSLESRTFLESTGIYHFPLFCYLVDCGFNASIINPIITHSTKNGNIRKVKNDKIDSKGIAKLGLSKDIPVSQFPAKLVLELRSLTRKYYDLTDERSAHINKLKGDLHTVFPQYLDVFCDVTGKTSTMILRQYGTPDKILRGHKKTMIEKISKASRKGLAKASERYEKLCAAANAAKTFGCQIDSIYFNIFLTLDLVEKLDSALDSILNRIRQLITFNKNEKFIQQIKLLNTIPGVGFLTAVTIMCEIGDFSAFRNPKQLFAYFGLDPEVNESGKFVGTQLHMSKRGSRIVCRAIFAVALASIRTKRNGEGINPYLRKYYELKSGQKPKMVAIGAVMHKVCNIVFAVLRDEKAFELRSPEEHCKQYQRPALAAA

SEQ ID NO: 446233 - protein, 459 aa, unidentified
MRKKASNPKERKKKVSVHQAWPLINAHAAGIDLGSREHWVAVPEACAEPNVRCFGTFTTDLEALADWLKKCGVTSVAMEATGVYWIPLFQLLERRGFEVLLVNARQIKNVSGRKSDVLDCQWIQRLHTYGLLGASFRPADPYCVVRAYLRYRDELVAARSTQTQHMQKALQQMNLQLTQVLSDINGESGLAIIEAVLQGERNPLKLAALANRRVRASRDQIAKALVGDYRVEYLFQLKTAFELYHTYEAKIRSCDEELGRQMEQLPDRVDPKAKPLPAKNSSKNLDENLRQSLYLKLGVDLTAIEGIGALVALTVLTEVGPDLSRFKTEKHFTSWLGLCPDNRISGGQVLSCRTRRVVNRLSDALRLSATTLERSPTALGAYYRRMKAKLGAAEGVTAMAHKLARILYRLLKYGEEYVRQGLEEYEQKHRERKLKQLQKSAESIGFQLIRKETLAEVVS

SEQ ID NO: 446234 - protein, 342 aa, unidentified
MNKELYFGVDVSKNWLDVAYYNGVTIDWKGGHIRVDNNLHGFIQIGKWLKKLNAEKDCALFCMEYTGLYSQGFRLWLEKEGIKYGMVQPRKMHRFEPDLGENERAIDRIKTDEVDSFRIAMYCEKHQRKIKTSPSKLPGEAYLKLKRLLSERKQYTKQSTLYKQQLHDISEYDTEGSCKRKQYGLDFVKNQIHQTDKEIQKVLEQDPNLATNYNLLRSIKGIGLVVAVETIVLTENFTSISNPRKYACYIGIAPARKESGISVKGGEHVSRKGFTQAKADLSIVCLVSIKWDPNIKAYWERKKSEGKCTGIVLNAIKFKLVLRMFAVIKRQQPYVIIDGHKK

SEQ ID NO: 446235 - protein, 377 aa, unidentified
MHSENIAAYIGLDVHKETLAVAIAAPERLGEVRYYGTINNEAQAVRRLFQKLQGLYGNILSCYEAGPCGFGLYHQLTAMNIKFQVIAPSRIPKSPTDRIKNDHRDAISLARLLRAGELTPVWIPDLTHEAMRDLIRARAAAKRDSRVARQRILSMLLRTDKRYAGKHWTGKHRTWLANQSFSQPSQQIAFQHYCQSLEQIEDRILQLDQEISRLLPEWSLCNLVCQLQALKGVGQLIAITLVAELGDFSRFSSPKQLMAFLGLVPGEYSSGNSIRPRGITKVGNSELRRLLYEAAWSYRTPAKVGAWLIYYRPDSVTQYSKDIAWKAQQRLCSRYRTLTAKGKKSQVAITAVARELTGFMWDIALAAQSSFSQQKQN

SEQ ID NO: 446236 - protein, 343 aa, unidentified
MQTVTTIGFDIAKSVFQVHGVDAVGQVVVRRQLKRRHVLAFFEKLPRCLVGIEACASSHHWSRELQALGHTVRLMPPAYVKPYVKRQKNDMADAEAICEAVTRANMRFVPTKTPEQQSCLMLHRTRHLFIRQQTGVINSIRAHLAEFGIVAPVGRKGVTELLRVVADPNDKRVSEVARACLAALGSQLLALKQQILEFDRMILTWHRSNRTSKRLHYLPGVGPMLATALVASVADPSTFRSARNFSAWIGLVPKQHSSGGKDRLGSISKQGDRYLRSLFVAGALAVIRYAKIHGTGHRPWLTALLARKPTKVAAIALANKIARMAWAMMARGERYREPIALAR

SEQ ID NO: 446237 - protein, 387 aa, unidentified
MHTVTSTTVVATAARANDNTLFASLELSKSKWVVTINSPGSEKFSKHVIEGGDGAGLLELLARLRAKAEQRCGAGVKVVVIQEAGLDGFWIHRLLLAAGIESHVVDAASIALPRRHRRAKTDTIDGETLLRTVMAWARGERRVCSMVCAPSPEEEDRRRLTRERDTLLKERIRHTNRVKGLLSSQGVRDYHPLRRDRFERLETLRTGDGRELPPLLKVEIRRELERIGLAMTQLAAVERARDALIRADAEGPNTPAALLLKLKGIGPEFASLLWLEALFRSFVNRRQVAAYGGLAPSPWQSGAIERDQGISKSGNRRLRKTMIELAWLWLRHQPDSALSRWFRARVGPAKGRVRRIAIVALARKLLVALWRYVTQGVVPEGAVLKAA

SEQ ID NO: 446238 - protein, 322 aa, unidentified
MSQPNPLCVGIDVSKATLDIAASSDVAQFTVCNDSDGFNAIITGLRRHSVALVLMEATGGLEVAVACSLQAEGFEVAVVNPRQARDFARAMGYLAKTDRIDARVLTQMAEVINRHPERKRFIRALPDAERQALAAMVVRRRQLIAMLVAERNRLHPFHPQNKKSINTIIKALEDELVRLEKEMDSHIRNHFKEIAERLSSIKGVGTMTVSAMLAEIPELGTLSRREISALIGVAPVNRDSGTMRGRRTIFGGRAGVRSALYMAALVATRFNPVIKTFYVRLLAAGKAKKVALVACMRKLLTILNAMLRKNEEWDESYHHVAP

SEQ ID NO: 446239 - protein, 345 aa, unidentified
MEPMYYIGLDVHKRKISYCVKDSSGQVYAEGSLPATRFDLDRWMKALPQPWSAAMEATMFTGWIYDHLKPHAAALKVAHPLMLRAIAAAKRKNDRIDANKICDCLRCDFLPECYMAPTAIRERRRTLRYRNLLVRQMVQMKIKISSLLMEAGVSYNKQRLHRAGYFRELLATNPDIDEGLRSLLRQCRETVVRLSKTESALIRSLEDDRLLAERVERLMSIPAIGPITALTWALEVGEVQRFSSIKKAISYCGLCGAEKSSGNTVQRTPLSKQRNKHLQTTLIEAAKMAPRYSPTLALLYDREKQKGNANRATLAVARKLVAYLMSVDRGRCHFLVLEQETSTAA

SEQ ID NO: 446240 - protein, 373 aa, unidentified
MNPIYIGVDFHSRQQTICYLKTETGELVIADLKHRDKEQLRAFYQQFQGQVIIGLEASGYSPWFETLLEGLGCEVWLGDATEIRRRARWRQKSDRRDAELIWDLMVHNEFPLLHRPALPSREILRMLRYRQKLIKMRTMSKNSLQAIAMQAGLAKGSRLFSTAGQQELQTAQMSAALQWQRDHWLALLQPLNQQLLETMVWFKAQAKGDVVISRLRTHPGIGLLTSLCLLHTLQPVSRFRNQRKVVAYAGFDPMVRRSAERAIYLGISKAGSRLLRYLLVEAVHTAVRYDEDLKRFYQHVAERRGRPKAKVAAARKLLIRAYIMLRDEIDYAEFRRRAVAARLARRGQGPTNVPEVLIGQPASTGCQKQLSRS

SEQ ID NO: 446241 - protein, 342 aa, unidentified
MENPIASYQLYVGIDIAAATFTAAWMPPGGAPTPPVTHPQQPSGFASLQRQLVATDTLPAATLVVLEATGSYWVALAVTLHTAGYGVSVINPLQAHHFAKARLRRAKTDPLDAQNLTQLAAALQPAVWTPPPAVYHEVRQRLTARDALVAMRQQTRNQRHALLQWPVVVASVRDHLDGVIAMLDMRIADLEREIAMVLAASDWAESLACLTSAPGIGMLTAAWLLVSTMNFTLCATPEAATADAGLAPMPHVSGTSVHGRSGIGHGGQGRLRTALYMATLAAVRHNPALKSFYARLRAAGKPSKVARCAAARKLLHLAWALVTKQQRYQSNYRIVDPALAAA

SEQ ID NO: 446242 - protein, 427 aa, unidentified
MARAIGLDVHLEFCEVAIAEDRTVRSAGRVETKPDALELFAQSLGPDDRVALEVTGNAWEIARIVEPHVARVVVVSPADTGIRQARAKTDRLDARTLARLLWSGELDAVWMPDRVTWVMRRRLSRRGQLVWARSRAKNEIHAVLMRCLVGRPPFADLFGVKGRRWLAELELPVEERETVDAGMRQVEFLDTEIAAVERLIARDALASEEIKRLMTVPGVNVIVAASFVAAIGDIGRFHNPRKLVGYLGLDPRVRQSGSGPASHGHISKQGSVRARHALVESCWSAVRQPGPLHAFYQRVRARRGHSVAIVACARKLACLFWVLLTREEDYAYAQPSLTRKKLRLLELAAGAQRYSPAGDGVWHANEAVRAAERELAHQAEIAYQRTVRDYHATQATTKGAGATPGRASSSRQSGKQRGRATVPDPAL

SEQ ID NO: 446243 - protein, 391 aa, unidentified
MILVGIDVAKDKHDCFIMNSDGEILAKAFTFSNNLEGFNFLYEKIKSVSKPKDKIKVGLEATGHYGYNLLGFLLNKGLPTFVINPLHTNLFRKSLTLRKTKTDKVDSKTIAMMLMSDVALKPYTDTSYHNEELKSLSRYRFTKVQERAKLKTSVSRLVQILFPELEKLVSTLHMISIYSLLEEYPGASYIASTHLTKLTNLLNEASHGHYDRNTAIKFREAAKNSIGSVMPAKSLELKHTIKLIRELTIEINEIDDEIKKIMDSMASPITTIPGIGYSMGAMIISEIGDFNRFSSPDKVLAYAGLSPSTYQSGKLDNCHSHMEKRGSRYLRYALFTVTQKVCIWDNTFAEYLSKKRAEGKHYYVAISHAVKKLVRVIFHLERTRQAYLKAA

SEQ ID NO: 446244 - protein, 374 aa, unidentified
MNAVGIDVSKGKSMVAITQPFGVVVAEPFEVSHDGQALSELVERVKRLPGETKAVMEYTGTYYEPIANALHNAGIFVSVVNPLLIDSYGTNRVRKVKTDKKDAFRIANYALDKWTQLREYIPIDDTRKTLKVLNRQYTQYNKLLIMQKNSLIALLDSCFPNANTLFSSPCRESDGHEKWIDFVLQFPHINCISKLCPSAFKAKYQSWCKANRYNYSEAKATQIHAYSRTQVSSLPITDAMMKAVELSASMLNSTLETLAALRTEMDNLASTLPEYETVTNIYGVGRVMCSQLIAEIGDVRRLKSSKSLIAIAGIDPPPDQSGQYDPKSRSISKRGSPLLRKTLFQIMQVIIQKQPIDEPVYHANVPRVSRIGST

SEQ ID NO: 446245 - protein, 462 aa, unidentified
MRTIGIDLAISATHKAVVADEQAKVITPLIRFETDPADLEGLLRRARKGADEDVPLRVVMEPTGLAWLPVASYFIQRGVTVYLVNTQQVADLRKFYKKHAKSDRISARVLVRLPWVNPEALHPLRLADADRLSGQRWCKQQDKLVTLMTAIKNRVQAWERAFWPGLEKVMGDLFAPWVRRWREVCYDPWELQSMDTGQLATLLVEAGVDPEGVESLALGLQAVARRAVALFGTPEGEMSPYVDYGVLQNQVLRELRVLAIYEEEHRAVQRQVQALYRQVHSSRNLESIKGVGKDGAAVYVFFIGDVTRFALQKEFRGWSGMVPESDQSGDVEKKGLRITKAGPDMVKKYAYIDAEVARQWDPQIAAIYHDQMVYKGKHHVQAVCHCATHLLDRVRAVLRDERPYELRDVDGTPVTWQEARAIIAERYRVPEEVRKRNSQRARKARRDRRAEKKRKRRSRPSK

SEQ ID NO: 446246 - protein, 342 aa, unidentified
MKDTMIGVDLAKNVFQLHGAAMTGEVRFRKKLTRPQFMKFMAEHPAAVVVMEACGGASYWARELAKAGHEVKLIAPQYVKPFVKRQKNDAADAEAIVVAAQRPEMRFVPPKTEEQQARAVLFRARERLVHQRTELTNALRALLYEYGHAVPQGPVHLKRIAEIVEVETCDLPELAREEAQDLLEQIAEKTARIEAKTRKIAAQAALAPTARRLQTMPGVGPMTALAIEAFAPAMATFKCGRDFAAWLGLVPRQLSSGGKERLGRISKAGQSDIRRLLIIGAMSRLNWMGLKGVREGSWIDRLRARKPKMLVAIALANKMARMIWAMLTKQEDYRDPVPAGAA

SEQ ID NO: 446247 - protein, 421 aa, unidentified
MKNTAARKRKQVPEGYLIIGVDPHKKKHAAVAITQDFTLRDRFKFDNTREGLEFLLRRIKIEMVKSDCRGVMFAIETGGHYWRNVAYYLDEKGIPFRFINQYTLKRRREGKDLNRRKNDYRDSEVAAQLLCTGEFVESKIPQGVYAELRTAHNAYRRLIKERTRITNLVKGLLDGLFPEFTRVFKDPCGLTALSVLSTGSIPGVITGMTGEEFVATIEAKHRGRLMRKKLRALHNAARSSIGIAAGAKSLSSEISFLVEKLELIRGHICVIERTLVKLVDETEEGKYLLSIRGLNYIAVAGLLAELGCFKSYRSAKQMIKMAGSNPTESESAGKKRSRTPMSKQGRPVLRYCAWTSVIPMLRFNSDFRAWAKQRRERPAHANPLCGREIVGAALNRLLRLSFALVKNQTYYQSPQLVQVTG

SEQ ID NO: 446248 - protein, 348 aa, unidentified
MSDKISRHTLKPSDGKELLDLCERIRMRVAKETTKRVEMVSCYEAGYDGFWLHRLLQAHDIRNHVIDPASLQVDRRARRAKTDRVDAERLLRSLMAYLRGEPKVWSIVRVPSVAEEDDRRLHRERGRLINERIQHVNRIKGLLAIHGIYDYQPLRRDRIQRLEQLHTADGRTLPPRLEAEILRELQRLEIVIGMIKTIEAERDAIASAKTEHRSAKKIQDLAKIKCIGPEFATALVGEVFYRSFDNRKQLASYVGLTPAHFQSGSMCRDQGISKAGNAKARTVMIELAWLWLRHQPDSPLSVWFRDRVGKLKGRIRRITIVAVARKLLIALWRYLETSLVPDGAALKV

SEQ ID NO: 446249 - protein, 408 aa, unidentified
MNAVGIDVSKGKSMVAALRPMGEVALLPQEFLHTEVGLEQMAYAIVALGEDTRVIMEATGRYHEPIAAALHEYGIYVCVLNPLFIKQSGGGSIRKVKTDKADAMKIAKYGLDNWVELREYTPMDTVRQQLKLCSRQYNLYMKTVVSLQNNLISLTDKTFPGVNELFSSPERADGHQKWVDFVMTFWHCDCICRVSEKAFTDRYQKWCKRKGYHFSTEKALDLYAGSCGHFTTLPENDNTKLLITTAAQQLLAGKMTLAALRAEMTRLAKQLPEYDTVRAMYGVGETTAVQLMAEIGDVRRFPRRSSIVGFAGVDPAVDQSGKHSAKSVPTTKRGSPHLRKTLYQIVCTYLKKSPAEEPVYQFLDKKRSEGKPYFVYMTAAQNKFLRIYYARVKECLEAFDARQSLAQS

SEQ ID NO: 446250 - protein, 349 aa, unidentified
MWIIGCDYHPRFQQIAFVNTEGGEYGQRRLEHVGEAEQFYRSLAGADVRVGMEASGHARWFERLLAELGYELWIGNPAAIRAAAPRKQKTDARDAEHLLRLLCEGRFEGMRIWVPTAQDRDVRQLVLHRHRLVQMRTRVKNQLKAVALNEGMERKPGLWSRRGREQFEQLSLPAWTARRRQDNLELLDELVSRTEPLDGAVEQEAQRRPEAMLLMTHPRVGAVTALAFVLTIGNPARFARGKQVASYLGLIPAEDSSGGRQRLGHLTKQGNALLRGLLVEAAHSAVLRDPQLGRCYRRLAMKKNRAIAAVAVARKLAIRLWWMWIRGFNYEQFRECGSHAGKPGLAGGV

SEQ ID NO: 446251 - protein, 325 aa, unidentified
MTLNETTPHFLGIDVAKAKLDCALLKDGKCRNKTVPNNPEGFAELSQWLARQGAAQAHACMEATGVYWEDAAQALADAGHTVSVVNPALVKAHARSCGVRTKTDAVDARVIADFCREKRPPAWTPPPTSQRALRALVARHQALVGMQTQEKNRLESTREEARDSVDTHLAWLAGELKRIEKAIAQAIDDDPGLRAKRDLLDSIPGLGDRSISTWLAYCADAGRFASARQVAAFAGLSPQHHESGSSVRGKPRLSKIGHAFLRRALYMPALVALYKTNWGRRFRERLAANGKPAKLIIGAMMRKLVHVAFGVLKSGKAFDPALHGA

SEQ ID NO: 446252 - protein, 415 aa, unidentified
MEGLHPRYVVGIDWASDKHDVCVLAAAGERHLAFPVLHTADGLAELVRRLKRCGAPADLPIAIERPSGVLVDTLVAASFPVVPIHPNALKATRARYRAAPGKSDPGDAYILADLLRTDGHRFRPLRAPSDATKALRAAVRTRDDLVATRVQLANQLRTLLESFWAGAATIFAAVDSPIALDFLDTFPTPDSAARLGATRLDRFLTRAAYCGRRPAAELLARLRAAPASPAGPLERETKGQLVRALVAVLRPLVVQLRELDGLIAAHLAQHPDGSLLQSFPRTGTVNAAQILAELGEDRRRFPTAEHLAAEAGVAPVTHSSGKHRGVACRFACNKRLRQALTTWADNSRHAHPWAHAVYAAARARGCDHPHAIRILARAWVRVLWRCWQDRTRYDPAQHRRALPFLLPQPSISPAA

SEQ ID NO: 446253 - protein, 372 aa, unidentified
MAQYIIVGCDLHDRSMLLRYSADSAASRKATFRNDRDGRPAMLRWLRMLSVAEGGAKVVFGYEASSQGFTLYDAVTGAGFECHVLAPSKMARSPQARRSKCDDKDAQAILELLRGYLFAGNTLPDVRVPDAQSRDDRELTRARLAMGDELTSTKTEVRCLLKRYGVEKPKSAGESWSKCFRAWLESLVAANGPLGTYGAVSLSVLLRRVAFCETEVRYLDEHIRALARVPRHGAAVEAVTERKGVGPLTAMVYLTELWDLRRFSNRRRVAGYLGLAPSKDESGEQSDRKGHITHQGPARVRRVLAQAAWSWVRSDPEARAAFERLVARNPKKKKIALVAMMRRLAIWMWHTGKQAQEAAGVYAPAEAIPATP

SEQ ID NO: 446254 - protein, 428 aa, unidentified
MNNQEIIRREEYCQIVKEITGSDQYMVVGIDVGKDKHHAFVGTATGICLFKKMVFENNLDGFARLLETVDQLKTQNGLGKIVYGLEPTGNYHKPLARHLIRCTCNVVLVAGQAVKNNRQLIDGRWDKNDTKDAANVADLVSRARCLYYDCPSPQINELRGLLSLRRRLKREEHSQRMRIRNNLLAQYFPEMDQFYSACESESLAIVRWCLDPDKISVMEFDKFFNMVTKTRRGMAQTLRLRKIHSLAMESVGCPMGPAAEYEAELLVEKRQQVAMQIQKTADLIEDICFEFPEYNYLRTIPGFGPYISAKVLASIGDPFRFNNRKQVIKMAGYDLSAKRSGKTSDQAVPVISKKGNGELRYALYQAANVAAARTDLFRAYFTKILRGRERERGIKTKMRVKLAAKMLVIAWTLMKTKQSFDPEHLNID

SEQ ID NO: 446255 - protein, 415 aa, unidentified
MAMKKNFILFDQVVERGAGMDVHKETIVVTIQGKGIKTETKSFRTFTSSLKKLREWLKQHGITHLAMESTGVYWKPVFNVLGDDFMIILVNARHVKNVPGHKTDKQDSKWLAKLLLSGLLKGSFIPGKEIRDLRDLVRTKTQLTGEISSAKNRFIKFMESANIKLSSVLTDVFCVTGQKIIAEILDGDYKPERLLHHVHGRVKASRQDIIEALTGNLDEHYRFMMKIMLEHIANIENVIAKIDAQIMQKTEDHKEILELLETIPGVGRDGAICIVAEIGTNMEAFASHKHLASWAGMCPGNNESAGKNKSGRITYGNAFLRTFLVQMAWAAARTKNTYLSSKYKSLVGRRGKKKAVIAVGHKILIAAYFIMKNKVGYNELGEEYLNNFRRDKLINYYKNQLQKLDPNVNFDKEVA

SEQ ID NO: 446256 - protein, 387 aa, unidentified
MVQVNDLSRSLAAFDPASTLVVVVEMSKASWLVSGVVPGVERQPLKKLEPDATALLRLIERWRNEAVRAGRPISRIALAYEAGRDGFWLARWLIARGIEAHVIHSASVAVSRERKRAKTDRLDAAMLIRVFLGWLRGERGHCGMVAIPTIEEEDARRPNRERESLVNERSRIINRMKSALARLGIRGFKAHLRKAPERLAGLRTPEGTGLPTNMIEEFRRDMARLALVREQISSIEKTRAERLEQAPDTGPHAMVRLLARVIGIGIETADLLVREILSRNLRDRRALARYAGLTGSPDESGLKSREKGLAKAGNARVRRGLIQLAWRFLMFQKDSALARWYRTRTEGPSGARKTTMIVALARKLLIALWRLVTTGEVPDGVELRSAA

SEQ ID NO: 446257 - protein, 343 aa, unidentified
MQIARIGLDLAKYVFQVHGVDQHGKIVIRKTLRREAVSSFFANIPACLVGMEASNGAHYWAKVLSEFGHDVRLISPQFVTPYVKSNKNDQNDAEAICEAVGRPSMRFVPVKSAEQLAVQALHRIRSRLVSDRTQLTNQIRGLLGEHGIVIAKSIAKLRQAVAGIVGDSNDDLPHLVRALIGETLEELDELDCRIAGYDRRIRELYRHSELCQRLGKIEGIGPMTATALLAAVGNRQCFKNGRQFAAWLGLVPKQRSSGGRARLFGISKRGDRYLRTLLIHGARAALARIRGKQDPRSLWLGRMRERRHPNIVAVALANKNARIVWSLLSSDTAYDPRLSVGPA

SEQ ID NO: 446258 - protein, 335 aa, unidentified
MRYIGLDVHYSTSTYCVLDANGQELQCETVRGHWAKLLERLRTVAGPWTICFEATCGYGYLYRELSRLAQRVVVAHPGQVRLIFRAKRKNDRIDARKLAKLLYLDEVPAAYVPSQEVQSWRELIEHRRHMMDRQTTCKNAIRSLLRGHGKIAPKGLWTKKGLAWLRQEEMPTAAARLKRDLLSDELDEAKRRVRTVTKALNEIGEHHAAVLLLRTIPGVGIRTAETIAAYMDNAKRFLRSSQVGAYFGLVPCQDASAGVNRLGHITRQGPATARKYLVEAAWQGVYRSPTIRAYFERIRHGRPERRKIALVATAHHLLRCMHAMLVRNQPWHEAA

SEQ ID NO: 446259 - protein, 344 aa, unidentified
MTTIDYIGFDIHKKTISFCAKAPDGAILEEGTIPSLRNRLLAWAKARPRPWIGAMEATLFTGWIYDFLKPLAQELKVAHPPMLKAIAVAKKKNDKVDARMIADLLRCNLLPECYMAPVAIRDLRRVLRYRNLVVRQATRIKNRIAGLLMETGTAYNKERLHGKAYFSELLGSLQEMPPSVVELLKLSRGQLELFAVIQRRLLKGLNEHPDLSERVMRLQTIPGVGEILALSWALEVGEVGRFASIGQAASYCGLTSAQHNSAGTEQRGPISKQRNKHLQTILIEAAKLAPRRNPQLAVVHERELQRGDRNRATLAVARKLVAYLMAVDKSGKPFAMRARTEVAA

SEQ ID NO: 446260 - protein, 327 aa, unidentified
MTCKVGVDISKMKLDVAWLRADGKYRSKVFPNNASGFEELLRWLQSNLPDGKAAAHVCMEATGTYHEALALFLHDQAVAVSVVNPLQVKRFMELEGVRNKTDGGDAKALARFCDKTDPALWEAPSAGVRSLQALVARLDTLLELRQAESNRLEVAHDAVRPSLTAVIASLDDSIKDVRMQIRKTIDDDPDLRQRGELLASIPGLGDRTIPQLLAYIGRPERFGCVKALIAYASLTPMIRQSGTSLDKRRGTHPQGHREFRNALYFPAMVAGRYNPLVAQFWQRLKAQNKPGKVIVVACMHKLLAIAYGVLRSGKPFDVNHHPKAVCS

SEQ ID NO: 446261 - protein, 392 aa, unidentified
MIYVGIDIAKDKHDCFITNSDGEVLFKSFTISNNPDGFETLFQKIQSVSDDLTKVKVGLEATGHYSYNLLGYLLDKGLPTYVINPLHTNLYRKSLSLRKTKTDKVDARTIASMIMSDVNLKSYSDTSYHNEELKSLTRYRFDKVKERAKLKTSVSRLICILFPELEKLVPTLHMASVYALLSEFPSAHAVASAHLTRLINLLSQSSKNRYGKDTAVMFREAARNSIGSNMPTKSLELKHTIKLIQELTSEIDEIEAAIKQIMDEEIQSPILTIPGISYRMGAMIIAEIGDFCRFDSADKILAYAGMSPSTYQSGQLDNCYSHMEKRGSRYLRYALYNATKYVCHWDKSFGEYLAKKRSEGKHYNVAISHAAKKLVRLIFAMEKSRKAYLPTA

SEQ ID NO: 446262 - protein, 419 aa, unidentified
MNQQPAQPGLFIGMDWADQKHDIYVIDRNGKGFHRELEHSAENIDAWVGDMLRLAGGQPIAIMLEQSRGALIYALMFREDVLLYPINPKQLARYRASYPGGGKNDPTDAMYLARMLSERITTLKAWQPDDENTRLIANLSQQRRKIVDGQTKLRLQLKALLKSYFPVVLELFGKQHQLPLLLSVLCRWPDPRKLRRADRQLIRRIMGEHSMRNEEQQNEIIERIRAAQLLTRDDALITPSALSVKLLANQIQQAQKTIEEFDARIAEAMKHHPDAHLFTNLRGAGSALAPRLLCAFGSQRDRWEDADSLASFSGIAPVTYQSGKSRGVRRRFACPKYLRQTFHEFADCARRYCPWSKARYRMLRDKGMKHHAALRKIARSWIRILFRVWKTRVPFDCDRYIAKLQQRCPEITPYLTQEN

SEQ ID NO: 446263 - protein, 343 aa, unidentified
MQTVTTIGLDIAKSVFQVHGVDAAGNVIVRRQLKRRYVLPFFQKLPPCLIGIEACASSHHWSRELKALGHTVRLMPAAYVKPYVKRQKNDAADAEAICEAVTRANMRFVATKTLEQQSCLMLHRTRHLFIRQQTAVINAIRAHLAEFGIVAPVGRNGVEQLLNVVADPGDKRLPDVARACVATLGAQLQMLKARILEFDRLIMAWHRSSEASKRLDEIPGVGPALATALVASVADPKAFRSGRNFSAWIGLVPKQHSSGGKDKLGSISKQGDRYLRSLFTAGALAVIRYAKIHGTKHRPWLTALLARRPTKVAAIALANKIARMARAMMARSERYREPVALAA

SEQ ID NO: 446264 - protein, 375 aa, unidentified
MSNHSEAFVAFDSSKLRNAVAIADSGRTGEIRFLGEIENSTTATAKLVRKLASKYERLTFCYEAGPTGYELYRQIKSLGQECIVVAPSLIPKKPGDRVKTNRRDAVSLAKLLRAGELTAVWVPDRHHEAMRDLTRARDTAVNDLRSKRQQISAFLLRKGLHYCAGKKTWSQAHLNWLMSQRFEYPEHRLVFEEMMMAMRQAQERLERLEQAMRAAVPDWSLAHLVTALMAMRGIDLISAATFLAEIGDLSRFQSPCELMAYLGLVPSEDSTGDRIKRGPITKAGNRRARRTLVECSWSYQHPPRVGKDKQAKVAAAPQAVREIAWKAQSRLNRRYRALARRGKLKTVAITAVAREFAGFIWAVAREATAARAAAK

SEQ ID NO: 446265 - protein, 343 aa, unidentified
MDQISIIGLDLAKGVFQVVGRNAAGEKVLVRQLRRSQVEPFFAKLEPGVVAMEACASAHFWARRLQALGHDVRLIPPIYVKPYVVRNKNDARDADGLSLAVQRPDIPTVQIKQPEQQARASLHRVRDLLVRQRTQVVNQIRGLAGEYGLVAREGREGLKGLIVLIQQAADLPDLARQALLVQARHHGELGQKLDELTAQICAQARACEQARRLMTIPGIAEIGADALIARLPDASMFRSGRDLSAWLGLTRLDHSTGGKPRTQGPISKRGDRTLRRLLVLGATSVIARQRRTGKLDPWIAGLLQRRPFKVAATALAAKMARIVWALLVRGETYQSGHQPKLAA

SEQ ID NO: 446266 - protein, 346 aa, unidentified
MNITTIGIDLAKSVFQLHGIDSYGKVLIKKQIKRAQMAEYFVNLKPCLIGMEACGSAHHWARKLEGFGHTVKLMPPQYVKPYVKTNKNDAADAEAICEAVTRPNMHFVPIKSTEQQAILSLHRIRQGYVKARTAQANQIRGLLAEFGLEIPQGIGYIAKRVPDILEDASNELPGILRIEIQSLLEHLNELNTRADNCEKKIVAWHKQSETSKKLEAIPGIGPLTATALVASIGEAKNFKNGRQVAAWLGLVPRQHSSGGKQNLLGISKRGDIYLRTLLIHGARSVIYRSGQKENPTDRQSWLNQLTQRRNKNVAAVALANKNARIVWALLNHDRDYQDNHKMLVAA

SEQ ID NO: 446267 - protein, 385 aa, unidentified
MLTLNPTDAPAASEYATVYVAFELSKAKWKLGVLLPGSRKVSRYTIDGGELPALSARLAAARAKAAAAGKPVRIVSCYEAGYDGHWLHRWLTDQGVINYEIDPASIQVSRRARRPKTDHIDLEQLMRTLLSYLRGEPRVCSMVRVPSSEDEDRRRASRERKRLTKERSSHTNRITGLLHAQGVRDAMPLKRGFIASLDTVRTGDGRPLPARLKEEIVREHERLCLVHKQLTELEAKSKAEVRDAARGSIEAKIKQLTDLKGIGVVSAQTLVHEVFYRSFDNRRQLGSYFGLTNSAYDSGDSHRDQGISKAGNRRGRTLAVELAWLWVRHQPGSELSRWFNERVGQIKGRIRRITIVALARKLMIALWHYVTTGVVPAGAVLRPSI

SEQ ID NO: 446268 - protein, 358 aa, unidentified
MQTQRKELNFEGQNIFVGLDVHLNSWNISIFTDSLHHKTFNGSPKPEALLDYLTCNFPNGNYFSAYEAGFCGLWAHYRLEELGIHNIVINPADVPITQKEQLHKSDPVDSKKIGRSLRANELTGIYIPLAQTLEDRSLVRVRSAIVKDLTRIKQRIKSMLYFYGIKFPKEFENGNGHWSKRFINWLKTIQLQYSTGTDSLGLWIKEAEQQRAILLEATNKIKVLSATERYSKSIELIRSIPGIGLITGMIFLTEIEDIARFENSDKLAGFIGFVPTCHSSGEKENKGEITPRRHDSMRKTLVESSWIAARRDPALGLSFSKLCKRMEPNKAITRIARKLVNRVFFVLINQKKYEYKIV

SEQ ID NO: 446269 - protein, 340 aa, unidentified
MKITTIGIDLAKDAFQVHGIDEHGKICVKRSLKRKEMMEFFTRTEPCLIGMESCGGAHYWARRLRDVGHTVKLMAPQFVKPYVKGNKHDAADAEAICEAVRRPTMRFVPIKTVDQQSILAVHRVRQGMIKARTAQANQIRGLLAEFGLIVPVGISHLFLKVPTMLDEAKDTIPGVFRELIHRLLEHMKELTRQVDQLEIQIHQWHRASEVSRNLEQIPGVGPITASALVASIGDARNFKNGRQLAAWLGLVPKQHSSGGKTRLQGISKRGDSYLRTLLVHGARAVVKSAERKPEQHVWLSKLMDRSHNNIATVAQANKNARVIWALMAHEQKFRSDYVRT

SEQ ID NO: 446270 - protein, 343 aa, unidentified
MYYIGIDVHSKWSTFVALDPATGETITFDRVPNTPADIAEQLGSLKSPLKGMLESGTNAWAMYRTLAPLFEELVVVSPAELWDRRRDDAKTDKRDCLGMATRLYRGDYTPLYIPDETTQDLRNLVRAKIQASRHVTKLVNEIGSLVRSWGHILPGSLLGKQGQAWLEEVQLPAHSARVLELWREELGRFLAAEAELEQSIVEEAARDEVCRQLMTIPNVGAFTALAIRAEVGDIRRFRSVDALIRYCGLAPRVFQSGEKRRYGRLGRQHNHWLCYVVMLFAQRCGRSRTETPFRRTYWRVSLRQQRNSAKVAVARQFVRVFSTMWRRGTVWDAARGQRAPRAA

SEQ ID NO: 446271 - protein, 384 aa, unidentified
MKKIAYVGIDYHMNVVAIAVIIEGEKEFYDTIRLKNTDTLIAKYMQKLSHQFTINACYEASSSGYCFQRKMRVWGYHCDVIAPSLVPKKPGSRRKNDFRDARELAQHYANGLLTVVHPPSEQDEALRGLIRCRQSLKEAEKRVKNQINSLLLSQGLHWQKSKWTLRHRQWLATLHLPHTYLQQVLDEHRALLHYLEARVLHFDRQIETLAQSELYADSVKKLCTLKGIRTLAAMILIAEITDFRRFASPRALMAFLGLIPAEHSSGDKQTGSSITKTGNKRCRTQLIEAVLHYVKKPIIRGRIKTALADVDAATSSIALTCMQRLHKRYWALVMKGKEPKVARTAIARELAGFIWALMNQQSAPATIPYSVPPSNSGGTTVMTL

SEQ ID NO: 446272 - protein, 358 aa, unidentified
MRIIGVDLHARQQTIAMLDTETGELIEKTLVHDGDEVRNFYSALRGPVLVGIEATGSMQWFLRLMEELGIECRVGHPKKIRKAETRKQKYDRRDARLLLTLLAENRFPTIWMPSSEQRDLRTLLRHRHQWVRMRSRVQHTLQSMALANGLRRGHSLWSQAGQHELQVLSLAPHASQRRTALLNLYPRFQESIDDLDRQVSEEAHQRPQAQRLMTHPGVGPVTALATEVFLGDPKRFADGKTVASYIGMIPSEHSSGRRQRLGAMSKEGNALVRYLWCEAAMHAVRRDPELKRFYRRKLIQKGMGKARVAAARKLGIRLWIMMRDEIDYQEFCRRGQLRQKSGGARAGMPDFNSGPAVQ

SEQ ID NO: 446273 - protein, 338 aa, unidentified
MKVMHECVAGIDVHKDMIKVAVRSPGAKAWTRKTEVFTFRTFYGVLREMARMLRGRGVTHVAMEASGVYAEPVCYALREEDFDEVLVVNPAHIKAVKGHKTDAKDCARIAELLECGLLQGSYIPPQELKELRDLTRYRSKEVQARTSEIQRRHKALEPAGIKLGSVASGITGKGPSLMIDALIDGERRGPVMADLAQGGARTAGKMADLSMALEGRFTDHHALMAGLHRDAIRGYDAAIAALDTRIAEKAAPWQRETGLLKTIPGFGDVVAQAWIAEIGPAPHEWFGSREKLASWVTLAAGNYISAGKRKHGRTGDAGAYVKPMLVQAALTPNPAFCR

SEQ ID NO: 446274 - protein, 440 aa, unidentified
MLILALDLGKFKTMCCFFNTKTRKAEFQVAATERDYLAKVFASRKVDLVVMEACGPSGWINDLAISQGLKTLVCSTNEDAWKWSNVKRKTDKDDALKLARMASMNELKAVHMPSEKLREFRSLVKYRKTLDHRICKMNCAIRAWFVNHGITIDSGEKAWNTGRKRIDSFRKPLSECEDKELWRAELDIELTQLDALTAQHDLVVKKLEAIGKNDKRIGRIMTIPGVGPRTAEILVACIDDPHRFSSGREVSAYFGLVPRQYQSGETDRNGRITKRGNPLARTILVECAWASLRYNPWAKSIYERVCGKQRTRKKKAAVALARKIAVLAWALMRDDKDWDPKRMIDVTESFGRMSPTLKATLSEMKPKENSDQRKSRLRREARAIREAAAEKNAKARPVKTKAKTIAKSDKPRKTAATKSSAISKQTPTKPRRARKPVPAA

SEQ ID NO: 446275 - protein, 356 aa, unidentified
MSRDIKYMGMDVHKEAIVIAVLNGSGQLVMESIVETKASSMLQFIHGLRGELHGTWEEGTWAAWLYDLLQPQVARVLVCDPRRNALMKEGNKSDKVDARKLADLLRTGMLRPVYHGEHGLRTLRELGRSYQTLSQDLNRVMNRIKALYRGWSIPCAGTQVYAPRYREEWLHKIEHAGVRRRAELLYQQLDGLQGLRRTLRPELLAESRKHKAAKLLRQIPCIGPIRAARLIALMQTPHRFRSKRQLWTYSGLGIETRDSAQYRYVHGQLQRTKKPQQIRGLNQNHNHEMKEIFKGAATRASCGVGPLRDFYVALLAKGMKSEMARLTLARKIAAIALTLWKKEERFDAEQLKPQAA

SEQ ID NO: 446276 - protein, 415 aa, unidentified
MALKIVYKICCGIDVHKTFVVACIASTNSNGVTTYESHRFSTYTKGLKDLLQWLLKHNCMDVCMESTGKYWIPVYNVLENDCTVVLAHPKYVKAIRGKKTDKKDAKWIADLFKHDLVAGSFMPPADIRQLRDLMRYRFKLTCFMSSEKNRLQNCLTVSNIQLGNVVSDTFGKSAQAILDKLLENPADTSFDLEPLVYKSLKKKLPELRDAIDGYISPEQAGKLKVIKAHYENLESRKAELEELILALAAPYQQELAILQTAPGIRSDFTAIGIISEIGTNMEAFPSAKHLCSWAGLTPTNNESAGKKKSVRVSKAGCYIKPLLVQCANAVVTSKKHPEIRNRYLRLKKRRGHKKAIIAIARMLLTALYHMLKNSENYNAELYRKSDLPSIDREITVEQAILIARNQGYRIRSETA

SEQ ID NO: 446277 - protein, 411 aa, unidentified
MDIIYDKCCGIDVHKKLIGACFRCGKKQDVRNFGATTRELLELADWLKEGVCEMVAMESTASYWKPLYNILESSDLNAMVVNARHMKAVPGRKTDVKDAEWIADLLQHGLLQPSYIPDKDQRELRELVSYRKSLVGERTRELNRLQKMLEGANIKLSGTVSDINGKSARSILEYLLTGEFIDAAKYDEMYEKKIIAHNLKANKEQIIDDLNGVMSPLQRRMMKELLAHLDELNKHIKNLNDEIDNFMKPEEKQASQAIQDITGIGNTSAQAIISVIGTDMTRFSTDRHISSWAGLCPGNNESAGKRKSGKTRKGNSFLRTTLITCAHSAVRNKKSYFYAQFMRISAHRNPKRAYVAVAHSMLIVIYHILNEGVVFKDLGADYYNQFNKEHKINAYLKKLKALGWEAPVVAA

SEQ ID NO: 446278 - protein, 413 aa, unidentified
MQVIYERCAGLDIHKKTVVVCVLITLATGAIKKSVRTFTTMTADLLALDEWLGSLGVEHIAMESTGVYWHPVYNLLEAGRQVILVNPQHMKAVPGRKTDVKDAEWLADLLRHGLLKASFIPPQPIRELRELTRYRKTLVQERTQEVNRLQKVLEGANIKLAAVASDVLGKSGRDMLEAIVGGEQDAEALAELARGRLREKLPDLRLALEGRVQPQQRFLLERILAHIDFLEGSMHQVQREIEQRLVPFEEAVTLVQSVIGIHEVAAATLVAEIGTDMSRFPSDKHIASWAGVCPGNKQSGGKRLSGATRSGNPHLKAVLAEVVWAISHTKDNYLSAQYHRIARRRGKQKAILAVSHSVLVIVYHILRDKKPYTDLGADYFDKLDAKRVERHHVRRLEQLGYTVTLTPKEEDAA

SEQ ID NO: 446279 - protein, 437 aa, unidentified
MRTSPNEYVLAFDFSLDTLDAALMAPNGDWIIPHRAYDNNLPGFQKLKQDLLHHLSNLDEVRLTAAGESTALFWWHAFYQIGIDPDFASYDPSLALLNPLYVKNFRRAQPEEDKIDPKDARLVGTYYRTMGVKHYHTFDSRYLPLRQLSRAYFRLTHTLAAEKSCALNLIYLLASDYRRLKPFSDHFGVTSAHVLTEFSDITAIADIPIDSLADELDVLACGHLKDPQESARKLHQVAQNSYPLPDFLAPTVLTVFRMTLDHIRFLERLQKDYKRLIETELDQLPDADLALAESGLGPILVAGCLSEIQDTRRFCTGRKFDCQTKRWRDRVYRDGQAGVARLAGLWWPRNSSGRFEGDDRHLARERNPYLRYWFVQAAHSLKRNREDFAAYYQRKYNEVKKHQHKRALILTARKAVRLIFALLYKGQMARLEEESAS

SEQ ID NO: 446280 - protein, 361 aa, unidentified
MPTIADAGRLVTGGVDTHAEVHVAGMADQAGRVLGTREFAATATGYAAALAWMRGHGELVKVGVEGTGSYGAGLARYLAACGIEVAEVIRPNRQARRRRGKSDPADAVAAALAALNGEASGQPKSGNGAVESIRALQVARRGAVKARTQAGNQLLGLIITAPQELREKLAALPATDRVKLAARFRPGDLTSPAEAAKAAMATVARRHQALTAEIAQLDTALETLLAHAAPVGFRAKNGVGTRSAATLLVTAGDNPGRLRTEASFAALCGASPVDASSGKQRRHRLNRGGDRQANSALWRIVFTRIATDPRTQAYVARRTSEGKTTREIIRCLKRYVAREVYKALTAQTRQLKQDQPRRSTP

SEQ ID NO: 446281 - protein, 354 aa, unidentified
MKGTTKYVALDVHQAMTVVAVREENGRIIARSIIPTEEQAILEFFRGMRGSIHVTFEEGTQAQWLYDLLVNRVDSVLVCDRRGEKRHGSKGDQADADHLSELLRLGSLRAVYHGSPHLSTLKELTRTYQNVVEDSTRVMLRLKALFRARGIKAPGKRVYHPRNREEWLAKLTDQGVRFRAQVLYTQLNVLRELRPKAKAAMVAEVRKDPAWEVLRTIPHLGPVRVALILAIMRTPWRFRTKRNLWAYCGLAVVTHSSSDFDWVNGQAVRRKRAPLTRGLNRNYNRELKDVFKAAATAATGRPGPLRDYYQARIEGGMREELARVTLTRKLTAVTLRLWKRGEPYDPEKLTVQAR

SEQ ID NO: 446282 - protein, 376 aa, unidentified
MEHDSTVYVGLDVHKESITLAYAIGMGEVELLGKTGTTKADIDHLCKRVQSKGRHVRVVYEAGPCGYGLYRQLVQKGFDCMVCAPSLIPKKPGERVKTDRRDAIKLVRALRAGDLSAVYVPGVEDEAFRDLARAWAAAKDDLKQARQRLKSFLLLHGVRYTGSANWGPAHRHWLSQYSFGNGWQQLAFEEHRRTIEDRLAQCDRLEAALREAVVNWRFYPAVLALQTMRGVQFTTAVGILAELGDLSRFEHPRQLMAWLGVTPSEHSSGDRRRQGSITKTGNSYARKLLVEAAWSYRYPARVSPQIQRRHERIPKPIIDRAWDAQVRLCRRFRKLAARGKSVNIAVVAVARELAGFIWDINRLAMSLAIPRTPQAA

SEQ ID NO: 446283 - protein, 397 aa, unidentified
MKCPQGLDYRGSVTHSAVRRVRERHIQHKGGTNMISVHYVGMDVDKEKIVLARLAAGRTAEVQEHVIANTPSAVKKYFTALLADAEVHASYEAGCFGFGLYRQLGAMGVTVVVAAPGLIPRKASDHIKTDRRDARTLAMALRAGQLTGIYVPTAQDESVRDYLRMYEDLRGDLRICKQRVLHFLLRRGIRYDQGGPWTVKHKNWLSSLQFSDPRDRKTLDMYLSTMQEIEGKCSEAAEEVEQIASQDRYREQTKKLTAFKGIKTLIALSFVAEIGDFRRFPNARQFMAYLGLVPSEHSSGNKRRQGGITKAGNSHLRRLLVEAAWHYRSYHPSSRVLTERRKGVEPQILTYANRAGRRLSRKYMHLLLRGKRSQVAVTAVSRELAGFLWGAMTGQVA

SEQ ID NO: 446284 - protein, 412 aa, unidentified
MMEVLYERCCALDVHKKTVIVCVATRDGKQTRTFATMTSDLLELADYLVSKGCTHVAMESTGVYWKPIYNILDGLGMELLVVNARDIKAVPGRKTDVKDAEWICDLLRHGLLRGSFIPDRSQRELRELVRYRKGLVQERSREVNRIQKVLEGANIKLGDVATNVMGKLGQAILEALVQGNTDPESLAGLAKGKLRRKNEQLARALQGLIGPHQRMMLSTQLGHIRFLDGQIERLNREVEERMRPFEEAIEAIDAIPGVGRRIAEEVLAETGADMAQFPTAAHLASWVGVCPGNNESAGKRKSGRARKGNPHARQALVEAAQSAAHTKDTYLSSQYHRIAARRGNKRAIVAVAHTILTIMYHILTERTTYRELGPDHFDKLNQDAVARRAIKKLETLGYKVTIEPLSTLECSA

SEQ ID NO: 446285 - protein, 355 aa, unidentified
MNYIGVDCHISSLDFAVVNEKGTVTKRAKVNTGVKEFMEFVKNIPKPRKIFIEEGELAGWLLETSLKFKEKLIITDPKINKWIGKAGQKNDTIDAEKLAQLARGKYVKEIYHPVNDRRRFKDLIFAYHDTVKNQSRIKNKIKAKFRSNGINCSGKTVYLEKHRDKWREKLSSNSITCLILEELWVQMDQLHNSKEKLKKTIKIQSKRYPEIKKFMKIPGIGLIHGSTMSAIIETPYRFANKKKLWMYAGIGLMERSSGGTIYSRKLTREYNRPLKNAIKQSTEVAIAAKDNKFRRQYLKLTIEKGIASHRAKLTVARSLLAALYGMWKKGEAYDPEIDKKRENKISVRTILPGLV

SEQ ID NO: 446286 - protein, 322 aa, unidentified
MTECILGVDIAKKKFDVALLINGKLKHKVFTNDQEGFEMLLSWLHQKNVDRVHVCLEASSTYGDELATHMYDAGHTVSIVNPARIKGFARSELLRTKNDKVDAGLIARFCLAMHPEPWKPAPPEIQHLQALARRVDALITMRTQELHRLGTAQDTIEHSIREHIVYLDRQIKALKQQIADLIKDDQDLKAKRDLLKSIPGIGEATVAAILAELHMFERCDHVQKVVAFIGLAPRQFISGTSIKGKPRLSKVGHARLRKALYMPALASIQCNPIIQIFYHRLKENGKNGKVIVCAIMRKLVHLIFGILKSGKPFDPRYAPHYA

SEQ ID NO: 446287 - protein, 351 aa, unidentified
MIIIGCDFHTRFQQIAMLDPTTGEVIERRLEHEKGEAEKFYGTLPGPARVGIEATVNAQWFEKVLREYHHELWVGDAAEIHAMRVRKQKTDSRDALHILDLLLTDRFPRIWIPSPAERDVRQLVRHRHKLVRIRTSVMNQLHALAIGQGLCRKQKLWSKVGRIELEALVLDRWASRRRHELLQLLDQLNPWIADLDRAVMQEVQSRPEALHLMREPGVGPVTALAFVLTIGPVVRFQRSKQVVSYLGLNPSEESSGGRQRLGSISKQGNSMLRHLLVEAAQAASKFDPELRRDYQRLKFRRGHSGVAKVAIARKLAVRLYGKLREAAQPNTAARMQGSPANPVADESLSAK

SEQ ID NO: 446288 - protein, 413 aa, unidentified
MQVLYDHCCGLDVHKKTVVACVMLTAATGKVFQEGRTFATTTAGLLAVADWLTHQQVTHVAMESTGVFWRPVFNILEGSLEVILVNAQHMKAVPGHKTDIKDSEWLADLLRHGLLKASFIPPKPIRDLRDLVRYRKTLVQQRADEINRLQKVLETANIKLSSVASDVMGKSGRDMLEALLAGVSDADTLAQLARGRLRAKLPQLREALEGRVDGTHRLLLRHLLDHITYLEGEVEKLFGEIATLLNPYERQITLLTGIVGIGRTAAVAILGEIGTDMSRFPSHKHLASWAGVAPGNKQSGGKRLKAPTNKGNRHLRATLAECVWVISHTRENYLSAQYHRLARHIGKKRAIVAVSHSLLIIIYHLLRDDQEYHDLGPHFFETLDTTRQRDTAIRRLQALGYTVTVQAKTEVSA

SEQ ID NO: 446289 - protein, 400 aa, unidentified
MKYYTSTTEFNCGIDLHARQMYVCVMDRQGKKRVHTNVRDNDFNFFLKLVAPYQHSLTVCCECMFGWYWLADACQAAGLTFVLAHALYVKAIHGGKNKNDRVDSEKLTHLLRSNLIPPAYVYPADKRPLRALLRQRIFYVWRRSELLARIYSHQLAHNRIPAKQTRRTRDLWEEALLKAEDHPLRQLALKNDLTMIKHFDRQICQLEEELQRQTQKVACREYSLLQTVPGIGENLGLTILYEIGDISRFPTVKDFLSYCRLVKGTVASAGKIKGLRGAKLGNPYLRWAFGEAAVIAKRDHHLVGPLSQRLEAQMNGNKFKANTVLAIKLARAVYFMLKNKTVFDPERLVASMQKCFSPGRRPPGSLTGRAKKAMPPPVPEDASCAPSTAVCVGQASSPAH

SEQ ID NO: 446290 - protein, 414 aa, unidentified
MEDILECCCGLDIHKESIVACLLIGPIEGGLKPRSEIREFGTQLKDLIALRQWLEEHHCRYVAMESTGIYWQPVYAVLETSLSDEMHLLVVNARHMRNVPGKKTDMRDAEWIVTLLRAGLLKGSFIPEHDIRDLRQYTRYRKAIIRDITSQKNRVEKLLQASGFRLSSFLTDIFGSSGVAIMQQLVQVGCISEQSLKVCLKGRARQKSVEILSSLNGTLSLPQRQLLKMQLAHLKDLQDNLREVEEQIHKDFYQFEGPRNLLDSIPGIDLTAAYAILAEIGRNMTAFPTAQHICSWAGLAPGNHESAGKKKKQRVMSGNNYLKTILCEVAWVIASHREYYLSGWYWRLKQRTDSKRAIIALARKLLVIIYTMLKTNQPFDERKFSERKETINRKRVSRMVHELTKLGYVVSMSA

SEQ ID NO: 446291 - protein, 353 aa, unidentified
MLYLGIDQHKRFSQVAVIDDGGRTVRQEKLYHDDRVRMRRFFSELAGSPAALEATRNWDWLWEMLEEEGVRPVLSNPSQTRLIADAKVKTDKVDARTLAQLLRTGFLPTVQVLPRGARDARELHRFRMRLVRMRTRIKNQVHAILDRQGIRTPDVSDLFGKAGRAFLDELTLGAPYDLELSALLSLLDAITAQIARVMRPLKKTLREDPRSRHLLSVPGIGDVLGYLILHEIGDVRRFRSAKRFSSYSALVPQTKQSADRLWQGKTGRRGNLYLKWALVEAAHTARKRDPMLGDLYDRICRKKGPQKAIVAVARRLSIVVYRVLSQQRMYETVRETTPGRPAASLGRRTADRS

SEQ ID NO: 446292 - protein, 411 aa, unidentified
MRLFVGDDWAEDHHDVEVMNEAGKVLARKRLPEGAGGVAGLHELIGRHLGEDADGAEVAVGIETDRGLWVAALVAAGYTVFGVNPLQASRYRERHGVSGAKSDSGDAHMLADMVRTDSHQLRATAGDSAEAEGIKVLARTHKTLIWERTRHVQRLRHQLLAYFPAALEAFDDLDAPDALELLGKAPEPARAARLTRAQVSAALKRAGRRNITGRATAILAALRGEQLGQPPAVTAAYAATVRSLIAVITVLNEQVKVLQGQVEADFGRHPDAEIYRSQPGIGAVLGARVLGEFGDDPDRYADGKSRRNYAGTSPLTRASGKKKVVAARFIHNDRLVDALNAQAFASLNASPGARALYDELRARGIEHNDALRRLANRLVGILHGCLKTRTLYDEATAWGHRENLPQSSVAA

SEQ ID NO: 446293 - protein, 382 aa, unidentified
MQASTLATPTAGHCGTVFVAIELSQKTWLVTLHSPDRDRISRHKLEGGDHAGLLALIAQVRARAAKKLGAVPEVTSCYEAGYDGFWLHRLLRAAGIANHVFDAASIAVEQRSRRAKTDRIDGELLLRTLMAHLRGEPRVVRIVRVPDVAEEDARRASRERDRLIIEQTAHTNRIKALLRLQGMAVGNPRRRDWLGWLGRQRDWQGQPLSPQLRAEVTREHTRLMVVREQLAALEQAQAARALPLPAPMAERQDHLQRLKALGPAFAATLVNELFYKNFGNRREVASYCGLTPSPWKSGGIDREQGISKAGNHRARHKAIELAWLWLRHQPDSALSRWFRTRTANAGKRARRIAIVALARKLIVALWRYLTTGLVPEQATMKV

SEQ ID NO: 446294 - protein, 489 aa, unidentified
MNDLKLHRVIGLDLGVASQHSAVVLDGTGRVAARRRVSSTAASLGELERVALTGAAEGTTLIVVIEPTGPMWLPIAVYFGRRGHTVVRVSSAKAADLRRFLSRHAKSNGIDAETLARMPMVAPSGLHPVELSGADRASLDRRVRTVARLTREIGQRKVRIRALAQTAIPTIGAALGDDLNRTDLAVLERYAHPRALLAAGPARLTRLVHTESRGKLGAAKVEALRTAARQALELWAGDTAIALSDLAEEIATEIRLLRLTETERARHEQARDAAHAQVDPAGLATSLPGLGPVGSTQLLAAMGRPGRFRSAAAFKAFTGLAPKASETGNTDRKSQPMSKAGNRALRTQLIQSANTARQLDPQLAAIYHAQMTERGANHLKALCVVAARLAERAWLTLSRGEPYTIRDLQDRPVTPAEARTLIDEQFTVPAAVRRRRRSKKQAGRAPQHCTRQKSQPTAGHEATRPSTTITSTPAAVNPDPTEVLTALPT

SEQ ID NO: 446295 - protein, 338 aa, unidentified
METYAGIDLHSSNNFVGVINDKDKILYGKRHKNRLDDVLTALDPFKDSLKGVVVESTFNWYWLVDGLQEHGYRLHLANPSAIQQYEGLKHTDDPWDSFWLAHMYRLGILPEGYIYPKEHRAVRDLLRRRLLFVRQRTAQILSLQSMISRNLGFKMSNNEIKKLKPADIESLFDCSNLVFMATNSWATIEFLKHIIKGIEKRVKTQVKVRKEFEMLRTIPGIGNILGLTIMLEVGDIGRFIKVGDYSSYCRCVESKRLSNGKKKGENNKKNGNKYLAWAYVEAAQFARRYCVKAQSFYQSKEAKTKPVVAIKALSNKLSKASYYIMRDQVAFDEDKLFS

SEQ ID NO: 446296 - protein, 387 aa, unidentified
MQKPHDNSKASPAAFTQDNTLIAVIELSLSSWLVGGLIPGVSREPLKKLEPNPEDLLKLLHRWRDEAIKAGRLITRIAVAYETGRDSFWLARWLRERGIDAHVIHATSVTVSREHRRAKTDRLDTAMLKRGFLGWLRGERGHCTVAIVPTMEEEDAKRPHREREGLVHEQTRVVNRMKSALIQFGVRNFNPKLRKARVKLETVRTPEGKSLPPNTIAALRRDMERLKIIKEQIKAIEQTRLQQFEQKPEALANRMIYLLARIYGLGLETADLLVHELLSRTLRDRKAIARYAGLTGSPDESGSKRREKGLSRSGNARVRKIMIQLAWRMVKFQPDSALVQWFKQRTENAKGSRKPMIVALARKLIIALWRYANDGVIPEGFRLHLAA

SEQ ID NO: 446297 - protein, 312 aa, unidentified
MNDQKPSVYAGLDIAKASLQLHLQDKFYDLPNSPAGHAQLLQRLAAVPGVHVVCEATGGYERAVVAALHAAPVPVSVINPARVRQFARASGQLAKTDPIDAAVLTAFGQAFAPEPTPPRTATELKMAALVTRRVQLLELRVAEAQRAATCADPDLRKLFTPWLAQMEKQISKLEALIEVLLKEQVPLARQVQRLDDIMGVGRLTAVMVLATMPELGQLNRRQAAALAGLCPYNRDSGQWAGQRHISGGRAEVRRALYMAALSASRSNHLLQPFYERLIAAGKPAKVALTAVMRKLIVLMNHLLKNPEFSLAT

SEQ ID NO: 446298 - protein, 398 aa, unidentified
MIYVGIDVAKDKHDCCIMDQDERILHPVFTFANNKAGMQQMLDAIDNAAPVESAGQSRSDIAVGLEATGHYSYNLLKALADHDLTTYLINPLHTNLYRKGLSLRKTKTDRVDSAAIAMMLIHDRSLKPYKNTADYTDELKSLTRYRFDRVQDRARLKISVARLVTILFPELERLVPDLHISSVYALLSEYPGASYVAEAKLSKLRELLELSSRGHYSKDKATAIRDAARNSIAVTMPAKSLELKCTIRLIRVMDEEISEIERSMKAIMDTLNPPILTIPGVSYRMAAMLLAEIGDFARFENADKLLAFTGLSPSTYQSGQLVSTYCHMEKRGSRYLRYALFNTTRFVCQWDPAFSAYLSKKLSEGKHYNVAISHAAKKLLRVMYKMQLSGEPYHGTPK

SEQ ID NO: 446299 - protein, 342 aa, unidentified
MDTKRYIGIDLHRDCFTACLRLENGREYLKEWKLEDMAKFTAKLRPSDEVAVEVTGNTRLFHDAVAPHVGRVVAVNPSQFKVITHSVKKTDPNDARNLALYLAKDLLPEVRMKDKTQAQIASLTQTRDTMVKLRTALKNKVNNICSAHGVNLNKESLGSEKGLRAVLEMRFDPLVNLELKIIIEQIRSLNQSIAELEETIGKEGQKLEGHKNLTSIKGIGGLSAGILLSIIGDIGDFADEGKLAAYFGIVPRISNSNQTEHSGRITKRGTKLGRTTLVQCALIAQRYSPYLKAYYEKKKSRGTGKAIIALARKFLGIIYRTLKNRWLFEDFPNFVLADEATA

SEQ ID NO: 446300 - protein, 350 aa, unidentified
MIIIGCDYHPSFEQIAFVDTETGELQERRLQHREEAEKFYRDLAAQGMKVRVGMEASGHARWFERLLSELQFELWIGDAAEISAKRVRKQKTDRQDAQLILRLMLKDDFPQIWVPSWENRDLRQLLWHRHRMVQARTRMMNQLQAVALNEGLRCKKKLWREAGRAQLEAFKLAPWASQRRTDLLELLDRLNPTIAKLTQAIDREVEKCPAARRLQTHPGVGPLTALAFVLIIGKTDRFQCGKQIASYLGLVPLEKSSGNQRRLGHITKQGNSLLRFLLVEAAQVTVRSLPEWRSKYCHLTLRRGRKIAKVAMARKLAVRLYWMMRKEWDYERLRKFGSHAGKPGYRDGVK

SEQ ID NO: 446301 - protein, 341 aa, unidentified
MYSIGLDISKASISVHIPINSLNLEIDNTNVALKALYSKLKKLYKKDLDKLTFVYEPTGSYSFLTKKFCADKNIKSFIINPKQSSNFAKALGNRSKSDKIDAIMLSKAIAIARVDEIRVPVINETLETIKEMMSYYKFTVKQRVALGNHNEALSCKDGNKYTLKNIAKRLKSFKEEEIEILDKIKEIIESDDKLSKTYANIQTIPGIGKIAGIVLVHLFISYPNASKNQIVSLTGLDPIIKDSGTSVKGKPRISKAGIKLYRGSLFMATMVAIKYNEQMKEFYNRLKDNGKHSTVAQIAVMRKLIVIAHSLYKNNCIYSAEVYEKACGKYTVNYDENGVIT

SEQ ID NO: 446302 - protein, 306 aa, unidentified
MSKRVSKKESWFKENNFTAEDELYVGVDVHKVHYHVAIWHNGRIGCIYSMSSDNNRLLQDLRKIRSSLKNVVYEAGPTGYSLVRLLRSAGFHAEVVAVTKTPRMTDSTAKTDRLDCQQLAEYAAKGLLTFVAVPAQQQEADRQVVRLRDQLMSKRKRVMQQIKSFLLQHGIAWPGGGWSEIVLHQLSAMDTGSELRFTLDQYLDEYEFLSKKAAETKAKLHQIFSSERHSAAIAIFKSHPGVGDIVAWEFRAEIFGITRFSEPKQISKYIGFCPRISQSGKTCHQGPITKTGRRQLRAMLIQATCA

SEQ ID NO: 446303 - protein, 337 aa, unidentified
MTRYVGVDLHRRRSVIVVLDADGTELWNRRIDNDPLTLGLEIEEAGPEPEVVLEATWGWYWAADVITQAGGRVHLAHPLGIAGFENRRVKNDRVDARLLADLLRMGRLPESWIPPESVRHQRELVRYRRKLSQLRAGLKAQVHAVLGKEGLLPPINHLWGPGGSDWLDDTGMADAYETRVRSLRRLIKLYDTELSKLDVRIAAEFKDHPGYETIQHLNGVGPVLGATFTAELGDVSRFGSAKHVCSWAGLTPRHRESDTKVHRGSITKQGPPLVRWAAIEAVSKNHGDDPIKDLYRRVSERRGRNKGRVAAARKLLTLVYYGLRDGEIRSLAPPEAA

SEQ ID NO: 446304 - protein, 408 aa, unidentified
MQVYIGIDWSENKHDVVFMNEAGADLACLVIAHTPEGFAQLDVRRRKLGLAVEDCQIGMETAHSILIDYLWSQGYTQLYVLPPNQVKSNQGRFRQSGAKDDPADARLIADILRTDRRPLQPWKPDTLLTRQIRSQVSLIIHLNRHILRLSNRLRAILLRYYPAALRIFSAGLRTQILPEFICAYPTHQAAQRLTFTEFEAFARHHRYPALGRLPACFANLQADYPAASPEVVLTYQSEARMLAEMLLLATRDKMLCLRQLLHLFRQHPRHATFASLPGAGEFIGPALLAKFGDDPLRFPSAASSQSLAGTAPVTRRSGKRKTVSYRWACDKEWRYIAQEWGIALVHQSRSPIAAAYFQTIRPHCHSEAHAYRCVANRWMAVAWKLWQTGQTYDEAYHFRQRANRSKPR

SEQ ID NO: 446305 - protein, 431 aa, unidentified
MNKGRIPLANTFSIGGFSMTLTCVGIDVAKGKSTISALGWGDVVLIKPYDVPHTASALCELAGSLRQLPGEVRVVMEHTGRYWFPVAQVFYEAGLFVCAVNPKLIKDFGDNKLRSIKNDKADSKKLSRYGLKYWTDLVPYIPTEVTRQKLLEFSRQLDASNKLLTGLKNNLQAIVDMTFPGVRKLLKSPARDDGHIKWVDFVCTFYHCNYVRELGEARFMERYRNWCKRHGYSFVSRGAGKIYAIAHNQVTTLPCDADTKLLISEAARQLTSVSAATETWRAKINALASILPEYDCVMSMYGCGKTTGPQLMAEIGDPVRFTGKKNLVNFAGIAPGDNQSGTYRQKSVSASKKGSSHLRKTLFLVMSALLQKSPLDEPVYQFLDRKRAEGKPYYVYMTAGANKFLRIYFSKVRDHLAMLDAASSNSTLANP

SEQ ID NO: 446306 - protein, 401 aa, unidentified
MQDTQQRDAVDVFVGVDVGKGHHHAVALDRNGKRLYNKALPNDEAKLRALIAELKTHGRLLFVVDQPSTIGALPVAVARAEGVLVAYLPGLAMRRIADLHAGEAKTDARDAAIIAEAARSMPHTLRSLRLADEQLAELTMLCGFDDDLAAQVTQTSNRIRGLLTQIHPALERVLGPRLDHPAVLDLLERYPSPAALAGTSEKTLANRLTKLAPRMGKGLAAEIVQALSEQAVTVPGTQAATIVMPRLAQQLAALRKQRDEIAAEVERLVLAHPLWPVLTSMPGVGVRTAARLLTEVAHKAFASAAHLAAYAGLAPVTRRSGSSIRGEHPSRRGNKVLKRALFLSAFAALRDPVSRAYYSRKIQQGKRHNQALIALARRRCDVLFAMLRDGTIYQPKSVPNA

SEQ ID NO: 446307 - protein, 477 aa, unidentified
MKHAKSSPCARAIPPRGGQLSRKERRELARQIQSDQVTLQIVHANAAGIDVGKNTHYVAVPPDRDGEPVRYFESCTDGLQQMVAWLKKCGITSLALQSTGVYWIALYDLLQEADFEVYLVNARYTKSLPGRKSDVQESQWLMKLHTYGLLPNSFRPPQEIRWLRSYWRQGQNHLRSAASCIHRMDKVLTEMNVRLSSAVTDLSGATGLAIIQAIVDGEQDPHKLAAHRDPRVKATQEEIARQRHGNWQADLVFRLKQELQAYRFYQTLIAECDRELAKLLRAFPDRSAGVELPAETRKGRRKKKRGNSPQFDLRQLLYLMSGVDLARIDSIDVITAMTVVAEAGYDMSPWPTADHFVSWLRLAPDNRISGDKIIGKGRTPTQNRLTQALKMAASSLKSSKTYLGAQYRRLRARRGPAVAVKAMAAKLARLVYNTLRHGMEYVDRGTEFYEQQQQQRRLHALAKNAAQLGFQLVPVVS

SEQ ID NO: 446308 - protein, 460 aa, unidentified
MSEPIPAAEPDYAAFIAIDWADRQHAWVLQVSGSTQRETGQLEHTPEAIEDWAMQLATRFAGRPVAVALEQARGALLYSLSRFEHLVLYPIHPSTSYNYRKAMFPSGSKDDPKDAAILLDLLTLHRDRLRLLRADTAPTRKLQILVEKRRQLVDERTAQTNRITDQLKMYFPQVLKWFDSLHAPIVAAFLQRWPTLPRLQKEAPEAVRKFFYEHGSRSGERIEKRLQEAAKAQALIHDAAVIEPGVLVVKALLAMVAALNEGIRALEKAIEDVTAAHPDYSIFYSFPGAGPAMAPRLLAAFGTQRERYASASELQSFSGIAPVMEASGRQCWVHFRWACPHFLRQTFHEYAAASVQFCDWARVFYQEQRAKGKEHHAAIRALAYKWIRILFRCWQSRQPYQEQLYVAARQARALALPSRQQNLPAQTASHGKPTSRKTGKAQDFAMKSIGEILKSFMAEA

SEQ ID NO: 446309 - protein, 357 aa, unidentified
MRRYRLAVDKRKPQRTSQIFIGIDVHKIQWHITIRTEDVELFSGSIPGKWEALKKLLDRYADCQKQAVYEAGYFGFRLYDHLMDYGVDCVVTPPSLVPQEYGNHVKTDRRDSRKLAHLLAKGLLKRVWVPSPEQRYERQVIRRRKQLVADRVRTQNRIKAELCFYSIELPAPTGQWSKAYVGSLQHLRFDNRWMQESFARLLEEYEFLTQQIERQTKLLRELAETDQYEERVKILRSTPGIGLISSMEYLLELQDLKRFQRGNRLAAYVGLTPSQYSSGEKLRMGRITAIGKNDLRGTLVEVAWRLIAKDPAMREKYERIKIRAGSKRAIIAIARTLLLRTRRMLLDRQPYVVGLAA

SEQ ID NO: 446310 - protein, 354 aa, unidentified
MQSMTEPPAVVIAGVDCHKYTHHVCTIDRQGRRLADGQFEATRAGYQGLLEWLQAQGRVESVGVESSGSYGAGLTRALRRAGVRVLEVNQPHRPLRQRRGKSDCLDAEGAARRVLSGEAHQIPKDTTGVVESIRVLKRTRDGAVKARSMAQSQLGELLVTAPATVRESLSGSTAKVQATACARLRPAADRLEQPVQATKLALRSISRRILALSEEIQDLDRQLQSLVARVAPRAMSLCGVGTQHAAELLVALGQNHERIRSEASFAHLCGAAPIPASSGLSQRHRLNYRGNRRANRALHLIAVVRLRYCDKTRTYAARRCAQGLSKKETIRCLKRYIARQLYKTLRADLMDWAT

SEQ ID NO: 446311 - protein, 400 aa, unidentified
MSVLKGSFDGFVGIDVSKDKFDACGITGDETKRFQFSTTMDRKGFEKLNGHLAAVSISSVLIGMESTASYHVNLFSYLVSEGYKVILINPLLISNYVKMQLRKTKTDKKDAVVIAQFLLANGEALVERATPSLISDLRDLSRQRESLVDEMTSLKIEIKQLLNITFPELEHMAGIFTKSILKLLQQYPSAFALRDADLGQLSQTLIADSYGHKRGAFAAELIKAAHSSIGSKSSAKDMILKQKIALLLHFEDALQEVTGMLIEMSRKLMNEDINLMTSLKGIGEKAAANFLIEMGGDINQFERSGKVIAMAGLDPAVYQSGKHDGKGRITKRGNRHLRKIIWLMTTKVIQYTDVFSIYYLKRRKEGLPYKMAVLATAHKLIRVIYAMLTQRTTFCPQVNS

SEQ ID NO: 446312 - protein, 316 aa, unidentified
MTDDSMICAGIDVGKSHLDIAIHPGDARLRVAYDATGLKRLDAFLQEHDAKRVGFEASGGYEWRLMVHLRGKKRPAVRLQPAQLRFFARSRLQRAKNDRLDATLIAVFTASLETLSALPDARFDRLSAELTYLEQIEQQIALVKTFAETAVPDIVKRRHAREIARLETCRNAHMLRLEKLVRGDPDLARRLDLLVSIKGIGMRSALCLVIRMPELGHAGRNAIAALAGVAPYDDDSGKHRGRRRIQGGRERLRKSLFMCAFTASRHNPDLAAFYKRLRDNGKEHLCAVIAVARKLVILANTILTRQTEWTPKYVEG

SEQ ID NO: 446313 - protein, 457 aa, unidentified
MSAPKKVKIKSTHKTNVQLPTLRPHAAGIDIGATQIQAAVPCDADSRPVRTFSTFTDDLHALRDWLKKCGVQTVAMESTSVYWIPLFQILEAAGLEVCLVNARHCKNLPGRKTDISDCQWIQYLHSVGLLRASFRPPEQICAVRSLLRHRANLIRYAGSHVQHLQKALTQMNLQIHNVISDLTGVTGLAILDAILAGERDPQKLAALKDHRIKASRDTIARSLHGDWRPEHLFVIQQALDTWRHYQKLIAQCDQQIQQLLARFDSQLDLSQRPLTTTRLQHKKPQRNEPNFDARSELYRLCGVDLTQVPGLQVNTALVLFTELGPDFVTRFPTAKCFGSWLGLCPDNRITGGKIISVKTRDVKSRAAQALRLAAQSLWHSKDYLGDCFRRWKARLGTPKAITAMAHKLARIIWHLIKYRTPYDPSVWAQAEEKLKQKRLKFLQQSAAALGYTLLCTS

SEQ ID NO: 446314 - protein, 394 aa, unidentified
MKLVGIDVGKNSHHFCVMDKETGEFNVAPSSFSNNKEGFDFLINSLKPYSKKSILIGMEDTGHYHVALLKFLLSNGYTVALINPKTTDLTRKMEGGITKNDKLDTITICDVLDTPERKKQYRITKVDRFDLYEQRQLTRHHHNLKEELNVYCNRLQKSIDLVFPEFNTLFSSKYSIVYMNLLKTFGSAEAIASTDIRTIRKCFEIKGRGNRISLTPEKLKECAKNSIGISSEVETIQIKHLVSQITLIKEQIAEIDKKIEEFSITNNSPILSIPGISHFSGTSILAELGDIGNYSKPSQIIKFAGVAPYHYESSQYNAQHTGITKKGSKYLRKTLYQIILTVINNNPVFKKYYRLKISQGKGHRCAQGHCIRKLLRIIYHLLETGQSFDPALLR

SEQ ID NO: 446315 - protein, 364 aa, unidentified
MRKELAVEHLAIDLGGRESQVCVRSEDGTILLEQRMDTALLGKYLHRRPKSRVVVEACTEAFTVADSALGAGHEVRVVPGQLVRSLGVGSRGVKNDRNDARALSQVSCRIDLPSVHIPSALARERKATCGMREALVESRTKLINTLRAWMRSQVRRPAPGHARTIVKRVRAAIPDRPSYVERMLESIEELTKQIAIADKELEALAEADETCRRLMTVPGVGPVTATRFAATVDEVGRFASAHLLESYLGLVPGERSSGERRHSTSITKAGSAKMRWALVQASWVAKRCGRKDPMILWAAEIEKRRGKRIAVIALARKMAGILYAIWRDGTTYDPTRGASQLPPTATDTKAMLAILKKAAEQPSN

SEQ ID NO: 446316 - protein, 477 aa, unidentified
MDLPQTRLKNTVHRVMCINKEETSMNVSPPVFNETRRHVAGVDVAGAADHYVCGPRNDDATHDTTHFGTTTSELHKLLAWLKERKVESVAMESTSVYWIPVADLLEANGIEVVLVDTREVRMVPGRKSDVKDCQWLQRLHSCGLLRGGFRPPEKITAIRTVMREKDTLVGARTQFIQQMQKSCDQMNIRIHHAVSDIDGATGMAIVAAIIGGERDAKVLAKLRDKRCKKTEGQIAEELRGTWREEHLFNLERAYRMLVFVDEQIALYDSKIAAMYKALAESMGRQPIAPYTDSSQKPGGKASRNVAEKLVLESITGFNMTQIAGVGYETAAKFISEVGVDLTRFPSERHFFSYLGLAPWLGKSAGKNVRQKKRFKNTSRGGRVLRMAAATLYRSNSELGAYFRSVARRNDRKTAIKATARRMAQIIYRALRHGVAYVEKGAEHYESRMREKTLRTVRNLIKVHGINELELASALKAS

SEQ ID NO: 446317 - protein, 450 aa, unidentified
MREPEEIEEREHEIAVARVAAVDVAKASGVVCTRVPREGEPGRFVTRVHPVEATTNAILELADYLAGMRIEKVVLESTSDYWRPFFYLLEAAGLAVDLVNARDVKNAPGRPKTDKLDSVWLAKLAGWGMLKPSFVPPAEIRQLRDYTRLRTDLVRERGRHWQRMEKLLEDALIKVTTVASRIDTMSVRDMLEALIAGERDPRALADLARGKMKAKRAALIEALTGRFDDHHGELARILLSQIDSLTAQIGMLTARIEELITTIPAAQGVKADGTTGPHAGQDTGDPVPPAITRLAEIPGISVQAAQVIIAEIGLDMTCFPTAGHLVSWAKLCPRTLQSGARTRPGRTGKGNPYLKGVLGDAAAAAGKTDTFLGERYRRLVRRRGKLKALVAIARTILIIIWHLLADRAARYSDLGPDFYASKIDISRRTRSHVRQLEALGYTVTLTPAAA

SEQ ID NO: 446318 - protein, 393 aa, unidentified
MHNCLAVDVAKGKSMVTLVSSSGEVLIDPYEVNHSINDFSNLLNRITNFKLDNISVIMESTNIYHRPIERFFLENNFKVFVINPIYGRMHKRNLRKTKTDKEDCFNLVNLFISNTFKEYIKPDQLYLDLNALSRQYFALDELCVNIKNRYRNLVYLCFPEYEEIFKGTLIYSNIALEFIESYPHVDIISNTRIDKLQNFFKKREFRYWKSKANLIKEIASKSYPSVNMNDELVSNLSQIARLVNEYQKAIDIIKYKIISLAKKSKYFEPINSIYGIGEFTTSIIIAELGDINRFNNIKELTAYCGLDPSIKQSGKSINIRGPISKSGNKYMRKILYIACSNIIRLAAISKQENDIEIYYRKKRNEGKHHYAAIVACTTKLLRKILALCKQLDN

SEQ ID NO: 446319 - protein, 405 aa, unidentified
MSDGMASGGHDAGAVTRAPFVMGEEPGAIVAGFDVHRRQITIDALDTASGEVSRGQIESTPAAVEEWVAGFPGRVVHVAVEACTGWLFVCRALERSGATAHLAEPVETSALRGRKRRAKTDRADAKWLRQLLWEGRLPEAWLPPEHVRQWRSRARLRNTLVDERTSWTQRIRATLYHHGIAGAPDELRTLAGRRFLAPLELPVDARERITLALEIIDLLDAQLAELERDLRALARHQAGCRALMTQYGMGEISSLVTLCELGDVTRLHASRQAVRMAGIDIGVHRSDRHAQLGKLTRQGSAPLRWALFEAAQSASHTGSPDYADYHALKARGLSHTRACLTIARKLARRSYHLLRALGPAALEPPLPPEKRSAQAHPSPMRSKHAASSSWNALGSTETGLVGVFQ

SEQ ID NO: 446320 - protein, 354 aa, unidentified
MKLYVGLDVGLEETSVCIVDSEGLTIREVKVSTEPEAIRSAVEGYADRLDRVGVEASSLGIWLYRELQSAGLPIIVVEARHMRVSLSTMRNKTDRNDARGIAQMMRLGWYRAVHVKNIDMQKMRTLLTNRKLLKRKLIDLENHVRGALRAYGLLVGAVARGAFEARIRELIEHSDPIFVMSIQVMLDVRRALLEGYDRLHRVLLQVVQHDPVCRRLMTVPGVGPVVALSFKVGVDDPHRFARSRTVGAHFGLTPKRHQSGTSIDFEGRISKQGDISVREALCEAAASLLLRVRKWSALRAWGLRIAKRSSMLCAIAAVARKLAGILHRMWVSETDFHVGFGAKITQRLRLKPAQ

SEQ ID NO: 446321 - protein, 332 aa, unidentified
MENFYFIGVDVLKKKLNFCVMFEGKVVHEEETSNHQGAIMSLLHHLEEDYGIASGQMLVCAEHTGQYTFPLACACKAVECRLWLENAAEIKYSSGVQRGKSDKVDAKRIAIYASRFQDKVRYYERPTEDIERLKQLESERTLYVTDFAKYKGQMKDQKEYMPKSLYERKMKRLQALMDDLEEAIQAITDEMDEVIASCPVLSRQRKLLISIDGVGRVVATNMIITTEAFTRFDDPRKFNCYAGVAPFSYSSGSSQHSKARVSHRADKVMKRLLHLAAVAVTHRIGGELKKYYERKVAEGKNKMSVINALRAKIVARMFAVIKRNERYKPILS

SEQ ID NO: 446322 - protein, 423 aa, unidentified
MPYRIAGIDVHKKKLAVVVADVEVEDEYQFERRWYGSNPEQLQLLAEWLIQQQVEEVVMESTAQYWKPVWGALEQYWKPSCEKREGAGRMSGTLHLAQALSNRGRRGRKKDFRDAERLLKRLVSQVLTLSFVPHAEQRLWRTVTRTKYQLRRNKVRLHNQLEALLEEAHIKLSSLVSDLLGASARRMLQALAEGETDPAALAALADQRLRATSTQLRDALGACTELNPVYRRLVKMVLEELQWIEQQIGQLDQEMASLLRQHQDAVQRLAEVPGLGVDPAQQIIAEVGAKAATFASAKNLSSLVGACPGEEESAEVNYSARSPKGNRHMRRLLNQAANAAVKVKGSIFEIVYRRLGPRLGHNKTIGAIAHRICQLIWIILNKGVRYEERGPAVSENSRRARTSRMIRTLRKLGYRVELQADPA

SEQ ID NO: 446323 - protein, 372 aa, unidentified
MTSVVYVGMDVHKASFSLCALDKDTGEIIRETKCASDPKLVEKFVDRLSEELGSRTEFLTGYEAGVLGFSLSKSLQILGVNCVIMAPSTMYSSGKNKRIKNDKMDAKMIARNLAANTYRSVHIPDEEDDDVKEFMRMRNTQKKSATRIKQQLGALILRHGFQYQGTKTKWTQAHIEWIKSLKLSDTLQLAVDEYLIQLAELIEKIARYDQLIEKFSHQERYEQPVNRLCCMKGLSTMNAMTIQVEISDFERFPSAPAFMSYAGLNPSEHSSGEHTHKGSITKQGNSVVRTTLVEASQALVKGRVGYKGRLVKARQVGQDASVISYADRASAHLQRTFHRMIEAGKPYNVAVTAVARKLAGYIWGMETGRIAD

SEQ ID NO: 446324 - protein, 350 aa, unidentified
MIIIGCDYHPGFQQIAYVNTDTGELSEARLGHKEQAEQFYRELSQRGVTVRVGMEASGHARWFERLLNELQFELWIGDAAAIRTKRVRKQKTDRQDAQLLLRLLLEDRFPRIWVPDVENRDLRQLLWHRHRLVQMRTRVMNQLHVVALNEGLRRKKALWRPAGRVELEGLSLAPWASRRRQDLLDLLDRLTPKIHELNGKLEQIVELRPVTRQLSTHPGVGPLTALAFELVIGTPERFACAKQIASYVGLVPVEESSGDRRRLGHISKQGNTLLRFLLVEAAQVTVRSDPQWRSQFFHLAMRRGRKIAKVAMARKLAVELYWMWRRGWEYDEMQQLGSHAGEPGNRHGVQ

SEQ ID NO: 446325 - protein, 355 aa, unidentified
MNQEKYIGMDVHQATISVAVMDGRGKLIMECILETKAATMLEFIQGLQGTLSITFEEGTSAAWLHDLLKPHVAHLVVCDPRKNALLKDGSKSDRIDARKLAELLRLNKLNPVYHGGHGVRTLRELGRSYLTITQDLSRVMSRIKALYRSWAIPCGGTTVYAPRHRAEWLAKIVEPGVRLRAQRLYQQLDLLQPVRQQARHDLLVESHKHAAVKLLRQVPAIGPIRAALLVALLQTPHRFRTKRQLWAYSGFALETHDSGEYRMVRGKLRRNRERLTVLGLNDNHNHDLKNLFKGAAISASTRPGPLYDFYVALLEKGMRPTMARLTLARKIATITLTMWKKGVDFDANQLNRQAA

SEQ ID NO: 446326 - protein, 353 aa, unidentified
MKYKREEIIQGEDVFVGIDLHKRTWHITIRTIDLVVFSASIPGKWEALSKLLDRYKKAKIHAVYEAGYFGFWLFDKLTERGVDCIVTPPSLIPQEYGNRVKTDRLDSSKLARFLSKGLLSQIYVPSRQERFHRQVLRRRRQIVRDRVRVQNRIKSELTFYGIDLPTPSGKWTQVYFGNLCKIKFRNKWMQESFNRLLEQYEFLCSLIDEQTKVLKKLAQLPLYRERVEILRSIPGIGIIGSMEILLELQDISRFKRADRLAAYVGLTPSQYSSADKIRMGRITGIGKNSVRTALVESCWLLISKDEAMRKKYDNIKARSGSKRAIVAIARHLLLCIRRMLLDNQPYRFGTVPT

SEQ ID NO: 446327 - protein, 373 aa, unidentified
MSTTKSTAFLVGLDVHKDTISVAYAVAGRADPPEYVGRIGSGYAEVDAVIRRLHSKASTLELAYEAGPTGYGLYRHLTARGYRCVVAAPSLTPRRVGDKVKTDRRNACDLARLLRSGDLTAIWVPAVEDEAIRDVCRARDATRCGLKRAKQRLKSFLLRLGLPYSGRAAWTAAHRQYLAKVVCPTPAQQIVYQELLHAVEEQEARLRRLEDELQSLLPGWRLQPVVTAVQALRGVQWLVALTVLAELGDLTRFASPRQLAAFVGLVPSESSSGETRRQGSLTKSGNSRARRALVEAAWAYRHPAKVSPQLQQRLEGLPAAIRAIAWKAQARLCRRYRRLLGRGKHANTVIAAIARELVAFMWAIAREVPLANA

SEQ ID NO: 446328 - protein, 390 aa, unidentified
MFYLGIDIGKFHHAAALMDQRGKVIATLPSFPNTRSGFHKLLALITAHLPPAEELRIGMEATGPYWIPLAEWLKAHGWIPVILNPIKTASLRNYGVRGSKTDNIDSVLIANTLRIEEEQPQQASPKLSEELRHFTRLRADMVKDRTRIALRVTSLLDRLFPELLSSFSKTLAPSCLTLLAAAPTPARVLALGEERLTTLLRKASGGKLKATRAKEIMDKAAVSVGITTQASEEVLALLLEQINWIGSQLTTLDHRITKLYKQAGLYFTSIAGVGTLTAGTILGEFGSVTRFTQAKQMVAFAGVDPKLRASGQHQGQVHISKRGSPYLRRALYLACQGAVRNDDYFHSIYQRHRDNGKSYKEAIIAVMNRFIHVLYAIWRDNRPYYPLTSA

SEQ ID NO: 446329 - protein, 426 aa, unidentified
MVRAVGLDIHRDFCEVAIMEAAGLRSVGRVDTSPAALELFAGSLGPDDWVAFEVSGNAAEIARIIEPHVARVVVVSPSDTGIRQARAKTDRLDARTLARLLAAGSLDAVWMADERTRVMRRRLARRAQLMAARSRCKNEIHAVLIRRLIARPQVSDLFGQAGRRWLGELELPVEERESVDAGMRQIEFLETELADVDRLIALDALGWAQAKRLISVPGVNVICAASFLAAVGDISRFKDPRKLVGYLGLDPKVRQSGPAPGTSGHISKQGSASARWALVEASWSAVRQPGPMRAFYQRVRARRGHQIAIVAAARKLACLFWFLLTREQDYAYAQPSLTKKKLRRLEIAAGAPKYQGRSNIWSTNNAMREAERALAEQAEHAYKNTVRDWQAAQAKKPTVEVGASATKGRASNKPTEGKAARQTTSP

SEQ ID NO: 446330 - protein, 343 aa, unidentified
MQISTIGVDLAKNVFQVHGVDGQGKIVLVRQLRRQQIMEFFRRLPSCLVGMEACATAHHWARELMKLGHTVRLIPPSYVKAYVKRSKNDAADAAAICEAVTRPSMRFVPIKTAEQQATLTVHRTRDLLISQRTQLINALRAHLAELGFVTNQGRDGVTKLIAIVTAENHLQALPAMMREALRVVVAQLASLQQQIRELERSIHAQHRASDVSQRLESIPGIGVIGATAIAATITDPNVFTSGRDLAAWIGLVPRQSSTGGKERLGGISKQGDRYLRRLLVVGATAVVRHARRHPDKHPWITKLLAKKPAKLVAIAVANKTARIAWAIMNKGGIYRTPALAAAA

SEQ ID NO: 446331 - protein, 319 aa, unidentified
MRFYNGPHQHWCGIDLHARTMYVCILDSQGEALVHKNLRACPEELLAAIAPYREGLVVAVECIYTWYWLADLCAREGIAFVLGHALYMKAIHGGKAKNDRIDALKIAMLLRGGMLPQAYAYPAGMRATRDLLRRRLHLVRKRGQLLAHIQMTAQQYNLPPLGKRIAYPANREGVAKHFEDRTVRKSIALDLALVERYDALLRDLELDLVRQARQHDPQAFALLRTIPGVGKVLALTILYEVHDVRRFDRVQEFASYARLVKCAKELVRSRDRRSKRCNATTAATPRSDGRRSSLDGRGAHRCWAACLVDGGCHRMPHRE

SEQ ID NO: 446332 - protein, 351 aa, unidentified
MDIIGLDLHQRESQLCLCDEDGTITERRIVTSRERFTAVLGSRPRTKILLEASTESEWVARHLESLGHEVLVADPNYAPMYATRSRRTKTDRRDARTLMDACRTGAYRLAHRLSDPRRHVRAELAVRDALVRTRTRYVALAKTLVRRDGLRVASSESHLVAQRIGALSLSPALEAELQPLFTVLAPLNEQIAAADGRIATLAATDPLVARLATAPAIGPVTASAVVATVDDITRFRSAHQFEAYLGLVPGERSSGEKRHVGPITKAGNSRVRWLLVEAAWRLLRTKSAEAAALRAWAHGVAGRRGKKIAVVALARRLAGILYAMWRDGVPFDASRIRNPRIAAAEVTARAG

SEQ ID NO: 446333 - protein, 435 aa, unidentified
MSSKAYRGTRVNEVNWEPIARGKEGLGVTVGIDVGKFDLRVVCRWADGRFERPWRVKNPWEIPTFLGLVRQVRAGRKLVVALEPSGTYGEALRQALGDNGIEVQRVGTKASHDYAEVFDGVPSQHDGKDAAVVAELAAMGKAKPWAYQAADSWEEELAYWVEEMVAQRQMLTPWQGRLEGLLARHWPEASQVLKLSSGTLLRILKRSGTPQALAEDPDAATQLARWGRSLLSAAKIAELLAGARSSVGVRGGPWQQRQIQEYAERVLAARQQANRAQQRLRQLAAGHPVLQAQGKVVGVPTACVLWTSTGDPRTLDSAGAYRKAMGLNLAERSSGTYQGRLRISKRGSARTRQWLDFAVLRLVQQCGVRPWYEAKKARHEGEARRVLVAVMRKLAVALDHVGVQNEGFQPRRLFGRIGRGSGRSAERTVSSREPA

SEQ ID NO: 446334 - protein, 325 aa, unidentified
MRKYIGIDISKASFDVAIKQKDGTFKSYKFQNNLDGFKKYVELIDKESITVVEATSTYYFPLVDFLHKNGYKVAVVNPLQVKHFVRMRLVRTKTDKKDAIMIASYGESEKPKLWKPKDDIIQQMSQLHTIIENLIKQETAIKNQLEAFNQMIVNNKKGIKTLRSLLRKIQKEREELENEMMELAQIHYDETLSLITSIPGIGKKTAVMLIVISENFTKFESSKQMASYIGIAPQVYKSGTSVNGKGHITKMGNKYVRKLLYICSWSAKKYNKQSMLLEKRLKEKGKPNKVINIAIANKLLKQAFGVVKNKQMYDENYVNPKYNHG

SEQ ID NO: 446335 - protein, 410 aa, unidentified
MQVLYPRCCALDVHKLTVVACLRIADDSKVTSEVRTFETTTASLIGLRDWLTANKCTHVAMEATGVYWKPVWHILSDGEFELVLANAAHVKNVPGRKTDVSDAEWVVDLLAHGLIRPSFVPNSQTQELRALMRTRKQLVREAASHIQRVQKTLEDANIKLDSVISDVMGKSGRAMIEALIAGQTNPAKLVQLADPRLKASTAQLCEALRGRVTKNHRFLLRLHLGQIDALDAAIAAIDRQVEADLAPFRVATEQVSSVFGIKALSARAIIAEIGIDMSRFPSDAHLRSWACICPRSDESAGKRRSNRIRKGSRWLKATLVQCAWAATRKKDSYLHALFHRIRMRRGSKKAILAVAASMLTAIYHMLKNGTMYEDLGYNHFHTHAKDRQKNRLIKRLADMGYAVQLTALPA

SEQ ID NO: 446336 - protein, 318 aa, unidentified
MQTISHFVGIDIGKSSLVVCVMPDGIYMQFTNDKIGITALIKWLKKLTINAIAYESTGIYHRSCEAKLNKFGYKLIRLTPSKSYYMMKAMGTIAKTDKIDAKNLAKIAMNWDGGFSQVPSEKLREFVSLFSVRDRLVQLHTSLNGDVDDCGRVAKDVLVKTQKDIDKSLKLLEKKMKEYIASDDNLSRLFAILTSIPGIGTITAFAMIAYLPELGSIEDNKIAALTGVAPINRDSGHSNPARHIKGGRFKLRRYLYMGAMSASATHFAEFAQRMRDKGKDSKVIFVAIMRKMVILANHLVRENRTFEPNYQKKTGAGA

SEQ ID NO: 446337 - protein, 404 aa, unidentified
MRVVGMDIHRSFAQVAILEDGRIITELRVELVHERVVRFGRTLDPDDEVVIETTGNSAAVERLMRPYVKRVIVANPRLVRAIAYARVKTDKIDAAVLAKLHASGFLPEVWVADDDTLCRRRQTTERMGVLEQAVRTKGRIHAILHANLIPKYKGHLFGKAGREWLNGLPLPDEERAILGRLVNELGRISGQLAELDKVIAQQALDDPRARRLMTIPGIGPVVAATVLASIGDVLRFATPEKLSSYFGLTPKVRQSGDRPARHGRISKQGNAAARKMLVEAAWSAKTAPGPLRAFFVRVQKKRGAAAAAVATARKLAVMIWHVLTSGAEYAYARPAFTAMKLRKVALKAGAPREYGKAGPGHDYWIKEIRQREMDYVERAERAYERMVAAWTEQPCRASAATGSG

SEQ ID NO: 446338 - protein, 344 aa, unidentified
MPTIVGGLDIHRKQLTFDYLDLVTGEVKCGHVAPADREHFRSWLARFENPAEVAFAAEACTGWRYVTEELQRAGMQAHLAEPADTAAARGRKRRAKTDRADARLMRDLLIQGRLPECWIPPSHILECRALLELYHDLRTEHTAWVQRVHAVLFHQGAPAFHDLSRIDAPAELSALAGEHVSPAGQLQLGACLRMLDVLEAELAAARRRLLAAARHLRGARVLADSIYGVGPFTGLALTCWLGGAGRFSSARKAVRFTGLDITVHSSDGKRPPGHLSRQGPPALRWALYEAGKTHARAVAPDHGYYAAVKDRKDGKRAALSEARKIVRRACHILAELGDDALAIV

SEQ ID NO: 446339 - protein, 390 aa, unidentified
MGPTETRRRRPEAVGKVVCSSQARADRGRPSPPQSWEHRLLQSKGRHDLFDQIPNSCQGLVKPASYEEGIHQLMNVLATIGIDVSKDRLDVAVRPTGEHLTAANTLTGIEELTHKLTGFSPRLIVLEATGGYETNLTAALIKEELPVVMVNPRQVRDFAKAIGRLAKTDQIDADVLAHFGEAISPQIRILPDKQQHELSMLLSRQRQLVDMLTMEKNRIQNCPSQKVRQSVQAHIDWLNNQIKHIKKELDNFIQDTPAWRDKDKLYRSVPGVGPIVSAALLAYMPELGTLNRKKVAALAGLAPFNRDSGKLRGKRVVWGGRGQIRRLLYMATVASLRVNPVIQSFFQRLVEAGKPKKAALTACMRKLLTILNAMAKSNLPWSHVPLQPAP

SEQ ID NO: 446340 - protein, 360 aa, unidentified
MRTITIGVDLAKQVFSVCSVDAAGRIADRRDLRREAFMRWLPSVAAGTTVAMEACSGAHHWARRCQDYGLEPRLMAAQFVAPFRKSRTAKNDRNDAEAIATAARQGNMRFIAVKTVDQQVRLSWHRVREGYKVEALATGNRLRGLLAEFGVVVAQSDSALRRTLADLDALSLPSALVELLRDVDAQWQQLRARIAAADRRIQAHAQADEACKRLREIIGVGPITADAVVATLGSAHSFANGRQFAAWLGLVPMQHSSGGRTRLGHISCRGDGYLRTLLIQGARSSLQRAKAVTWDKGTPEQRWIQDLERRLPFGKVLVAIANKHARQLWAMLARGEHYDAEAWLKHPMVQRTASRQSVSE

SEQ ID NO: 446341 - protein, 337 aa, unidentified
MTLYCGIDLHANNSVISVIDDHDTIVYEKRHANDLREIQDVLEPFRDELFACVVESTYNWYWLVDGLMDAGFDVRLAHTGAIPQYAGIKHSNDQTDARHLAHLLRLGILPEGHIQPREQRAIRDLLRRRLLLVRQKTLHHLSLQSLIVRQTGERLSANQIKALDNDAIADKLTDPIRLGGQITHLARCWHEQAIEMLEDEVLKHLKPRKEYQLLTSMPGVGKVLASTIVLETGAIERFPDPGHYASYARCVNTARVSNGKLKGRGNKRNGNKYLAWAFMEAAHYATIWSPEIKRFYQKRQAKRHILVAKKTVSNKLAKACYHMLKRQEPFDVKRAFG

SEQ ID NO: 446342 - protein, 344 aa, unidentified
MLYVGIDVSCKEFVVYAVNERKQKVFDNKIEPTREGLRKLVKDLGEGPKLMVFEAGNQMKWIAMTLKKMKDVYIHVVHPNEVKWISQSNGKTDKVDAKKLAELARSDMLPRAVHIVDGEIRELRELVSAKGRLQSKRVALTNTIRAMMLQEGVRLPVKFFQGMEWREKIEKLKIGGVQRLIVESYMKSVDQLLISEEEITARMLEMKDRRIELLESVPCIGKISSRVLVSAIDNVERFDNKKCVANYGGLTPTIRQSGEVKVMGRINRDGRREVRKVLLQCSHALSRTKSIGAKPLKIFYERIERRRGKKKAIVALARKLLTTAYGVLKNNEYYDPQKLTANAV

SEQ ID NO: 446343 - protein, 386 aa, unidentified
MIYVGIDIAKLNHFASAVSSDGEIMLPPFKFTNDYDGFHKLQSCLDQFDKDQLIIGLESTAHYGNNLVEFLVLCDYKVCVINPIQTSTLRKNNIRKTKTDKVDTLVIAKALMMNHTRFFTKYDISLLHLKELGRFRMKLIKKRTQAKIQLTSYVDQAFPEIQYFFKGVHHKSCYALLKEAPTAGMIASMHLTHLSHLLEVASHGHFKKETAKEIRALAQKSVGINDSSVALQITQTIDLIELLDRQVTTVESDMESLVNSLDSVILTIPGIGAINGGMILGELGDISRFSNPSKVLAFAGLDPTVYQSGNFEARHTKMSKRGSRPLRFALVNAAHNVVKNNQTFKKYYDQKRSEGKLHYNALGHCAGKLVRIIYKMLTDNVAFNLK

SEQ ID NO: 446344 - protein, 408 aa, unidentified
MRVVGLDIHRVFAEAVMLEHGKTRRLGRVGMTRDHLAAFARTLTHDDHVVVEATGNASAVAEVIRPHVGRVVIANPRQVRLIAEARIKTDVIDATVLARLYASGFLPEVWIPDEATLSLRRQVTRRTQIVRQRARLKTIVQSILHAHLVPPCPHADLFGSRGRAWLLAQPLPPDEGEAIARHLREHDRLTEDLRVVERELARDALADANVKRLMTVPGIDMVVAVGLIAAIGPVERFAGPDQLVAYLGLNPSVHQSGEGRPRHGRITKQGRNHARTMLVEAAWQAVRGPGPLRAFFQRVSTRRGPHVAAVAVARKLAVIIWHLLTRAEDYAWVRPALHAKKLRDLELRSGEPARRGKRGAAYAYNLTRTRQEERRRVEQGETAYRRMTEGWSRRGRRVPTGAAKEERP

SEQ ID NO: 446345 - protein, 430 aa, unidentified
MCFAPAFGDQEESMGKINERCGGIDVGKRFLLCCVLSGAAHEEPRSQTRRFDATVSDLVRLREWLAAERITHVVMESTGSYWVPVFNILEGHFIIVLANPEEVKNRKGHKTDRKDAEHLADLLRHDHIRASFIPPKPIRDLRDLTRRRLQLIQDATRERNRVEKLLEHVNVKIGNVLSDVFGVSGQSMLLALLDGKTTAEQIAHLARGQAKRKIPQLTEALEGHGMRDHERFLIRSCLRHLACLEEEVEQMDCEILQRMQESLFQGAFQRLQTIPGVGQLAAASILAETGVDLTTFPTAEKMASWAGLCPGNRESAGIKKGSQTTQGNSYLRTTLVQCAWSATRKTGCIFQTRFRELSPRRGQKRAIVAIAHQMLTVLHFMLKNNVPFNGAANAPTQRRQRRAHHHLRCLRRLGISVQIVEPTEFAPQTG

SEQ ID NO: 446346 - protein, 361 aa, unidentified
MKRVQSNKLDFSGQNIYVGIDVHLKSWSVAILSEYSALKRFSQSPEPEALHKYLVSNYPGANYFSVYEAGFCGFWIHEKLTGLGITNIVVHPADVPTMSKEKLRKTDAVDCNKLARELRSGSLEGIYVPKADVLEIRSLIRTRNMIVKDSTRTKNRIKSLLRFHGVDIPEEFTRSSIGRWSKRFLAWLHSIELSTEYGKKTLELHLEQFVRLRNMLLQETRAIREISRKAPFEKPMRLLTSVPGIGVTTAATLMVELDDIVRFKNADHLASFIGLVPMCHSSGESNGTGNITVRRHFMLRCLLVEAAWIAIRKDPAMTVAYTEYRRRMNPQKSIIKIARRLVNRIYYVLKHEKEYIPCVVE

SEQ ID NO: 446347 - protein, 346 aa, unidentified
MRFYDGQHRYYCGVDLHTKRMYLCILDHEGNKLFHRNVRAKPHDFLNAIEGFRDDLIVGAECMFTWYWLADLCLEEKIKFVLGHALYMKAIHGGKKKDDKLDSEKIARLMRGGTFPLSYVYPREMRATRDLVRRRMFLVRRRSELLAHVQLMNQQYNQDPFEKMLNYAGNRDVLDRFAESSAQLNVAADLEMVGHYDHLIKQLEKNLLQEAKLHDPKACSLLRTIPGIGKILSLVLLYEIHTIDRFPSVGDFLSYARLVTPKQTSDGKVTGHSGAKIGNAHLKWAFSESVLWMLRYSEDAKAFLKRKEKKYGKARTMTMLARKIARAVYQMLKRKESFDALKFFAS

SEQ ID NO: 446348 - protein, 372 aa, unidentified
MGYATILGLDLGKFKSVCCVMDAATGGHAFETLASTPATIHDLLTRHLAAANGQEVLLVVETCDAAGWVHDVAAAIAGVAVTVVHTQGDERWRWCKVKRKTDRDDALKLARLARLGELPQPPVRVPSPPRRQWRRLIVHRRSVVNRRTKSRNAIRSIYLQQGLTLARGSKQWTRAGIAQLITDARPIADCTIEELWRGRLHVELTLMTTVDAQLKLVDARLDELAKTESRIALLQTVRGVGPRLSEAVVLHLGEDPRRFKSGEQLASFAGLVPKQLASGQTTRLGHITGRGPALLRSLLVESAWMVWRLNDWAKAFVDRVSRGGRGRRKLAIVALAKKLLILLWGMLKSNRPFRTPRPNEKAAVPAAALATA

SEQ ID NO: 446349 - protein, 349 aa, unidentified
MQHATTVAIDLAKDVFEVIIADGHGHVLERRRLSRRPFERFIDTLTPTHVVVLEACSTAHYWGRRCQTRGATVRLLPAQYVRPYVRRNKTDRTDAEALLEANRCGALQPVPIKTPEQQAIQGLHRVRTQWLRTRTARINVMRGLLREHGIALPVGTGRMASRVVAALEQHASELPALVPQLAQWLLADLHRIDEQLRVINQQVARLARTHPVAVRLQQVPAVGPVTATALVGTVTHIHRFARGRQFASWMGLTPREMSSGHRRELGGISKRGDRYLRTLLCHGARALLRAAQVRQQRLRSLTPLQQWGLQVLHRRGHNRAVVALANKLARIIWAVWRQESDGALVEAVS

SEQ ID NO: 446350 - protein, 353 aa, unidentified
MKPKTESDTALPMVIGVDIGKEVFHLVGFGGDGKIVFRRKIKRLGFAAVFEKVPPCIVGMEACLSAHFVSRTLRTLGHEPRIIPAIYVKPFVKGQKNDYNDAEAIAEAALRPNLRFVQEKSQDQLDLQACHRVRARLVSRRTATINQIRAFLIEQGIAVRSGPRALRTSLFAILENRKDEISPRMARLILDLYKDWCHLDERIDTVTGEIEELSRVEAKCQRLMTVPGIGPVISTGLVAAIGSGEAFERGRDFGAWLGLVPRQYSTGGRSVLGRISKRGSKYLRTLLIQAAKVLLMRPHNWPRYSFGAWLKTASERLHRNKLAVALANKLARIAWSVLRHDKAFDTHLETAAI

SEQ ID NO: 446351 - protein, 344 aa, unidentified
MSDNTRIAVDLAKSVFEVAVSVRPGTVSERHRLSRAQLVRFVAQRPAATIVMEACGSAHYWGREFQQLGHQVVLLPPQRVRPYVRGNKTDRTDATGMLEAYRNAEIRPVPVKSVAQQTLAALHRLRSGWLAQRTAQLNSVRGLLREFGIVIPVGAPHVVPRVRALLEDADSGIPDALRNTLADVCTDLRTLEGRITQVERQLEALAQQLPTVARLRSIPGVGLLTATALVAVVGDARRFPSGRHFASYVGLTPREYSSGATRRLGRISKRGDAYLRMLLIHGARTTLWHAKHRKEPDSLRSWAVRVEKLRGHNKAAVALANKVARIVWAVWTRENTFTAIAHAA

SEQ ID NO: 446352 - protein, 364 aa, unidentified
MNKCLHTELSSHEGTRSEFNPGQTVIKLGIDVHQEFYVVVCQEGGSNPRPGQRFRKEEFLGWVARLQHKRGGQIHAVYEACGFGFGLQRALTELGIKCYVVCPQKLDEQNKRVKTDGLDAKALCLKLDRYVEGNRDALALVRVPSEEEEQLRAIHRQREQLVKTRKRLEAQGRSLMVNHGIEPVQRWWKRRTFAALEVPEWMKELLNNSQPILLGVEEKIRGPHRATQAAAPPGQPRGLGLMTSVVIDREIGNWHRFVNRRQVGSYTGLCSGEYSSGRTRLQTCVTKHGNPRLRAALVELAWRLVRFQPQYKPVVKWRRVLAKGALATGAVRKKAIVAVARQLAVDLWRIRTGRLNPEQLGLSI

SEQ ID NO: 446353 - protein, 421 aa, unidentified
MEEVDELDQIVDRVAGLDLGKTGLVACVRVPSDRPGRRQQEVRSYDTFSRSLLELADWLRAERVTRVAMEATSSYWKPVFYLLEAEGFECWLLNPRHVKHLPGRPKTDTLDAVWLAKVTERGMCRPSLVHPAPIRALRDLTRYRRTLIRDRTRERQRLEKLLEDAQIKLSSVISDILGVSGREMLEAMIAGNRNPRVLAQLARTRMRTKIGVLEEALTGHFTDHHAFLTRTMIDRIDQVGADVEKVNAAIEEAMAPFRAEARRLDEITGIGIRSAQELIAEIGVDMTRFPTPGHLVSWAKFAPIVHQSAAVTRNGSTGKGNPWLAGTLGEVVAGVSRTHTFLGERYRRLARRRGKKRAIVAVGNSVLKIVWHVLADPDARYQDLGEDHYLSRHTTVRRRRTLIRDLELLTGQHVTLQPHAA

SEQ ID NO: 446354 - protein, 358 aa, unidentified
MRYVGVDLHKNKFTAYFADTGRYRDYGTNSVGIMSFIHDCKRSDDCNGVIVGVESTGNTRYFKRMLETEGIQVKVINTMKFKVIAESVTKTDKHDAATIAEFLEKDMIPEARLCSDYSEQLRRLLKVRKTLVRTIVTIKNQIHGILTAYGYEDTRASLQSKRGRQHILNTLASTENGLVVQPLIQIIDELDEKVKHIENIIEELTKQDDQKRLLQTMPGCGDIIASTILAYTDDIRRFKSPKQYAAYAGLVPYVHNSNTMLRHGTITKHGPEPLRTAFVQLVLGTHRLPATRDYRIMKQYRALKQYKGSGKAIIATARKYAEIVWHMLTYNEPFCPDKQLQVMCERNRSIQVYEQQPA

SEQ ID NO: 446355 - protein, 350 aa, unidentified
MMIIGCDYHPGFQQIAFVDTETGEIQERRLEHREEAEKFYRDLAAQGMKVRVGMEASGHARWFERLLSELQCELWIGDAAEISARRVRKQKTDRQDAQLILRLMLKDDFPQIWVPSWENRDLRQLLWHRHRMVQARTRMMNQLQAVALNEGLRCKKRLWREAGREQLEAFKLAPWASQRRGDLLELLDQLNPTIAKLTQAIDREVEKCPAARRLQTHPGVGPLTALAFVLIIGKADRFQCGKQIASYLGLVPLEKSSGNQRRLGHITKQGNSLLRFLLVEAAQVTARSLPEWRSKYVHLTMRRGRKIAKVAMARRLAVRLYWMMRREWNYGQVKKFGSHAGQPGPGDGVR

SEQ ID NO: 446356 - protein, 416 aa, unidentified
MNAVGIDVSSRKSTVAVLRPLGEVVCLPFDVSHDADGLASLAEKLKALDGETRVVMEHTGRYYEAVAKALHEAGFFVCAVNPLLIKEYGANSLRRVKTDKADAIKIARYALDNWADLRDFTPMDAIRYDLKTLNRQFQLASKQRTASANNLIALLEQSFPGIRKCFDSPVRSDGTQKWVDFAHSFWHVDCVRKQPFAAFCERYRKWCKLHAYFFKLRNAEKVYALAKSAVVLTPKAKVVKVLVQEAANQLSSISRSVEVYRAEMDRLAAMLPEYPVVMAMYGVGKSYGPQLMAEIGDVRRFERKQALVAFAGIDPMPNQSGDKNVRSNKSSKRGSPYLRKTLFNVIRTYLQCAPQDEPVFQFLNRKRAEGKPFYVYMLAAANKFLRRYYAKLRDYFASLDTLQSVDPIPTTLKASL

SEQ ID NO: 446357 - protein, 343 aa, unidentified
MDHFAGLDVSVKETSVCIVDDTGRIVREAKVASEPEALLAVLKNPAYHFKRIGLEAGPLSQWLYGAIAEAGLPVICVETRHMRAVLKAQINKTDRNDARGIAQMMRVGLYRPVHVKTLRSQKLRMLLTHRKLLQAKAIAIENDLRSTLRNFGLKVGMVGNVKFEGRIKELVENLPDLATLAEPLLIVRRVLHEQLSILHRRLLVIVRNDDVCRRLMTVPGVGPVVALTYRATVDVPARFKNSKAVGASFGLTPSRRQSGESDHPGAISRCGDEMMRVMLYEAAQVMLTRTNKWSWLKAWAMKIARHRGMKKAIVALARRLAVIMHRMWVDGTEFRWTHDVVAA

SEQ ID NO: 446358 - protein, 355 aa, unidentified
MNDAKYIGLDVHQATISVAVRDCTGKLVMEAILETKAETILQFFRGLRGSLHVNLEEGTWAAWLYDLLQPHVTRVVVSDPRKNALLKDGNKNDRIDARKLAELLYLNKFNAVYHGQHGLRTLKELARSYLTLTRDLTRVMARIKAIYRGWGIPCAGQRVYAPGHRAEWLGKLSEAGVRRRAEFYYQQFDALALLRQETRRELLVESRKHSAVKLLRQIPSIGPIRAALLVALLQTPYRFRTKRQLWAYIGLALTTHASGEYRFERGQLQRSKKVLAIRGLNRNHNHDLKNIFKGAATWAAANSGPFKNFYEACVARGTKPHLARLTLARKIAAITLLVWKKGVCFDAEYLKPQAA

SEQ ID NO: 446359 - protein, 351 aa, unidentified
MDLRMHYAGLDVHKKTISYCVRRADGRIVQEGMITASREAIDVWRSKLPAPWIAGMEATMFTSWIYDHLTAGGGQVKVAHSAMLKAIVSGKRKNDAIDARKIADLLRCDYFPECHMVGRELRDRRRVLRYRNLLVRQVVRMKNRAGSLLMETGIPYNKKKLHQKRYFAALLKELAPEMPESLPYLLGLNRGSIEFLDAMDRQLMKMLRQDLLLRERVERLCTIPGVGPVVALSWVLEVGEVERFSSVKKVISYCGLCSAEISSAGQQQRSPISKQRNKHLQSVLVEAAHLAPRYHPDLALVYEREKQRGNRNRATLAVARKLAAYLFAVDRGQRPYRKEGPPPATPALRAA

SEQ ID NO: 446360 - protein, 361 aa, unidentified
MTSMTHDGPRITGGVDTHGLTHHAAVIDSIGRHLADREFEATIRGYRYLLDWMRSHGDLVAVGVEGTGAYGAELARVLTAAGVTVFDVDRPDRKTRRMKGKSDPIDAYAAATAVLSGRAAGIPKSRDGVVEAVRVLRLARRSAVKARTQAMNQIRGLLVSAPAMLREQVAGLDRAALIRTLARLRPGEDLSRPLAATRGSLRRLARRLQALDTEITELDAEIGPLVKQAAPQLLELFGVGPETAGQLLASAGDNPERMRSQAAFAHLAGVAPIPASSGRTHRHRLNRGGDRAANNALHTIVLTRMRFDERTRAYVERRTKEGLNKKDIMRCLKRFVAREVYRALTTTPTERITQTNLAPAA

SEQ ID NO: 446361 - protein, 317 aa, unidentified
MTEHNIGAAGIDTGKSTLDVALAGDFSQLQVDNDAAGHRGLVSWLRDNGVERVGIEASGGYERTVVSHLRKQGFTVIMFQPIQVRAYATYRQQRAKNDRIDAALIAACTAAAATIKDAPDPRLEAFAEPLTLIEQIEEDIARCKTRLEAFRDPRHRDLLKAEIKRLKAWRAAEIKRMVAELRRHDDLARRLDLIESVPGIGLRTALALLVRMPELGTLSREQAAALAGLAPFDDDSGKRHGARRIAGGRTRLRKSLYAAALPAAFRWNPALINLYQRLIRNGKPHKVALVACARKLVIFANAVVARGTPWTSNTMPS

SEQ ID NO: 446362 - protein, 379 aa, unidentified
MDVIYPRCAGLDVHAETIVACALWEEEGKIQKDIQTFSTFSKGLGDLLEWLEEHGVTHVAMESTGVYWKPFFAFLEGDVDLTLANPQRIKNVPGRKTDVSDAEWIAKLLRHGLALKKVSSPPADIRELRDFTRLRKKWVGQLTSEKNRIQKVLESSNVKLGSVLSDLFGVSGRNILARLLEKGCVDKDELDECLRGRLKTKKQAVYDSLLGTLTEHELRLLRLLWKHVEELERLIEEVDQHIDRLLEPYREEVDLLMTMPGVKKQTAAVIIAEMGTDMSVFETPERAASWTGLSPGNHESAGKRKSTRTTKGNPHLRSALCEAAWSAARSKTHPLSRKFWSLAARCGKKKALIATARRMLVIIFCMISRKEPFRQPQLI

SEQ ID NO: 446363 - protein, 404 aa, unidentified
MMYAGLDWADDHHDVVVIDEAGHKLAAKRVKHTKEGLEELILFLESFTGKTHQDQMACIVETNRGLLIAAILEAGFCVYPVNPKVADRRRAASGAKTDQIDAYVLAKLGRAELADLRQLHPDSPIIAELKELTRDQDALVHMQTRLVNQLTACLKAYYPVALQLFTKLQQRSTLLFLQAFPTPEKAAAASVQQMEQILKAGGHPTAHKVASKLYEILQQPHLRANAITTRTKSRLALALIAQLLPLLEQIAAYEKEIARLFLTHEDHALFESLPGAGKRLAPRLLAELGDDRTRYTDCTQVAALAGTAPVLSQSGNYQKAHRRHACLKPLRNALYQLARTSRQQESWADDSYQRKRAEGKSHTVALRALSNVWVRILDRMWNTKTCYDPAIFGAARQAHAPRAA

SEQ ID NO: 446364 - protein, 358 aa, unidentified
MFVGIDVHKHTHAAALLDERGGELGVLTFANSPAGYRRLIGWLADRGAAAAVIGVESPGSYGRCLTGALAAAGHEVLHVPAWRTHRERHRQGPGKTDPGDALAIADVVRRKRAELGPALQPELVRAISILELQRRRFVLDRTQAIQRLRSDWTQIDPVTEAQVIHLDRQRELRRLKRISFGDGLTERIAAATIRQLARDIEDLNARITELETEIAALLDEHGNPVDDLLGAGNQIAAALISHAGDVRRFKDAAAFARYCGAAPIPCGSGQTSGRHRLHRGGNRQLNAALYRIAIVQQRHHPQAKAFLTRKHAEGKTPREARRALKRHLANVLYRQLHTWANNTPAMNADHTPAMNDLT

SEQ ID NO: 446365 - protein, 339 aa, unidentified
MLYVGIDIAKNKHDVTALNVPGKTVLKPLTFSNNKAGFELLDLSIRQINQDCLIALEDTGHYAFNLLNFLHEQGYKVYTYNPLLIKEFAKSLSLRKTKTDKKDAHGIALKLLSNPNREQFQHDNRQVELKILARHIHRLKKKQSDWKVQYTRCLDIIFPELDKIVGKHSEYTYQLLTRYPNPQKRIEAGFDKLIEIKRLTASKIQDILSVAPRSIGTTSPAREFEIIKHYKRLIDKAETCVNDLMAEFNSVITTVTGIGNRLGAVILAEIRNIHAFDNPAQLQAFAGLDSSIYQSGQIDLAGRMVKRGSPHLRWALIQAAKACPRFSPAFKAYLKTKLE

SEQ ID NO: 446366 - protein, 342 aa, unidentified
MNHYAGIDVSLECSSVCVVDANGKILREAKVASEPAALIAWFHLLGFGFERIGLEAGPLSQWLFAAMREAGLAVELLETRHVRKAFEAMPVKSDRNDARGIAQLMRLGWFRPVHCKSMSAQETRTLLTARKLVQSKLRDVENSLRGILRGFGLKVGKTTERKFAGRIEELVVGHRHLQVIAKALLSVRAVLRKEFAAFEKQVRKMARSDIRTRLLMSIPAVGPIVALTYASAIDDPTRFRSSKQAGAHFGLTPKKHQSGETDYTGRISKIGDSSVRTALYEAAHVMLTKPLKGCTQLKSWAMRIARRAGMSKAKVALARRLAVIMHRMLADGTPFNAAAAAA

SEQ ID NO: 446367 - protein, 461 aa, unidentified
MAVVMIGVDPHKASHTAVAIDAAEEQLGQLRVRACAAQAGQLLGWAQAWPERAWAVEGAGGVGHLLAQQLLAAGERVLDVPPKLGARVRLLATGNINKNDPNDARSVAVAALRSAGVREASRDDHAAVLKVWSKRHKDLGRIRTQVACRLHQVLCQLIPGGVPKAITAAHAAHLLETITPGDAVAAARRELAADFVADLRGIDARIRETRKKLAAAVAADGTSLTGLFGVGPVIAAAVIGDVRTVSRFPSRGHFAAYDGTAPIEVSSGGRKVYRLSRRGNRRLNHAIHMAAVTQIRHPGSEGRAYFDKKLAAGKTRKEALRALKRRISDAIYARLQADARRAAGAQGPGGQPGNDSDSSAAGSHPGHRLFGQATPGPGHHPTTTASADGRAGHSPIAATSPPATPQAQVERPQRSEDERPGGVARRRRYSAAGKASKPRPPAKSPPPKATSSAAKKTARTP

SEQ ID NO: 446368 - protein, 404 aa, unidentified
MWFAGLDWADQHHDIVVIDESGRQVGSRRVAHSPEGFAQLHEFLVSISTPAGKSELACLIETNHGLLISFLLEAGYPVYPVNPKTVDRHRSASGAKTDQIDAYLLAKHGRAEFADLRRLEPDSPLVAELKALTRDQDGLIQLQTRLVNQLTACLKAYYPVSLKVFSKLQQPSTLTFLQTYPTLEAAQAAPKEQLRLLLKQVGHPTPEKVATKIFEVVQQPQLKADAVVVRTKSRLMLALIHQLLPVVEEIAAYDEEIERLFLSHEDNEVFSSLPRAGKRLAPRLLAEIGDDPKRYTDAMSLQALAGTSPVLFESGKYSKPHRRHACIKPLRNALHQFAWQSTQQEPWARDYYDRKRQEGKSHTVAVRALANVWARILFAMCRASKCSQSSTFEQAQRLHSPRAA

SEQ ID NO: 446369 - protein, 405 aa, unidentified
MEVLYPRCCGLDIHKKTVVACMLLTEADGTARRFVRTFGTMTADLLALSDWLSFHDVRHVAMESTGVLWRPVFNVLEEGRTLILVNAQHLTAVPGRKTHVKDSEWLAELLRHGLLRPSFVPPPPIRVLRDLTRYRKTLVQRRTQEINRVHNVLETANLKLGAVASKVVGVSGRQMLRAVERGESDPGVLAELAKGRLREKVPARRRALAGRVQPHQRLLLGELLDHIAEEQAIHRVEVSIADRLAEQEAAVHLLLTLPATGPVTAAAILAEIGPDMARFPSAHPLASWAGVCPGNRRSAGKQLSGATTKGNTQLKTIRCEIAARSAGTYLHALYHRLARRRGKPRAMLAVAHSLLVSIYHLLRDQVPYQDLGPDDFDHLHAQRLERHDVRRLEALGFQVRLTPAS

SEQ ID NO: 446370 - protein, 344 aa, unidentified
MDHFAGLDVSVKETSVCIVDDTGRIVREVKVASEPEALLQVLKNPAYRFKRVGLEAGPLSQWLFSALAEAGFPVVCVETRHMRAVLKAQINKTDRNDARGMAQMMRVGLYRPVHVKTLRSQKLRMLLTHRKLLQSKAIAIDNDLRGTLRNFGLKVGVVGKVRFEARIRELVENLPDLAALVEPMLVVRRVLREQFVILHRRLLAIVRDDEVCRRLMTTPGVGPVVSLTYRATVDIPARFRKSKSVGAVFGLTCAKYQSGEVDWDGRISRCGDEMMRTMLYEAAQSMMRSKKWSWLKAWAMQIAKRRGMKKAIVALARRLAVVMHRIWVDGTEFHWTREQAAAVA

SEQ ID NO: 446371 - protein, 331 aa, unidentified
MGVHVGLDVGSRSTAMGWRDNGRSAGSWEILQTPKGRKAAVKKLLSLKPVSVVMEATGIYYLDLAIELSAAGLPVSVINPKSSRNFARLMLQHSKTDAIDAQLLAEYGERMSPRLWIPPSPTQLEFRAIGRHINRLVGHRTRAKNELHALRATQTSLALLIEDEEEAIATLDKRIERLRQAGRELIAGCATLSAQFKHMVAAPGMGDISTFAALAELTTLPVTLKSSQVSRHAGLDVRLTQSGTSVNKPGRLSKCGNAYLRSAMFMPAMSAARCDPHVKAFYDALVSRGKRKMQAICAVMRKYLTGLWACMHAGEDFDTAKLFSEEHLLKG

SEQ ID NO: 446372 - protein, 357 aa, unidentified
MKIVGCDLHARQQTIAMVDTESGEFTEKTLHHEGNAVQEFYASLNGPVVVGIEATGSMQWFLELLEKLGIESRVGDPAKIRAAETRKQKHDQRDARLILDLLLRDRFPAIWMPSTELRDLRTLLRDRHQWVKMRSRLQHTLQAIALNHALRKGSGLWSHAGQTALQALPLPPYTSQRRAALLSLYVELQKRIQRLDQELEGQMQQRAQARRLMTHPGVGPVTALATEVFLGDPDRFATGKQVASYIGMIPSEHSSGKRQRLGKMSKQGNSLLRYLWTEAAMHAAQKDPELKRFYRRKLIQKGMGKARIAAARKLGIRLWIMMRDQIDYQEFCRRGKLRQSGEAHAGMPDFNSGPALQ

SEQ ID NO: 446373 - protein, 424 aa, unidentified
MKVTYQTCCGVDVHKSFLVATIVKTTGGIEPSYQKKRFSTFNNSILEFKQWLLDNDCHDVCMESTGKYWVPVFNLLEDEINVVIANPKWVKAVKGNKDDAKDSKWIGDLFRLGLVKGSYIPCKKVRILREYTRYRYKLVSCRSSEKNRYQNALTVCNVALDSVVSDIFGKSSTSIIDYLLEQSGTSINHEEIASKLLRSLKSKEDAVIESIEGYQMTDAQKYRMRLVRAHMDYITAEINDVDKMIENMISSDPDFENAVQFLCTIPGVKRASAITIISEIGTDMTQFSSSKRLCCWAGLTPGSNESAGKKKSVRITRAGVYLKPALVQCAHAAVKSDKSPYYKKKYDSLVKRRGKKRAIIAIARMILTAIYQMLSTGELWNPSDLYKIDMPVALVEKQKAKAIKQAKKLLQQEGLLPPDEPLAS

SEQ ID NO: 446374 - protein, 345 aa, unidentified
MTIVGGLDIHRKQITFDYVDTVTGRVQRGRIAPADRAHLAGWLAQRFPGRTDVEFALEGCTGWRYVAEELAAAGLIAHVGEPADTAALRGGRRHAKTDKTDSRHLRELLADDRLPQCWIPPAQVLECRALLELYRDLRVEHTAWVQRIHAVLFHQGAGALTVPALRSQAGLVELSEQAADLSSAGKMQVVTALEMLAVLDEQLVQVRRQLLAAARHLRGARVLTARLYGVGPITALALCCWLAGAGRFSSARKAVRFAGLDVTVHSSDGKRSPGHLSRQGPSVLRWCLYEAGKTHARGSAPDHAYYAQVKDRIDGKRAALSEGRKIVRQACHLLSELGDDALTQV

SEQ ID NO: 446375 - protein, 340 aa, unidentified
MNRYLGVDLHRNCFTVCTLKEDGQSELRKWSIYSLSEFAHTVQATDAVAVEATGNSRYFCQSLKERGCRLVVVNPQQFQVISRSVKKTDAHDAKTLAQFLARDLLPEVRLKEALPAEIASVLQTRDKLVKLRTTLKNKINNLLAGQGILIRRESLSSDKGLEQVLQASVSDLERVELEVLVAQIRHLNDSIRKLEAAIKKQGPKLPGYQNLKSIKGLGEIGTTTLLSTIGDINDFASEGKLAAYFGIVPRVANSNETARSGRITKRGNKLARTALVQCALIAMRYSPYLAHFYARIKAARGTGKAIIALARKFLGIIFRTLKNGWVFEDFPRFVISPAAA

SEQ ID NO: 446376 - protein, 343 aa, unidentified
MHIRSVGIDLGKTTFHLVALGDNGKVLLKKKFTQRQLITFTANLQTTLIGLEACAGAHFLGRALREQGHDVKLIPAQFVRPFVKSNKNDFLDAEAIAEAVDRQNMRFVPIKTDDQLDLQALHRVRDRLITRRTSVINQLRAFLLERGLVFAKSPARLRERMPEILENAEEGLTPRVRNLLALLWNEWKDLEQQIVAMNEEVEQIASSDPACQRLRQIPGIGPLVATAIVASIGNGAAFHKGREFAAWMGLVPKQYSTGGKAKLSGISKRGNRYLRKILIHGARAMVLRCKRERIPMGAWMTALETRAPRNVLIVAAANKLARIAWAVLSSGQDYRAVQEPVAA

SEQ ID NO: 446377 - protein, 421 aa, unidentified
MSNVTEFGKKANNQVHELMENVSWVVGIDIGKEKLSCALMDIKKALICRFDVEGSLAGYNELLNRVKKETKGSGKIIFALEPTGHYWMVLGQFFEDHNQSYVLIHPLVAARSREVHRLNKGKTDSLDARLIGELACDRSITRTQIPEDYWATIRFFAREYMDREKEIAREKNRIVSYLETTLPGFVEIFPKPLCMSGRACLRFLANFREASKGDMEHFEMQIRKHFPGKRLMTSRVRRLYDMLQRGDVLGLRAGRQAMFFRIIHSLNRLEMYEGQEEAAKQAMLDMYKKSEYKEYLDSIWGTAPSVNALVLGFMGDPALYDSPASLVKLAGCDPVPNESGKFKGRASISHRGRSLLRKAGDRVSFLLEKRNSVFRAFFNHLMSRQKNKFTKRQARVACINKYFRIVWVLCHYRVPFNPALA

SEQ ID NO: 446378 - protein, 364 aa, unidentified
MKKISTAKIKSQAANRKVTIGMDLGDRSSRYCLLDEEGVVIAEASTPTTKAGIAKVFGAMARCRIALEVGGHSPWVSRQLEAYDHEVIVANPRNVRLIGESSRKDDRLDARTLARLARIDPMLLSPVRHRGAEAQADLAVIRARRVLVRARTMLINAARGLTKSFGERLRKCGAGQVGPTLTAELSPEIRAAVLPLLAEVEALNQRIAAYDHQIEQLVKEHYPEVDRLTQVKGVGTLIALTFVLTVDDPNRFQRSREVGCYMGLRPGRRNSGKSEPQLHISKEGDCYMRSLLVQGAHYILGPFGIDCDLRRWGLKMAERGGKKAKKRAVVAVARKLAVLLHKLWVSGEAYDPLRNSRPLVARAA

SEQ ID NO: 446379 - protein, 365 aa, unidentified
MTSVPSAAGLIHLGMDTSVNEIVVAVLRPGQEIPVVDRIPGDEGSVRRLIGRFPDRRLLSACYEAGPGGYELHRLLTSMGVACDVVAPSLIPKGSSERVKTDKRDSVRLALTHRAGLLTAIRVPSPAEEAVRDLVRARGDLLDDRKRMQQRLNAMLLRHGRVWRGAKWSYAHRTWVDSQVFDEPALAEAFALYRGGLEAREAELAAAEAGLAAWAGREPLAVPVARLGGYRGIAQLTGLTLAAEVVDWRRFASARAFMGFAGLIPTEYSSGSRTRRGHITKAGPEGVRTALIEAAWAYRYRPAIGATLRRRQAGLPPETLARSWKAQQRLHAKYAKMTARGKPPGVAVVAVARELAGFVWAEMTT

SEQ ID NO: 446380 - protein, 368 aa, unidentified
MTKSITFVGLDVHKNSIAVALADAGRNAEVRNYGIIGGTLDDVDRLIKKLSASGKELHFVYEAGPCGYDIFRFLTAKGFDCAVCSPAHVPKSPADRIKTDRRDAMMLARLHRAGELTYVFVPRADDEAMRDLTRSREDGVKAQRVARQQLGAMLLRLGYKYPGKSWSKVHFKWLADQKMPTAEQQVVFQEYINAIHETTTRVERLTKHIEALVPKWRMAPVVAALHALRGVSLIVASTMIAELGDLTRLEHPKKLMAFLGLVPSEHSSGEKKQRGKITKTGNGHARRVLIEAAQTYSHQARVTSRLLKRQEGLTKEVIDIAWECQTRLCARFRKLMAKGKNRNTVVTAIARELAAFMWDIANKTPIAA

SEQ ID NO: 446381 - protein, 346 aa, unidentified
MTIVGCDFHPSWQQIAVLDTDTGEVRECKLVNGNGEAERFYRKLPCPTLIGIEACGNSQWLVDMRQRLGHEVWIGDAAQIRASYVRKQKTDRRDAAHILKLLIEGRFPRLWTPSAEQRNLRQLLIHRHKLVGIRVQVKNGLQHVMLNRGVQLKEKLWSQAGQKVLRELTLAVWAAQRRRDLLSLLASLNEQIGQLDQATQKAAEENQEARLLMTHPGVDPITALAYVLTLGDVTRFKRGKQVASYLGLVPREHSSGAKQRLGSISKQGNSFLRMLLVESAQAVTRLDEGFRKQYQRRCHHMAKGVAKVAAARRLSVRLFWMLRTHTAYPEIVRIESSPAQALVGES

SEQ ID NO: 446382 - protein, 337 aa, unidentified
MHSVGIDLHKETAWYCVFDAEGRRVSHGSLPADPESFKKYFAGVPRPFKMAVEATYNWYYVIDIAQEYAAEVYLADSYQTKAFAKKHKKTDKIDARLIAWLLYRGDLPTVAIPDKETREKREVLRYRMRLVSDRTRDIARLKAMRDRIGLKETGNLTTAKRRAEIGAIETPAPYGKLTQGYLARIGKISEELKDCGRDLKVLAEQDPDVVHLMSVPGFQAFSALLVKTEIFDISRFRSFGALCAYSGLAPRVHASGGHCYHGPLNTNRRKELQWILLENAWQTMRKIPRLERKYAAIKRRKGSNTAKVAVARDILKIIYHILKEKRPFYPESVRLSA

SEQ ID NO: 446383 - protein, 358 aa, unidentified
MEYGAIDLHKKESQVRIVTETGELIDQRIPTTRARFTKLFWGRCRTRILIEASTESEWVAQHLESLGHEVIVADPNFGLMYGHRSRRVKTDRRDVAALAEACRHGIYRRAHRRSARQRTVQWHLNVRHELVDARTRAISVARAITRGAGYRILGGATETFLTRLAALDLPEPMQESLAPLRRVIETLDQELAGADARFAALHDADPVVARLTTCPSIGPITATAFVAALDDVQRFDHRRGAGQVASYLGLVPREYSSGEQQQRGRVMRSAHPYVQALLVQAAWRICRSTDSRVAALRTWTQAIAARRGKKIATVALARRLARILYAMWRDQMDYQPTRIPSSRREPLADTKRTRRTAA

SEQ ID NO: 446384 - protein, 414 aa, unidentified
METLFEVAAGIDVHRDTAVVSIRMPRGRRESVETRTFETFRDDLDAMCVWLREHNVQVVGMESTGVYFKPVLLALRRNLPERPVWLVNAAAVKQVPGRKTDVNDSAWLSKLVMHGLVRPSFVPDEAQEDLRLLTRHRKKRVGEQSSCKNRLIKVLETAGLKLSRVCTDPFGKTGRAIITALAEGGRSPEQMAELAVGSLRNKRDELARALAGDLSVTKRWLLQLLLDQLSRVEADIAKLDAKIALLLAPHQDDVALLHQVRPIDQVSAACIIAEMGSDMSVFGTAKRAASWAGFAPGSHESAGKKRDSPTRKGNQWLRTMLVQIAHLAIRMKDSPWRASFARLLRGTGSNKKAIFAIARRLCVTVFHVLRDRVYRPYLPPPPTEAQQERAKRRALEQLRGLGYQVALAPLATTT

SEQ ID NO: 446385 - protein, 416 aa, unidentified
MSLALPEALFFTGIDWAAETHAVCVMDAGGTIAAEFTIEHSADGIAALIRRLARHGQPGGMPVAIERPNGRLVDLLLEAGHAVVPVSPNAIKTWREGEVLSGAKSDAGDAAVIAEYLRLRQHKLKTAAPYSDETNALRTVVRTRDDLVEMRVAATNQLSALLEAHWPGAKAIFADVESPVSLEFLTRYPTPAAARNLGEKQMAAFCIKHGYSGRRTAAELLTRLRAAPAGTTGAAVTEALRDAVLAAVGVLTALNASVKNLDRSVAAHLGEHPDGAIFTSLPRSGQVNAAQVLAEWGDCRQAYDGPDSVAALAGVTPVTRQSGKHRDVHFRWACNKRFRKAMTTFADNSRHASPWAAKIYNDARAAGKDHPHAVRILARAWIRVIWPCWLSHTPYDPARHGAAAALTAALAEPIAA

SEQ ID NO: 446386 - protein, 395 aa, unidentified
MFIVGIDVAKRSHEVCMITSDGQTVQRPFSIRNNCTGYNLMLEKIRKHTNIKSQIVFAMESTAHYWLALFTRLRKDGYHVILLNPIQTSAMRDMFIRKIKTDAKDSFIIAELIRFGRYAESNVAQDRLLALKELCRNRFYLVDMAGDLKRKLIALIDRVFPEYEVQFDTIFCKSSVALLKKYPTPQKLSNAHLDKLTELLWNSSNGHFGEWKARELRELARNSFGVEDCDGAYSTLILLMLDQIQSLSEKADALEKEISRLFQSFDTTVTTIPGVGPIIGAVILSEVGDISRFSSADKLAAYIGVDPSVNQSGEFQAAHAHMSKRGSPYLRRCIWMVSQVAVQRDPMFRAYYEKKAAEGLKYMTIIGHVTRKMTAVIFAILRDHKVYEPVLPTAA

SEQ ID NO: 446387 - protein, 359 aa, unidentified
MEAQRKALSFKGQNIYIGIDVHLKSWSVTLMSEATQLKRFSQSPDPDALYAHLVRNYPEAEYHSVYEAGFCGFWIHYRLVGLGIHNIVVNPADVPTTTSEKLRKTDAVDSAKLARSLRSGELKGIYVPGSESLETRSLIRLRDSITKDQTRLKNRIKSHLRYLGIEIPEEFSGPGRCWNRRFVVWLKGAETGTAYGRQTLDFLVRQYEALRGQRLEMLRAVRALSRTERFEKPLENLMTVPGIGQLTGMSLLSEIDDIRRFKSADQLAAFIGMIPMCHSSGEREGVGDITVRRSARLRSVLVEASWVAVRQDPALSMAYGNYCKRMAPGKAIIKIARKLVNRIYFVMKRNQPYVKCVVA

SEQ ID NO: 446388 - protein, 323 aa, unidentified
MSRIVVGIDVSKAKLDVCLLREDGTEQYHQVANSAAGHQQLHRWLRQQTGQAVPVCLEATGIYGDAVACFLHQQGYPVSVVNPAPVKAFAAAMMKRHKTDKSDAQVLAHFRAHSRPTPWQPPSPNQSRLHDLKRLADDLQADRTRVKNRLEGSRAGSPARRYLEDQIAYLDKQLAQVQQEMQQQVEEDDKLDNQSRLLTSIIGIGLVSARQVLAELPDLTRFSSADELVAYAGLCPHQAQSGSQLKRSWLSKQGSAALRKALYFPALTAKQHNPHLRQFAERLSQTKKAKMVVVAAVMRKLLVLIYAILKSGHPYDPHYGFST

SEQ ID NO: 446389 - protein, 456 aa, unidentified
MSPVKTRTKPKTKAKLAAAAPRRDDGQPRFVGVDLHKEVATFHVVSHDGASLHSGEFLVNPDAIREFATAHLLPADSLAVEATSNTWAFVRLVRPHVAKIVVSNPLKTKAIAEANIKTDKVDALVLAQLLRCDYLPSVWVPTSTVEDSRALAARRSALVNQRTAIRNRIHAVLARRLVKAPAGGLFTDKGLAWLKEVKLDPLDRALIDADLALLDALGQQSLTIDLMIVNESYDDHDIQLLMTMPGVDYTIAHALKATIADVRRFTDPDKLASYLGLVPSVKQSATKCYHGPITKAGSSQARWLLVQGAQCVGRHPGPLGAFFRKLERRKNRNVAVVATARKMVTIAWHMLMNKEPYRYAVPQSTEIKLAGLRVRATGAKRKTGPPKGSKPARKAAGEKSRTVPSLDEVYSREGLPSRRPRSQGEERMVRESGTQEYVASLDAPKLVPRGRRTGVE

SEQ ID NO: 446390 - protein, 399 aa, unidentified
MLARKTFRCRAWDLGTALDWAGKQALSTGFANVTVACEPTGHRWRVLGQLAAERGMPFVCVQPMLMSWARRSEDLTFDKTDEKDAVIIARLAAQLRCYVPEPVDQTWGRLRHLGARREQLLVESGRQVQQMRALLECVWPAALSTARQPFRSSTWTAAMSVVLDRDAADLARTHRLGLARLESAVRREITRRGKQRPCLRIVRLLFAALTDPAGVTAHRPGALERVGLLLGDWLATHHRLVDTETRMTTILDELRLTGLVTSITGLSAIGAAAILAETGDPHRFATARALVKHAGLAPREKLSGTFVGRTKLTGQGRPSLRLAAWRAVWGAQRANPVYAARFTHLTTREQNKLTATQAQAVIAAAILRHLHAVVTTGRHWDPVIATHGTKQLAVMPIAA

SEQ ID NO: 446391 - protein, 377 aa, unidentified
MRHPASAALRLRLAGRCPNNLDGFKRLLQTIKDCTQKSDKIKVGLEATGHYSCNILGFLLDDGLATYVLNPLRTNLYRKSLSLRKTKTDRVDARTIAAMLLSDVGLKPYTDTAYHNEELKSLTRYRFDKVKERAKLKCSVSRLVCILFPELENLVPSLHGASVYALLEEFPGAVQIAGAHLTRLKSLLTDASRGRYGRDMALDIRDAARNSIGSRMPAKSLELQHTIRLIRELDAEIEEIETEIQAMMDELHSPITTIPGIGCRMGAMILAEVGDFSRFESPDKLLAYAGLSPSTYQSGQLKNCYPHMEKRGSRYLRYAIYNATKYVCLWDPAFASYLAKKRAEGKHYNVAISHAAKKLVRLIFALEKSRQPYRLVA

SEQ ID NO: 446392 - protein, 310 aa, unidentified
METNVFVGVDVSKDSLDVAIGTQKDIITFTNDQKGVDSVVKKLKRIDAQLTVFESTGGYEHLATSCLAEAGLAVVIVNPRQVRNFAKATGILAKTDAIDARVIARFAEAVKPDIRPLKDRATSELTALVTRRRQLIGMIVAESNRLKLANKRNKKDIKDHIRWLQKRLDKIETDIGKTIQNSPIWRCKDNILQSVPGIGPVTSATLICDLPELGVLSSKKIAMLAGLAPLNYDSGKFKGRRRIWGGRAAVRSGLYMATLAAIRCNPAIAGFYQRLLAAGKCHKVAATACMRKLLIIVNAMLRDQTLWQQN

SEQ ID NO: 446393 - protein, 405 aa, unidentified
MLFVGDDWAEDHHNVEIQDESGRRLAKARLSEGVAGMARLHALIGEHLDSDADGDQVAVGIETDRGPWVRALVAAGYGVFAVNPLQAARFRQRRSVSGAKSDTADAHTLADMVRTDSHQLRQVAGDTELAEAIKVVTRAHKTLIWERTRHVQRLRQALRDFFPAALEAFDDLTAPDALELLAKASDPATAARLSRSQITAALRRARRRHVAERTEQIHTALRTEQLAQPPAVAAAYAATVRSQVALLTTLNAEIATMQGEVTAHFGQHPDAEIYLSQPGLGVILGARVLAEFGDDPHRYADAKARKNYAGTSPITRQSGKQKFVLARYVHNDRLLDALGRQAFTALTASPAARAYYDQLTDRGKDHHAALRQLANRLVGILHGCIKTNTRYDELTAWPALHEDVA

SEQ ID NO: 446394 - protein, 385 aa, unidentified
MFYVGIDIAKNKHDLACINETGETVITNFRFANSCQGFHQLKLKLEQLSPITQDVQIALERTGHYNYNIVTFLRDLGYNVFAYNPLIIKEFAKSQSLRKTKTDRKDALLIARKLRSDVTPERYQTDRVLDELKELTRYQNRLIQSRSRCKNLYIRLLDIIFPELHRIVNNLYNQFIYDLLTNYPSPQRIARARFSSLLKIKRLTADKAHQIQETAKQTIGNASPVLSLELVQLIESIKHYDKQINQVQEEINLLMIELNSPITSIPGIGSRLGAIILAEIKNIHNFKNPNQLQAFAGLDPAIYQSGQMDNTGHMVKRGSSYLRYALIQAAKLIAIYSPHFKAYLRLKISQGKHYNVAVTHVAKKLIRVIYHLLKTNQLFDEAKLR

SEQ ID NO: 446395 - protein, 429 aa, unidentified
MNQVPVAGIDVGKRFSEMAILSPSNQVYARIRINHDAYSNFDRAFELLRKAEKEFAAKPVVVMESTGHYHKILFQALNKNGYEVCVINPIQSDSIKNIRVRKVKNDKVDARKIALLYRFEQLKTTNIPHEDVDCLRSLCRHYYKLSDQLTAYKNRLLGIVDQLFLSFTDVFKDISSCTALAILEKYPTPEDILKADRQELISLIQKTARKNIKWATRKYESLCSKASNFSPLSINSIANVAMLKANIAMIKTLMQSLDEAVEAIHELLDKDASKDMPVLSLTIELLCSIPGIGLLTAATIVAEIGDFSAFPKPDKLVAYFGIDPSVTQSGQFKGTENKMSKRGSRLLRRVVFTTALSNVRKKRNGQEYNPILYEFYRKKCLSKPKKVALGAVMRKLVTIIFAVLRDRKPFVLRKPEEHAKMLVAKNSAA

SEQ ID NO: 446396 - protein, 416 aa, unidentified
MNEEPISIPIERYIAIDAHKHYVMVGGLNASLETVLPVRRVQMEAYPAWAQAHLRPGDAVVIEATTNTWTLYDVTLPHVSKVVVAHPLEVKQIANARVKTDRHDVFCLARLLVAGLVPEVWIPPQPVRQLRTLIAHRRRLVKMHTLTANRLHSVIHRHNLVPPEGGFFAASNRSWWEALPLSEVDMIQVRQNLTLLDQLGQLTSRIDQELARLSTLDPWKDQAPFLLQLPGFGLINTMTVLSAVGDITRFPTSKKLVGYAGLGGGVHDSGQTHRNGPITKQGRKELRWTLVEAAWRAVDHHPFWKQQFQSLSHRMCSSKAIVAIARKLLVAIWQVMTERVADRKAEPSMVAFKLMRWSWQLNEAQRGGLSARQFVRYHLMQLNLGQTLQSVGKAHPLPIPSVEELISLRPELGATT

SEQ ID NO: 446397 - protein, 321 aa, unidentified
MQSFHCGIDVAKAKLDCALRLVNGKYKYKVFDNNLEGFNELFGWLDKHGASDAHICMEATGVYWEAVAEYLTAKDMTVSVINPAQIKAFGASRLARSKTDRGDAQLIAEFCFERRPTTWQAPSPAEQALRASVLRLEALQTMRTQESNRLEVARDGVAEGIVCHIEWLDTEIKKLLKKIRNQIDGDADMKSKQMLLDSIPGLGERTIAVLLAFCMHPGRFANARQAAAFAGLDPRQHESGSSVKGRPRMSKVGHAFLRKALYMPAMTTLYKTHWRKRFRERLAASGKPAKLIIGAMMRKLVHVAFGVIRSGKCFDPKLQNA

SEQ ID NO: 446398 - protein, 450 aa, unidentified
MPKRTTGDRPELKPVNVGAAAIDIGSRMHMAAVDPTCTDTPVRAFGTFTQDLHDLADWFKACGVASVAMESTGVYWIPAYEILEQRGFEVILVNARYAKNVPGRKTDVSDAAWLRQLHSYGLLRGSFRPDAEIATLRAYLRQRERLVEYAAAHIQHMQKALMEMNLQLHHVVSDITGATGMRIIRAIVAGERNPDVLATYRDVRCHSSIETIRAALVGNNRDEHIFALTQSLELYDTYQAKMLDCDRKLESLIAALTDKGARPVGKLSRPRVKTKQANTPSFDVRAALYGVLGVDLTEIHGLGPSLALKLIGECGTDLRSWPTAKHFTSWLCLAPGNKISGGKVLSSRTRRSSSRAAALLRLAATTIGRSDTALGAFYRRLSSRAGKAKAVTATARKIAVLFYNTLRHGMTYRDPGADHYEEQYRSRVLANLKRRAKSLGFVLQAVPCDA

SEQ ID NO: 446399 - protein, 341 aa, unidentified
MGKGDRNKAMASDGFSLIPLQVRMMRTLGIDVSKKRFHVALLRENGKFVTKAFDNTPAGFQALERWLHAKGATHPNVCLESTGTYSEALATHLFEAGYTVSMENPARIKHFARSAGLRTKNDAVDARAIARYAEAMQPEPWAPAPREVRELKALVRRLEAQLAMRTQEQGRLEADPPPIVREEVETHIAYLDSAIEATRKRIRDHIDNHPGLKQDHELLKTIPGLGDTTAAHLLAELDVRRYPSARQAAAYLGLTPRQHQSGTSVHGPAHLAKEGNGRLRKALYFPALAAMRANPVIVAFAKRLRDRGKRPMVVVAAAMRKLIHIAFGVLKSQRPFNPQAA

SEQ ID NO: 446400 - protein, 424 aa, unidentified
MKVTYQTCCGVDVHKSFLVATIVKTTGGIEPSYQKKRFSTFNSSILEFKQWLLDNDCHDVCMESTGKYWVPVFNLLEDEINVVIANPKWVKAVKGNKDDTKDSKWIGDLFRLGLVKGSYIPCKIVRILREYTRYRYKLVSCRSSEKNRYQNTLTVCNVALDSVVSDIFGKSSMSIIDYLLEQSGTSINHEEIASKLLRSLKSKEDAVIESVEGYQMTDAQKYRVRLVRAHMDYITAEINDVDKMIENMIFSNPDFENAVQFLCTIPSVKRDSAITIISEIGTDMSQFGGSKRLCCWAGLTPGSNESAGKKKSVRITRAGVYLKPALVQCAHAAVKSDKSPYYKKKYESLVKRRGKKRAIIAIARMILTAIYQMLSTGEQWNPSDLYKIDMPVALVEKQKAKAIKQAKKLLQREGILPPDEPLAS

SEQ ID NO: 446401 - protein, 343 aa, unidentified
MHIASIGIDLGKTTFHLVAVGEQGKVVVRKKFSRKQLLAYTANLQSSLIGIEACSGAHFIGAALRSQGHDVRLIPAQFVKPYLKSNKNDFLDAEAIAEAVARQNMRFVPIKTEDQLDLQALHRVRDRLVHRRTAIINQIRGFLLERGITFAKGPANLRNQMPAMLEDTELNISPRLRTLLARVWQEWKQLEIDIADASDEIERISSEDAGCKRLRQIPGVGPLVSTATVAAIGNGAAFRKGRDFAAWLGLVPRQYSTGGKAKLYGISKRGNIYLRRMFIHGARAVLLRVKYDTGGFGQWVHQLEARAPRNKVVVAIANKLARIAWAVLFRAEDYRHMAVCAPA

SEQ ID NO: 446402 - protein, 417 aa, unidentified
MKKVTEKIERITENTLICGIDLGKYKCCARFVDYRGKEVYRRVWFDRTEDLDVIGAHITAAKKKENKNDVLIVFEPTGHYWLNINKYFTDLKLETVLMPTYTVKKAKDDYDQNPTKCDPKDAYLIAKLASEGKYVKPIERNELYQDIYSGYGIYEDIKKEINRVKNKIHVWNDKYFPEVEKVYKIDSVGIKAIYENEMLPKEINDMELTEFNELMTENNGYAQKSKIIKLKELCKKSNAIEPDSFTKKEIKRLYERYQELEKELEEITKELVKLASQIDYVEKMVEISGVDYVSVIGIIAETGDLNNYDHAKQVLKMSGLSLKENSSGQKKGKNHISKRGRAKLRRNLKQTGISLVRSNEFFQQLHKYYTTERREPLTKIVSINAIIRKYVYVMMAIVKTKESFSIEKAKQESIIFS

SEQ ID NO: 446403 - protein, 458 aa, unidentified
MGNARARKIPAQLIEDEHYQLRHERVAGIDVAKAKADVCTRLPPQRDGGRRASRVEEVPARAREIADLAARLLADGVELVVMESTSDYWRIWFCLLEAAGLSVQLVNSSHARQLAGRPKTDRLDAQWIARLAEMGLLRPSFVPLPEIRALRDLTRTRLQLVRDRTREWQRLEKLLEGALVKLSSALSSLAGTKTARAILEAIADGERDPKTLAGLASAQVKAGRAGIEQALDGMQIGSHHPMLIRLHLDRITFLDRAAAAIEDEIEAALDAIPAAWGADASGETGPAAGRGEDAAALPAAERLAEIPGVSRKLAMAIIAETGLDMARFPTAGHLVSWAGLAPVSRQSGPRDRKPGKGQGDAYLKGYCTQAATGAAPTDTFLGERLRRLSRRIGGNRARSAVGRSILVIIWHLLASPEARFTDLGPDWHARHGDRDRKIRAHVRQLQALGLDVTLAPAA

SEQ ID NO: 446404 - protein, 310 aa, unidentified
MDFIAVGIDVSKDRLDIAVRPGGEAFTVERNGAAVEQLADRLRTLAPHVVALEATGGFETIAAATLAAAGLPVVIVNPAQVRAFAKAIGQRAKTDPIDAAVIAHFAEATKPQVRPLPDEATRLLADLVARRRQIVEMIGAERQREKRITAAHLRKSIERLVRALEKELAGLNTDIDDTVRGSPVWHAKQDLLKSVPGVGRVIASTLIAELPELGRCDRREIAALAGLAPFTRQSGQWRGKSFIGGGREVVRTALFMGAMVAMRSNPVLKAFYDRLVAAGKPKMIAIIAVARKLLTILNAIVRDNRPWQTA

SEQ ID NO: 446405 - protein, 347 aa, unidentified
MITIGIDPHKATHTAAAASGVGRQLAEITVQADEAGQHELLAWAHGLGTEVRFALEDCRHVNGRLERFLLASGEPVLRVGPRLMAGARKGARTRGKSDAIDALAIARAALREEAELHFASHDEAARELKLLVDHRDALVAERTGLASRLRWHLHDLEAGLEPPARSLDQASVRRGLSQRLARREQTVQVRICRDLLARIGDLTKRERQLASEIGERAKRYCPALLEVPGVASLTAGKLIGEIAGANRFASDAQLAHFAGCAPIPASSGRTERHRFDRHGNRQLNAAFYRIALTQARVHPGARVYLARKRAEGKSTAEALRCLKRLLVRVVWRTLRSGGEPRLSPSPV

SEQ ID NO: 446406 - protein, 396 aa, unidentified
MDARTVNSLPPAATHDGTVRCLMAIELSKKSWIVGVNVPGSEKISRYTLKGCDGKGLLELIEKIRTRVHRELKQPVEVICCYEAGYDGFWLHRLLEEHGVRNYVVDPASVQVNRRARRAKTDNIDVAQLLRSLMAYLRGDPKVWSVVQVPSVAEEDDRRLHRERDRLINERVQHVNRIKGLCAVHGIYDYHPLRADRLRRLEQLRTGDGRGLPPRLKAEIRRELQRLELVLQMIKTIEKERNVMAAGKAPSTHGNAKKVQDLVKIGSIGAEIATVLVGEVFYRQFNNCRQVGGYVGLTPSPFNSGKMTRDQGISKAGNPKARTIMLELAWLWLRHQPNSPLTIWFRERVGTAKGRIRRIAIVAVARKLLIALWRYLETGVVPTGAKLKASKMLSKS

SEQ ID NO: 446407 - protein, 319 aa, unidentified
MAQSDLVVVGIDVAKDKVDAYIRPLSAGRTFPNSSVGQRQLTAWLRRHKVSKAVMEASGGYERNWAKVLRPVGIEVRIVDPKRVRSFARSAGRLAKNDTIDAAMIAWFAETFDQAPHQAHDAAREQLVQMVNARQGLLDLQTALQNRDEHSEVSAVQKMHARLLKKIASEVLTLEAAIGVLIKTTKCFAELAEIIASVPGLGEITSAGLIAAMPELGQVDNKVAAALLGVAPYDDDSGKRRGERQIKGGRRRVRNLFYMACLGAATRHNPVLKAFYRRLIAKGKKPKVALVACMRKLIVILNTMIARRQKWDPTLFVAS

SEQ ID NO: 446408 - protein, 349 aa, unidentified
MPEPRLSSTGERVYVGIDVHKATYAVVCVCQQRIVKTATVPADPAQFAASVLRWFPGATLASAYEAGFSGFVLHRVLAAAGITNIVVNPASVAVAANDRVKTDRRDAKKLAVDLADGRLRGISIPTEAEELARLLPRTRAQIVEHRATIARQIKAKLYQFGLIPPASRRRISSRYLRELAACSLPAELHASLALLADQWRFATRQLLEVRRLLRDQATAQAALETVYRSAPGIGAVVARTLATELGDMSRFANERALLSSTGLTPSAYASGASMRRGHISRQGASRLRHVLVETAWRALPRDPILQAIFDRIAATRGKQRAIVAIARRLIGRIRACFRHGTTYAVGTAG

SEQ ID NO: 446409 - protein, 339 aa, unidentified
MKYTPVGVDIAKHLIQLHFIDEHSGEVVDKQIRSQDFLAFFSNRKPCLIGMEACGGSQHWARELTKQGHQVHLLQARFVKAFVMGNKNDVMDARAIWMAVQQPGKAIAVKTEGQQAILALHRMRRQLVKFRTAQINALHGMFLEFGETVRKGRASLDKAVPVVLERLRERLPPFLIALLEEQHHRLSDLDEQINGIEKQLKAVAKQNEACQRLLEIPGVGPLIATAAVATMGDASAFKSGREFAAYIGLVPKQTGSGGKVRLLGISKRGDTYLRTLFIHGARAASLLAKDPGPWITELKKRRPTSVIIVAMANKLARTVWAISAHNRNYDKDHVSVRPY

SEQ ID NO: 446410 - protein, 352 aa, unidentified
MLYVGLDIHDKRIAICVLGETGQIVRRAQVRTIDEMMRVLEALPGRFEVCYEASCGYGHYHDLLKPIAARVTVAHPGRLRLIFRSKDKNDRKDAERLAKLLYLGEAPAVHVPSADVRTWRELITCRGRIIAKRTRAKNSLRTLLRCAGVVPLRRPALWTKKGLEWLRQLELPTASQQLRRDLLLEEIESLTNQVRRIEQQLNLQAGRSPAVALLRTIPGVGARTAEAVAAFIDDPHRFPDAEAVGRYFGLVPCQDQSGDRNRLGHITREGPAVVRQLVAEATWQAVRRSPTVRAYFERVRRDDPQRKKIALVATAHYLVRVMWALLKLGTTWEEGLDPADEPEGAAPAVAKI

SEQ ID NO: 446411 - protein, 321 aa, unidentified
MTYVGIDVSKATFVIAYSSAKSSETKTFKNTTKGIREFIRTISPKENHCVLEATGNYSMLLVYLLSKAGVTVSMENPLKIKNFARVMLSVVKTDVIDARLIALYGERMQPAPFKLRSDSLLLLKQKRTVLRQLKKQLTANRNLEGSLKVLPFIDSKCKKVLEKTIKFLEKQIEEMEEELTSLAEIEYKKQMNLLTSIKGIGATLAAALIIATGGFTYFDNAKQLTRYLGLSPTYQQSGTSVNVKGHINRNGDSSLRGQLYIAAMASLRCNAECKECFDRLRSNGKPGKVAVVAVANKLVRQAFAVVTQERTYVDGFKSAKP

SEQ ID NO: 446412 - protein, 412 aa, unidentified
MEVVYPRCSGLDVHKRFVVACLSIIEKGQRHKELRQFSTMTNEILMMKEWLTASGLTHIAMESTGVYWKPIFHLLEGEIEAVLVNAQHMKAVPGRKTDVKDAEWIADLLQHGLLKASFIPGSDQQAVRDLTRTRMRLTQERTRLINRIQKVLEDANIKLASVVSDIMGVSGQAILMALLAGQEDPERLAHLARGSLVKKEDQLQAALQGKLLPHHRMVLEELLPLIASLDRSMARFDREVAERLGRFDALIARIDAVTGLSRRSIEVLFGELGWDMSRFPDAAHAASWVGICPGNHETGGKQLSGRTRQGNRWAKTVLIQAAHAAGHTQTYLGEQYRRISARRGSKKAAMAVGHSILVIFYHMVKTGEPYHEKGADYFTNVTKEKIQRRLVRQLERLGNTVILQPKAETTLA

SEQ ID NO: 446413 - protein, 424 aa, unidentified
MKVTYQTCCGVDVHKSFLVATIVKTTGGIEPSYQKKRFSTFNSSILEFKQWLLDNDCHDVCMESTGKYWVPVFNLLEDEINVVIANPKWVKAVKGNKDDTKDSKWIGDLFRLGLVKGSYIPCKIVRILREYTRYRYKLVSCRSSEKNRYQNTLTVCNVALDSVVSDIFGKSSMSIIDYLLEQSGTSINHEEIASKLLRSLKSKEDAVIESVEGYQMTDAQKYRMRLVRAHMDYITAEINDVDKMIENMIFSNPDFENAVQFLCTIPSVKRDSAITIISEIGTDMSQFGGSKRLCCWAGLTPGSNESAGKKKSVRITRAGVYLKPALVQCAHAAVKSDKSPYYKKKYESLVKRRGKKRAIIAIARMILTAIYQMLSTGEQWNPSDLYKIDMPVALVEKQKAKAIKQAKKLLQREGILPPDEPLAS

SEQ ID NO: 446414 - protein, 372 aa, unidentified
MFKVGEKSKSVSSGRGTEPKLRVNPEAEMSKGGRSGAAVCGQAFCGIDVSAATLAVAVQQEQGAGLRQKEFANSAAGHKRLIAWLLGLGSRVRVSLEATGVYSLEVAMALDRAEGIEVAVLNPKTVHRFAQTLRRSKTDKADAAALAEYSLRMPFVPWRQPGAIALQLRAIGRHLAALGEDHTRQRNRLHAARVSGSTPACVRQDLKRGLDGIEKRMKKLRAQAVALIAQEPELKRKFEQLIALPGIAEVSAVQLLSELAVLDPAMTVRQWVALSGLDPVHRQSGTSVDKPSRISRNGSSHLRRALYMPALVGVRRDPHLKAFYQSLQARNKTPLQALIAVARKILHAIFGVFKTGTAWDGAKLFPKLIPNS

SEQ ID NO: 446415 - protein, 311 aa, unidentified
MNSDAYVGVDVSKDQLDVNLLPSNETKQFSNDDAGINTLIKLLKRIDPALIVFESTGGFEMPAVSGLIENHLPVVVVNPRQVRDFAKATGRLAKTDSIDANTIARFARDIRPEVRPLKDEHTQLISALNARRRQIVDMLVAEKNRLYTAPKPNKKSIQKHIQWLERSLEDINKDIDKTIKKSPTWRENDKILQSFKGVGPVVSATLLCDLPELGTLNRKKIATLVGVAPLNCDSGKFRGRRRIKGGRANVRRKLYMAAVASLRHNPMMKDFYDRLVDAGKPPKLALTACMRKILTILNAMMKNRTYWIATY

SEQ ID NO: 446416 - protein, 370 aa, unidentified
MSNSTTMFVGLDVHKDSISVACAPEERTADVAFVGPIGTRQCDIDKLVRRLHSKASRLVFAYEAGPCGYVLHRYLTAKGLTCFVVAPSLIPKKPGDRVKTDRRDAVELARRLRSNDLTPVYVPSVEDEAIRDVCRAREDAVKDLKAAKLRLKSFLLRLGLHYVGRADWNDAHQRYLARVVCPTPAQQIVFQEYLRAVTEIADRLKRIDSELREHVPSWRLSAVVEALQALRGVQDTVAITTVAELGDITRFDSPRQLASYVGLVPSEHSSGPSRRQGSITKAGNSHARRVLVEGAWAYHHPAKVSEAIQKRLERLPKNIQDIAWKAQVRLCKRFRRLSARGKHPNVVVTAIARELLAFMWAIAREVPVKA

SEQ ID NO: 446417 - protein, 367 aa, unidentified
MKKISTAVVKAVKDFSQQKLTIGLDLGDRSSWYCVLDEAGEVLLEQRLATTPKAMKEVFGSMPRCRIALETGMHSPWVSRLLSELGHEVMVAHARNVRLIGESRKKDDRLDARSLARLARIDPQLLGPVKHRSARAQADLTVIRARAGLVRSRTALINTARGLTKSYGERLRGCNPRNLNPEKAQGLSPELQAALEPLLAAIESLSERIYEYNQQIDKIAKESYPQVARLEQVKGVGTLIALTFLLTLEDPHRFRKSRDVGCYVGLQPGRRNSGQSEPQMHISKEGDPYLRTLLVQGAHHILGPFGADSDLRRWGLKLAERGGKNGKKRAVIATARKLAVLLHRLWVSGEAYEPLRNSHQAAMSAAA

SEQ ID NO: 446418 - protein, 364 aa, unidentified
MYDSTMTVAVGLDVHARSIRLAAVRADELLEERTLPYDEEQVERLLRRWPSVRCCYEAGPTGFGLYRHLVDRGVDCTVVAPGLVPQRPGDRVKTDPRDARKLARLLAGGLLEPIHVPSPEHEAARDLVRAREDARLDRMRDRHRLSKFCLRHGRILPTSSWTVVRRKWLGEQRFEFVAEQLTFDSYLHALDLVDARIEQLERAIRETAEQEPWRQLVARLRCLRGIDTLTALALVAEIGDFNRFRSAAEFMAFVGLVPSEHSSGEKRRQGSITKVGNSHVPRLLVESAWHARRRPKVGYDLARRQRGQDAVVLERAWRCQQRLYQRWQRMAGRGKPQQKIVVACARELAGFVWAIATEQPLRTT

SEQ ID NO: 446419 - protein, 347 aa, unidentified
MQVARDVPGKIANTLAALKTLTTKLASRHSELRFCYEAGPCGYGVHRQLISLGHRCDVVAPSLIPTRPGDRVKTNRRDATMLARLHRAGELTPVWVPDADHEAMRDLIRLRSVVRQIVSRARQHLQGFLLRHGRKHGRGTAWRMAYRRWLSTLAFEHPAQQIAFQDYVDAVLDAERRLQRVEEQISGLLPEWNLRPVVDALQAMRGIALITAVVLVAEVGDFTRFANPRQLMAYFGLIPGEQSSGETTRRGGITKTGNAHARRALVEGAWAYRMKARIGRHKVDRIEALPKVVRDIAWRAQLRLCTRYRRLSARGKTANVVNVAIAREMVGFIWSIACTVQSAPKTA

SEQ ID NO: 446420 - protein, 354 aa, unidentified
MKRTTKYVALDVHQATTVASVREDSGRVIARSVLPTDGGAIVEFVRGMRGAVHVTFEEGTQAQWLHDLLAPLVDRVVVCDRRGAPRHGNKGDHVDADQLAELLRRGGLRAVYHGSAHRAGLKELTRTYQNLVEDSTRVMLRLKALFRARGIPTAGTAVYHRQQRARWLARLPDGGARFRADALYTELDVLRQLRPKAKAAMITEARQDPAWPVLRTIPFLGPVRVALLLATMQTPWRFRTKRNLWAYAGLAVVTRSSADYALVAGQPVRRRRAPMTRGLNPNHNRVLKDVFKGAATAATARPGPLQDVYHNVIARGTREELARLTLTRKLAALTLRLWKKGERYDPTKLTTPAR

SEQ ID NO: 446421 - protein, 352 aa, unidentified
MENIALIGIDLGKNSFHIHCQDHRGKAVYRKKFTRPKLIEFLATCPATTIAMEACGGSHFMARKLEELGHFPKLISPQFVRPFVKSNKNDFVDAEAICEAASRPSMRFVQPRTESQQAMRALHRVRESLVQDKVKTTNQMHAFLLEFGISVPRGAAVISRLSTLLEDSSLPLYLSQLLLKLQQHYHYLVEQIKDLESQLKRKLDEDEVGQRLLSIPCVGTLTASTISTEIGDGKQYASSRDFAAATGLVPRQYSTGGRTTLLGISKRGNKKDPNFVGSVCQGIHTKTGTPVWQVGRLGQGVVVSEKQLCRHLCSGKQAGQNSLGTDGATANLRSIKAEIHQFKQSFIWFCEY

SEQ ID NO: 446422 - protein, 346 aa, unidentified
MLHVGLDLSRKRIDVCLISDQGELIDRFTATPDRDGLHGLARRVAVYGEPIRGVVESMNGARFVHDELVAHGWEVLVADAQKVKGLAPLACKTDKIDSRVLAELSFRDLVPAIWLPTFELRSEREISRWRLHLVKHRSTLKNRVHSTLITFGHQRHMSDLFGVAGRKLLGELEMPEPWRSHVDASLVLIDDLEARITQIAKDLRRSGADHRYIPILMTAPGFGWITSYTVACEIADINRFSSPVKLTGYTGLCPRVKQSGQMDQRGPLSKHGPKYLRWGLMEAAIAASSHPLYRERYQRTKRRLGKQRGPKVAQIDLARQLTEAIWYMLTRNQPFAPAGAIFRLAA

SEQ ID NO: 446423 - protein, 341 aa, unidentified
MNHYAGIDVSLKESHVCVVDASGKIIREGKVASEPEDLIGWFGALGLAVTRIGLEAGPLSQWLYAALRDAGLAIELLETRHVRNALKIMPVKTDRKDAQGIAELMRLGWFRPVHCKSMGAQETRVMLTARKLVQSKLHDVEMSLRGILRGFGLKVGKTTRTGFAGRINELVAGHPSLQVVAEALLRVRAVLLKEFNGFEKRVRTMARHDARAELLMSAPGVGAIVSLTFASAIDDPGRFRSSKRVGAHFGLTPKKYQSGETDITGRISKTGDSGVRTALYEAAHIILTRPVKGSALKRWAARLAKRAGMQKAKVALARKLAVIMHRMLVDGTTFDFAAAAA

SEQ ID NO: 446424 - protein, 349 aa, unidentified
MHLRTIAIDLAKDVFELAVVTPAGKSMSRQRLTRAALLKFLQQQEPSCVVMEACGSAHYWGRLFQAQGHQVRLLPAHYVRPYRRRNKTDRADVLAILEANRCAEIKPVAIKSVDQQQIQHCHRLREQWKATRTARINALRALLREQGVVFPQGATAFLKAAPMLIDDEPTVRPLQPLLHALLAEISLIEDHMREAEALLRRATADNLAVTRLQQINGIGLLTATALVAAVGDPRSFKRGRQLANWIGITPREHSSGNTRRLGAITRQGDVYLRTLFIHGGRAALARAKQLAASKPEELTKLQRWAVQLEQRCGFNKAAVAMANKLVRIAWAVWHHTRRFDGNFVIATTA

SEQ ID NO: 446425 - protein, 353 aa, unidentified
MKTYYVGMDVHRASIVIVVLNGAGKIVMQSVIETGAERVRGFLKQLSGKVYVTFEEGTQANWLHDIVRPLVTEVVVCDPRHNKLMQSGNKNDRVDAQKLAELLRLGSLKAVYHGDNGVRGLKELVRSYDCLVSDTTRVMNRLKAIYRGRAIGCAGHDIYRQDRREQWLEKLTERGVKQRASFLYQQLAALKPLRHEAKRMMVKEARRQTAYLWLMSVPQFGAVSVAQLLAIVGTPHRFRSKRQFWTYIGLAVVTRTTADHEVVNGVLRRSQRPVATRGLNRNHNHLLKRVFKNAASSACRQGPFKAAYELRVTQGMVPSLARLTVARQLAATVLAVWKRGEQFNPERMKQQAA

SEQ ID NO: 446426 - protein, 359 aa, unidentified
MSTITIGVDLAKTVFLECETDSTGRVLKRQDLRREPFALWLAQLPVGTVVAMEACSGAHHWARRCLAYGLQPRIIAAQFVTPFRKSSRNKNDRNDAEAIATAARQGNMRFVAVKDVDQQVRLSWHRAREGYKVESLAIGNRIRGLLAEFGVIVAQSDVALRRQLADLDAQRELPDEFKELLRDLAEHWKQLRLHFDACDARIEAHARQDERCVRLRAIIGVGPITADAMVATVGNAREFKLGRQMAAWLGLVPTQHSSGGHARLGEISCRGDAYLRTLLIQGARSSLQRAKAVAIEKATPEQRWIRSLDGRMPFGKIIVAIANKHARQIWTMLAHGVDYDPCACLNHPMHRPSQMTQAA

SEQ ID NO: 446427 - protein, 388 aa, unidentified
MHVYVGVDIAKELHYAAIMDSDGVVTKPFSFENNDKGFNLLLSHLAPYDKESILIGFESTAHYQENLAYFLKSLGYRTAEINPLQTAALRKANIRNTKTDSVDARLICLALMNHHIQGDQRDSVRLDDLYQLCKMRMDTMKKRTTCKIQFVAIMDRIFPELASFFDNNLHTNTIYRLIDSFPLPSQIKKTRIDILTKLLHKASRGHFKKEKAQKLKNLADISVGIPSDIFAFQAQQLVHQIEFYTDQIQTIEERINTNPDVMSSPLMTIPGIGTFCVACILSAIKNINDFGAPCKILAYAGLDPVIRQSGKFIASHTRMSKRGNSLLRYALVWSAGNVVKNNHTFAEYYRHKTEDQGKSHYQALGHCAKKLVKSIYHMLKYNKSFNLD

SEQ ID NO: 446428 - protein, 318 aa, unidentified
MAEAVFVGIDVSKAELAVALRPSGESFTVAHTGAGIKQLVARLEKLHPTLVVVEATGGWQRQVVAGWWSARIPVAAVNPGWVRSYARGRGLLAKTDRIDARLLALFAEREQPEPRAPLDAETQALQELATRRDQLVEMRVAEVQRLHRASPALHKELRKHIAYLAGRIKQLEDEIDKTVRRSEAWRRKREVLRSFPGVGKVFSLTVLSKLPELGTLSGKAAAALVGTAPVPADSGRRRGVRVIRGGRYQVRRKLYMCALSAVRWNPVLKRFYEQLVARGKLEKVALVAVMRKIIVMLNAMLKRDTLWSEPCAGLSAKD

SEQ ID NO: 446429 - protein, 329 aa, unidentified
MTYDYVIGMDVGKYFHHACVLDIDGAQVLSKRINQNEKSLRTLFSTFSANDHKVLVVVDQPNNIGRLTVAVAQDIGIDVRYLPGLAMRQLSRIHAGNAKTDIRDAYIIAHAAQNLPESLRSVDRVEEAFLQLKVLNGIDEDLARSYTRLINQIRSALVGCYPQFEQALRGQIIHRKWVLHLLARYGGPTKIKRLGKAKAAAFARRYKARNPEPVIDAIFAAISEQTVAIAGAKYAEMGVAMSAKDALLKLEHRKQIEQEVIELINDIPHTQILLSMPGIGPKTAAQILMTAGDMSGFPTAGHLASYAGLSPRTNQSGTSIMSNSLNRAG

SEQ ID NO: 446430 - protein, 358 aa, unidentified
MESQDSKYVGIDCGKKSLEVVRIHSENSLKERRQFSTTEIGINNLLKWLTQNDIVGLEAGTQSFRIAKSILNKGIQVIVLNPGDLATIYQSLKKTDKEDSLKIARLIQRYPMEELPVVPVPTDEEEDNRRLCTEQENWTRQLTQGKNRLHSLFTQAGLTEITKKHLRTKSSRETSVTLLPSRYQKEAERILQVLDLVEQNLKLIEEETKDALKKNPAYVQTIMSMPGIGMVTSLAIMSYMGDCKRFSSGKQAAYYAGLVPRVDISGDTVRYGKIVSRGCHSIRRVIVQAAWSLVRCQHGGKLKEFYERLYSKKGAKKSIIAVSRKMIEVLYSMIRTGALFDSMPEEVLHRKLAQHGLM

SEQ ID NO: 446431 - protein, 392 aa, unidentified
MNACALGWDNHRKFSKVSLMEQTPDGEIRAIERARLEHDDKDAMRTWLSHLDPEMPVALEATFGWPWVADLLEELGHPVHLGHPPVIRALAKHEAKTDRCDSDRLGKFQLRGILPESYLAPPEVRQRRERTRYRMAISALRTAVKNRAQAVLHRHGILHDFSDLFGKAGRQFLDNLELPDGSRQALQGCLELLDHLTLLIHEVEQWMVVNLEEDELVRLLMTIPGIGLILAHVIRAEIGEIERFPTFRHLASYAGLAPMSNDTAGREGPRHCSSACNHVLRWAFIEAVHGVQRTQGAHGLRLRQLYARLCGQGRPKGRKSSAKVAVAHELSKVVHVVWTKRVPYTDAPPPRPGSREGQRQTKESPTAKTTLRSNQPRHPMVRRRATVGQTRK

SEQ ID NO: 446432 - protein, 372 aa, unidentified
MGHHTEAFVGIDTSKLRNAVAIADGGRGAEVRYLGEFPATEAAIQKLVAKLATKYRHLTFCYEAGPTGYGLYRLLKSLGHESLVVAPSLVPKKAGDRVKTNRRDAVSLAKLLRAGELTAVWVPDERHEAMRDLSRARQAVKKDLQGKRQQISSLMLRLGRIYPGKTTWGPAHMKWLMTQKIEHREQRVALEELLEGIRQESERMERLENAIREVVPEWSLAEVVAALQAVRGIDLIAAVGVLAEIGDLSRFQNPRELMGYLGLVPSENSTGDKVKRGGITKAGNGRARRILVESAWSYRYPPRVSRDKQPKVEAAPRRVREIAWKAQTRLCGRFRSLERKGKRRTVIATAIARELSAFIWAINRELMAHRQA

SEQ ID NO: 446433 - protein, 420 aa, unidentified
MTDEIEWFVGFDWASEKHRACLLDRHGGVIGERDVPHGGAGLTELCDWLVDSAGAEAGAIAVAIEMPHGPVVEMLMERGFQLFAINPKQLDRFRDRFTVAGAKDDSRDARVLGASLRTDRHAFRRLAVDDPVIIELREWSRMAEDLQQERTRLANRVREQLWRYYPQALQLTDDLAADWFLALWHQAPTPAKAAKLRKTTIECVLHAHRIRRLGADAALQILRQKPLAVAPGATEAATAHIRTVAARIRLVNEQLKTAHRMLDELTARLEPAAESAPGQTSEQRDVAILRSLPGVGRINLATLLAEAWQPLRRRDYHALRALSGVAPVTRRSGKSCIVIRRLACNKRLERAVYHWARVATQHDPASRRRYADLRKRGHSHGRALRTVGDRLLAVACTLLQRQVVFDPDYNADPAQDDAAA

SEQ ID NO: 446434 - protein, 405 aa, unidentified
MVDIMVSDFRKGRYNLMKIFVGIDIAKLNHFAAAISSDGEILIEPFKFTNDADGFQLLVSKLESFDKNSIIIGLESTAHYGDNLVRYLVAEFYQVCVLNPIKTCQMRKNNVRKTKTDKVDTFVIAKTLMMQDDLRFITFFDLDMMDLKALGRFRQKTIKQRTRLKIQLTTYVDQVFPEIQYFFKSGLHQNAVYALLKEAPSPKEIASMHMTHLANLLKVNSHGHFTKEQAKELRVLAQKSVGANDSAISIQITQTIQQIELLDSQLQKIEAEITDIMKFNDSVIMTIPGIGYINGGMILGEIGDIHRFSNPNKLLAFAGLDPSVYQSGNFQAKTTRMSKRGSRVLRYALVNAAWNVVRNNATFKAYYDAKRAEGRSHYNALGHCAGKLVRVIWKMLTDEVEFNLE

SEQ ID NO: 446435 - protein, 358 aa, unidentified
MAKSKQTTPVVGGVDTHKDLHVAAVVDDNDQVLGTQSFATTRQGYKLMLTWMRSFGDLQRIGVECTGSYGAGLLRYMQVAGVDILEVTAPDKQDRRRRGKNDDFDAQSAAHAAFARRRTVTPRSRDGMVESLRVLKVCRKAAVQARRIALQIIQTTIVCAPDRLREILRNMTRMKLIRTLVAWRPDQTGYRDVEEAYKIAFKSLARRYLELNDEVADLDDMIEAIVTDLAVELIARNGVGLDSATQVLLTAGDNPERLGSEASFAALCGVSPVPASSGKTTRHRLNRGGDRAAKSALEIIAIGRLRLDPKTQEYVSRRISEGHSELEVIRWVKRYIACEIYNVIARRHKQINQVQIAA

SEQ ID NO: 446436 - protein, 415 aa, unidentified
MSLMVLYERCAGLDVHKKTVVACLMLAAPRGQVTKEVRTFATTTAGLLTMADWLSSHGVTHVAMESTGVYWRPVFNILESRFEVILVNAQHMKAVPGKKTDIKDSEWIAELLRHGLLKASFIPPKPIRDLRDLVRARKTMVQERAREVNRLQKVLETANIKLSSVATDVMGKSGRAILESLLAGESCAQRLADLARGRLRAKLAPLREALDGRVDSHHRLLLRHLLDHIEFVEGQVDKIEAEIEQMLDPYEHQITLLTQIVGVQRTTAAAILGEIGVDMSRFPSDKHLCSWAGVAPGNRQSGGKRRSASTNKGNAHLRAVLAEAVWAIAHTKDNYLSAQYHRLARRIGSKRAIVAVSHSLLVIIYHMLRDEQDYHDLGPHFFEKLDTERQRTAAVRRLEALGYAVTLEKKTEVSA

SEQ ID NO: 446437 - protein, 410 aa, unidentified
MEILFGCCGALDIHLKSIQAHVRRRNANGVVSSFAQRFGTTTAQILALGDWLAEHQVEKVAMEATGVYWKPIWNLLEDRFSLMLVNAQHFHNVPGRKTDVNDAAWLAQLLQCGLLRDSFVPPRPQRELRDLARQRTALVEDKSRVVNRIQKTLEDANIKLSSVASDVVGVSGRAMIRAMIAGQQDPAALADLARQRLRTKIPELREALRGGVRAHHRFMLKQLMDQLQMLEGQIEAFEARLDELLSNNREPIERLREIPGIDTTAARLILSEIGTDMSRFPSAAHLCAWAGVCPGNNESAGKCKSGRTRDGNRWLRRVLVQVAWAASQKKDSYFYAQHRRIAFRRGMKRATMAVARSILTTLYHMLKTGSDFIDLGVQFFDKLKPMRAVNSLVRRLEAIGYQVQLRPKVA

SEQ ID NO: 446438 - protein, 380 aa, unidentified
MRSAQDQHTTQPTEMLAVALELAKKSWKVAMSDGRRDRPSLYSVDDVTPLGRIQAVVNKIKLQLQHWGLTKVCRVSVVFEAGQDGVWIARALSKYGYQVLPIDPASIPVPRQARRAKTDRLDAVKLVNSLLGWLRGEKDRMHVLHLPTQGEEGSRHLVRARGDIQKDIIRHRDRITKLLRTVGCWTEFDPLSADWLQPGALCDYAGQPLNSNLLARLSKNRELLCLAVQQMKQIEKQIRDALPEAQKERIRHLQQLKGIGEVGATRLTLELFWRHFNNRQEVGACVGLVPQPYDSGQSRVDQGISKQGNRRVRALLVEMAWDWLRYQPNSDLTRWFMQQTQAGGKRGRRLIIVAVARKLAIALWRLLEFGEIPAGAMCKH

SEQ ID NO: 446439 - protein, 438 aa, unidentified
MSNKVIFNLDELFISVGIDVGADFSWMSIALPNQQFVGKPYKILHNSIDSLTTAVSKIKEAEELYSLESRIFLETTGIYHYPLFCYLRDKGFNCSVINPIITKNSTNINIRKVHNDRFDSKKAALVGLKPDLKVSLMPSDLALNCRNLCREYYDLMDNRSAYVNKLQGELCMAFPQYLDIFSKVTINTSLTLLETYTSPSAFLEADRQEIIDIIRSTARFGLTYAQNKYNAIVQAATDANQFGYIINSNIKRIRLYISFIRKYDEEINRILESLHELVDANEDADFVKQIHLIETFKGAGFLSAVSIIGEIGDFSAFSKPKQLFAYFGLDPAVKQSGKFEGTKVQMSKRGSAIARLVIHTLTLQSISISRNGEAKNPVLREYYLKKCDSKPKLVAMGAVSHKVCNMIFAILRDNKPFKIIAPQEHIKQYNSAKCDIAA

SEQ ID NO: 446440 - protein, 345 aa, unidentified
MRRIIVSTINILGIDIGKSTFHLVGHDLSGREVYRKKFSRPKLIQVLSTIEITTIAMEACSGCHWLARKCQEFGHKVLLIPPQYVKPYVKTNKNDFIDADAIAEAAARPTMRFVSVKTESSQVISVIQRIRSSYVKDRTACMSRIGATLLEFGMSFPKSHAKMKVLFQWLAEHGEPIPPMLLLELRDHHDFYLKLNQLILTQDKKLKEIVNNDERAQLLKTIPGVGTLTASRCISDISNVADFKNGRHLAAWLGLVPRQFSTGGKPTLLGISKRGNKGLRELFIHGARAVLVRPEKAVAVFGNWILELLSRKHFNVVVIALANKLARIAWSVLSTKQAFEVRVQA

SEQ ID NO: 446441 - protein, 344 aa, unidentified
MWIIGCDYHPSFQQIAFVDQATGEYGDLRLEHKGGEAEKFYRSLTGQQVRVGVEATGGMRWFERLLGELGIELWIGDPARIRAAAARKPKTDKEDAKLLQRLLLEKRFPRIWVPTVQQRDARQLVLHRHRLVQTRTRAKNQLQDIARNEGLHPKRRVWSQAGQKELMALPLSPWATVRRQDWQELLGELNRRIDPLDRALQQEAAQRPEVQLLMTHPGVGPVIATAFVVTIGEPGRFQTSKQLAAYLGLVPMENSSGKGRQRLGHITKQGNSLLRGLLTEAAHIASRHDPEWRRKYMRLAMKKNRSIAAVAVARCLAVRLWWMWKLGLDYGQIKESRSHAEQLA

SEQ ID NO: 446442 - protein, 409 aa, unidentified
MDLLHRRCAGLDVHKETVVACVRVGEGKQVRHEVRSFKTTTGELLALSDWLSANECTHVVMEATGVYWKPVWHILSDGGFELTLANAAHVKAVPGRKTDVNDATWLADLLAHGLVRASFVPDVATQELRGLLRTRKQLVREQVGHTQRIQKTLEDANIKLDSVISDVVGVSGRRMIEALVAGETDPAQLAPLAHRRLRAPPEALCEALRGRVTRHHRFLLALHLRQIDALGEAIAAIDQEVEANLAPFRAAVRLLTTIPGVSALTARTIISEIGQDMTRFPSAAHLVSWAGLCPRNDESSGKRRSTRLRKGAPWLKTTLVQCAWAAARKADSYLQAQFHRLRSRRGPKKAIVAVAASILTAIYHMLTDGTEYHDLGHDHFDQRTKETQKRRLVERLQLLGFSVTLQPAA

SEQ ID NO: 446443 - protein, 392 aa, unidentified
MIYVGIDVAKDKHDCFAMNSDGEILIEKMTIQNNFDGFNYLFNSISQFNESFENIKVGLEATGHYSNNILNFLTSKGFNVYVINPLQTNLYRKGQSLRKTKTDKLDARFIATMLITGNLKPYSNLSYHISELKSLVRHRFRLVQERSKFKTSLSRLVTLAFPELEKIVWSISQNSVLYLLNELPSVKDISKCNLKHLTCILEKYSNGKYSRDKAIEIRELARKSIGTNSHSLSFELKQVIQTVLFLQSQIDDIDKELKNLVDKLNSPIMSIPGISYVSAAFILAEIGDINNFDSPAKLQAFAGLDPSTYQSGKYTATHSLMVKRGSKYLRWALLNATRLVCMRDKTFNDYKNSKLAEGKHYFVALSHTSKKLIRVIYYLLKTNKSYQLPKVA

SEQ ID NO: 446444 - protein, 406 aa, unidentified
MADDYDFYIGLDWGTDQHQACVLDAAGRRIGEHTITHSGAGLAAWLAALARYGPAARLAVAIEVPRGAVVDALLAHGCHVYALNPKQLDRFRDRQTVAGAKDDRRDAGVLADALRTDRGAFRALQPDDPRLGPLRELTRLARELGTESTRLTNRLREQLVRSFPQVLTLCPAADEPWLWTLLDHAPTATQAARLRPQTLRALLAKHRVRRFTAADLSACLQAPPLPAAAGTIAAAGEHIAFLLPRLRLASQQRRQCDRRLEQLLDVRATGEPPLEHRDVTILRSLPGVGRLVAATMLAEAWPALAARDYQMLRTHSGVAPVTRQSGKTRLVTMRRSCNGHLREAVFHWASNSLRLDPRCRAHYDRLRRRHGHARALRGVADRLLSLLIALLRAGTLYDPARRQVAA

SEQ ID NO: 446445 - protein, 356 aa, unidentified
MTSNAKYIGMDVHKESISIAVRNSAGKIVMEGVIETKASMILQFIDGLRGDLQVTFEEGTSAAWLYDLLKPHVTKLVVCDPRKNKSMREGNQNDKIDARRLAELLRLNHLTPVYHGEHGLRTLKELVRSYLTITKDLARVMTRVKAIYRSWAIPCTGKQVYARRHRAEWLGKITEPGVRRRAEFYYLQLDALRVLRQDARRDLLAESKKHKAWKRLCEIPAIGPIRAAVLLGILQTPHRFRSKRPLWNYGGLAIEMHSSADHRCVDGHLQRAKKQVLVRGLNRNCNHDLKNLFKGAAVVASSKPGPFQEFYTALLAKGMRPEMARLTLARKIATIVLIVWKKGVCFDPQHLKPQTA

SEQ ID NO: 446446 - protein, 481 aa, unidentified
MKIKSIYPARNSSQLREVLGKYSPGELLYAPIDVAKYNHKACAVNFFGDILTPAFEFSNNAHGVKFFISKITEAARNAKAKKIFIGLEATGHYHQNLTLHLKSLGYEVAVINPFDSWKERLNKSSKTDKIDLGSIAKSLISRKFSSSTVPEGVYYNLQRATRTRRKFVNRRTSSKNIITGLLDNLFPGLWDKEDTIFSDRWGKASLSVLEHYPTPQMVLRLGEKRLTRFLKKGTTKLGEKTARKIISAAKVALTRSPYEQTMDILALRSHLQAYRLYEEIIFHLEKEIAYLLVQTPGTYLLSVPGISVTYAAEVTAEIGDISRFAYANQIISLAGTCSKKDQTGEHDPQNLPISKKGNKFLRTVLNQAGLSLNTWCPDFNAYYSRKVEEKKGRCGIARTATGNKFARLAFALMKHESLYHPHSFNTLVQDPGNYYLSVYGEILKKLRAFSSEKILPQSNYLEKIKQKLEKEYAINLSEVKG

SEQ ID NO: 446447 - protein, 514 aa, unidentified
MSEGTAVSPFSRLSPRLLRKHSAWHIRHIPLTQNFHPQPLAPARKADWVHAHCARFRPPYAAQDKPFASGFTNPGQNGGDIMLKINYMSTLFVGIDVSSKANAVYAMDFEENRYISSSFGNNQPGADELVVMIAECMQKHKNLDTLLIVLESTSVYSVHISNFLASSEALMPYKPYVFCVNPKATSNYRKPYIGMEKTDPTDAYLIADFGRVGRTKRLEPWRGGQFIALKRLTRHRMHLSGCITREKTYMVSNLYLKFSELQLLEGDDKPFGNLYGATSSAVLTEFLSPQEIIDMPEEGLLTFLAEKSRNRISDISKTSELLRKAARDSYRLDKCMYEPLNISLASSFNCIHAYQKEIKLIEQAVEKCINGMSPNALIILRSIPGIGPVWASGILSEIGDITAFHSSDALAKYAGLYWPKGDSGDFTSEDNQMSKAGNPYLRYYLGEAANSVRKHIPEYADFYARKYAEVTKHQHKRALALTSRKFVRLVFGLLVKNQLYTGEKLDTEYNIESN

SEQ ID NO: 446448 - protein, 310 aa, unidentified
MEQRFVGIDVSKECLDVHIRPSGKAFAVARDGEGLAALIERLQAVKPALVVLEATGGFETTVAATLAGAGLPLVVVNPRQIRDFARATGRLAKTDALDAAAIAHFGAAVKPAVRALPDAAAQALGELVARRRQLIEMMVAERHRARQLTQRRLLKGLERHLAMLQKELSALEQDLDDAVRGSPAWRDSEDLLTSVPGIGDTTARTLIADLPELGTLDRKQIAALVGVAPFNRDSGKRRGRREIWGGRAGVRAALYMAALAAARFNPAIAAFHQRLRAAGKPPKVALVACMRKLLIILNAMLRDRRPWQPA

SEQ ID NO: 446449 - protein, 342 aa, unidentified
MNHYAGIDVSLECSSVCVVDASGKILREARVASEPEALIAWFRSSGFEFERIGLEAGPLSQWLFAGMREAGLAVELLETRHVRKAFEAMPVKSDRNDARGIAQLMRLGWFRPVHCKSMSAQETRSLLTARKLVQSKLRDVENCLRGILRGFGLKVGKITEREFAGRIEELVAGHPHLQVIARALLSVRAVLRTEFAAFQKQTRKMAQSDARTRLLMSTPAVGPIVALTYASAIDDPARFTSSKQAGAHFGLTPKKHQSGETDYTGRISKIGDGSVRTALYEAAHIMLTKPLKGCSQLKSWAMRIAKRAGMSKAKVALARRLAVIMHRMLADGTPFNAAAAAA

SEQ ID NO: 446450 - protein, 445 aa, unidentified
MAACQSKELLPLQHAHAAGIDIGAREHWVCLGSDPDADVRSFGVFTTDLQALADWLSERGVTTVALESTGIYWIPVFELLERRGFQVLLVDPRQTRRAGRPKTDVLDCQWIWRLHAAGILSPSFRPADLVCEFRGYLRRRLTLARDAGRYIQQMHKALDQMNVRLELAVSDVTGKTGLSIIKAILKGERDPAQLAKLRDRRCAKDEATIAKALQGNWREEHLFALQQGLDAWQFCLKQMRQCDERLHKCLRHMPKRTADGSEAIRPRLKGRKPNEPTFEARGLLTEVIGVDLTAIEGIDASTALTLYAEIGIDMSLFPTEKHFGSWLGLSPNAKKSGRYLDKRRSKPSASRAAWAFRLAARSLYRSQSALGAFFRRLKSRLGAPKAITATAYKLARLVYQMLKHGTAYVAQGMVEYELQFRERTLRNLHRRATALGYTLVPTAPT

SEQ ID NO: 446451 - protein, 342 aa, unidentified
MNVKTIGIDLAKAIFQIHGVNEHGKCLFNKPLKRAQMISFFANLPPCLIGMEACSSAHYWASKLQGLGHTVKLMAPQFVKPYVKTNKNDAADAEAICEAVSRPNMRFVPMKSSEQLAVLALHRARQGFVKARTAQANQLRGLLAEHGIIIPKGIAHIGKHLPEILEECENGLPGTFRQLLERLGDHLKALDRQVQELEVQLQSWHRENVASKKLAQIPGIGPITASALIASVGDAKNFKNGRQLAAWLGLVPRQHSSGGKQTLLGISKRGDSYLRTLLIHGARAVLRVAERKAQHADSWLAGVMGRRNHNVAAVALANKNARIVWALLAQEREYKANYGVAA

SEQ ID NO: 446452 - protein, 406 aa, unidentified
MRLFAGDDWAEDHHDVEVMDEAGTVLARRRLPEGVAGMAQFHALVGGVLDEDDDDPQVLVGIETDHGPWVTALVAAGYRVFPVNPQQSARFRARYAVSGAKSDAGDAHVLADMVRTDSHQLREASGDSPEAAGIKVLARAHKTMIWNRTRETQRLRHQLLQYFPAALAAFDDLDAPDVLELLARAPDPASARKLTRAQISAAMKRARRRDIHGKATAVLAALRSEQLSQPAALAAAYAATVRSLIAVITTLNEQVRLLEEQVKEHFGRHPDAEIITSQPGMGMILGARVLAEFGDDPHRYRDGKARRNYAATSPITRASGKRKIVAARFVHNDRLVDALNAQAFSALSASPGARAYYDQQRAAGHGHNDALRRLANRLVGILHGCLKTRTPYNEHTAWSHRHQQAA

SEQ ID NO: 446453 - protein, 326 aa, unidentified
MSNIIGIDVSKANLDCAYLRDPDQKKAKRLSCKNEVSSFASLVSWAETKSDLSVVIEPTHVYHEPLVQFLHNSGATVYLVNPGRVRKFAEGIGILSKNDLVDADLLARYGLLARNLIAYAPAAQEVNDLRSLLNRLDVLERNLRSELNRQEKVGKTMIFHRLEQQSIARAVKRLKTEVITFKRAIRECIKSTPSLQQPFNLLCTIPGVGAKTAWIMIVILASRPFMSAPEVASFLGLNPIEKRSGNSQYRRPRMSKSGSGHYRQKLYFPAMVATRKNPDIKALYERLLAADKTKMCALGAAMRKLVHICYGVMKNQTPYQVQTTPS

SEQ ID NO: 446454 - protein, 360 aa, unidentified
MSNYITIGMDLGNKKHTVCALDQAGKVLWRKDVANTPEALKPFFEENAGATVAMETGLCCRWISALAKSCGCDALVGNARKLAAIWQSKRKNDENDALMIAQLARADRELFHPVELRDDERHEIVQIIELREVAVSQRTQAVNSVRGLCKAHGVFIPKCDSSCFHKVAKEAIPADMAWKFKPMLRNLKEVAATIKRYDAMLEKYAKAHFKEEVELLQTIPSVGLITSCAFVALIADPRRFGSARDAGPYFGLTPGQDQSSEGDAPKGITKTGSTLMRHLLVTAANYVLRTSSPDTALKRHGEHICARGGKVARRKAKTAVARKLAVVMLAMLKSSRPYDDGLAAGKAAEGKSPAAPELVA

SEQ ID NO: 446455 - protein, 355 aa, unidentified
MPSKADTAVARTIGIDTGKNTLHMIGLDERGAIVLREKISRARIAARFVNLPPCLVGIEAGMASHYVARELVALGHEVKQVPPAYSKPFRHGHKNDFRDAHAVAEAVERPSTRCVPIKTDGQLDLQALHRVRSRLIGNRTAVINQIRGFLLEHGIPVRQGHHFLRKQLPLILAARTDVLSPRMIRIIGDLMADWKYLDERIERVTDEIEALAQADEGCQQLITVPGIGPIISNAMVAAIGNGAAFCKGRDFAAWLGLVPKQISTGDRTILGRITKLGNRYLRMLFIQGARAVLLRPASWVKHSFGSWLTAATRRLHRNVLAVALANKLARIAWTVLAQGRRYEARVEPRVEPAAA

SEQ ID NO: 446456 - protein, 435 aa, unidentified
MKLSKLRENTAGIDVGSQHIFIGFEDDTVHQFGTFTCDFRAAIELLKQRGVQNVAIESTGVYGVILHEMLGQAGLEVYLVNPAHLRYVPGKKTDVADCLWLQQLHSYGLLANSFLPPSGIKTLRSYLRLRERYIAESARAVLHIQKALTLMNVRLHQVISQIHGASGMRVLRAIVGGQRDPHQLASLCHKRIQATKYDQVVASLEGHYREEYLFELGDAIECYEFFQGKLQTCDRQIDQQLTWLAQQQPVPAEYGKVKPIRHNRPAIDELHQKVVRLMGGVNANDLPGITDYSALRLVGEIGVDLSAFPTEKHFTSWLKLAPGKKQSGKYNKKYKYKTAPRASEIFKQAAQSILESKTIALGAFGRRVRARRGPGVAIKAVARKLALLYYRSMTMGMEYVEKGVEAYEKQYHERQLHNLHKQARRLGYALVTLNE

SEQ ID NO: 446457 - protein, 335 aa, unidentified
MYVGMDVHKRFCYATMIDEEGNKIGEKKFPTIDEALDAFAESIDDARVVVEASTTGLRVYEHLDEMGVDMCMAHPLKVRAIADAKVKTDRIDSEVLAHLLRANLIPEAYVPPREIRDLRDLVRHRTALVRVQTSIKNRIHAILTREGIHHNFSDLFGKAGTEFLKKVELRRQNRMAVDNFLMVLDTLKSRIKDVSEHVDKEAREKKNEDVESLTAEIKGLGVYTALLAVAEIGDVTRFPTYKKLSSYVGLIPSTSSSGGVTRHGKITKRGNKLLRWALIQAAWRVIRYDEKLRGYYARIAKKRGKNAAIVATARKLLKRIYFILQENQAYGVQGV

SEQ ID NO: 446458 - protein, 456 aa, unidentified
MKEKEIPMQIVHPNAAGIDIGSKTHWVAVDQNLGNVREFGVYTRDHQRLINYLKAHQITSIAMESTGSYWQTLFHALQKAGLEVILVQGNQTRNVQGKKTDVLDCMWIQKLHSLGLLSSSFLLSDYLQTLRTHYSHREHLVEQTAMYINKMQKALRLMNIRLDVAIRDLAGKSGRAILDAILAGHRDPNYLASLAHFRVKKSPEEIAAALHGNWREDLLFELRSCLTFYDAYKKEILVCDQKIESIMTAYIPETEVLTLENKAPQKPVRKQVNRNSPSFNVRQLAFTHLKTDLFQIPGVSHSTVLCLLCNMGNDIKRFASAKRFASWLRLVPNNKQSGGRIISSRTPKGKNAIALSLRQAANSIGNQKEHPLTPFFKRIAYRKGRNAAITATARKLALIIWNMITKTQDYLQPNTQLLFDRRKLAQVNNIKSRLFRLNLSEAEMMELFQKTSFPST

SEQ ID NO: 446459 - protein, 364 aa, unidentified
MEEPTHIGLDVHKETIAVAVLRPGTVECDERVIPNTPEALRRLLSRYPDGAALRTCYEAGPTGYDTQRLITSLGISCDVIAPSLIPRRSGVRVKTDRADARNLARLHRAGELVAVRVPTPAEEALRDLVRAREDLKNDRRIARQRIRSFLLRYGKRYPAPGSRWSFRFEVWLRPLRFSEPASQAAFEHLLGAYFMRDSQLGAVDKQIAELALAEPLAGAVARLRAFRGIDTLTAVTLLTETCDFRRFGSAGSFMAFTGLVPSEHSSGQSRHQGSITKTGNAHLRRVLVEAAWAYRYAPAVRGKLRGRQIGQPPEVVAYSWAAQCRLHGTYRRLAAKKGPNKAVVAVARELSGFVWGAMSDRMAV

SEQ ID NO: 446460 - protein, 415 aa, unidentified
MNDSPQTFERYLALDIHKHYLVAGGVNAEKKVILPPRRFDFGEWAVWHTKHLQPTDAVVLEATTNAWTFYDQVAPRAGRTVVAHPGLVKVIASARVKTDNRDVLQLARLLAANMIPEVWVPPLEVRELRALLSHRRRLIKMRTMTRNRLNSVIHRYNLIPPRGELFLLKHRAWWLGLQLSPTEKLRIRQDLATLDHLEPEISEVEEELFRLSTVSPWAEQVPYLMQLPGFGIIVVMTVLAAIGDVTRFPSAKKLVGYAGLGASVHDSGETHRTGRITKTGRKDLRWIMVESARIAVLYHEYWKQEYARLEKRMDSNKAIVVIARKLLVGVWNVLTERVADRHVAPEMAASKLMVWSWNLTDEQREGMTSRQFIRYHLMHLKMGDDLTHSPYGGRARPLASVDEVLALRPELKSEA

SEQ ID NO: 446461 - protein, 355 aa, unidentified
MQKYKVSFKGQNIYVGIDVHLKTWHVTTLTESGCKYSFAQHADAKELFDRLNKKFHEAHFKSAYEAGFCGFSVHYALTELGVENIVVHAADIPTTGKEKALKTDAVDSEKIAWALKRDELTGIYIKDRRYMDDTNLMRLRQRFIMDLSRQKNRTKHLLYTQGVTYPERFLNNRTHWSRNFMKWLREEVELLSEQKLSLMLLCEQVENTRKAILKVTREIRRLSTTDRYKENFNLLMTVPGLGLITSMSMLTELDNDIMRFPNERSFVSMLGLIPTCHDSGDKKVNGEKINRGNKHLGPLIVEACWVAIQRDIELSAYYSNCCLSMKPHKAIIKVARKLACRAYAVLKTKTRYALP

SEQ ID NO: 446462 - protein, 359 aa, unidentified
MAVIEERERRIVGGVDTHKDLHVAAVVDEQDRVIETRCFATTRQGYRQMLAWMRSFGELQRIGIESSGSYGAGLLRFMQQAGIEVLEVTTPDKQDRRRRGKNDDLDAQNAAHAAFAGQRTVTPRSRDGMIESLRVLMACRKTAVSARRVALQMIHNTIVCAPDGLRDQLRSLTRMQLVRTLAAWRPDLTAYRDLDSAYRIGLKSLARRYLELHDEIADLDAMVAAIVDELAPNLVARNSIGHIGAAQLLLTAGDNPERLRSEASFASLCGVSPVPASSGKTVRHRLNRGGDRAANSALHIIAIGRLRTDQRTKDYVARRTAEGHSKLDAIRALKRYLAREVFTLITQRRKEINATRIAA

SEQ ID NO: 446463 - protein, 364 aa, unidentified
MVMIGTDSHKRTHTAVALDEVGRRLADKTVPATSDGHFALVSWAQQWTQVSFAAEDCRNMTRRLERDLLAAGHRLVRVPTRLMAQARASGRQPGKSDPIDAEAVGLAALRHRHRLPVAELDGPTRQVKLLADHRRDLVGERTRVVNRLRWHIHELDPALRVRARGLRSYCVIDRLGEHLATVTGLVARLARELLARCRELTMQINALWRELRDLVRRLAPTVLAIPGCGVLSAAMILGETAGVHRFRSRDAYARFTGTAPIPAWSGNTAGKVRLNRGGNRTLNSALHMIAVTQSRGIGPGAAYLDKLTAGGKTRTEAIRLLRRRISDAVYSALRADERDHGLDSASQPRTGPDTSLAEPIHPAA

SEQ ID NO: 446464 - protein, 322 aa, unidentified
MTQQEPYASYVGIDVSKATLDAAVRPTGQRLNVPNQEKGVRELVASFGEPSQALVILEATGGLELPVAAALAEAGFSVAIVNPRQVRDFAKATGKLAKTDRIDAQILAHFGEAIKPEPRPVPEGEALLFKQMLSRRRQLVEMITAEKNRLSTTPSALRQGVQAHIAWLQESLARLDDELGNRIKASPMWRASEELLRTAKGVGPVCSRTLLVDLPELGKLDRKEIAALVGVAPLNRDSGKLQGKRAVWGGRSRVRAVLYMATLSATRCNPVIAAFYLRLLAAGKAKKVALTACMHKFLTILNAMVKHGTPWQKVAPQPSGAR

SEQ ID NO: 446465 - protein, 338 aa, unidentified
MFFIGIDPHKTSHTAAVLDAHEHLVSEVRVGADRSQRARLMAFAAGFEPRCWAIEGATGTGALLAQQLVAAGETVLDVPPALSARVRLLDNARSDKTDAHDARSAAVVALRHSNLRTVDLEDHSALLRLLAKRHHDLVAHRTRAVCRLHTVLCLLVAGGLSKGLSAARAARELRRIRPTDQVGIERRRLAGELLAEVRRADADLIELKARIAVAVTASSTTLTDVVGVGPIMAAYLIGYSGDVRRFPTAGHYARYNATAPIEASSGPNPRHRLNPRGNRQLNHALHIVAVTQVRNNTPGRAYYLRKQAEGKTRKEAMRALKRRISDAVYRQLLTDTPR

SEQ ID NO: 446466 - protein, 490 aa, unidentified
MSQSKTQKKPNSPRESPSRKKHRKIRNAQQKVQKVCIDAKDPGVAATTAPTLAVVHPHAAAIDVHSDNHVVCVGPGLVRTFGAYTCDLEAIANHLSAHGRTTVVLESTGVYWVPLFELLEARGFEVFLVEPSQARHCGARPKTDVLDCQWLQRLHTFGLLRPSFRPPESVLALRGFWRQRQLLVRYAASHVQHMQKALEQMNVKLTEVASDITGVTGRAIIEAILRGERDPQKLATLRDGRCGKTEEEYAKALAGTWRPEHVFALKQAYELYRFIHDQIKECDQQIRAELARLPNRAGDKPFQPQRRGRGYKSNDVRIDATEPLFKALGVDLTLIDGIDVSTALVILSEIGVDVSRFPTEKHFASWLRLCPHFEQSNQTRKKGAKRKGKNRVAQALRMAAQSVSRMQIPMAMFYHRIKGRLGGKAAITATAHKLALLVYRLIKYGLEYVRQSMEEYSAKMHDQAERSLRRKAALLGYDLVPKEAAAAPTN

SEQ ID NO: 446467 - protein, 349 aa, unidentified
MKLMAGMDLHSNNVVCGIVDMEGRRVFHKKLPCQMELIVQALEPYREDLEKIAVESTFNWYWLVDGLRERGFPVVLANPAGIEQYSGLKHSDDSSDCFFLAELARLKILPTGYVCPPKLRPIRDLLRRRGLLVRQRTALILSLKSLHARTIGQSLELKTVKAASPAAARQWFKHPADQLAGQVELEVIEQLKEGIESIEQGILAVRDLLACYAVLQSLPGVGIILGQTISLETGEVERFASAGDYASYCRCVDTRRVSNGKNKGQNNGKCGNKYLAWAFVEAANFARRYDEQCRRFYDRKAAQTNGIVATKALACKLAKAAWHIMKENKPFDAERVFGRSSRPDAVKSH

SEQ ID NO: 446468 - protein, 312 aa, unidentified
MYYIGIDVSKKDLSVFDGKKDLKFINKEGLKSFKKYLKKKVNFSDLVIIFEPTGIYSLYLKEFCAENSIKAYIVNPKKSHNFTRALGRRSKTDKIDARILYQFHKLIEAKDIKVPQIDQQAKALASYLTSYEFALKQRVSLSNHLESLRDKSLIALLKKDLKRAKKLEDKIFNDILEYVGKNQNLKEDYQRLLTISGVGDKTAIALLTLFKTYQGTNRAQITALAGLDPVRRESGTSIKGKVKISKNGKGIYRKIFYLPTICATVHNQKIRVFYQRLLAHHKIKKLAIIASMRKMLLIAHAMYRDKTEYVSA

SEQ ID NO: 446469 - protein, 422 aa, unidentified
MLQETQDREQIIARVAALDIGKAEVVCCVRVPHESRPGRRLQEVDTYSTMTRSLLGMADRLHSLGVTRVVMEATSDYWKPVFWVLEAAGFETWLVNARDVKHLPGRPKTDKLDAVWLCKVAERQMIRPSFVPPPQIRRLRDVTRYRADLVGARTAEKNRAEKLLEDAQIKLSVVASDIFGVSGRAMMAALIAGERSPAALAQLARTRLRTRIPALQEAFTGHFTDHHAFLLGKMLARVDGINTDIAELDARIEEMIAPFAQAAAQLDEIPGIGPVAAAIIIAEIGTDMTRFPTAGHLASWAKFAPGVKESAGKKKGSGSTGHGNRYLARILGEAVVGAARTDTFLGERYRRIARRRGAKKAIVATGRSILVIIWHLLSDPDARYTDLGSDFYNQRINPERRKRAHIHQLEALGYKVTLEPAA

SEQ ID NO: 446470 - protein, 356 aa, unidentified
MKKYIGCDMHKKFSVFVTMDERGRVEAPVKVANDSLELQEYLRSLATGTPVAVEASGGWYWFVDALEEAGLDVRLVHPLEAKKRMPGRNKTDTIDATGLAMLLRNGTLPEVWIPPATLRDLRGLLRTRLALRQHTTTLKNRIHGALRRYGQHETGEPRNLFAGKGRVQLSVYVGALPPETRLATRHEWELVDQVEAHIRELEMRIRLGLGQLGYVRLLKTLPGVGEILAATIYLEIGEVGRFGHARQLASYAGLTPTVYASGDKKRLGPTSPMANHYLKWAFVEAANCVVMQKQRYGQRHVVQLYERLRASKNHGKAAVAVARHLAEASWWVLTKKQVYREPAPASMSSSENGPAR

SEQ ID NO: 446471 - protein, 352 aa, unidentified
MTEITTIGLDLAKTVFQVHGADQDGRPVMRKKLRRGQVLGFFAGLPPCLIGLEACASAHYWARELQGLGHAVRLIPPQYVKPFVKRNKNDASDAEAICEALTRPTMRYVPLKSAEQQSVLMLHRARELLVRQKPKLINALRGHCGEFGIVVAQGASRVAELIVMIEYRQDERLAALAREALGSLVGQLRMVQAQIVGLEKKLMTWHRANEASRRLATIPGVGPGCRHYHSPLLRPWALVATIGDASQFHSGRQLAAWLGLVPRQYSSGGKDRLGRISKRGDGYLRKLLVHGARTVLLWSRRKKETRTAWLEALLARRPTNVVVVAMANKTARVVWALLSRGETFRVKTRAAA

SEQ ID NO: 446472 - protein, 346 aa, unidentified
MLADELDYVIGVDPHRDTHALAVVDVRSGGVVFEATAVADGEGYASVLRLADQHAPGRRAFAVEGTGSFGAGLARFLVSQEERVLEVGRLRRERLSGKSDALDAIRAARSVLGQTRPARPRAGGEREALRALSAAREGAVTARRAGLCQLRGLLVSAPEPLRAELRSLTRAQLLRRLAAVRPEGRQDPELRGTLLALRALARRVKALTVEERELAREIETLTRKLAPQLLEQPGVGPLAAAQLLISWSHRGRITSEAAFARLAGCAPIPASSGQTVRYRLDRGGDRRLNRALHMILVTRRRAHAPTIAYIDRRIQEGKSRREATRCLKRYLARNLYRLLENPPMPT

SEQ ID NO: 446473 - protein, 476 aa, unidentified
MGNTTKKRPDLKAIPMLKHESLYVGIDIGKTKHVAGFVSATLLERHERFEGCPAFSFEQSREGFQSLIDRICLYCPLEQVSVLLEHTGHYHRPLEQYLLEQDITVYRIHVQKRQVGTIKTDKRDALSLANQLYNQLALGVQVVDKSQLVHRDVPPTETAAQLKSLTRHRYELSQECTQRRNKLTSLCDEIFPEYTTIFKDPNREVALALREKFPTPQAVATASMAALCEVRKRNHPSAAQLAQLQNLARQSIGTKDLARLRGLIIEQEQLINELRLLQGHLQRLDDEIENIVTYSREGQILISMGIGPVSSASIIATIGSIANFERPGDLRSYFGWAPLEDQTGISYDRASLTPRGNRMIKQIMYLVVWSVIKKKESEWSKIYERLVPRLCSYDERTRAYKGKGKVIGRIAGQMIGMMYALLKKDLETLKGLAPGEKPPDPMLYDPEVHRLHQAGYYRSLKPGTRPRSLIHQVPKP

SEQ ID NO: 446474 - protein, 313 aa, unidentified
MTFSSDYVGVDVSKQHLDLAMAGARVFRVPNNPAGMSRLVARLAGLQRPHLVCEATGSYTRLMAREMARQGIAFSAINPRRVRDLARADGQLAKTDAIDAAVILRFACLMQPEPSPAPDPHTLEMADLVRRRRQMVDMLASEKQRREHPETARVRTSIDAHIDFLSTQIAEMDQAIATQIRSDGALQHRVELLTTIPGIGQTTAAVLVAEMPELGTIGNKQAAALAGVAPFNRDSGETRGQAHIAGGRLSVRCALYMATLSAIRANPPIKAFYQRLREQGKPAKLAIVAAMRKLIITANAVLASNTPWKTNMD

SEQ ID NO: 446475 - protein, 358 aa, unidentified
MEQITRGECGRVVVRVGVDLAKRVIQVHAVDAAGRLVIGRALARDRFIAWCAQLPGGCVVAMEASSSAHHWARQLCSLGLDARIIAAHLVKPYRKQGSSGKNDANDAAAICEAASRPSMHFVPIKSVEQQSMLCVHRLREGIKEERTACINRIRGLLAEFGLVFAQSPKVLRLALADTIEDASNEMGPLARLTLQRAHAQWRELDEHLAWCDERIAEHARTNEQVKTATALQGVGPVTASAVVATVGDFRQFRNGAQFGAWIGLTPKQHSSGGKARLGRITKRGDTYLRTLLIQAAKSAVLTAHRRSDRISSWLCMLRERSGWQIAAVALANKNARILWALMTKGAAFNANHLSVKPA

SEQ ID NO: 446476 - protein, 400 aa, unidentified
MLSIGIDVSKGKSTVCGMKPGGEIVYTPFEIQHTREGMSELVSLLHNSGEEVRAVLESTGSYHCPVVAALLENGIFVSVVNSLRMKRFCSQSIRKVKTDRIDAMQIALYGLAYWQELQPTRLPEDTYRELQLLARQYYQMTSILIKAKVDFNALCDQVLPGMQELMNDHAGRHKLSDFVLRYRHTTHILEMGETRFRKDYCKWAEKKGYRNCERMAALIFATAQNGIPVLPNAPSTQIVITEAIRVLHTVEASRDAILTQMQALAKTLPEYSLVREMPCIGDTLAPRLIAEIGDVRRFHSKRALIAYAGIDAPPYQSGKFCANNRHISKRGNRYLRKTGYEVMQSYVMHKPANDPIFTFIEKKRGEGKSGKLAMVAGLNKFLRIYYGKVTELYRSLPAIE

SEQ ID NO: 446477 - protein, 412 aa, unidentified
MRIVHTTCAGIDVHKRDITVCLITRKTATQRTQEVRTYGTVTKDLLAMRDWLEDHNCQVVAIESTGVYWKPVFNLLEDSFQVLLVNPAHLKHVPGRKTDVKDSEWIAELLEHGLLRGSFIPPREIRDMRDLTRYRRRLVQTRASEVNRLRKVLEDANIKLASVATDVMGVSGRAMLNSLLAGERDPDELAGLSKGRLRRKMPELALALEGRFRPHHARLLARMLAHIDFLDESIAECEAEIDEMCRPFDREIDLVDTVTGVGKRAAQDAIAEIGVDMSRFPSHKHLCSWARICPGNNESAGKRKSGRTGKGNKWLKSILVECAHAAGRSKGTYLSAQYARLARRKGKKRAAVAVGHSILEALYFILRDKVPYQDLGPDHFDQINRAHTIRYHVRRLEGLGLQVQLEEPAAAA

SEQ ID NO: 446478 - protein, 459 aa, unidentified
MNPKRSKSRHDRKMPMVHPNAAAIDIGATMHMAAVRADRAQEPVRSFGTFTADLHRLVDWFTECGVETVVMESTSVYWIPIFELLDARGFTVCLVNARDAKHVPGRKTDVSDAQWLQRLHSYGLLRASFRPKGQIAQLRSYVRQRERLLEYAASHIQHMQKALTEMNLQLHHVVADITGATGLRIIRAILTGERDPEALAALRHYSCHSSAETIAKALTGSYRAEHLFALDQALALYNAYREKASACDVRIEAVLKELSIHRGRDHGAVPPPRRRHRTDQANALAFDVRAALFALLGKDITAIDGLGAYLSLKLIAECGDDLSSWPSAKHFTSWLGLAPSNKVSGGRMLSSRTRRSGGRAAALLRLAAVAVGRTDTALGAFYRRLSSRIGKAKAVTATARKVAVLFYNAVRHGMEYVDPGASSYETRYRTRVVNNLQRRAKAFGFVLQPMEPNAGVAVS

SEQ ID NO: 446479 - protein, 366 aa, unidentified
MEKATSVEVAAGVCEVVVGVDTHLDLHVAVALDELGRRLGELAVPTTTRGYQRVLLWANGFGPLGRVGIEGTSSYGAGLARHLKAAGISVLEVERPKRRHRRANGKSDPIDAEAAARAVLAGEAVGEPKSGDGRVEMIRALRSARRSAVKARSQAANQLQALLVTAPEELRERLRGLKAKELAAVAARFRLGSDLTDVQAATKFALRSVARRYEALSQEIAELDRQLGWLVAEVAPALISRPAIGTNHAATFLVLAGDNPERLQGEASFAKLCGVSPLEASSGKVVRHRLNRGGNREANCALHMICVVRMGADKRTREYVRRRTAEGKSKWEIMRCLKRYIAREVYHVLVPPDAPSLIGAAPQAPS

SEQ ID NO: 446480 - protein, 376 aa, unidentified
MTPLKFAVGIDVDKKTFKACYCLLNEALEITTERQKAFKNDLQGYHELIQWTGVHHREDTPIYFVMEATGVYHEHLAWYLFSKHQKVSIILPSKSKRYLQSLGLKSKNDKLDAKGLAYMGLQQHLPLWMPVSCKIYQLKKLTRYREDLQKQKTTLNNQLEALEHGMYTVKAVTRSIKALIKVIDKQLMKVYGEIEQLINEDSVMKEKIKHLTSIKGVGFLTAVTIVAETNGFALFKNQRQLASYCGYDVTENSSGNRVGKTRISKKGNPHIRRMLHMPSLNVVRFNVPVFRSLYDRVYSKRKIKMVAYTAVQRKLLLLMYTLWKKNEGFNEGILGNSSGDSLSEALKRQDSRKTILHKMNHISLKQPYDPLSEISI

SEQ ID NO: 446481 - protein, 410 aa, unidentified
MKLLYQRCCGLDVHKDTVVACLRIVSDGKVTTEVRTFKTTTAGLLQLSAWLAANNCTHVAMEATGVYWKPVWHILDDGEFELVLANAAHVKNVPGRKTDVNDAMWLAELLAHGLIRSSFVPDTQTQEMRSLLRTRKQLIREQSSHTLRVQKTLEDANIKLDSVLSDLMGRSGRAMIEALIAGETNPAKLASLANRGVKASHEELREALRGRVTNNHRFLLRLHLNQIDALDAAVATVDAQVEGILGPFRTAVELVMSVPGIKNLSAQVIISEIGTDMSRFPSDQHLISWAGMCPRNDESAGKRRSNRLRNGAPWLKTTLVQCAWAAKNKKDSYLQAQFYRIKARRGPKKAIMAVAASILTAIYHMLKDGTMYQDLGRKHFDRRSNDQQKRSLVKRLADLCYMVELKPLAT

SEQ ID NO: 446482 - protein, 351 aa, unidentified
MSIVANSYAHVIGIDTHASTHTYAILDAPTGALRHTRTFPTTPAGLKRAAAWIVRCTGPTRTTLAVIEGIGSYGAGIARVCRDTGLTVVEPLPIAKALRGGRGKSDPIDAELIAGSVRPADAHHLREPRDDQGVRAAIRILVTSRDALNRSRTAAINQLTALVRTVDVGIDARHPLTSVQIHTIAAWRERADDIAIMTARREARRLARHIRAIEHDLKSNEADLATLVAASDAAPLMDEAGIGPVIAATILTSWSHAGRIRNEAAFAALAGVSPIPASSGNTTRHRLNRGGDRRLNSVFHAVILTRMRVDPATRDYVERRRAENKTTKDIRRTLKRYLARHIYRLLTNPTA

SEQ ID NO: 446483 - protein, 345 aa, unidentified
MKITTIGIDLAKAVFQVHGVDGRGKVLVRKQLKRKDVVGFFANLEPCLIGMEACGSAHYWGRTLSGLGHTVRLMAAQFVKPYVKTNKNDRNDAEAICEAVGRPNLRFVPIKSAEMQAVLALHRARQGFVKGRTAQANQIRGLLGEFGIVIAKGIGHIGERLPEVLEDGENALPGMMRQLLARLGENLKEMDKQVGALERQIKLWHRDNEQSRKLEAIAGIGPITATAFVATVGDVKSFKNARQVPAWLGMVPRHEGTGGKATLGRISKRGDVYLRTMLIHGARTVVAQLERKRDATDEWLRKLVARRNKNIAAVALAAKNARIAWAVLAHERSYERDYVANRAGA

SEQ ID NO: 446484 - protein, 350 aa, unidentified
MLIIGCDYHPALQQIAFVDTDTGELQERRLQHREEAEKFYRDLAAQGMKLRVGMEASGHARWFERLLAELNFELWIGDAAEIRTKRVRKQKTDRQDAQLILQLMLEDRFPEIWVPSWENRDLRQLLWHRHRLVQARTRMMNQLQAVALNEGLRCKKKLFREAGREQLEGFRLAPWASRRRHDLLELLDRLTPTIAELTQAIEQEVEKCPAARRLRTHPGVGPLTALAFVLIIGRADRFQCGKQIASYLGLVPLEKSSGNQRRLGHITKQGSSLLRFLLVEAAQVTARSLPEWRSKYYHLTMRRGRKIAKVAMARKLAVRLYWMMRKEWDYGQLTRFGSYAGKPGNRDGVK

SEQ ID NO: 446485 - protein, 426 aa, unidentified
MNERGGSRQHKKRCWAGLDWGGSGHAVSVVDDRRRVLASFAVGASLEDLESLSRRLRACGEVAGVAVEATRHPVVGHLLSAGFPVYAVNPKQSKNWRGCASVSASKSDARDGLVLAVELAGRHESLRPLRREDPAVAELAGLCEKVRDLVDERTALVQRLKATLGQYYPGALCFFSDWTSPVAWRFVKRFPRPKTLAQARKQTLCAFLKSNRVGLRPVWLERIEARGDAARWPLPADSEALEAVALATVAQLLALQPHIDKMDRLIAEQSKKVPQTTLMKSLPGAGKRLAPALAAMAALTTTGKKQNLEALRCVSGVAPVEDKSGKRQRVRARRRCNRHWRDVLYLFAHCSINCCDWARAFYDMHREQGDNHAGALRKLADKWLKIIHHMVEANEPYSDVRHVQSLRKHASWFPPEPGGKPGGKLH

SEQ ID NO: 446486 - protein, 389 aa, unidentified
MKRLFCGIDVAKHEHVVSIYDPSTGEYILDSLHFENNEKGYKSLLSGLLKLKRKNDLVIGFESTGHYHMALFSFLSGKKYRCFLINPYMTSRFRSVSLRDAKNDNIDSRAIAQFMSFEYERLSEEEFVNNELKELSLQRSFLMIDSSKMKIKLKSYLDRVFPELESIADINTAALRAILREYPCASDIARTRIDKLKNMAYKAYKGKYPSAKIERIKEAAAVSVGYYSKAIGLNISQCIETLELKERQIEKIESSIVNHPLVIKSPLKQLKGINDIEIGYIMSAIISISRFTSAKKLVAYAGLDPKIRQSGTWQAPRTRMSKRGSRLLRYALIWTAYNMSRHEGPIKRYYELKRSQGKSHYNALGHCAAKLCRYIFWILSNPDKQFIYQ

SEQ ID NO: 446487 - protein, 326 aa, unidentified
MTTIGIDVSKCKLDCAWFRDVETGKLKNQVFMNSLKGYQQLIDWACKQSHVPLESILFVMEATGIYHEAVAYALYQVGAKVSVVNPAQVRNYAKSLGTRTKTDKKDSVVLTRFGLTQAPRLWHPEPEAIRTLKALISRLNAIEKDIQRENNRLEKATIALAGDEIITSIHTVLEHLEKERKRLEDLIDQHIDSNPKLKKDRALLESIPGVGPVVSRMMLALIHSRDFKSASQCAAFIGLVPTHYQSGTSVRGRAHLSKAGNAAIRAKLYMAAIVAKQHNPDIKKQYQRLLKNGKVKMSALGAAMRKLVHICFGVIKHQQPYQAQGV

SEQ ID NO: 446488 - protein, 327 aa, unidentified
MYLCILNQTGEVLLHRNLRATPEAFLQAITPHREELVVAVECMFTWYWLADLCAAEGIRFVLGHALYMKAIHGGKAKNDRIDAHKIAVLLRGGMLPEAYVYPAAMRATRDLLRRRLHFTRKRAELLTHIANTNSQYNLPVFGKKLTYRSNRTGVVDRFAEASVQQSIAVDLALIAQYDALLRELENFILRTATGHDANTLYRLRTVPGIGKILSLVILYEIHDITRFARPQELASYARLVTCAKESAGKIRGNGGTKIGNAHLKWAFSEAAVGFLRKNPEGQAYYERLVQKHGKGKALTVLAHKLARAVYHMWKHDQVFDQEKFLSN

SEQ ID NO: 446489 - protein, 391 aa, unidentified
MIYIGIDVAKDKHDCFITNSDSEVLFKAFTIFNNLDGFNDLYQKIESVMDDVTKVKVGLEATGHYSYNLLGYLIDKGLPTYVINPLHTNLYRKSLSLRQTKTDKVDARTIASMLMSDVNLKSYSDTSYHNKELKSLTRYRFDKVKERAKLKTSVSRLVCILFPELEKLVPTLHMASVYALLSEFPSAKHVATAHLTRLTNLLSKSSKGRYGKDTAITFRDSARASIGSNMPAKSLELKHTIKLIQELDSEIDEIENEIKIIMDEINSPILSIPGINYRMGAMIIAEIGDFNRFDSPDKILAYAGFSPSTYQSGQLDGAYAHMEKRGSRYLRYALYNATKYVCHWDPTFAAYLAKKRAEGKHYNVAISHAVKKLVRVIYHLEKTKQQYIKAA

SEQ ID NO: 446490 - protein, 427 aa, unidentified
MVSLSGIVCSRWWAAGTYPAHPGSLIRRLSTQQGVTHHSVAPTVTSPRTGTGRTAETLVREKKRAPSRMTILPQSIAKTYSYIIGVDTHAKKHVYAIITNSGEHLETRDFPTTSASIKRAIAWVDRRTGGDANTLWVIEGTASYGAILTGAVSDAGYTVAEAPGGYAKAGRGVGKTDPLDAQRMAAAALPVDCEKLRIPRQNDGARAALRVLVTARDMLAVERTKYVNALTALLRVTLLGIDARKPLSNAQILEVAGWRTRDETIELRVARAEAVRLARRIGELDTDIKENSSEMSELVKLSEGKELLNVTGIGPVVAAVCVAAWSHPGRVRSEAAFASLAGVNPIPASSGNTVRHRLNRRGDRKLNKALHTAALVRMTHDEETRAYVEKRTAEGKTIKEIRRCIKRFLARRIFKILESAEMLPSKA

SEQ ID NO: 446491 - protein, 377 aa, unidentified
MRNVRFVGLDVHAETIAVAVAEVGGEVRSLGVIPNRAESVGRLIRKLGKPEQLRVCYEAGPTGYVLYWQLSELGVKCEVVAPTLVPVKAGDRVKTDRRDAEKLARNYRAGDLTAVWVPDAAHEALRDLVRARLAAKRDQLRARHRLGKFLLRHGRRAPEGTRAWTDKYLQWVKAQVHFAHRAQEVTLSDYLHEVEHSAERIRRLERSIDEAIETLPVKMRAVIEALESLRGIAQLSAVSIMAEVGELSRFEHPRQLMGYSGAVSREHSSGPHIRRGAISKAGNAHLRRIVVEAAWAYRHRPAVGKTLAARQRHSSAAVTALAWKAQQRLHQRYARLMARGKSKQQTVTAVGRELLGFIWAIGVHVEQEVKVPLRQAA

SEQ ID NO: 446492 - protein, 419 aa, unidentified
MSNSNISRRLAQVKSGTLHAGVDLALESNVIIVLDEKARQCDRFRFPQDIDGYKYMHERLKKVCQKQGASQVVIAMEPTNYFWKLLANWLEQNQVVYHLVNAYTVNKHREGDQIDRSKDDPRDAFVIGDLSRTGKYTETQLPRGYYAELREYATLYYQTMKNVHRAKSILWGLLGQVFPELSRAFKSFSGATITALLKTCPAAVSIRALSEEDFIAKVTTAFSGKRLCRSKLRQAYRLARTSIGLVDGIQANALAIQIHLSHLETLQKEIVQIITALKSCLQQVEAAQYLLSVKGLNTLSVALILAEIGDPDRYRSASQLVKMAGIQPVPNSSGRKQRSSTPMSHQGRPGLRSTLYFACLRLTQVDRRFQEVYHYLQNRTKNPLTKMQALGVLMNKLLHILWALMHQKIFYNPNFFSAV

SEQ ID NO: 446493 - protein, 379 aa, unidentified
MVSDSARTVYMALDLSNGRWDLAVWTGGNANPSLWQLKGESYDHASKLEGLEQRLRALADQYGPELTIHCCYEASWLGVWLDRWLHARGVNNLVISPSSVEVAPTKKRKKTDRIDACKLVRKLKQYLDGDRRAFRPVRVPRLQEQAVRQRQRERQQLKTMVQQHRSRLESKLSYYGIGVKSKPVTAADWKRLIAKLPVMKTYAGEAIAPTVIEAMARAAERLAQVERQRAKVEGQIAAYHRGLPADSAAKKLERLRGVGVTTSQQLCAEIMDWGRFRNRKQPGSFAGLCPTPWSSGPMCREQGIGKDGNGRIRATMVETAWLWVRWQPSSELTLKWACELAKKGRRRRMAIVALARQLLVSLWRYITQDVPIPGAVLSG

SEQ ID NO: 446494 - protein, 332 aa, unidentified
MDNFYFIGVDVSKKKLDFCVLFEGKVLREEQVSNHQQAVARLIGELKNDLEMDNEQFLICAEHTGQYTFPLVCACKSVECKLWLENPSQIKYSSGMQRGKNDKVDAKRIAIYASRFGDKVKYYDRPTEEIERLKQLERERALYVTDLAKYKGQMYDQKDFMPAALYRKKTKRMKGLIQELQAAIDAITAEMEKIIGSTEVLARQMELLMSIDGVGKVVALNVIIETEAFSRFDNPRKFCCHAGVAPFSYTSGSSQHSKNKVSHRANKNIKKLLHMAAGSVTHRKEGELKAYYMRKVEEGKNKMSVINALRAKIVARMFAVIKRNEVYTPIYS

SEQ ID NO: 446495 - protein, 348 aa, unidentified
MRFYTKQHKYSCGIDLHARSMYVCILDEEGKTVLHKNRKATPEALLRAIAPYREDIVVAAECMFVWYWLADLCAKEKIPFVLGHALYMKAIHGGKSKNDRIDSHKIAALLRGGTLPKAYVYPRKMRSTRDLLRRRNYLVRKRSELLTHLQNTNSQYNLPEFEKKIALKANRDGVAEHFSDPSVRKSIEVDLEVLDFYDRLLSDLERYIEKSAKGHDVHSWYLLRSIPGVGRILGLILLYEIHDIRRFPRVQDFVSYCRLVKCPRESGGKKFGAKNTKVGNHHLKWAFSEAACFFIRVNEQAQHYHSRLVSKHGKGKALSIFAHKIGRAVYFMLKRKEPFSMEKFFAHA

SEQ ID NO: 446496 - protein, 401 aa, unidentified
MGYASIAKTVAQSHMRKGPVMKKATRFVGLDVHAETIAIAVAEAGRTGDVTSMGTIPNRPEAVTKLIKRLGGAKGLLVCYEAGPTGYVLYWQLIKLGVDCEVVAPTLVPEKAGDRVKTDRRDAIKLARCLRAGELTKVWVPDPAHEALRDLVRAREAAKKDQLRARNRLSKFLLRAGCRPPDGTAPWGIDHREWMRKLTFEHTARQATMADYLGELDHVIERVRRLEQAIDDAIAQAPPLLQEIIAGLQALRGIAKLTATTLAVEVGSFSRFEHPTQLMGYAGITPSEYSTGKSKRKGAITKAGNPHLRRVLVEAAWSYRHRPAKGLRMQARTRDLPAAINEIGWKAQHRLYRRYAALQAKGKPFGTVVTAVGRELLAFIWAIATHVETEHVKRAPDRRAA

SEQ ID NO: 446497 - protein, 349 aa, unidentified
MLHVGLDLSRRRVDVCLISSDGELIDHFPVPADRDGLYGLARRVTVYDQRVRGVIESMNGARFVHDELVAQGWEVLVADAQRVKGLAPLACKTDKIDARVLATLSFHDLVPAIWLPTPELRKERERSRWRLHLVKHRSTLKNRVHSTLIAFGYQVPMADLFGHAGRLLLRELDIPQPWRGHVDASIGLIDELELRISGIEHELQRSGADHRYVPILMTAPGFGWITSFTVACELGDITRFSTPGKFVGYTDLCPRVSQSGDVNLRGPVSKRGPRFLRWGLMEAAIHAAPHPRYRERYQRLRRRHGRQRGAKVAQIDLSRQLATAIWYMLTRNQPFKPFAPAGATFRLAA

SEQ ID NO: 446498 - protein, 415 aa, unidentified
MEIRYARVAAIDVGKKEIAVAVRTPGDRPGVRTQQIRKYKTFYPVLRQMVAWLVEQGVTHVAMEATGVYWKPVFHALGEVDSLEVLLVNARHVKNLPGRKTDAKDAEWLAQLLECGLLRGSFIPPKDIAAIRELTRYRKKCIQARTRELQRLSKVLEDGGIKIDSVASSITTLSARDMVEALIAGERDPKVLAEFARGVMRKKIPDLTMACAGRFGDHHALLARMHLDHIDQLTTMIDGLNTRIEEVVDPFSDQLRLLKTIPGIADCAAQVIISEIGVDMSRFPTSAHLASWAGLCPGNNESAGKRKSGRTGKGNAEIRDILTECAWSASHTGTYVGAQFRRMHRRFGKKGGGKAAIAIAHTLIVITWHVLHDQVEYRDLGSDYFTRHDNPDAKKQRLIRELQALGHKVTVEPAA

SEQ ID NO: 446499 - protein, 351 aa, unidentified
MKNVAYLAMDVHAAHCVLGHMSSDGTFLGNKTFTTAEGNIIDALKAIQAKEKYLALEESNLAYWVAQVATPYVTEVISSDPKENALIYKSPNKTDKVDTHKLCRLLRLGELKRVYQPETDDRAIFKTAIQHYIDLRDQQTRLKNKIKASYRHWGVVDVRGQAVYGATHRETFLNKVKHLHIREQLQRLYTLMDQAESLQDQALKAVKQLGRKYPEIKKFKEIPGIGDVIAHTFDAFIQTPERFTNKRPLWRYCRLGITDRNSDGKPLGYKRLDKSGVSELKSLSYRAWLCAMKGDNEVKRFYSNSLRRTLNRVHARLNTQRKIIAVMYGMWKRGEPYNPKLFLDPSESGVV

SEQ ID NO: 446500 - protein, 425 aa, unidentified
MSLVQPTQPPSVLVAIDIAKLRHDVLIEAPGWKNRKRMILPNTAAEFRLFADFLHGLKHPVRIVFEATGNYHRPLAHFLQAEGFHLELIASLAVARTREAMHNSWDKNDPKDAQVLLHLLKTGVTQHYHDPLVNQIHDFQELSLTHAQISLEKTRTQHRLLTHYLPLYFPEIERYYHATRSEWLLAFLQVFPTPALIARLSMEDFVQQAWTVVGRKVSKQRLLEDIYRTAQSSIGIPVAENSEAVAMFRVVLGEMIRLCQLRDQLEERAACHMKENADFRRLQQMPGIGPILALTILAEAGDLRRFNHHRQFLKFCGLDLSTQQSGQFRGATKLSKYGNARLRCAFWMAATVAVRLRENSFRDKFERYLRRDPASADRKRMAYVAVAAKMARVAHGIIKTGTDFRCFYEAAAPSGRAASPGPSRP

SEQ ID NO: 446501 - protein, 423 aa, unidentified
MKNSQIRTNNPAGSLFVGIDVAKEFHCARGLNGFEVDFTKPLFFKNRREGFKNLKKQIRRWLKFYGCERVVIGMEPTADYWRPLYAWLIENGLEVKLVSSLKVKRSKDLMDNSPLKSDKKDALVIAELTKANMVLSFGPKQKEIEEVRKCVGHVEDLEDMACREKNHIEHYLSVHFPELCHILELRSVTMRKFLMTFATPAEVVKAGPEKVRSLLKEVSCSRINAAKADAIYAAAKDSVGLPCSSAERLALSFHLEILEKISEDLRKFHKLLEDLLEPMGEYHILRSIDGVGLMCSAAIIAHLGDLRLYGNYRQVIKKSGLNLFSLSSGGYKGRDHISRRGSGFLRRNLYMASLRHTRPGSAFYEKYRRMRDRGKGFRSSMVAIMRRILKVAFALVRDDRFFNKEYDPGAERNEIVIRRARVG

SEQ ID NO: 446502 - protein, 428 aa, unidentified
MNCNTQNAKIASITEKTLIVGIDVGSETHFARAFDWRNYEYTKKPLEFSNTEAGFMMFKAWVEDIAEKQGKTAVIPGMEPTGHYWFALGKFLQDSGMKPVHVNPHHVKKSKELDDNNPNKNDRKDPKTIAALVNEGRFSYPYIPTGIYAEIRSLSNLRFQTQEELTRIKNRIARWFAIYFPEYKDVYGDLMAVSGRMILKEAPLPEDIRILGVNGVNQIWRNAKLRGTGMKRAKILVSAAEHSVGSKEAPEAARIELKNLLNDMDVYVSRMEELLQTIEEKLKTIPYVDKLMEIKGIGLITVSGFIAEVGDIGRFDNPKQLQKLAGYAIVANDSGKHNGESRISYRGRKQLRYVLYEAAISLVGKNAEFKEIHEYYRTRKENPLKKMQSVVAVACKIIRVFYTILTKGVDYDPMKLMSDIRRPQLQAA

SEQ ID NO: 446503 - protein, 355 aa, unidentified
MSQEKYIGMDVHQATISVAVTDSRGKLIMESILETKAATILEFLQGLHGSLSVTFEEGTSAAWLHDLLKPHVTHLVVCDPRKNALLKDGSKSDRIDARKLAELLRGNQLTSVYHGEHGMRTLKELGRSYVTITQDIVRVMSRIKALYRSWAIPCSGTSVYAPRHRAEWLGKIPEPGVRLRAERFYQQLDLLLPVRQQARRDLLSESRKHHAVKLLRQIPSIGPIRAALLVAQLQTPHRFRTKRQLWAYSGFALETHDSGEYRYVRGKLQRNRERMTVRGLNNNHNPEVKNLFKGAAISASTHPGPLYDFYVALLENGMRPTMARLTLARKIASITLTIWKKGADFDATQLHRQEA

SEQ ID NO: 446504 - protein, 338 aa, unidentified
MALYCGIDLHSRDSWLAILDEGLKVVQEAKVGNDLKALLQVLEPYREDLEGVAVESTFNWYWLVDGLMDAGHCVHLTNTWAVKQYEGLKYTDDRHDARWLAHLLALDILPEGYIYPKEERSARDLLRRRAFLVRKRTSFILAMRGAFECRTGLRINSNDLKKWKAKDVEAHVGDPAAAFSITCLLEPMHALSAQIKKIEKGALARGRLRPEFAPLETVWGIGKILALTIMYEVGDVARFRKVGNFASYCRLVNTARLSAGKRKGSGNPRNGNPHLSWAFSEAAHHAVRHYPEAQKFYQRKRTKTNGIIAIRALAHKLARASYHVMRDHVDFDPEKTFA

SEQ ID NO: 446505 - protein, 332 aa, unidentified
MGIDVSKPYFDASLMAVINHEKQTVETARFDNTNAGIKVFEKWLKTHKVLMDENSLLVIENTGIYHRLLWSFCSRKMLPIHIGNAAHIKWSFGIARGKNDKIDSIRLCQYAFKESDTLKATPALNPVLMQLKDLMTARSRLLSQINSIKTYIKELKNVSDKAVQKLLEQAHETAIDGIAKSIKNIEAQINKIIAENEALKNNYDLLVTVPGIGHLIAIYLICCTNNFAGKISGKQLACYAGVVPFEHSSGISIKGRNRVPTMANKDLKKMLHLSALSAIQYYPEFKTYYNRKKEEGKHSMSVLNAIRNKIVLRAVAVVNNQKPYVNNNKIAA

SEQ ID NO: 446506 - protein, 387 aa, unidentified
MPELNGLSRSLVALEQDGTLIAVIDMSQSSWLVAGIVPGVERHPLKKLPADEAALLQLLQRWRDEAVKAGRTVQRVVVAFEAGRDGFWLARWLRAHDVEAHVIHPTSIAVSREHRLAKTDRLDTEMLKRAVLGWLRGERGHCSMAAVPTLEEEDAKRPTREHESLVGERTRVVNRIKASLARLGIRGFKPMLRHAAERLNALRTPEGAVLPPNTLAELQRDLGRLRFVREQIKQIEDARVERLERASGEGSHAMVRLLARVVGVGIETADMLVHEVLARDMRDRKAVARYAGLTSAPDESGAKRREQGLAKAGNARVRRGMIQLAWRFLLHQKGSALAQWYRARTADARPGTRKTLIVALARKLLVGLWRLVTTGEAPDGVVLRPAS

SEQ ID NO: 446507 - protein, 334 aa, unidentified
MEKITTVGIDLAKAVFSLHAVDVAGRVVFKRTLRRDQLVGVVAGLPPCLIGMEACSGAHEWGRRFQEYGHTVRLMAPKFVAPYRKSGKNDGNDAEAICEAVTRPNMRFVPVKSIEQQALLTLHRVRQGFVVERTAIINRLRGLLAEFGVVLPLRSVTVRRQAAAAAENLPELARRAIGDLLEQLRVLDERIGGYDREIEVQAKLCEPAQRLMKIRGIGPTTALAIVATVGNAREFKNGRQFAAWIGLVPGQYSTGGKPRLGHISKRGDAYLRNLLVQGARSVLNSAGMHQDRMSRWIIELQPRRGYYRTLVAIANKNARIAWALLAKNETLRSA

SEQ ID NO: 446508 - protein, 321 aa, unidentified
MAYFRDAVGIDVSKENLDLYVLSGQQRRTVANTAAGYGDLVSWLKSLGVRMAVMEASGGYERDVAKALRQAGFDVRIVDPKRVRHFAKAAGRLAKNDRIDAEMIAEFGAVFAAAQRCEIPLDAKREHLAGLVAARQALVDHQTSLQNQISACPKGPARQALAAALKPIPASIKQLDRLIAEAIAAHPQFAALAARLDTVPGVGPVTIAALIAWLPELGRLDRRALAALVGVAPFDDDSGKRTGQRYIKGGRGKLRNIVYMAVMGAATKHNPVLKAYYDSLLNRGKLKKVALIACLRKLLTILNTMVAKQQDWNPASMAIAA

SEQ ID NO: 446509 - protein, 408 aa, unidentified
MEVVYERCAGLDVHQSSVVACARLVEGGRVHQELGSFETTMKGLKALRSWLRKRGCTHAALEATGVYWKPVWMVLEGSVELLLANPHEVRNVPGRKSDATDAAWLSDLMAHGLIRGSFVPAGPAQALRDLSRTRTQLAREVTRHTQRIQKTLEATGIKLTGLISDVLGATGRAILEALIAGESDPATLAQLKRKGIRATHEQLRDALCGRVQEHHRVLLRVHLNQVDAIRAAIARLEAEMESLLEPFRADVELVKTAPGIQATTARVVLAEAGLDIVRFSTAGQLLAWTGLCPGSDQSAGKRRSTRLRHGNPWLRTAMVQAAWAAIRKKDSYLRSLYFRLRARRGAKKAIIAVAASLLTAIYHMLTRRVPYSDLGPTYLDQRDRERTIHHLVRRLENLGLDVELRPAA

SEQ ID NO: 446510 - protein, 350 aa, unidentified
MKLHTIGIDLGKTVFHLVGLDQSGEVIVRKKFSRTQLLRFTAIVQVDLIGMEACAGSHFLGRALREQRHDVRLMPAQYVKPFVKTNKNDFIDAEAIAEAVSRPTMRFVPIKTDEQLDMQSLHRVRERWIMRRTAIVNQIRGLLLERGITVRVGRCHLDAALPNILEDGSTSLSGTLRFLLVELKQELEQLAGHIEQAEALIQRAAQQSEACRRLDAIPGIGPLTATALIAAIGNGGAFRKGREFAAWLGLVPREHSTGGKQKLLGISKRGNGYLRKLFVQGARAVLKYRDKQCSGLRHWLAELSSRSHYNVVGVALANKLARMAWAVLASGDAYRPPVLADMTGLQMAPA

SEQ ID NO: 446511 - protein, 359 aa, unidentified
MDKYIGFDIDSVKTAVCVIQKGKEEKFYTISSEIDSMIEFLKKQQRQDSQLHLTFEISGQAGYLYDTLIDYVDTITVSNPSKMTWIYRTAKKNDRIDARKQALLLSIGEIPKVHMPGKKIRQWRETILHRRNLVGRTVQIKNRIRALLKSQGLIKPLYSGSWWKAENKIWMRTLAQMKRVSSLQLWRMKLVNLLEQLELLERQVKTITNYLDAYLSKHPGSKLLMSIPGVGPRTAEAVLAYTDDIRRFKKVKQYCAYFGLTPKLDESGNSKRLGHISKQGPSVVRWLVGESAWRVIKQSPAMKSFYEKTLAGQSNRKKIAIVAVARKLMTIMRAMMLSGELYNEELVSKSSYAEFNKTA

SEQ ID NO: 446512 - protein, 376 aa, unidentified
MNQDSTLYVGLDVHKDSITVAYATGLDDVELFGKIGTTQTAVDRLCKRLQSKARHVHVVYEAGPCGYGLHRRLIEKGFDSMVCAPSLIPRKPGDRVKTDRRDAFKLVRSLRAGDLSAVHVPAVEDEAFRDLARAWSSARDDLKQARQRLKSFLLSHGVQYSGRANWGPAHRRWLSTLSFDSAWQQLAFNEHRRTIEDRLAQCDRLEAALHEAVPAWRFYPVVLALQAMRGIQFTSAVGLVSELGDLSRFEHPRQLMAWLGVTPSEHSSGSKRRQGSITKAGNSYARKLLVESAWSYQHPARVSKDIQSRQEGIPKPIVDRAWDAQLRLCGRYRRLVARGKSRQVAIIAVARELAAFIWDIGRMGMALAVPQSEQPA

SEQ ID NO: 446513 - protein, 415 aa, unidentified
MALPVLYARCAGLDVHKKTVVACILLTAPSGRVTQQVRTFSTTTAGLQALADWLASQGITHVAMESTGIYWRPVFNLLEGRFEVILVNAQHMKAIPGHKTDIKDSAWIAQLLSHGLLKASFIPPKPIRDLRDLLRSRKSLVQERTRAINRVQKVLETANIKLSSVATDVLGKSGRDMLEALLAGVGDAESLADLARGRLRAKLPALREALDGRVEDTHRVLLRHLLEQIDFVQGQLDRLSQEIEQQLAPYEDLLTRLMQIPGIGRMAAATILAEIGTEMHRFPSAKHLASWAGVAPGNKQSGGKRLRAATTKGNRHLRAVLAEVVWVISHTKDTYLSAQYHRLAHRIGKKRAIVAVSHSVLTIIYHLLRTGQDYHDLGPHFFETLDSTRQRDTAVRRLQALGYTVTLQEKEEVPA

SEQ ID NO: 446514 - protein, 360 aa, unidentified
MMKYMIKTQTPCLTAFKTIVSVNFETPIAIGIDVAKNSLMICYRYADNHILTKNIGNNDSDIKKLIKELKLLNFSGKIVSESTGRFHMLSAVMLSEKNFLMYVINPLMSKKYNSASIRKVKSDKRDAEILAEIAIKEEKLPDVFTADRKKLMIKKKISLVATMDKQIQAMQATVKEYQETAKTLKIKLTKAEKGILGVVKNLKEEKEKLEKEIENIFNEQSSVDAINIRRQEIFSSIPGVSNYAATLTTVFFLEDHCQNPKQWIAYSGLDISVKQSGQWVGKGKLTKRGNGYLKKRLFSAAWGTIMHDAKFKEYYNYLREKKHSYVESLLMIARKIIRIMFYLSKNNCMYNPNKIVFTTN

SEQ ID NO: 446515 - protein, 315 aa, unidentified
MTTSSGKFVGIDVAKEKLDIAVLGERKAGQVTNDEKGIASLVKGMQKLAPDLIVVEATGGYQRRVVLGLYEGGLPVAVVNPARVRQYARACGLLAKTDKLDAFNLAEFGKQVKPRRFEAKSEAGRYVTALLVRRRQVEEMRKAEKSRLRTVHADMRGSLERMIEVLEEEIKRLEKDLDRFMKEHADWQEQEDILCSAKGVGRVTAATLLAELPELGKLDRKKIAALVGLAPMNSDSGKKRGYRKTKGGRIEVRSVLYMSTLVATRYNPLIKAQYQELLKRGKVKKVALTACMRKFLTILNAMMRDKAPFRQTVLA

SEQ ID NO: 446516 - protein, 421 aa, unidentified
MTPPNEVVWAGIDTHTDTHTIALLDERGRPLGAETFTADPDGYDRLIGMPPGPGRVAAVGVEGTNSFGAALARRLTAAGYEVREVPRPRRSVRRRDGKSDPLDAVAAARSVMAGDGTSLPKSPDGWVEALRHLNARRSQLVSAMTAIPDSTNGLLAAAPEPIRERYRGLRSETRMNRLAECRPAGGLVERSVLAALKSAAKAWKALKRQAGLLEERMRLILEEHARPLLDMYCAGAVIAATLAIVAGDNPERIRSEAAFAKLCGVCPIPASSGRTNRHRLNKGGNRQGNMALHRIAIVRLRYHKPTRDYMAKKTREGKGKLEIIRCVKRFIAREAYRALISIRNGEVGRGTPAERGAKLRELRVSRNITQQQIGEALCVPSSRISEIERGARDLPELEQRAIQWIHSTTNPKQHTQTLDNV

SEQ ID NO: 446517 - protein, 426 aa, unidentified
MNRIRNEKIKQVNEDTLVIGIDIAKKNHYACAVDLRGRELARVWRVHQSKDGFIHFEKTVKDLMETHQKTNVLIGFEATGHYWMNLAAFLEISGLPFVLVNPMHVKQSKEMDDNLQTKNDAKDSRIIAKLLPNGYFSLPRKMTPVDHHIRQGSAVQERLRKDIAMVKNRIQRWLDLYFPEFNQVFKHYGQQALTVLKLTPLPGDIRGASVEELIKQQKEAGAKYAGKPKMVALIEKAHHSIGVTQSDQMARMEIQGLVSQLELLDLQLEEVTSHMIERAKDLDEFQFLVSIQGISENTISALLAETGSLRNYEHPRQIIKLAGLTLRDNSSGKHEGTKKISKRGRRRLRVLLYKAILPLIQPNNAIHDLYTSYHSREHNPLTKKEAMVVLCRKLLQVLHGLSKNQNRFDPHRMITDLSQGTQNKAA

SEQ ID NO: 446518 - protein, 316 aa, unidentified
MIKLKYSICCGLDVHKNVIVATIVTTNKDGISEYLQKSFSTINSDIQRFHNWLIENNCYHVCMESTGKYWIPIFNYLENDIDICLTHPKYVKAIKGKKTDKKDSKWIADLYKFDLVRCSFIPPKDFRQLRELARYRFKLVCMKSSEKNRIQNCMTISNVGIASVLSDPFGKTATEIMSYLLEHTADSMDEKAVRKLIKKGAKSKSDEIIEAIKGYTIETDKAKKLELARGHLEYLDDMIIQTEVELYVRIKPSYEFVEFVSTMPGMTELSSTIVLAETGVDMDIFDDAKHLCSWCGLSPANNESTGHKRQSLPLQE

SEQ ID NO: 446519 - protein, 339 aa, unidentified
MSKLFKNFVGIDISKTWFDAALIKADDSSVVIHERFSQKPEGFIQMQNWLQKLEVLPDEQTLFCMEYTGIYNTGLVHYLVKAKAALWVEMPLRIKKAGGFERGTDDKAASVKIALYALRYKDQVKLWQPIDSNIESIKNLIAQRDRIVNAIILLTVPVNELKDCGCAEITKTLEKLQKASVAALQKSKLSVEALIAKTIQQDEQLNTKVKRVASIKGIGQVTSVALMVYTKGFTAFENGKQLACYCGVVPFTKSSGTSVRYKSTVSPFANMKLKKLLHLCAMSAIQNDPEMKVFFERKVAEGKNKMSVINAVRNKLIHRVFAVLRDERNYEDNYVRHCA

SEQ ID NO: 446520 - protein, 392 aa, unidentified
MVVSVGIDVSKEKHDCFIVSSEGEVLSDVFTVPNNMDGFLCLLQRIQDCSVPQDKIKVGLEATGHYSYNLLGFLLDNGLATYVLNPLRTNLYRKSLSLRKTKTDRVDARTIASMLLSDAGLKPYTDTAYHNEELKSLTRYRFDKVKERAKLKSSISRLVCILFPELEKLVPTLHMASIYALLEEFPGAKQVAAAHLTRLKALLETASKGRYKRDMALEIRDAARNSIGSRMPAKSLELQHTIRLIRELDNKIAEIEEQIQAIMDDLNSPITTIPGLGFRMAAMILAEVGDFTRFDSPDKLLAYAGMSPSTYQSGQLKNCYPHMEKRGSRYLRYALYNATKYVCHWEPTFADYLAKKRAEGKHYNVALSHAAKKLVRLIFAMEKSRAPYRLAS

SEQ ID NO: 446521 - protein, 344 aa, unidentified
MGEVSTIGLDIAKSVFQVHGVDVAGAVVIRKRVSRLKLLEFFAALPPCLVGIEACPSAHHWGRELLALGHTVKLMPPSYVKAYLKRSKNDANDAAAICEAVTRPSMRFVPIKTKEQQTALMLHRARQLLVRQRTMLSNALRGHLAELGIVSAKGRNGIGELLRIIADGADNRIAPATRAILEVMARQYSAIGAEIRSIDKSILAWHRSCEASRRLEEIPGIGPIVATALVAEVGDWREFSSGRNLAAWIGLVPKQHTTGGKDKLGGITKQGNRYLRWLLVAGAMAVIRSAQKHGTERRPWLARLMEHRPTRVAAVALANKIARMAWAIMVRGERYQEPKLLVAA

SEQ ID NO: 446522 - protein, 311 aa, unidentified
MAQHKLFVGSDISKDLIDVAIWPTGESRQVRNDRDGWLELIRWLRPLAVEAIGIEASGGYERGLLRALLDASLPARLANPLRVRQFARACGIMAKNDRLDAVAIARFIAIVPPHAVERSHAVEALAELVTARHQLTDELARAKNQTEHGRQPVVSRLAKRRILRLKADILLLDKAIAQAVAADAQLAYKNSLLRTVPGVGPVFAHSLLALMPELGSLTNRQAASLLGVAPFDFESGAFKGERKIFGGRRNLRDVAYMAAMVACSCNPIFKAFSDRLRAAGKRPKVAIVAVMRKLITTLNAMLRDNQPWRYA

SEQ ID NO: 446523 - protein, 411 aa, unidentified
MEVVVACCAGLDVHQASVVACVNSTGGGGRSRKEVRSFGTMRDDLIALHDWLKQAGVTMVAMESTGVYWKPVYEALEHHFDTVVVNAQHIKNVPGRKTDVKDCEWISNLLRHGLIRPGFVPPREIRDIRELTRFRRKLTQVQAGERNRLIKVLETAGIKLAGVASDVFGVSGRAMIRALIEGEDTPEAIACLARGKLRGKRKELARALDVSLKAHQRFMLRTQLARIEQAEADLERIDITLRELIAPYAHYLQLLMSIPGIDWIIAVTIIAEIGMDMSAFASPAHLASWTGICPGNNESAGKKRSAKSRKGNVFLKTALVTAAITGSRRRGGTYLAEKYRRLVARRGKMRAAVAIAHKILVSIWHMLSNGTFYQDPGTGFLDKLDRERTSKHLVRRLVNMGFEVQLKEKAA

SEQ ID NO: 446524 - protein, 337 aa, unidentified
MSEISILAIDLAKGSFQVCGVTADGAVVFNRSVTRPRLYQLLAEQARCVVAMEACATSHHWGRVAESHGHKVRLIPAAYVKPFVKRQKNDRADAEAIAEAASHPSMRFVAVKSAEKQGRAVAFRTHQCFVRQRTQLTNALRGHLAEFGLVAPKGPASLKLLEQALAHSDTDLPAPLREMAVLYLDQIGRLTELIEQLAEELERASKTDDELRRLCTVPGVGPVTAGAIAAFAPDLSTFDSGRNFAAWLGLVPRQRSTGGKARLGAVSKMGQCDIRKLLIVGAMSVIRWVVRKGGSANRWLANLVARKPRMVAAVALANKMARMIWAMTTKQESYRMA

SEQ ID NO: 446525 - protein, 375 aa, unidentified
MDAHFPIRHRSAKVVVASVTTKQGKGHPKMKITTIGIDLAKNIFQIHGVDERGKVIIRKQLKRAEMAPYFANLPPCLIGMEACGSAHHWARKLEGYGHTVKLMAPQFVKPYVKTNKNDMADAEAICEAVARPNMRFVPVKNIEQQAILSVHRARQGFVKARTAQANQIRGLLSEFGIVIPQGIHAVMKQIPEILEDGENDLPGTFRHLIARLTDNLKEMDSQVEELEKQINLWHRTNAASRKLADIPGIGPITASAIVATVGKAQEFKNGRQLAAWMGLVPRQSSSGGKQNLLGISKRGDTYLRTLLIHGARSVIYHAENKAEPDSWLRKLMVRRNKNIAAVGLANKNARVIWALLAHDRIFRPDYTAAAATAAV

SEQ ID NO: 446526 - protein, 337 aa, unidentified
MKYCGIDLHSNNSVVSVLDEQDHVVAEKRLPNDLEKIIGLVKPWQSELAGVVVESTFNWYWLVDGLKDAGFTVHLAHTTAIKKYDGLKHSGDEADARYLAHLLRLGILPTGTILEPEHRAVRDLARKRMQLVRSRTAHILAVENITARQNGSRITSNQVKQLTAESVDAMPLAGDVALAVKTNVAVITTLSEQIDLLEKRLLADMKARSDYTLLTSVPGIGKVLATTILLETGPIDRFKAAGNFASYARCVDSAHTSNGKKKGAGNTKNGNKYLAWAFVEAAVYAMRFNAEAKRFYDRKKAKTNNVVAIKALAHKLARACYHMLKEGRPFDVTRCFA

SEQ ID NO: 446527 - protein, 340 aa, unidentified
MNITVIGLDIAKQIFHLVGLDATGKKVIKKTLRRTKLLEYFANLKPCIIGMEGCASSHYWARELGKLGHQVKLLPAQYVKPYVRGNKNDYNDALAIAEASRIPEMREVRPKTVEQQSIQALHRLRRGAVGDRTKLCNQVRGLLAEFGIIINQGISSLRKKIPEILEDAENELHWIFRDALALKYQQLRQLDTLVDELTTFIEKEAKQHPQIKQLQSIPGFGAIVASTFFSIIGDGTAFKKGRDVSASLGLVPRQHSSGGKNTLLGISKRGDKYLRSLLVHGARSVVNHAHKKDDVLSLWVTRLVNTRGKNKATVALANKLARIAWAVTTSRKPYQTNFVV

SEQ ID NO: 446528 - protein, 338 aa, unidentified
MHYVGIDHHRQYSHITLLDEKGKVVKSGRVANLRRELGRFLQGIGDVKAVIEAGRSSYTMVDVLDDMGIETAVAHPKDVKAIAKAKVKTDERDSYKLAHLLRTGYIPEVYKRSRENRSSQRVLRQRAFYVGKQTAVKNRLRALLAQQVEEIRQEVARVEDLFTDKGMKVLAGLALPEREAKMVEALLKTYRHLQDRISETNALVGELYEKMPYARLIRSVPGFGVFLSVLVAVEIEDIKRFEDVSKLHAYTGVIPSTHSSGERSWHGKIIKEGNRWLRWAVVEAVWPALRADFDLRCYYERMKRRKGANSAKVATARRLLTIIYGMLKENRPYIPYKR

SEQ ID NO: 446529 - protein, 427 aa, unidentified
MTDQIKHKAYSSWVAIDIAKDFNVVMVELTNGKTRRFRMANSGKDHDRLIEVIRELPQPSHIGFEATGNYHRPLAFRLLTEGFDVSLISSLASARYREAIFNSWDKNDPKDAGILLELLKRGVVQTYVDPIRSGYHDIQELSKTYSNITLSRTRLQHSILTHYLPLYFPEMAKFWCSTRNAWWINYLLHFPTPASVTQYSEQAFCQIASPIIGRKMNKQAKLLELYEAAQHSIGLPIAPDSLACQTFQLQLQRYQELTTQRQQLEQQAEATLSTHPDYCLLKTVPGIGPIVAMTILAEGGDLRRFNHHRQFLKYCGLDLAKNQSGNFRGQDKLSKRGNARLRLALYMASLHAIRQTENSFRNKFHRYTQATPKDADCKRKAMTAVMAKMARVVHALIKSGTPYQGYFEVSPSGSIPLSRAVGATRTP

SEQ ID NO: 446530 - protein, 343 aa, unidentified
MKTITTIGFDIAKSVFQVHGVDAAGEVVIRRQLKRRHVLAFFEKLPPCLVGIEACASSHYWSRELQALGHTVRLMPPAYVKPYVKRQKNDMADAEAICEAVTRANMRFVPTKTPEQQSCLMLHRTRHLFIRQQTAVINSIRAHLAEFGIVAPVGRKGVTELLHVVADPSDKRVPEVARACLAALGAQLLGLKEQILEFDRMIMAWHRSNQTSKHLHYIPGVGPMLATALVASVADPRTFRSGRNFAAWVGLVPKQHSSGGKDRLGSISKQGDRYLRSLFVAGALAVIRYAKIHGTKHRPWLTALLGRRPTKVAAIALANKIARMAWAMMAKGERYRNPVALAA

SEQ ID NO: 446531 - protein, 391 aa, unidentified
MTAVVIGVDPAKRSHAMAVLDEREEQLAALQVGNDSAGYRAMLALAKRYKDRVWAIEGAGGVGVQLAQRLVAAGETVLDVPPKLSTRARIFDRGHGRKNDPTDARTVAVVALRTKGLREVVLDNEMIAIRLMSERRADLVRARTVAVNHLHQLLMELIPAGAERKLTATKAKALLATVRPRDVAGRTRRQLAVDLVEDLTALDRKLKDLDKRLREAVEATGTTLTDIKGVGVATAAMVLGEVGDVRRFPTRHHFATYNGTAPRDYSSGGVDTRRLSRAGNRKLNHALHIIALSHKRYDQRGGEYYARKLAAGKGKKGALRCLKRRLSDVVFRTLVEDREQRQAAGPVGHSGATTKSCAADRSPMVSTSEKPLAGPAVPDATPDAAPLPVPA

SEQ ID NO: 446532 - protein, 371 aa, unidentified
MKTGSKLSEDEIQLYKAFVASKKAQPVAVDLAARVFQVCYIEQDTGRLHNRKLSRADFFKFITEQKGKVVWGFEACGACNFLARKVAEHGHDSKIMPAASIKSFLGIDKSDKIDAMGIFRALITPTIREIKPRSAGSQMLMWLFTAREQLNKQMVQTINMAHAILYEFGTVADRVCTQNVKALKDGFAEMRNKYLQMPEYLHMELTLNAVEEQMDALSEKLEQIDDRLEAIGKTDSMCKALCTIPGIGPKTAVALVAYAGDIGRFPSSRHFCGFIGVTPRVTGTGGKIITVGFKKSGIKTLKRMLYMCAFSYFGSSVRKGVMSSWIKSRLNRKGYSKRKIICAIMNRLCRIAYSVMKNGKTFEPGRCSMIA

SEQ ID NO: 446533 - protein, 335 aa, unidentified
MLHIGLDTHYRTSTMCILDHNGKKVKNETVRGGRAKLLARLDAIDKPFEICFEASCGYGPLYDELAKRAQRVLMAHPGHLRLIFRSKRKNDRVDAEKIAKLLYLDEVPTAYVPNQDVRQWRELIEFRRRLVDQQTTCKNQIRSLIRSQGWQAPRSLWSRKGLAWLAGQDWPGLSGRVRCDMLLEDLQASKRKIRAVTQALNRIGRNNTGVQLLRTIPGVGPRTAETVVAYIDDPKRFARPSQAAAYFGLVPSQDASAGTNRLGHITKQGPGTARKYLVQAAWQAVRRSPLARLRYERLLDGRRERRKIALVAMAQWLVRCMQSMLSSGEVWRESA

SEQ ID NO: 446534 - protein, 395 aa, unidentified
MKGRYNLMIYVGIDIAKLNHFAAAVSSDGEILIEPFKFTNDYDGFYLLLSKLAPLDQNSIIIGLESTAHYGDNLVRFLISKDFKVCVLNPIQTSFMRKNNVRKTKTDKVDTFVIAKTLMMQDSLRFLTLEDLDYLELKELGRFRQKLVKQRTRLKIQLTSYVDQVFPELQYFFKSGLHQHSVYALLKEAPTPNAIASMHMTHLAHILEVASHGHFGKDKARDLRVLAQKSVGVNDSSLSIQITHTIEQIELLDSQLFHTELEMANLVTCLHSVIMTIPGIGFVNGGLILGEIGDIHRFSEPKKLLAFAGLDPSVHQSGNFQAKKTRMSKRGSRVLRYALMNAAHNVVKNNTTFKDYYDSKKAEGRSHYNALGHCAGKLVRVIWKMLTDNVEFNLE

SEQ ID NO: 446535 - protein, 414 aa, unidentified
MSYKIAGIDVHKKVLMVVVMDASTPDLKPERRRFATMPSDLRQLSTWLRERGVEEAVMESTAQYWRSVWLELEPYMRLELAQAFSNRAPRGRKHDFKDAERLVRRLIANELILSFVPDEEQRTWRNLTRMKLQLTRDRVRLQSQMECLLEEMRIKLSHVVSDLLGSSGLRILRALAQGETEPKRLALLGDDRLKCSEEQLVDALTGRPQPMHRQMLGLQLERLQLLDGQIAKLNGLIAQAMKPHQDAVIRLAEVPGLGVDSAQQVIAEVGVKAGTFPSAAEFTSWVGTCPGKDESAEENHSTRSAKGNKYLRRVLNQAAHAAVKKNGSHFQAVFRRLLPRLGYQSAIWAIAHRLCRVVWKILHEGVRFIEQGTEPDPKAKKQRARMLARALRKLGYEVAITPISLATSQNETRI

SEQ ID NO: 446536 - protein, 353 aa, unidentified
MSKILAIDLGKNSSAVCIFDRGSLKSRFRTVHTRKQVMHDLFVEFANQIEIVLFETGAQMGWVADILWALNVPFKVANTNHPAWKWKNNPNKSDRKDAQRLALMYNAGFFPTVHVPRRDVRQKRSLINYRDDLVKRITKVKNSLRALLSREDMHLPSGKKGWTQKALKPIRQLAAPIKGIAEPEDVWKGQLHCEFELLDGLTEQLRTLESKLDALGKNDEKVQRLRTIPGVGPRLSEAVAAIIDDPHRFKNGRHVSSYAGMVPRHWQSGQVDITGRISKCGNKLLRTLLVEVSWLGLKEPWMREIYEKVKRGQQKRSKIAIVAVARQLLVRCWAILRDASCWNADHATRFMTC

SEQ ID NO: 446537 - protein, 372 aa, unidentified
MAHRAEETAVNAGNDIILVTDYHAENIEFRWFNQATGEERTGKYCTTRAGILRQMEQAAGEVAPGGRVVWIMESTTGWARVKDLLGQRVEFVLANVLQMPMPPKARRRKTDKIDTGRLLREYLHGSLPRSFQPSSWWREVRRVVDCRQDMVERQTAIKNWIGSLLHHETWEDRENLWSAKGLRRLEAMKLSPSDRAMVELKVQQLEQLARQLAQVEAQMRTIYNGWPEAQWVDHVRGIGMVTAVSLLAHIGPIERFATAEDLISYAGLAPGMWQSDGTCHHGRIGGGGTDSHLRYLLIEATVWLRQIPRYRDTYERVVTKRGKKIGRIVVARLLLRSLHKMLTEKIRFNPMPRLSPQTTTEATATAKAGCSR

SEQ ID NO: 446538 - protein, 429 aa, unidentified
MDNETYFRIKKFRQFKEEIRGSEEYLIIGIDISKDKHHAFFGTANGKTLLRRLIFENNLEGFSKLRSRADAIKAQSGLSKIIFGLEPTSNYHKPLGMHLIRCEHEVVMVSGVSVKRNRELLNGRWDKNDTKCAANVADLISQGKCLFFDSPSSEISGLRELLSLRERIKKQHHSLRMRIRGNLLAKYFPEFDRYFGQCSSESLAIVKLCLDPHKIAGMDFEQFMFTVTTRDRGIAQQRRLRKIYDLAYESIGCSMNRFAEFEAAILVDQVNHTKQLIEQIDAQIEEAASAFIEYHCLLTIPGFGPYISAVVLAKIGDPFRFENRGQVIKMSGYDLSAKRSGKSSDKATPVISKKGSNSLRYALYQAALIASARNSNFIRYFTNTLKGREKERGIKTKMRVKLAAKMLIIAWTLMKKKIDFNPDFLLIEQ

SEQ ID NO: 446539 - protein, 343 aa, unidentified
MIIIGVDAHKRSHTMVAIDEQGRALGERTVQATTPGHHHAFRWARKSFGSELLWAVEDVRSLTVRLERELIDAGHRVVRVPTHLMARSRKTSRTPGKSDPIDALAVARVALRESDLPVATHSPRTRQLKLLLDRRDDLVQYRTAATQRLLWHLHEIDPTYEVKPGALSWSTTQAAVADMLTRHHGLVAEIAGEELWDVQDATPRINELQRRIGTVVRSAAPSLLELHGCGPLTAARIVGETADVGRFKSEAAFARWAGVAPIPDWSGTTRGQLRPFRGGNRQVNAAVHIIALTQIKKGAPGEQYYRQVRDRKGSHGAAFSALKRRVVRSIYTRLRADRSLLAD

SEQ ID NO: 446540 - protein, 344 aa, unidentified
MRKLPSDLSTVTTVAVDLAKHIFQVHGCDAAGKVVVAKALRRKELLPFFAALGPCVVGLEACGSAHHWGRALLALGHDVKLIPPAYVKPFVKRQKNDRNDAAAIYEALFRPGLRFVAVRSIDNQAMLMQHKVREMLVAQRTQLFNGLRGHMAEVGIIAAQGARNMRSLGALIHEGHPDISDMVQQSLMPLVMQINHLDEAIRDIDTAVAAQAKADPVASRLMTIPGIGPVTASALVATIGDPSGFSGPREFAAFLGLVPRQHSSGGKERLGRITKMGNGYLRKLLVVGAHAVLVHQARHNDPLRAWARKLLETKPFKLVAVATANKLARMAFALMRQDTSYRAA

SEQ ID NO: 446541 - protein, 356 aa, unidentified
MKYYTSTTEFNCGIDLHAHQMYVCVMDRQGKKLVHCNVKDNDFEYFLKLVKPYRHSLTVCSEGMFGWYGLADACQAEGLTFVLAHALYLHLIHGGKNKNDRIDSEKLAHLLRSNLIPPSYVYPSARRPLRALLRQRISYVWRRAELLARIHSHQLAHNRTPAKQTQRTRDLWEERLLKAENHPLRQLALKNDLAVIRHYDQQIFQLEEELQRQTKRVACREFALLKTIPGIGESLGLTILYEIGDIERFPTIKDFLSYCRLVKGTVASAGKIKGLRGAKLGNPYLRWAFGEAAVIAKRDHYRLKPLAQQLEARMNGNKFKANTVLAIKLARAAYFMLKNKTVFDPERLTAVLAKAA

SEQ ID NO: 446542 - protein, 342 aa, unidentified
MEHYAGIDVSLECSSVCVVDGNGKIVREAKVASEPQALIAWFGALGFGLERIGLEAGPLSQWLFAAMKAAGLAVELLETRHVRKAFEAMPVKSDRNDARGIAQLMRLGWFRPVHCKSMSAQEIRSLLTARKLMQSKLLDVENSLRGILRGFGLKVGKTTKQTFAGRIEELVAGHPHLQMIAKALLAVRAVLRTEFAAFEKQTRRMVRSDMQARLLTSVPAVGPIVALTYASAIDDPARFKSSKQAGAHFGLTPKKHQSGETDYTGRISKIGDASVRTALYEAANVMLTKPVKGCSQLKSWAMRIKRRAGTNKAKVALARRLAVIMHRMLADGTPFNAAAAAA

SEQ ID NO: 446543 - protein, 408 aa, unidentified
MQVVHTRCAGLDVHKKSVYACVICRTGDGKNREVRSFGTMTADLLRLADWLREHQVSHVAMEATGVYWRPIWAVLQGHFELLLVNPHHIKVIPGRKTDTKDCEWIADLLQHGLVRSSFVPPTDIQDLRDLTRYRAELKQAQCTVANRIQKLLEQANIKLSSVASNALGVSGRRMIEAIIAGEDNPEHLAALAKKRLKEKIPELRLALQGYVRDHHRFLLREFLDEWNALAERISRVEQEIDRRIAPYEHAVTLWQSIPGMDRVTACNLVAELGVNMAQFPSAQHLTAWAGLCPGNNESAGKRMSGTTRPGNKWLRRTLCQSAWAVTRKKDCYLSAQFRRLAARRGVKRAVMAVAHSMLIIAYTMLKTGNTYHDLGGNYLEQTNKEHLQNYFVKRLRRLGLNVTVAPAT

SEQ ID NO: 446544 - protein, 391 aa, unidentified
MLPTRLREQNESDKVLIKGDSMSVRRILAKTINTDLEYEAIGIDLAKNCVSVALLTTDGEVVCIDRLDYSELEKSAQVLCPTTFAMEPCTEMNYLVQKLEAWGHRCLVIGGKNVQNYVENHFSGQKTDLNDAQALAFLAQDTQLRTIKAKDMEQRKYASLTTLREQYIKQYRQTIVSLKGICQAWGLNISKGISGKARLKDLIENHAAFPEELKESLVDMVTHAQTAQKALNKITKTLEELAKNDKLCQLIRTIPGLGLICSCRLRATIGDIKRFKNPKDFPAYYGLVPRSIATGHNEKKGRITHRGDKTMRSLMVQGAGSVINMATRGKLKSKQLTKWILKKQKEKMPWGKLVCAVAAKLLRIVRAVLISSKPYNPQIAGVAKCSLPKGT

SEQ ID NO: 446545 - protein, 363 aa, unidentified
MSSIPQLQPSDPDEVVLGVDTHKDVHVAAVLTALGVLLATSSFPTTATGYRAMLVWARGFGVVRRAGVECTGSYGAALSRHLRVETVTVIEVNRTDRGDRRRRGKTDTIDAEAAARAVLSGRATAIAKSGDGQVEMLRMFKLAKASAIKSRGQAINQLKAVIVQTDPALRESMTGLSNTALFRRCAEITHSLPTDTASAAAFTLRLLARRIVQLSSEIDELNAQLVVTVEARAPQLLQRYGVGPDTAAALLLAAGDNPERLHNEGSFAALCGVSPVEASSGKTHRRRLNRGGNRQANSALYTITIARLRWDKRTQEYLQRRIAEGKTRREAIRCLKRYIAREIYQDLTKKNAKTSPQPAQSAA

SEQ ID NO: 446546 - protein, 422 aa, unidentified
MNEQEPVVYNVYVGIDWADKKHDVCICPRDSDTREFDVIRHCAEDIDAWVKGLHQRYEGRIAVAVELSKGPIISALQKYDFIDLFPINPATLAKYREAFQPSRAKDDPTDAQLAVDMLLRHSEHFKVLKPQSVEMRALATMVEQRRSLVSEQGRITNRLRSALKQYYPQVLEWFEHIDTPLFCAFVKRWPTLTQARRARANTLKQFFHEHHMYREDVVERRRKAIKAASPLTLDEAVIVPYRMQVLVLVEQLELMFKAIDQFDDEITKLASQHPDYAIFRPLPGAGPSLTPRLMVAFGEQRERFSSAADVQKLSGIAPVTERSGQKHWVHWRLQCPTFMRQTFVEWAAQTINKSYWAGAYYRQQRDKGSTYQAAVRSLAFKWIRILYRCWQTGVAYDESRYLKALERRGSPLVKRREMLESA

SEQ ID NO: 446547 - protein, 429 aa, unidentified
MNYNTQNAKIASITEKTLIIGIDVGSETHYARAFSWRNYEYSKKPFAFSNDEAGFAAFKEWMDDIAEKHEMEVIIPGMEPTGHYWLNLGAYLQEQGMKPVHVNPHHVKKSKELDDNNPSKNDRKDPKTIASLVNEGRFSYPYIPTGIYAEIRNLSNLRIQTQEEITRIKNRMARWFSIYFPEIKDVYRNPDAVSGLMVIKQAPMPCDIRELGVEGVNKIWRDARLKGAGIKRATTLVTAAEHSIGNTEAPRSARKEIRNLLNDYEIYKNRMDELMEEIEKTLSEIPYIDKLMKINGIGIKTVSCFIAEVGDIGRFDNPKQVQKLAGYAIVADSSGKHNGESRISHRGRKRLRYALYESAISVIGKNKEFKEIHSYYRTREKNPLKKMQSVIAVACKLIRIFYTILTKGVDYDGQKMLNDIVRPEIQPAA

SEQ ID NO: 446548 - protein, 492 aa, unidentified
MYRARIAQVNGQRLAFRSHRRPDLARDRCRAHVFSHEPHSAAPAECRTERGITITEEEKERFAAGFAVHVGVDTGKSFHKLVARRPGDVRSKPLKVTVDRAGFDAAHAHLQTLFPDVLPERMLVGIEFAGHHGFTFAHDLARRGYQIVTVLPSATKRLKDVGTNRTRKSDDIDAWQICKLVGQGAYVSYLLLDPIYTSLRLLTTARRRLSREEVRFKNRLQGLLDLAWPEFLRFFANLEQETPVAVLRRWPLPQDFIAAPETEVADFIRAVSRNHVKPERIDALRRSAIDTVALTTAADVRRQEITDLLGRWTLAREQLAATDARIARLVEECPPARALATVPEVGPVCAATIISEIGTPYDFQSHRQVLALAGMDLSGISSGTSVKTSLRGSKRGRPMLRRELFLLAGRWVHPRRGLYRAQYEAMLARNGAKRTKAVCAMARKLVPMLLTVAQSGEPFDRARWLADRRRPAGATNNEVPPLSAPSATTPTE

SEQ ID NO: 446549 - protein, 322 aa, unidentified
MRYIGIDVSKATFVVAYSSDKGGEIRTFNNTTTGIKQFIGALPKDGSIHCVMEATGNYSALLLYMLNVAGITVSMENPLKVKNFAKAMLSTIKTDKSDARLITLYGEKMNPRPFKVQGEAILRLRQKRTVIRQLTKQITAMSNLRGSLACLPVPDKGATHTVDETIKFLEKKRDRLQAELTDLVEVEFSRQLALLTTIKGIGITLATALIITTGGFTYFQNAKQVSRYLGICPTYEQSGTSVNIKGHINRNGDAYTRGLLYIAAWPASRFNAQCKETYTRLRQNGKSGKLAMIAVANKLVRQAFAVVAHDKEYVDGFVSNRP

SEQ ID NO: 446550 - protein, 435 aa, unidentified
MEVNGKFAKNDKLSFITDDMLIVGCDIGSETHYIRAIDVRGRELSPGAFEFSNTSEGFENAKAWVLALAAKHDKKQIVQGLEPTCHYWFALAAWMISNGISVVQVNPYAVKQSKEIEDNSQLKDDRKDPKLIANLVKDGNYGMPYLPEKVYADMRRLSMFRDQFTEDRIRNINRLHRELKIYFPEYMDAFGKIDGAFTLEVLKVSAIPTDITALGAEGMKNIWHNAKLRGRGYSRANEIVNYAEKSVGLTDGTDAGREAVKWYAEQILRLDEQLAEIESALHEKCREIPYAENILAINGVGENILAGILAEMGDISRFDDVKEIQKLSGMGLVACSSGKHKGQTKISHRGRKRLRYWLFQAAKSAVSHADEFKQLHEYYTTRSNNPLKKMQSLVVIACKILRVIYTILKIGTTYDPQKLLKDIKHPAASQAPMAA

SEQ ID NO: 446551 - protein, 407 aa, unidentified
MKEPDTMNIRPQLLQACGIDIHKNKVSICYYISNKTEEVKEYGTFTFELEQIRDEILSHQIKDVIMESTGVYWIALCSILMAAGMNVCVVNPKFIKNMPKEKTDKKDARWLCKLLVNGLVRNSFVVSEDQRAFRDLCRMRTKYRNHITQSQNRIVKNLERRNIKLRSVVSNMDTVSAMEIVGAIAAGETDIEKLVSLCRTKLKKKKKEMRKALVGVITPHDRRMLQSLLDDIAHYRKQIKKIEEEIKTHTEKINEELIKNLREVKGIGEQSTQIILAEIGDNVKPFATADKLAAWVGVAPGNKESAGKNYYSGTRKGNVYLRTVMIQVAWAAVRTKNSYWRALYYHLTRRMPMKKAIIAIARKMVRLIYKIINGTKTYVEYGAEYFMQHLQERLAQKRNHNIVIKPA

SEQ ID NO: 446552 - protein, 455 aa, unidentified
MPKPKRIRNARTSPVPRILEPDAAGIDIAATEVYVAVPTDRDPEPIRCFSTFTDDLHRLADWLRACNVQSVAMESTGVFWIPLFQILEDRGFRVCLVNARHVKNVPGRKTDVSDCQWLQYLHSVGLLRASHRPAQTICAVRSIWRHRESLVQMAAAHIQHMQKALDQMNLQLHHVISDISGTTGLSIIDAILDGERNPETLAALRDPRIVASRETIARALVGDYRTEHLFTLQQSLRAYRQHQQWIAACDVEIERQLRVLPNNLADDQKPLSKPKDHHKPRRNEPGFDLRSQLYRIFGVDLTEVPGVSSLTAHALLTEVGPDLRRFPNAAAFASWLGLCPDNRISGGRVLSVVTRKVKNRLTMALRMAAQSLHRSQSYLGQYFRRMRVRLGTPAAITAAAHKLARILYHLITTRQPYQESTFAVMEERSRHRQLLRLKKQAASFGFQLVPGSSVP

SEQ ID NO: 446553 - protein, 345 aa, unidentified
MEQISRIGMDTSKHIFQLHGVNSAEKVVLRKKLRRKEMVAFFEALAPTVIGIEACGASHHWARILRSFGHQVKLIAAQLVKPYVKRGKNDTADAEALCEAMSRPTMRFVPVKTAEQQAALMLVGLRDRLIRNRTQLSNAIRGYAAEFGFTAARGMAHIDPLLDRIQADESVPVLARELFAAQAEEYAQLQAQIDEVDAKLMAWHKADECGRRLAKIPGIGPIGATLLLMKTPAPEMFRSGRQFAAWIGLTPKDHSTAGKVRLGVITRAGDETLRSVLVAGATAVIQQVRRGGRGSPWIVDLLKRKPPKLAAVALANKIARVAWKLMLTGESYAAKSARVAVTSAA

SEQ ID NO: 446554 - protein, 326 aa, unidentified
MYAYLDLHKEYSQVVVLDFDGTVLREERVENEDPTEMERFSESLPPETEVVIESSSTWYWVYRILSRRHRVVLSNPLKTKAIASAKLKTDRVDALTLANLLRGGYIAESYVPSQKVMDLRELVRYRANLVRMRSSIKNRIHAHLLMNNVRVEAGPFTKEFIQQVRAIEDTKVQGYLRLIESLNQEVRTASAEISREAMSSEEARLLMTIPGISFYSDLLIASEIGDVNRFADCNGLVAYAGLVPSTHSSGGTTYHGRITKTGSPYLRWVLNQCVRANIRTEPDGTVASFYNRLVKKKGSAKSAVAASAKLLRIVYWVLKERRPYHS

SEQ ID NO: 446555 - protein, 345 aa, unidentified
MGRLLDTATFDATDAGYTRLTEWLASFGPLAQVGVEGTGDYGAGLTRHLTRQHIRVVEINRPNRQKRRRQGKSDTTDAIQAARAVLSGEASAAPKLRSGPVESLRVLRETKQQLTKARTAAVNTLRALLVTAPTALRESLAGLSTTQLIAACAGLDTPTVPASGLRGRARTASHDELAEALCDHETATRTALATLAATITDYDTRLTALTTQLQVLTARIAPRTLTCHGLGPDTTAQLLITAGDNPDRIHSETAFARLTGVAPLDASSGQQQHHRLSRAGDRAANSALYRITLTRMATCHRTRTYLTERLTPNGANKKHLIRCLKRYITREIYPQLRADLTALTT

SEQ ID NO: 446556 - protein, 330 aa, unidentified
MKGPAASEQARQWIVGIDVAKAKLDVALRLPAGKWRNKVVANTPAGFEELRSWLSRQGVSCAHVCMEATGVYWEAVASDLADRGFGVSVVNPAQIKAFGGSMGVRTKTDVVDAKVIAEFCASRNPATWQPPSKSIRRLRALVGRREALVDLRTQETNRLEVAATEEVRQSVEQVIALLNAQIEQIERQIRKDINDDPTLREQRDLLDSIPGVGDKTIAMFLSHYGGELRFDKTRQAVAFAGLDTRKHESGSSVQGRPRLSKMGHSDIRRGLYMPAVVAMTRTPWGKAFASRLLAAGKPKMLILGALMRKIVAIAYGVLKSGKPFNPALHA

SEQ ID NO: 446557 - protein, 386 aa, unidentified
MHHRTTLPVSEHTCSREDCATLFVSLELSRSTWVATSLALGSRKMSKHTLVGGDAPKLLDLLARLKSRAEQRIAAPVKVVAIQEVGLDGFWIHRLLDANGVDSHVVDPASIAVPRRHRRAKTDAIDGETLLRTLMAWQRGEPRVCAMTVPPTPSEEDRRRVSRERATLLRERIRHTNRIRGLLFGQGITNYNPLHKNRRKGLEELQTGDGHPVPVQLKAEILREIDRLELVLRQINEVEAERDEMLRPGQARSPVALLMRLKGIGPEFAAVLYLEGVFRHFESRRQLAAYAGLAPSPWKSGSVDHEQGISKAGNPRLRTTMVELAWMWVRYQPASALSCWFRQRVGSERGRIRRISIVALARKLLIALSRYINHGEIPAGAVVKPV

SEQ ID NO: 446558 - protein, 413 aa, unidentified
MDVLHSRCCGLDVHKSSISACILLGEAGRVQKHQRRFGAMTQELQELAEWLRQFGVSQVAMESSGVYWKPVWNILEGQFTVVLANAQHIKNVPGRKTDQKDAEWIAQLLQYGLLRPSYVPCETIRDLRDLTRMRASLSQEVSRISSRIQKVLEDANVKLASVATNVLGKSGRAMLEDIICGEDDPEHLAALALGHLRVKIPQLRVALEGKIRSHHRFLLRRLVDQIQFAEHEIALLDERLEDIGRQRPELAQAVARWDTIPGIDRVAAWALLAEIGDNMSQFPTAEHLASWAALCPGNHESAGKRLRGTTRQGSPWLCRMACQCAWAAARTKNTYLSSQFRRLAARRGKKRASIAMAHTIIVMGYHLQKNQSNYEDLGGNYFDRIHSDGLKRYLVKRLQQLGHKVTLEPMEAA

SEQ ID NO: 446559 - protein, 348 aa, unidentified
MRTEYFITMDTHCRTTDVCIKTAGGKLVRREHLATGIPQLRDVIQSVPRPRRVAFEEGALAGWLYRNLMTDADELIVCDPRRNAHVAKDGDKDDPIDAQKLNDLYRGGFLKVVYQPDSAEKAAIKQLIGMYHDRVAHRVGEGNRLLALGKRWGVLLKRSMLQEVDARPALQACLARAGVPQRIVTLADELWEGLEVAMRQEQALYAQLCTLVKQDKVMARVAELPGYGPIRSATLISYLDTPWRFKSKAALWKYVGIGLRREKSGADLDVVCVEQCCNRLLRAVVIGAAQSVIEQKRSVFARRYAHWIRSGLSFGNARRNVARAQVTAIWGMWKSDKAFDVSRIPELG

SEQ ID NO: 446560 - protein, 433 aa, unidentified
MIKINYMSTLFVGIDVSSKSNMVYAMDFDENKYIDASFGNNQPGADELAGKIADCMQKHPHINTVIVALESTSVYSIHIANFLASCELLMPYKPYVYCLNPKMTANYRKSYVGMDKTDHMDAFLISDFARVGRTKKCEPWRGSQYLALKRLTRHRLHLAECITREKTYMVSNLYLKFSELQLLDDDRQPFSNIYGATSSAVLTEFMSLQEIIDSPEEELLQFLASKSRNRIADISKTSELLKKAARDSYRLDKCMYEPLNVSLASSFNCIQTYQKEIKLIDQAIEKCINGMNPNAFIILKSIPGIGSVWAAGILSEIGDITAFHSSDALAKYAGLTWLKNDSGDFVSEDNRVSKAGNTYLRYYLGEAANSVRRHVPEYAEFYSRKYAEVTKHQHKRALALTSRKFVRLVFGLLVKNQLYTGEKLDAELNTEFE

SEQ ID NO: 446561 - protein, 430 aa, unidentified
MNHMTDTNTTHAPEQFAAFIAVDWADEKHAFCLQAAGQKQKESGTLQQKPELIGAWVAALRERFGGRAVAVALEQSRGALIHALLGYDFLVVYPIHPTTVAKFREAFKFSGVKSDPLDTDQILEILTKHLDLLKPLRPDTQETRLLARLVEDRRKAVELRASHIQALKASLKEYFPQALEILSGNVTSRLAYDFLKKWPTFENFQQAQPSTVKRFFYGHNVRSPQRIEQVLQVALKSRALTTDTPVVESGVRLSQMHGEVIHTLNPLIEQYDRKIEAAFNDHPEAKLFTGVPGAGPALAPRLLAAFGTDRSRYDAADNVQSFSGVGPVTKSSGKTRVVYARSACPKFLRQTFHEFARLSVAQCQWARNYVDYYTGQGKKYQTVIRALAFKWIRILFRCWKDRTPYDDQKHMKRLEQRGSIFATLHLQKTS

SEQ ID NO: 446562 - protein, 403 aa, unidentified
MNNVVGIDVSKGKSMVSVLRPFGEVVAKPFSIGHTGSELKELADYLKSLDGETRVVMEHTGRYYEPVARFLHDEGVFVSAVNPKLIKDYGNNTLRKVKTDKADSRKIARYGLDNWAELRQHTPMDTIRMQLKTLNRQQSLYSKTKTMMKNNLIALLDQTYPGVNTLFDSPVREDGSQKWVDFATTFWHVDCVRNMSLTAFAERYRKWCKRHGYNFSQSKAVEVHAGAQDLIAMLPRDALTKTMVRQAIDALNAISASLERLKAEMQALAAQLPEYPVVMAMHGVGDSLGPQLMAELGDVTRFTHRNAITAFAGVDPGADQSGTHEAKSTRVSKSGPPELRRALFLVMDCLLKTMPQDDPVYCFMDKKRAEGKPYLVYMTAGANKFLRIYYGRVKEYLAQLENS

SEQ ID NO: 446563 - protein, 344 aa, unidentified
MNSMHYIGFDIHKKVISFCEKLMDSTIVDQGTIRATRESITNWAEGRTAEWIGAMEATIFTGWIYDYLLPYALELKVAHPAMLKAITAAKKKNDAADSEMIVDLLRCNLLPECYMAPEEHRNLRRILRYRNFLVREAAKMKIKTSGLLMEVGVEYNKKRLHGARYFQELLGKLDYVPESVLQLLQMSRSSMESFDKMQKSLISGLREDPQISHRVELLMSIPGVGEVTALTWVLEMGEIDRFARINQAVSYCGLCSAQKQSAGKDYRGPISKQRNKHLQTVLIEAAKLAPRWNQQLAEVHEREITKGNRNRATLAVARKLVAYLMAVDKNQKKFSPKEVLQEAA

SEQ ID NO: 446564 - protein, 335 aa, unidentified
MPELWAGTDAGKAEHHCTAIDADGTKVLSRRVPNSEDELLQLLGDVLNLADGDPVTWAVDLNAGGAALWITLLVNHGQRLFYIPGRTVHHASGSYRGSGKTDAKDAFVIADQARMRRDLQPLQETSEIAVDLKILTARRLDLSADRTRAINRLRAQMLEYFPALERAFDYSTSKAALILLTGYRTPAALRRIGRARLATWLKNHGVRTVNVAKSAADAAVTAAEAQFTVVPGEKTAATMVHTLAREVMALDQEIAELEVLIEGRFREHPDAEVITNMPGVGDMLGAEFIAATGGDMSAFGSSDRLAGVAGLAWCHATRAGSAATCADQVATAGAC

SEQ ID NO: 446565 - protein, 331 aa, unidentified
MTSLPNHTVTSNLTVGIDVAKATLKMSLSDRLATIGHPNDEAGHAALLARLEQLRTQGAHIGLVVLEATGGLEAEVAWALQLAGWPVVVVNPRQARDFARSMGQLAKTDRIDAQLLARLGQTLLQRPDLAKLIKPLPDERQRMLQARVTRRRQLLAMRVAEQQRASGPDRQMRKSLNIMMKALDRELARLELELHAFIGEHHAELLALLGEVKGVGKATISTLLAEVPELGELSGREISALVGVAPINRDSGTLRGKRTTFGGRPQVRKVLFMAAMVASRYNPVIKAFYQRLVTAGKPKKLALTACMRKLWTILNAMAKACKPFNSGLHVA

SEQ ID NO: 446566 - protein, 371 aa, unidentified
MELEAGHGVGGIDPHKHSATLAVVDSHGHLVDVVSVPVTPAGIGELLEFLTDTELVIDRIGVEGSAALGQPVAVALSAAGYDVREVQPNRTAERRRRRRRAKTDIEDAEAIARETLADPQLPPAGKHAAPEAAWEELTAVHDWRDSLILQRVRQLTEAEAVLVSLPLSIRSQLPSTSRVLPQLEMLETFAGQWDGLSTVDRVRLDRLQAALDDIRLLTGRIKILDKRIPPLLEQLGCTLTEICGIGPVTAMDLLVEVGDPCRFTTEAQFARWCGSAPIALSSGEGHGPARRHRLDVGGNRNVNSILHIVHVTQVRCHEPARTYVARKIAENKTKREARRAHKRQLANVIIRHMWKDEALRKTSGTAFPAAA

SEQ ID NO: 446567 - protein, 330 aa, unidentified
MRIIGCDLHARQQTLAMVDTTTGEVVEVTLKHEGDNVREFYSSLPRPVRVGIEATGSMQWFLNLMEELGIECLVGHPAQIRAAASRKQKNDRRDAELILKMLVEGRFPAIWLPSKELQDLRALLRHRHQWVRMRTRTQNSLQSIALANGLRRGTALWSHDGQSRIASLPLAPHTAYRRSELQAMYEKFEAEIEKLNQRVEEQACKRPGARLLMSHPGVVPITALATEVFLGDPARFADSKALASYVGMIPREYSSGGRQRLGGLSKQGNPLLRFLWGEAGAHAARKDPELQRFYRRKLVQKGLGKASVAVARKLGIRLWIMLRDQIEYNE

SEQ ID NO: 446568 - protein, 331 aa, unidentified
MTTTTPLASQTLCSSCVFAGIDVAKHKLDLARSDSGELITVCNDAEGIACILELLGQAKPKCIVVESTGGLERPLLEALLDANLPVALVNPGRVRYFAIGCGILAKTDPIDAAVLVKFAQLAEPRLSQKRSANQSELDALITCRRQLSVTRAQQSNCRLATRSKNAIKSIDAVLATLDKQIQQLDKKIRQLIDSDDDFKHLDQQLRSVPGVGPILSATLIAELRELGDANRRSIGALVGVAPFNHDSGAFKGKRSIRGGRTQVRCVLYMAALAAMRFNPVLRRFAQRLSRCGKSPKVVIVACMRKLLTLLNAMIRNNLMWHDLNVVKMLDT

SEQ ID NO: 446569 - protein, 346 aa, unidentified
MYKGMKKIIIGIDVSKEKIDVSHQDMDRQTVPAYLGKYENSPKGYKAMVKDLSRMHKGICPGQWLFCCETTGAYDRPMCYWLCANGFNVWRESALQIRWSLGIRRGKDDKADSMAIAEYAWRHMDKACLFHIPEEKLAALKDLFVYRMQLVDRCKAQKARLKSLDAQGKAASAAAALIKHDIKKEIEAIEKSIAKFENEIMTVINSSPDLKNSYKRITSINGVGMVTAVSMIAFSDNFTNIPTPNKMATYCGVAAFRKKSGDSIDKRQDVSNLSNRRLKGILSMAARSAIHYNPDIKSYFERLVANGKPYGIAVNNVKNKLIHIMYALIKNASEYKPGYQHERKSA

SEQ ID NO: 446570 - protein, 424 aa, unidentified
MKVTYQTCCGVDVHKSFLVATIVKTTGGIEPSYQKKRFSTFNHSILEFKQWLLDNGCHDVCMESTGKYWVPVFNLLEDDIKVVIANPKWVKAVKGNKDDSKDSKWIGDLFRLGLVRGSYIPCKKIRILREYTRYRYKLISCRSSEKNRYQNALTVCNVALDSVVSDIFGKSSTSIIDYLLEQSGTSINHEEIASKLLRNLKSKEDAVIESVEGYQMTDAQKYRMRLVRAHMDYITAEINDVDKMIENMISSNPDFENAVQFLCTIPGLKRDSAITIISEISIDMSQFSSSKRLCCWAGLTPGSNESAGKKKSVRITRAGVYLKPALIQCAHAAVKSDKSPYRKKKYESLAKRRDKKRAIIAIARMILTAIYQMLSTGEVWNPSDLYKIDMPIPLVEKQKAKAIKQAKPCLPICNTVNHKWKILL

SEQ ID NO: 446571 - protein, 344 aa, unidentified
MKITTVGIDLAKNVFQVHGVNEHGKTVLRKQLKRDQVAVFFANLPQCLIGMEACGSAHHWARKLRGLGHDVRLMAPQFVKPYVKTNKNDAADAEAICEAVGRPNMRFVPIKNIEQQAVLALHRVRQGFVKARTAQSNQIRGLLAEFGLVIPQGIAHIATRVPDLIEDADNDLPGSFRLLVQRLLDQLKEFDRQVHEIESQIVAWHRMNDDSRKLAKLPGIGPITASAMVASIGDAKSFKSGRQVSAWLGLVPKQNSTGGKTVLLGMSKRGDSYLRTLLIQGARSVIYAAQRKERPDGWLSRLLKRRNTNVAAVALANKNARIIWALLSNGREFRADYATAIAVA

SEQ ID NO: 446572 - protein, 419 aa, unidentified
MKRERKTREAEEERYIGLDVHKHYITVGGMNAQQEIVLRPRDVEMERFQTWAESNLRKTDEVVLEATTNTWDVYDTIALLVGRVVVAHPAEVKQIANSRVKTDNQDVIRLVRLLIADIVPEVWVPPVEVRELRAIISYRWRLVKMSTAIQNRMHSLLHRHNIQAPQGKVDTGENRAWWEKLQMSELENLRLKQEIKTLRLVRENIVEVEKELGRLSNSERWGDQAVYLMQIPGVGIIVTMTILSAIGDIRRFESPKKLVGYAGLGAGVHDSGQKHRGKGITKFGRKELRWALVEAAWQAIRSNPGWKAEYEELCKRKHPNQAIVAIAHKLLVTLWYLLNKQEAYRHSNEEDLAYKMLTWAWHMHKTALNGMSNQQFAKYGLIRLGKGENLTRIVRGGLPRRIASKEEVLALMPESYLKQ

SEQ ID NO: 446573 - protein, 456 aa, unidentified
MQQYYLGIDVSKGYADFVILDSKKQAMKENFQMDDTFVGHCHLYDRLHEFYINHPDSKIYAAVESTGGYENNWFNSLIKFQSSFNLETARLNPLGVHANSKADLKRNVTDKISAQNVAEFLIAHSEKVSYQQQDYLASLRKQWGFIKMLTKQSTQLLNQIESLIYSANPELLVYCKDGMPDWILKLLLRYPTAANLSKAKASSVASIPYISSARAKELIATAKQSVASSTDRITGQLIAATAKQILHLKKTIASQTKIMAKDCSLPEVDLLKTFSGINDLSAIGLMIEIQSAERFPSVKKIASFFGIHPVFKISGDGASGFRMSKQGRKEPRRILFMVALTAIRSNPLIREIYQDRVQKGMEKMAAIGLCMHKILRIIYGMLKHNRAFDPEVDRKNREKMAKSHKKVRQDKNRRYQGFDPKAPISRRQKMKRKEWEQSHSDNNTKSGIIAPIPASA

SEQ ID NO: 446574 - protein, 341 aa, unidentified
MESVTLIGIDLGKHNFHVHGQDRQGKALLRKKFSRKQLIEFLANFHPCTIVMEACAGAHFMARQLARFGHEPKLISPQFVRPFVKSNKNDFIDAEAICEAASRPAMRFVTPKNESQQTLSALHRVRESLVRDRVKASNQIHAFLLEFGISLPVGHAAIERLPSVLAEEHLPARLMRVLERLQVHFKYLDEQIADIEKELNRQLAEDDLGQRLMTVPGIGPITASVLAAEVGDGKHYRCGRDFAASVGLVPRQYSTGGRNNLLGISKRGDKGLRRLLVQCARAYMQRLERQRGPLAEWVRSMLTRRHSNVVACALANKLARTAWAIAAHHTEFEMTEAVIAK

SEQ ID NO: 446575 - protein, 366 aa, unidentified
MKYIGIDLHSNKFTCCFLYDQNNRKKLITYNLDSQGIKDFLTHVDRHTSVMVEASTNTFSFVQRIKHHADQVIIANTHKLKLISLVKKKTDKIDAEKLAIVLKMQIKSNQNMFEPVHMPDGLIRKLRSLFTTYRLYRKQITSIKNRIHSLYKQELMPFTKEYIFGKKSKTFLRQLNINPQTDFQLDLLFDELETLEASIQKLTRYIMYLAKPYLFQIDILTSMKGISVITAIALIADISDLKRFKNSKKLASYLRSAPGIDSSNETVRHLSTNKMGRKLSVTLLSQSLNHFRDSNVKLQKWYQTKIDQGKKRGKMRMALCRRVFTEIYQMLKKKEYHHYRNERNHTLKMQAYTKFLNNYSVPEKYA

SEQ ID NO: 446576 - protein, 452 aa, unidentified
MTEKDKISMDIVNPRAAGIDIGSRSHWVAVGQGPNDFKEFGVYNEDLYSIAQWLRENEIKTVAMESTGTYWQSLYAVLIAQGFQVILCNGKFTKNIKGKKTDIQDCQWIQKLHSIGLLSGSFLPDQATEQLRTLCRHRANLLDSAAAASKKMQKYLRLLNLRLDVVVNDICGLTGMAIIQAICNGEKNPERLADLRHHNCKKSKEEIAKALHSNGRQDYIFALKQELEMYEMFQAKIAQCDIEIEKMLNDTIDSDENKKQHYIEKKPYKKVNKNTPKNIDLNLMAYQHFEGVDLMAIEGMSYSTILSLISEVGVDGIKRFSTAKHFASWLRLAPNNKISGGKVLSSKIPKGSNRLKISLRNAANAIGNLKDSTPLSDFFKRINFRKGRVSAISATARKLAVIIWNMVVKGVPYHNPEEYLFRDQKKKLGLLKRIQKQITKFELEITDFQFYN

SEQ ID NO: 446577 - protein, 352 aa, unidentified
MHMIAFDSHKRYTVASVQSMRGKIIKEARIAHVRGSIGRFLEQWDKCSPVAVETIGNWYWIVDEIEHAQMHPRLVHARKAKLMLGMINKTDKLDARGLNRLQQTGTLPTVWIPPLEIRDKRELPRTRMVFAHQRTKLKNRIHSVIDKYGLQDKFTDISDMFGKNGCKVLRECFDLLPEQTRYTLEMLLHHLEEVELQIEKIEKRMEEVFQPDEDIKFLMTMPGVGFILAIVISLEVGDIGRFSGPERLASYSGTVPRVHASGDKIRYGRIRSDINRYLKWAFCEAGSSIAMNRGKWPHRHVSKVYGRVRHRHGHAKAVVAVARHLAEATYWILTKKEAYKERGISRVSKTEA

SEQ ID NO: 446578 - protein, 337 aa, unidentified
MRYIGVDLHSNNFMVCVLSENEEPIFKKYELAALEAFKEFLEAEDRIAVEATGTTRFFYNQVATLVAECVVVNPSQFEIIKKSFKKTDKNDALNLARFFSNGQLPSSRMKNELQAEVNSLATTRDKFVKLRTILLNKIHAHLKGNGYMSRKEAYDHPANLKKVLDLSWSTAVKIELEVIVNEILNLTAGITKLEKEIAKRGAKIDGYENLNSIKGIGNYSAAVLLSVIGDVNDFADENKLASYFGIVPRVSNSNQTQHHGCITKRGSKLARTVLVQCTLTAKRFSPYLKQYYERIKARRGSSKAIIATARKFLGIIYRTLKYKWVFSDFPNFVLAEQ

SEQ ID NO: 446579 - protein, 391 aa, unidentified
MVCVGIDVAKDKHDCCILDSDGMVRADCFTIPNNMDGFKQLLQTIRNCTKKSDKIKVGLEATGHYSYNILGFLLDNDLAVYVMNPLHTNLYRKSLSLRKTKTDRVDARTIATMLLSDVDLKSYTNTAYHNEELKSLTRYRFDKVRERAKLKQSVSRLVTILFPELEKLVPSLHIASVYSLISEYPGAKQVSEVHLTKLTNLLTTASKGRYGKDKAIQIRDAAKTSIGSVMPAKSLELKHTIKLIKELTSEIDEIEDSIQQIMDVLHPPILSIPGVGIQSAAIIIAEIGDFSNFESPDKILAYAGCSPSTYQSGKLTNCYAHMEKRGSRYLRYALYNATKYVCHWNPVFAKYLAKKRAEGKHYNVALSHATKKLVRLIYALQKSGKAYLTAA

SEQ ID NO: 446580 - protein, 409 aa, unidentified
MKLFVGIDVSSQDMKVCVMDVAGETLLSLTVDNNLIGASYLRDQIVDIAQKNLIQEIRIGMEATSVYSWHPAMFFHEDESLKKFKVQVFTINPKLINKFKESYVDLDKTDHIDAWIIADRLRFGRLRLSAVMQEQFIALQRLTRMRYHLVHNLTREKQYFLQHLFYKCSSFTTEVESSVFGNALMELLLEQYSLDEVSSMEILDLANFLQEKGKNRFKDAECVAKSIQKAARSSYRLSKCVEDSIDLLLGTSIESIRSITKQIKELDKAIEKLLDGIPNTLKTIPGIGPVYCAGILAEIGQIDRFDDQAALAKYAGLTWSKHQSGKFQAEETKMIRSGNRYLRFYLVEAANSVQRYEPEFREYYLKKYHEVPKHQHKRALVLTARKLVRLVDALLRNDQIYTPRRKVNN

SEQ ID NO: 446581 - protein, 351 aa, unidentified
MLIIGCDYHPSVQQIAWVDTETGETGERRLKHSDREAEGFYRELKEKGFSVRVGMEATGHARWFERLLGELGFELWVGDPGKIRAKQIKKQKNDRRDAEHLLKLLMKDDFPRLWVPTPENRDVRQLVLHRHRLVGMRTRVMNQLQAIAMNEGIRRKRGLWNKQGRALLESLSLPPWTSRRRQELLELLDHLDPSIEQLSQAIEQEAEKWPEVQRLLTHPGVGPITALAYVLVIGTPHRFRCGKQVASYLGLAPSEASSGDRQRLGHISKQGNAMLRHLLGQAAQSVAHCEDQWRGQYVHLALRRNHAIAKVAMARKLAVRLFWMWRKEWDYQQVKNFGSHVGQLVQSHGVE

SEQ ID NO: 446582 - protein, 388 aa, unidentified
MEARLVDTTSTARNDAPARCLIAIELSKASWVVGVQTPLSNKTSQYRLTAGDWKSLLKLIERIRRQVGGELGRPVEMLSCYEAGYDGFWLHRLLEAHGVRNHVLDPASLLVNRRARRAKTDRIDVERMLRALGRYLRGEPDACSVVRVPSVEQEDARRLHRERHRLIRERVQHVNRIKGLCATQGIYDYEPLRSDRKAQLEGLRTGDGRALPARLKAEIIRELHRLELVLKMVAEIEAERDAIVTEAAPQHLNAGKIKALANLRSIGPEFATTLVGEVFYRSFDNRRQIGSYPGLAPSPFSSGSTDRDQGISKAGNPKARSTMIELAWMWLRYQPDSTLSIWFRQRVGDRKGRVRRIAIVALARKLLVALWRYLETGLVPAGAVFKTR

SEQ ID NO: 446583 - protein, 352 aa, unidentified
MNITTAAADLAKNLITVCAQDASGRTVERRDLRREAFLSWLRRLPADCLVGMEACSASHYWAREMAALGLRPRIMAAEFVQPFRKSRAGKNDRNDAEAIAIAVREANMRFVAVKSVEQQARLARHRMREGWKEERTALGNRIRGLLAEFGVVIPKSQAALGRALAEAMHDERLTESVRVLVRAAREHLEVLGKRIADCDRAIGLACRADPATKRLQELCGVGPTSADAAVATVGDARAFRNGRQFAAWVGLTPRQFSSGGTTRLGAITRRGDAYLRTLLVQGARSALKSALRCAPDRASRLQQWIVQLHGRVGYQKTLIAIANKNARVIWALLAREETYNPEAWKSYATKEG

SEQ ID NO: 446584 - protein, 409 aa, unidentified
MLFVGNDWAEDHHDVEVQDETGRRLGKARLPEGVAGIARLHELIGGFTTEDMTAEQVLVGIETDRGPWVAALVAAGYTVFAINPRQVARYRERHGTSGAKSDAGDAHVLADMVRTDAHQLRAVAGDSALVEGVKLVARAHQNLIWDRHRQVLRLRSALREYFPAALEAFDDLAAADALDLLGAAPDPEQAARLSRSRIAGALKRARRRDVEVKAETIQAVLRSPRLSQPPQLAAAYAATVQATVAVIAVFNTEIATLQGQVEAHFGRHPDVEIYRSQPGLGEVLGARVLGEFGDDPDRYQGVRARKNYAGSSPITRASGKKTVVLARFVRNQRLADALHQQAFCALRASPGARAYYDQLRARGVGHHAALRQLSNRLVGILHGCLKTRTLYDETTAWGHHANKDQQTAA

SEQ ID NO: 446585 - protein, 341 aa, unidentified
MNIVVLGIDLGKTLCSLVGLDREGAVVLRRRIRRASLTAFVEKQSHCIIGMEACCGAHHLARQFDSLGHNVRLMPPEYVKPYVKSHKNDDRDAEAIAEAATRPTMRFVPIKSEEQLDVQTLHRARERLVGTRTALINQLRGVLFDRGIVIARGRPKLSLWLRENLPDNTLLTARMRQLVDDMVDELHSLDHRIKQLDQEFEALAKSDQRARLLRSVPGIGALNATALAAAVGDVSAFAKGRDFAAWLGLVPRQITTGGKPRLSGISKRGSTYMRVLLIHGARAALPYLARMDTQLDAWLQALLKRAKRNVVVVALANKLARIAWAVMSNQRPYEAAMASKG

SEQ ID NO: 446586 - protein, 429 aa, unidentified
MTPLSSTTSPVVRVAIDVAKLTHQVLLELPTGKRRSLRVQNTRIEIERLVTLLRSLDGPCDVAFEPTGDYHRPLAYILGQAGCRLSLVSSLAVARTRDALYNSWDKNDPKDAQVILHLMKTGTTQRYLDPLVTGHQDLQELANTYQQVSLRKVRLQHSIVTHHLPLYFPEAERYLHSSRAEWFTDLLLFTPCPAAVRRYTKAAFVAAAREQIAGRKVDKARWLADFYDTAATSLGLPVSESSEAMRMFRIVLEEYRALCVLRKRLEADVVTRLAHQPDFIRLQTLPGIGPILAMIILAEARDLRRFGCARQFLKYCGFDLCTEQSGQFRGTTHLSKRGNARLRYAFWMAGTVAIRMQQNGFRRKFEDYIRPDPQNADRRRKAYTAVAAKMARVAYAVITTGIDFRRFPEAAKPGGRIPSPAAVEAHATS

SEQ ID NO: 446587 - protein, 343 aa, unidentified
MKNTIVGVDLAKDVIQVCIYTNKKVRSNIEMTPPEFIEFLANYTSLTIVFEACGTSNYWKQKAISLGHDARLISAKLVSVVRQNQKTDKNDALAIIQAALLPDVTFISGKSIEQQQLQSIMRLRELCVKQKTAAGNQLTSLLLEFNIKVSSRNSGLKGAVESTLEDAENGFSFEFRKALSEAWQLYLSVIKSIHTYDECLECAIEGHTDCKKLRQIEGVGTLNAINLYIALGCADLGVFNKGKDASACIGLTPIQYSSGGVTKLGSIGKYVKSSVLRSQLITGAMSAVNHATRRKAKTKKDQWIQEMVERRGKKCTAVALANKTVRTAFAMLTQNTEYKAELI

SEQ ID NO: 446588 - protein, 265 aa, unidentified
MIIIGVDYHPEFQQVAWVDTETGELKEVRLHHPEEAERFYRELAEQQVQVRIGMEASGHARGLERLLAELQFELWIGDAAEIRTKRVRKQKTDRQDAQLILKLMLEDRFPRIWVPSSENRDLRQLLWHRHRMVQARTRIMNQLQAVALNEGLRCKKKLWREPGRQQLESFQLGPWASRRRRDLLQLLDRLNPTIAELTQAIEREAEKCPEAERLRTHPGVGALTALGFVLILGNAERFRCGKQVASYLGLVPLEEKPRKWRWRAD

SEQ ID NO: 446589 - protein, 370 aa, unidentified
MEQRLFVGLDVHKRNVSVGLAEDGRTGEVRFLGDIENTPVAVESLMRRLSERGHVLDFCYEAGPCGYGIYRQLTGAGHDCSVVAPTKIAVAPGDKVKTDRRDAQRLAVLHRAGELTPVWVPDSRHEAMRDLIRARMDAVRQVTTARHQLSSFLLRHGRVYPPNRKPWTKIHSRWLGTQSFDEPAQQIVFQDYVQTVWTAVERRDNMVKRIEELAPDWSLCEFVYALRCFRGLDLVSAATLTATIGDISRFDKPRQLMNYLGLTPSEYSSGGTIRRGGITKTGNREARRMLIEAAWSYRFPAKVAQHKARVLETQPKCVRDLAWKTQERLCKRYRSLQARGKKSTVIVAAIARELAGFVWALGQEMQPSSD

SEQ ID NO: 446590 - protein, 339 aa, unidentified
MSLYCGIDLHSNNHVITIIDENDNRLFERRMPNKLETTLNCLSEYQDDVAGIAVESTYNWYWLVDGLMDAGYSLHLVNTSAVKQYEGMKFTNDEHDAFHLAHLMRLGILPTGYIYPKEQRAIRDLLRKRGFLVRHRTAHTLSAQSLHSRLTGRQASCNVIQGDHAESIYLPGLDDANRRLEMKANLRMIQALHHQIVEIEKTVLNQMKLSPEYIGLKQVPGIGNILALTIALETGDISRFPKAGNYASYCRAVKSCRESNRKKKGEGNRKNGNKYLGWAYVEAVNHMVRFSNDGNRFFQRKLAQKNRAVAVKATANKLAKACFYIMRDKIAYDAKLLFR

SEQ ID NO: 446591 - protein, 405 aa, unidentified
MDVIIERACGLDVHKDNITACIMTPDGKEVQTFSTKTVFLLKLLDWIKENSCTHVAMESTSVYWKPIVNLLESEGIEFLVVNAQHMKALPGRKTDVKDAEWIAQLLRHGLLKASFIPNRTQRELRELVRYRRSIIEERARQHNRIQKVLEGANIKLGSVVSDIMGVSAKDMLRAIADGEEDPEKLANFARRTMKKKKEELELALQGYVNPHQRLMLKTILAHIDFLTAQIEMLDQEIAERVNSYEEDIERLDSIPGIARRMAEQILAEIGTDVKSQFPTAAHLCSWAALVPGHNESAGKRKSTRSKKGNKYLRSALTEAAQSVRGSKNYLGALYRRTAGRKGNKRAAIVVAHAILRIAYYLLTRKEMYVDLGEDYFDKQRQVSIVRHSVRRLENLGYTVTITEAS

SEQ ID NO: 446592 - protein, 417 aa, unidentified
MNTETYGALVTLDWGETEHAFATEVADSPAETGKMPATPESLHGWLEEIHERSGGRPVAIALEGGKSAVVHALLEHPWLTIFPVHPATSDRFRKAFTPSGAKDDIPDALVLLRILKQHRERLRPLKLDSPETRKVAGLVAARRQAVDRRTRIACELASTLKTYFPQALELCGREPATDLMLDFLTRWPELKSLKAARPATLRAFYAAHNSRHSEVVAARLALIAKARALTEDRAVIEPAMLEVKMLVDLLRPLQKNIALIEERIAEAFEAHPEAALFRGLPGAGPATAPRLLAAFGTDRSRLPHASSMQKCAGIAPVKQKSGRSLWIHWRWNAPKFLRQTFVEWAGQSVPKCAWAKAYYQQQRAAGKHHQATLRALAFKWIRILWRCWQDRVPYNEARYLASLQRQKSPLAARLSIT

SEQ ID NO: 446593 - protein, 400 aa, unidentified
MISVGIDVSKGKSTVCILKPYGEIVCSPFEVQHVEKELEGLDSLLKKLDGEIRVVMEATGIYHLPVLTFLEEKGYFVSVINPFAMKKYAKDNSIRGAKTDKLDSTMIANYGIEKWFKLQKHEGDEDTYAELKLLGRRYRYYMELHVKALLELTHILDYTMPGIKKLFNSWDEASGKDKLSDFVERFWHFDIITAQSLDEFVEEYLVWAGEKKYHRSRSKAEAVYELASGGISTLSSGTPSTKMLVQEAVSVLRAVDNSLSRILSRMQELAKSLPEYSTVRSMGGVGDVLAPKLIAEIGDVRRLHSAKALIAWAGIDPPPYESGQFVGSKRRITKRGSSTLRKVGYEVMRVLKSHKAPEDDAVYNYILKKEHEGKDKKHAKIAGLNKFLRIYYARVMAIYR

SEQ ID NO: 446594 - protein, 408 aa, unidentified
MSGTGVEVFGGVDTHRDTHVAAVVDRVGRVLGCESFVADESGYGRMVAWFRTRGTLVRVGVEGTGSYGAGLARYMAAAGVDVVEVMRPNRQRRRARGKSDQIDAEAAAQAAASGQATAVPKSGVGPVECIRMLRVARRSATKARSQAANQIHSLVVTAPEPLKHQLKGMSLKAMVGVCSRSRPGDAQTTVAYAKKTLRHLARRYQALDAEITDLEADIRRLCAEANPALLAANGVGPDTASVLLTAAGDNPERMKTEKSFAALCGANPIQASSGQTIRHRVNRGGNRQANSALWRIAITRMRTDQTTQDYVARRTAEGKNKREIIRCLKRHIAREIHRLLTNPPPTPDCARLRTRRLHAQITLTHAAQQIGTHPSRISALETGRDHNHQLATRYQTWLQTHQPDPSPI

SEQ ID NO: 446595 - protein, 359 aa, unidentified
MEYFAGLDVAMEETAICVIDREGKVMLETSATTDPDAIFTVLKKYAPRLRRVGHEAGSLSPWLQVELKQRGLPAICLEAWHARAALSAMRNKTDKADARGIAHIVRTGWFREVHVKSEESYRLRLLLTQRRNLKRKFLDIENAIRHSIKTFGLKVGKVSRGQFEARVRELVANDPLIAGLTDCMLRARAALWQEYVRLHKVVVVIVRRDELCQRFMRIPGVGPINALSYKTSIDDPHRFRYSKTVGAYLGLTSRRWQSGTSIDIQGHISRAGDGDVRHPLYEAANIMLTRYRGFCSLKAWGLKIAKKRGHKRACVAVARKLAVIMHAMWRDGSEFRFKEPKASTDRTATDAPKLIGVAA

SEQ ID NO: 446596 - protein, 432 aa, unidentified
MTGEPLYRDRVCGVDIGKAQMVATIRVPSEKDPARRAAETRSFGTTKNEVLALADWLRSWQVPAVVMEATGDYWKGPFCRLEAEGFDCVLADAKQVKNLPGRPKRDPADSRWVAACFERGAVTACFVATPEFRIIRLHTRYRRDLTEERTREKQRAEKLLESAAIKISSVLTDLHGVTGRDIMDHLIAGETSPKVLAQLARRQARRKISQLEQALEGAEFFTPAHAALLTVMLARIDRLTADIGQLTAVIERLLAPYEEQLAQAESMPGWGRRSAQDTLAETGVDMSRFPTGAHLSSWAGRAPLDHQSGNRAGRATAKKGNRYLGAVTGETAVAAGRTQTREGARHRRLARRRGTAKACVATGNTQLKVLHKLLSNPGMRYHDLGVDYYERQRDIRRQIAHHVGKLGSLGFEVTLCRIPEPNPDGTGPTQAV

SEQ ID NO: 446597 - protein, 350 aa, unidentified
MKYSATTIGLDIAKHSFYAVGVDKGRHEVLKRKLTRAQVVTFFRAHPPASMGIEACAGAHYWARTLNALGHDVRLIAAQHVSRRVVGNKNDYRDAQVIAELRGNPEMPFVPINTEPQQDIQMLHRVRARLVTQRTALVLQIRGLLGEYGAVFAPGVRSLRQGLAQVLGGEHLSLSASALETFADLYEQLQQLDEQVRGYDQRIQLLAQQDETVARLMAMPGIGPLNGTALLASLGTARHFRAGRIFALNLGLTPREFSTGGKQRLFGISKRGDRYLRTLLIHGARSALRCAEGKPDRLLQWALRLKEAKGFNVAACALANKLARVAWALVAHDRQYQPQGVTVTASTAHE

SEQ ID NO: 446598 - protein, 335 aa, unidentified
MFYSGIDLHRDNCYITTVDDTGNVVKQQRVPNSPPLVLDYFTTLGAEHKTVVESTTGWYWLNDLLESAQIPMVLAHAKYLKAISYAKVKTDKVDSHTLATLLRLNLIPTAHKISPELRGLRDTMRMRLRLVQQRSACYRRDDSIIAKFNAPENVPEQYRLQAAAIDRVAQSLTEQILALEKSLHPFLIPNTDIQHLLNIPGIGKLSAFTIYLEIDGIERFESEKQFFSYCRLVPAADNSNRRMHHHSSKDGNKYLKIAFSDAAVHAIQYYPEYKAFYNKMVRRGNAAIARTIVAKELAKIVYHILKNNEPYRGFKGLPMSRQKSLQWPRLPSPDA

SEQ ID NO: 446599 - protein, 348 aa, unidentified
MSLELRSLLPYPNSCLGTSPHQQERDTKMQSVCGIDVSKDRLDIMVLPEQQCFSVRNDAAGWVELVERLRGFSISAIGLEASGGYERGAMRALLAAGMPARQVNPFKLRQFARASGVLAKNDPLDARMIASFVAIMPTQPAQLRAPAIERLAEMLAVRRQLNAEKVAAENASRLLEDPMLQRLSRRRIRRLAADIEMLDRHLAEIVGTDAALAHRYRLLTSMPGVGLVLACTLIALLPELGRMSRKQVAALVGVAPYAFESGKFKGRRCIWGGRAPVRNVLYMGAMSASNWNPVLKAFHDRLKAAGKLPKVVIVAIMRKMITALNAMVRDDVVWADHLSGRHSVPTAR

SEQ ID NO: 446600 - protein, 320 aa, unidentified
MTYIGIDVSKDSFVAAYPKKSGYSTKTFSNTTSGVRQFITSLPEDCHCVMEATGNYSMLLLYLLQQANIIVSMENPQKIKHFARAMLSTTKTDEIDAKLIAMYGEKMEPAPYKIPSESIILLKQKRTVLRQLKKQLTAMINLQHSLSVLPKQDPTAKVATEQTIKFLRKQISKLEDEITNLSNKEFKRQMELLTSIKGIGENIASALIMATGGFTYFSSAKQISRFLGLCPTYQQSGTSVNVKGHINRNGDTHLRSQLYVIAFSSIRFNTACRETYERLRAKGKSGKVAIVAVANTLIRLAFAVVTNNRPYIDGYVSTLA

SEQ ID NO: 446601 - protein, 376 aa, unidentified
MENDSTLFVGLDVHKDSITVAYALGSGEVEVLGKIGSSQSDIDRLCKRLKSKAPHVRVVYEAGPCGYGLQRRLRAKGFGCMVCAPSLMPRKPGDRVKTDRRDAIKLTRLLRAGDLSAVHVPSVEDEAFRDLARAWSRCRSDLKRARQQLKAFLLSHGVRYTGTANWGPAHRRWLSALSLHNKWQDLAFNELRRTIEDRLAQCQRLEDALREAVQRWHFYPAVLAVQAMRGIAFTAAIGLVSELGDLTRFAHPRQLMAWLGVTPSEYSSGSKRRQGSITKTGNSYARKLLVESAWQYRHAAKVSRDIQRRQEGLPKAIIDRAWDAQLRLCRRFRKLLARGKERNVAAIAVARELAGFIWDIGRLGMAQASPAPESTA

SEQ ID NO: 446602 - protein, 483 aa, unidentified
MKSKRVESNKKASCRPTPNHWHKMNRKQRREMLRRIQSEDLSLEVVHPDAAGIDIGNESHYVAVASTRDSQPVRRFGCTTAELKAMADWLKQCKIQTIAMQSTGVYWMSVYDILEEAGFEVYLVNANQTKNLPGRKSDVQESQWLMKLHTYGLLRNSFRPCQEIRRVRTYWRQRNDLVRAAGRHIQRIQKTLTQMNIQLANVLSDVGGMTGQAIIKAILAGERDPYQLAALRNWRVKASEEEIARSLEGNWQEEQMFVLQQEQDGYQFCLKQMAECDQRLQQYLQQQEDRSQGASLPQEKRKERLKKRRNGNAPQFDMRTELFRMTGTDLTQIDGIDVTTTMTILSEAGWDMSKWKTEHHFVSWLRLCPDNRISGGKIIGKGRLPTNNRITNALRMAASTLRLSHSYLGAQFRRLRSKLGPPVAIKAMAAKLARLVYRMLRYGMPFIDRGEAFYESQHRKLQISYLKRKAANLGFQIIEAPAA

SEQ ID NO: 446603 - protein, 355 aa, unidentified
MISTKYIGMDVHKESISIAVLNAAGKVVMECVVETKASMILQFIDGLRGDVQVTFEEGTSAAWLYDLLKPHVTKLVVCDPRKNKSMREGNQNDKIDARRLAELLRLDHLTPVYHGEHGLRTLKELVRSYLTITRDLARVKSRVKAIYRSWAIPCTGKQVYAQRHRAEWLSKINEPGVRRRAECYYQQLDALRVLRLGIRRDLLAESKKQKAWKRLCQIPSLGPIRAAVLLGILQTPHRFRTKRQLWAYGGLAIETHSSADHRRVDGQLQRSRKNVLVRGLNRNSNHDLKNLFKGAAAVASSKPGPFEQFYTALVAKGMRPEMARLTLARKIATIVLIVWKRGVCFDAQHLKPQTA

SEQ ID NO: 446604 - protein, 419 aa, unidentified
MSFKILKFNCCGLDVHKTWIYACIGITDSNNRTEYKQARFSSFTKGLNELCDWLAKYNCKDVCMESTGKYWIPVFNILEQHEIWVTLSHPKYTKPMKGNKTDRKDAKWICDLYMCGMVKPSFIPPADIRALRDLVRYRFKLTCMITSEKNRAQNCLTVSNLKLDDVFSDVFGKSSRSITEQILQHPGEKFDVSPFVDGRCKTPVEEIQAAVDGAISKEQAVKLRQCLDHIDELQKHISEVEQEILCLSDKYEAALNLIRTVPGFDKNPMTAIQVLSEIGGDMSVFPTAKHLVSWAGCCPRNDKSDRKIKSTRISRAGSYFKPVLVQVANALIKSKKHPEFTTRYKRIKTRRGHKKSIIAICRMILTAIWHILTDLKPYTPEGFLESRPVNKEKVLTTSQALNLLKQRGYLIKDDPSPAS

SEQ ID NO: 446605 - protein, 423 aa, unidentified
MPYRIAGIDVHKKKLAVVVADVEVEDEYQFERRWYGSNPEQLRVLSEWLIEQQIEEVVMESTAQYWKPVWGTLERYWKPRCQSREGAGRMSGTLHLAQALSNRGRRGRKKDFRDAERLVKRLVSQELVLSFVPDTEQRMWRTLTRTRYQRTRDKVRLQNQLEALLEEAHIKLSSLVSDLLGASARRMLKALADGETDPAALAALADQRLRATPAQLHDALGACTELNPVYRRLVKMTLEGLQFVEQQIGQLDQEMASLLRQHQDAVERLAVVPGLGVDSAQQIIAEVGVKAATFPSGEKLSSWVGACPGEEESAGVNRSRHSPKGNRQMRRVLNQAANAAVKHKGSIFEIVYRRLVPRLGHNKTIGVIAHRLCHLIWIILHKGVRYEERGPAVSEKSRQRRTARMVRTLRILGYRVEPLANPT

SEQ ID NO: 446606 - protein, 476 aa, unidentified
MVVPNEEPKKPTKPKKPAKPRKSRERSLPVPVPASAAALQVINPDAAGIDVHSDMHMVCVPADRDANPVRQFGANTADLQEIVAWLKKCRIKTVALESTGVYWIPLFELLESEGFEVYLVEPGQLSRCGARPKTDVLDAQWIQRLHSYGLLRASFRPPDSVLALRAYWRQRQMQVRYAASHVQHMQKAVEQMNVKLPEVVSDITGVTGMSIIGAILGGERDPVKLAQLRDERCQHSEEQIALALQGTWRPEHLFELRQAYELYQFHHRQISECDQQVEAELANFPNRAGEKTRTIRPRKHGRKSNDVRFEAAGPLFKALGVDLTLIEGIDVATALVILGEIGVDVSRFPTEKHFASWLRLCPPQNESNKTNRRHGHRKATNRVTIALRMCARSVGQTMAPLGLFYRRIRSRIGGLGAVKATAHKLACLVYRMLKYGQEYVTQSMEEYEAKVKANMLKALKRKAAAMGFELSPLPTQ

SEQ ID NO: 446607 - protein, 338 aa, unidentified
MTLYGGIDLHSNNSVLAVSDEADRLLYRKRLPNDAGVIVDALAPYRDGIVGLVVESTYNWYWLVDALMEAGYRVHLANTSAIVQYSGLKYANDDTDAAWLAKLLRLGLLPEGYIYPKAERAVRDLLRRRQHLVQQHTANILAVQNLFSRNRGRSISANEVRRLTPESVAELVPDPNLALAIQSTVLAMRGQQAAIDLLEREAWRQTKETQTWRALLSVSGIGRILGLTIVLETGPIERFERVGNYASYCRCVGSTHVSNGKQKGKGNTKNGNKYLAWAYVEAANFAVRYNPHIKRYYQRKRAKTKGVVAIKAVAHKLSRACYHILRDGSAFDVNRAFA

SEQ ID NO: 446608 - protein, 339 aa, unidentified
MHLYTGIDLHSNSSYLATMDENGKRIARRKLPNDAAKIHESLSPFKLEIVGVVVESTYNWYWLVDSLMAEGYKVHLANPSAIQRYSGLKHADDDNDAFWLADMLRLGILPEGYIYPKEERPIRDLLRKRGHLVHLRTSLILSLQNIVARNCGIGIRANDVKRLKEDCVAPFLEANEDLAMAGQVSKDSIDFLTRKIRSIEHVVEEKVELKAPYKHLLSMPGIGRVLALTIMLETGPVSRFPKVGDYASYCRKVGSNWISNGKKKGSGNKKNGNKYLAWAFSEASEFARRFDPKARAYYNRKMQKTNFMVAHCALAHKLARAAYYVMKDEVPFVAEKLFS

SEQ ID NO: 446609 - protein, 433 aa, unidentified
MQDVQDEPLFCERVAGLDIAKAEVEVTIRVPSDTTAGRRQQETRTFGTTRRELESLGDWLACWGVTRIGMEATGDYWKPVFFLLESRGFDCHLYNAAQVKALPGRPKTDRADSIWLARITERGSVCSSFVPPEPIRALRTHTRYRRHLTQARTAEKQRVEKLLEEGHLKLSSIISDIHGVSGREMLNAIAAGQRDPRVLAQLARGTMRAKIKRLEEALDCAFFTGEHAAVLAMMLATIDHYTTQIDNLTAKIEVLAEPYLHQIRQLDEIDGVGPVCAQDIIAEIGTDMTVFPTAPHLVSWAKWSPQVKQSAGKRKGSNATGRGNPYLSAALGEVSISAGRTQSFLGAKYRRLARRMPKKKALVATGNSALTIIHALLSDPAARYTDLGPDYYEQRMHARRQARNHVRSLERLGYKVTIQAINPDTGELLAAAG

SEQ ID NO: 446610 - protein, 343 aa, unidentified
MGDVITIGVDLAKSVFQVHGVDSEGAVLVRRQLRRRQVLPFFEKLPPCLVGMEACATAHHWGREIERLGHRVRLMPPRYVKAYVKTQKNDAADAEAICEAVTRPTMRFVELKTCEQQSILVLHRTRQLFVRQRITLINAIRAHLAEFGIVAPIGRNGVEKLLQTIGDGQDARIPDVARTCQEVLAMQLQLVNRHILETDRRVLAWHRSNEASRRLDRIPGIGPLIATALVASVPNPQAFKSGRDLAAWIGLVPKQNSSGGKERLGGISKHGNRYLRTLLTIGALSVIRYAETHGTAHRPWLTRLLERRPAKVAAVALANKIARMAWAVMARGEAYREPKVQTA

SEQ ID NO: 446611 - protein, 337 aa, unidentified
MKYSGIDLHSNNCVVLVTDDSDRVLFQRRLPNRLQEVLDALAPHRGELAGVVVESTYNWYWLVDGLQENGYRVHLANTAAIKQYDGLKHSGDVSDAAHLAQLLRLGILPTGYILPKAERAARDLARKRLQLVRCRTAQVLAVENLFARNTGARPSSNVVKRFAPEDIERSGFDPDVTLAIQANVGVIRTLNQEIERLERRLQERVTLHPEFALLKSAPGIGETLATTIMLETGTVARFAKVGNFSSYCRCVDSTKVSNGKKKGEGNTKNGNKYLAWAFIEAANFAVRFCPEAKRFYERKKARTNGIVAIKAVAHKLARACFHMLREQKPFELKRCFA

SEQ ID NO: 446612 - protein, 519 aa, unidentified
MTTTRVRRPSRRRTPTAVGKPRGVLHPRVQQVGPEHFGIVCFDCHKVSSKFLLADFYGRHLIPPTVVQHNRPDLDSAIAQIRLAFEQHQIRDGVVAIERTGRYHRVVQRAFAAAGFETRILHPFVTKQYRQPVDPGNKTDDADLAAIHRATVTGCALLEATRDEAWTTLQLVIRHRRDLVCKGAALNCQIRDHLEAALPGYAACFDKLWESPLPWHLLRHYPTARQLRAAGVTALCHSLRQASIRFQQRTVQAVVDWAEQAAPGDVAASQHLRIALALYDDRQRKTQEILALEREIAGRLVQTPYVLLLSFPGINVVSAADFAGEMGPIEHYANAKSITGRAGLRPSRYQSDHVDKANGPLVRNCNRALRAAILGIADNLIVCNHHFQALATQWAAQGKDPRHTRVKVALRLCRIAFQMVAGRQVFRHPSIQGRHYILNKLTAFQRAHDTGMVDVLHDLQAAIGQVPPREHAAEANPLQEELQRIHDGHRRGPQVLGDILPIVLARLGVGVVQSEESGE

SEQ ID NO: 446613 - protein, 414 aa, unidentified
MAKELDKGGGLDIHKKSVAAAIASEDGSILEAEFGMTIDQIYQLKKWLLENGCKRVLVESTASYWYRIDQVMRDEINVIVVNPRDIKSPSSKKTDKIDARKLASRCLSNYEIHPSRKFTSEQLSLKRLTRSRQQYVQTRSKLKNQIHKVLDAAGITLSIFISDIFGVSGRYILNCLVARKSLKELIPGIPTNRIRKRAQELPEHITVQLDDTQVFLIRKALHTMDDIQKTIDEIDAILYERADAYIEDLKILMSVPGVKFIAAITILAEIGNYKDFGDGDQLACYAGLTPDVNNSAEKNIIGKITKHGPKGLRWILNQVAHGASKTNKSRLKKVYLRLLRRKGKPKAITALSRKILSIIHHLLVNREMWEEEGFKKKRLDFDFDRKSSPSQLTWLDLVVNNVVLIGKGKPGGGG

SEQ ID NO: 446614 - protein, 355 aa, unidentified
MSQEKYIGMDVHQATISVAVRDVHGKLIMECVLETKAATILEFIQGLRGTLALTFEEGTSAAWLHDLLKPHVSRLVVCDPRKNALLKDGNKNDRVDARKLAELLRTNQVKSVYHGKHGTRALKELGRSYLTVTKDVTRVMNRIKSVYRSWAIPCAGTSVYTPRHRGDWLEKLVEPGVRVRAEHLYQQLDSLQPVRLEARRELLLESHKHAAVKLLRQIPSIGPIRAALLVALLQTPHRFRTKRQLWAYSGFAVEVHDSGEYRWVRGKLQRNRERITVRGLNDNHNQDVKNLFKSAAISASTRPGPLHDFYVARIESGMRPTMARLTLARKIAAITLTMWKKGVSFDPKQLQPQAA

SEQ ID NO: 446615 - protein, 342 aa, unidentified
MKITTVGIDLAKNVIQVHGVDERCKAMLRKQLRRNQVTAFFANLPACLVGMEACGSAHHWARTLESCGHTVKLMAPQFVKPYVKTNKNDTADAEAICEAVGRPNMRFVPMKNVEQQAVLSLHRARQGFVKARTAQANQIRGLLAEYGLVIPQGIGHITKRLPEIMEDGENDLPGAFRLLLQRLGDHLKELDRHVGELEMQIQTWHRESDASRKLARIPGIGPITASALVASIGDAKSFDNGRQLAAWLGLVARQRSTGGKPTLLGISKRGDTYLRTLLIHGARAVIRVAERKPSYEGSWLARLMDRRNKNVAAVALANKNARTVWALLAYDRNYEADYGTAK

SEQ ID NO: 446616 - protein, 337 aa, unidentified
MKTTCNDVLGIDVSKKKLDLALLINGKLKAKVFDNTSAGHRALVAWLRDSKASLPTLHICMEATGVYYEAIATTLHAEGFKVSVVNPACIKGFGSGENIRNKNDEIDAGLIARYCAAMSPDPWTPPPLEQRQLRAWTLRVQSLKDIRQQEQNRIEAHIVAGLHDVADNVTEHVKWLDAEIRKLQADIDDHIDRHPGLKSDAALIASIPGLGMTTVARILGHLGDIRRFKNAKAFAAFLGVTPKQRTSGTSLKGRTMLCKTGNTSLRAALFMPSMVARQHNPILRQFAERLLANGMAKRAVISAVTHKLAHLIYGVVRTGKPFDAGYLHKNLAIQDGI

SEQ ID NO: 446617 - protein, 329 aa, unidentified
MVSSSPLPVVGLDVSKATLAVCYQLDHQVRHLEVSNDKAGFAELLQVCGAQSLFVLEATGTYYLALAYYLHEQGGQVAVLNPLIIRRFIQMHLGKSKTDRKDAHWLLRYGQQQAVTPWQPAESVLVECRQLEQVTEQLLKQKTMVSNSLEALQRQPVISPLAQQRLQQTWQLLDDQVQALEAELLSLLEARFSQEMALLRSIPGIGRKTAGLLLLFAGGFTRFDNYRQLIAKAGLSPREYTSGSSVRGKVRITKMGGGLIRGKLFMCSFAARKFNAACKALYNRLIAKGKNGKVALIAVCNKLLKQAFAIVKSGVPYQADFRSKFTLNP

SEQ ID NO: 446618 - protein, 418 aa, unidentified
MSDSKFLYVGIDVSKASNQVYAMDSDEKKFLSFSSPNNSEGASAIEQRLFEVLVKFSFTDVVIILESTGMYSYHIAVFLAASELLAKFNVLVFNINPKTSCNYRKTFCDLDKTDPKDSFLLADMARSGKYKQFTPVRGSQKLALQRLTRHRKHISELIGREKCYVLNNIFLKFSAFDSKIDGKSVFSDTFSASATEILSQFKTPEEIENSSIEDLVAILAKASKNRFENTVEVANLLKKCARLSYRLNKAAYDPINIAIASSLCLIRTFEKQLESIDKEILNLIKGLQSNEYASLISIPGIGPVFAAGILSEIGSVKQFANDSALAKYAGITWRTKQSGKFAADETPMTKTGNNYLRYYLLEATSMAILHNPEYRAYYLKKREEVTTHQHTRAVALTSRKLIRLIYGLVSKDQLFASI

SEQ ID NO: 446619 - protein, 491 aa, unidentified
MSRRKHKPVPTAPHAPRTPTAPLPHDRGPTPPRPTTPTEHYRDSLPVRYRHAAGIDVGARTHWVAALGAAGTLEVAEFDAYTDGLLALVDWLRQRHVTTVALEATGIYGDPLFDLLQAEGFEVIQVNPAYTAQIKGRPKTDKLDCQWIQRLHAHGLLPASFRPAADIAVLRCYLRQRAELLRAGARHIQHMQKALELMNVKLTEVVSDVTSLTGLKIIRAILAGARDPVVLGRLRDKHCKHPTDTFARALHGSWRPEYLLALRQALASWEHYQRQQRELEELIAAQLWHMRKAQVLPPLPPKPRQRGRGANEPRFDVRQALYYVTGVDLTELDGIAEVTALVVVSEIGLDMSRFPTVKHFCAWLGLCPRWRKSGGRVISSRTRPGKGRAARALLLAARSLWHSRTPLGSFLRRLKARLGAPQATTATAHKLARLLYRALQTGRVPAKESEAVYAERLRQQAVASLQKKALRLGLQVVAPGEVVEPPPASPT

SEQ ID NO: 446620 - protein, 280 aa, unidentified
MEKSTVIGIDLSKRFMQVCTIDGEGNAIEEVRVPRDRLAETVSVHRGAVVAMEACGGAHHWGRTFERLGHEVRLIAPYVAKAYRDPACKDDRRDARAIAEAGSRPHARAIPVKDAQTQALQSLERIEALYARQRTQLGNALRGLLTEFGIVLPKGPGHLTRRVPELMASGAWAAVPSTLQDALAELFAQFLAIGERLAEAKKRLVSAAAADPRARLLTSVPGIGPLTAAGFVAAVADAARFECGRDLAAWLGLTVTATSENASAPLSAFMRPYHSNTPTL

SEQ ID NO: 446621 - protein, 344 aa, unidentified
MEHFAGLDVSVKETSVCIVDEAGRITREVKVASTPEALMQVLRAPAYHLKRVGLEAGPLSQWLFGALAEANVPVICVETRHMRAVLKAQINKTDRNDARGIAQMMRAGLYRPVHVKTLRSQKLRMLLTHRKLLQSKAIAIENDLRATLRNFGLKVGVVGTAKFEARIKELVGNDPDLVLMVEPMLIVRRVLREQLAILHRHLLALARDDGVCRRLMTVPGVGPVVALTFRATVDVPARFQNSRAVGAVFGLTPCKHQSGESDYTGGISKCGDEMMRMMLYEAAQILLIRATKWSWLKSWAMQIAKRRGVKKAIVALARRLAVIMHRIWIDGTEFCWIRQEAVAA

SEQ ID NO: 446622 - protein, 405 aa, unidentified
MVDIMVSDFKKGRYNLMKIFVGIDIAKLNHFAAAISSDGEILLEPFKFTNDTDGFQLLVSKLESFDKNSIIIGLESTAHYGDNLVRYLVAEFYQVCVLNPIKTCQMRKNNVRKTKTDKVDTFVIAKTLMMQDDLRFITFFDLDMMDLKALGRFRQKTIKQRTRLKIQLTTYVDQVFPEIQYFFKSGLHQHAVYALLKEAPSPKEIASMHMTHLANLLKVNSHGHFTKELAKELRVLAQKSVGANDSAISIQITQTIQQIELLDSQLEKIEAEMTDIMKFNDSVIMTIPGIGYINGGMILGEIGDIHRFSNPNKLLAFAGLDPSVYQSGNFQAKTTRMSKRGSRVLRYALVNAAWNVVRNNATFKAYYDAKRAEGRSHYNALGHCSGKLVRVIWKMLTDEVEFNLE

SEQ ID NO: 446623 - protein, 343 aa, unidentified
MKLSRIGIDLAKNVFQLHGVDRHEKAVWKRRLKRDQWLKAVFNQAEPGCEIGMEACAGAHHWARELESQGYLVKLIAPQFVKPYVKSNKNDANDAEAICEAMSRPHMRFVTVKSVEQQDIQATHRIRSELMTQRTAKSNQIRGLVTEYGLVAPLTLRALRAAIPCWLEDAENGLTDHFRSLLHGLWSDLSALDDRVLELDQTILKIANSNEITRRLQQLRGVGPMVATALIATVGDARQYHKGRQMAAAIGLTPRQHSSGGKSRLLGISKRGDVYLRSLLVHGARAVVSQAKHRDDRLSRWVTGIAQRRHPNVAAVALANKTARMAWAMLRNETNYDPDFATS

SEQ ID NO: 446624 - protein, 351 aa, unidentified
MKSSITIGMDMGDQKHNICQLSEAGEVIETAAIANTAPAIKDYFEGIKPSLVALEAGTHSGWVSRVLEELGHEVVVGNPRKLRAIWDSDEKDDERDAEMLARIARFDRKLLYPIAHRGAKVHADLAVIKARDMLVKSRSMMIAHCRGSVKSLGHRLTSCSADCFHKQLAEELPEELKSALEPMMKSIEELTKRIRHYDRQITKLSVEVYPETRKLRAVSGVGPITALAYVLTLEESTRFTKSRAVGAYLGLVPRRDKSGQTDKQLPITKAGDSYLRRLLAGGAQYILGPFGPDCELRRFGLKLAARGGKNAKRRAVVAVARKLAVLLHKLWAADVAYDPFYSQSLKKKKAA

SEQ ID NO: 446625 - protein, 344 aa, unidentified
MSEAIIIGLDIAKYVFHAHGVDGRGRAIFSKRITRRKLLDFFVAQPSCTVALEACGGGHHWARLLTQLGHEVRLIPPAYVKPFVKRQKNDAIDAEAICEAAQRPSMRFVAVKSEQQQAAGLVFRTRDLLVRQRTQLINAIRGHLTEYGWIAPKGPSHVAMLADLIEEEEMASSLPEAARAMFRLMLDVLAGLDGKIADLDKEIARRAREDEVSRRLMTIPGIGPISATAIAALAPPAETFAKGRDFAAWLGLTPLQRSTGGKRKLGATSKMGERTLRRLLIIGSSAVVFQASKRGTPRGSWLEQMLARKPRMLVTVALANKMARIIWALLVKQENYRAPVAAKT

SEQ ID NO: 446626 - protein, 342 aa, unidentified
MEKVSIIGLDLAKRSFQAHGALADGGVGFRKKLSREKVLGFFAEQPRCVVALEACGSAHHWGRAIGDLGHEIRLIPPAYVKPFVKRQKNDATDAEAIAEAASRPTMRFVAVKSEGQQARAMLFRTRDLLVRQRTQLINALRGHLSEHGVVAAQGPANVKVLEEAVEDQTTSLPLLVVELARVFLDQIEGLSKTIAKLEKVTAQEAIGGETTRRLQTMPGVGPITALAIETFAPPMDVFKRGRDFAAWLGLVPRQQSTGGKQVLGKISKMGQRDIRRLLIIGAMAVVRSAVRKGAPEGSWLQRMLARKPKMLVAIALANKMARSVWAMLAKGEDFRVPRVAAI

SEQ ID NO: 446627 - protein, 355 aa, unidentified
MDHYAGIDVSVEHSSLCVIDDKGAIILETTVETEPEAIAKALEPFGKSLRRVGHETGSLAPWLHKTLRAEGLPVVCMEAAHTRAALASMRNKTDKNDARGLAQILRTGWFQPVYIKSDEAYRMRLLLTARRNLKRKFLDIENAIRHSLKAFGIKLGAVSRSRFETAVRAHLSDDPMLTGLVDGLLRARSVLWAEYGKLHKLVVRIVGRDPLMRRFACVPGVGPVTALSFRAAVDDPHRFQKSRTVGAHFGLTPRRWQSGTTIDYGGHISKKGDGEVRTTLYEAAHVLLTLKRGKDPLKSWGLKIAKRRGHKAACCAVGRKLAVILHAMWRDGTDYGTPLTVAAPTPARAMIARKG

SEQ ID NO: 446628 - protein, 414 aa, unidentified
MDIVHYRCAGLDVSKRDAKVCVRVQEPNRAKATVTVTTWGSVTNQIMALREHLIEQHVTLVVMEATSDYWRPFYYLLEDGPFAVLLVNARHVKNLPGRKTDVSDAAWLAQLGAHGLVRGSFVPPPPIRALRDLTRTRTTLVRERAREIQRLEKLLEDSGVKLSSVATQITGISGRAMLDALVAGERGPDVLADLAKRRLRSKIPELTEALTGHFNDHHAFLVKIHLDLIDQHTKAIDEITQRVEEAMVPFRAARDLLVTIPGVSTTVADVIVAETGADMTRFPTAGHLASWAGVCPGSNESAGRVKSTRTRPGDPYLKGALGIAALAAARSKGTYLSAKYRRIASRRGPIKAVVALEHATLVAIWHMLTTGETYRDPGEDYFTRRDPERAKRRALNQLRNLGYTATLQPTAEVA

SEQ ID NO: 446629 - protein, 347 aa, unidentified
MLHAGLDLSRKKVDVCLLSDEGEHLDQLAAPPDADGLKTLARRIDEVHREPVCAVIESMTGARLVHDTLEQAGWEVEIADAQKVKGLAPLACKTDKIDSQVLATLSHRDLVPAIWLPDPRVREERELARFRLHLVKHKSALKNRIHSTLINFGKPCPVTDLFGVEGRRLLERLQVPEPWRGNITASLALIDDLERQIAEINTRLREGHADHPYIALLLTAPGIGWVLAFTIAAEIGEIERFDSPTKLTGYTGLCPRVNQSGEKDRRGPLTKHGPRYLRWAMLEATMHALKHPAYSERYQRNKRRLGKQRGAKVAQIDIARRLTHAIWHMLSRKEEFAPRGAAFRLAA

SEQ ID NO: 446630 - protein, 350 aa, unidentified
MIIIGADYHPGFQQIAYVDSETGELQERRLQHREEAEKFYRELAAQQMKVCVGMEASGHARWFERLLSELKFELRIGDAAEIRTKRVRKQKTDRQDAQLILKLMLEDRFPQIWVPSWENRDLRQLLWHRHRMVQARTRIMNQLQAVALNEGLRSKKRLWREAGREQLLAIRLAPWASRRRQDLLELLDRLNPSIAKLTEAVEQEAEKCPEAQRLMTHPGVGPLTALAFVLVIGTAERFRCGKQIASYLGLVPSEDSSGERRRLGHISKQGNSLLRFLLVEAAQVTVRSNQEWRSKYYHLTMRRGRKIAKVAMARRLAIRLYWMWRQGWNYQQLTKFGSYAGQPGNPHGVQ

SEQ ID NO: 446631 - protein, 391 aa, unidentified
MIYVGIDIASEKHDFFMIQAETGITFSKSSITIKNSDDGYKKLHESISAFCGVTGDSQIRIGLESTGIYHTNIINFLLSQNYQVMMINPILTNMARKASKIHCPKNDNLDSQTICKYMIDNSYKFSPYTLSLYHNEALKSLSRKRFYIAQDLRKAKLAVNSLVQQIFPEFKSFFSNIYGDSAIAILKEYRTPKNLAKAHTKKVASFIHGRCKCTAEQLIAAAKASVGISEPHLAFQLTDAIEEMEHIQKRIKSYDAQIKEYVDLLCPNLLSIPGVGYTTAGLIAGEIRDIGRFHSAESLISYSGVDVTVYESGKYKAKHLMMSKKGSKYLRYALFQVARIIWQHDPVFQAYYNKKKAEGKHYYVILGHIQKKLCRVIYSILKSGSLYSSAS

SEQ ID NO: 446632 - protein, 392 aa, unidentified
MIYVGIDIAKDKHDCFITNSDGEVLFKSFTISNNRDGFETLFQKIQSVSDDLTKVKVGLEATGHYSYNLLGYLLDKGLPTYVINPLHTNLYRKSLSLRKTKTDKVDARTIASMIMSDVNLKSYSDTSYHNEELKSLTRYRFDKVKERAKLKTSVSRLICILFPELEKLVPTLHMASVYALLSEFPSAHAVASAHLTRLINLLSQSSKNRYGKDTAVMFREAARNSIGSNMPTKSLELKHTIKLIQELTSEIDEIEAAIKQIMDEEIQSPILTIPGISYRMGAMIIAEIGDFCRFDSADKILAYAGMSPSTYQSGQLDNCYSHMEKRGSRYLRYALYNATKYVCHWDKSFGAYLEKKRSEGKHYNVAISHAAKKLVRLIFAMEKSRKAYLPTA

SEQ ID NO: 446633 - protein, 358 aa, unidentified
MAVTGGTRRNVGGVDTHKDLHVAAVVDEQDRVIGTRSFATTRQGYRQMLAWMRSFGELQRVGVESTGSYGAGLLRFMQQAKVAVLEVTTPDKHDRRRRGKNDDLDAQNAAHAAFAGQRTVTPRSRDGMIESLRVLMACRKTAVSARRVALQMIHNTIVCAPDGLRDQLRSLSRMPLVRTLASWRPDLTAYRDLDSAYRIGLKSLARRYLELHDEIAELNVMIAAIVDELAPNLVARNSIGRIGAAQLLLTAGDNPERLRSEASFASLCGVSPVPASSGKTVRHRLNRGGDRAANSALHIIAIGRLRTDQRTKDYVARRIAEGHSKLDAIRALKRYLAREVFTLITQRRREINATRIAA

SEQ ID NO: 446634 - protein, 346 aa, unidentified
MGATCGIDWASDWHDVHITDEHGMLLVAEQFSHDERGISALIELLRSSEVECCAIERPDGLLVGRLLAAGIVVLAIHPNQVKAARDRYRAAAGKNDRFDAFVLCELARTDRHRFPVLAPSSDETLALKALVRTREDLVDARVALANQLRAQLQAFWPGAERILTDIDSPIGLAFLERYPSPVDARSLGEKRLESFLARHAYCGRRAPTELLARLRNAPNAIVGELEQDARRSAVIGLVAALRPIVEQISQLTSQIAGATRAHPDGAIFLAFFRDSKSVVTAAGLLAEIGDNRTRYPTNDSLAADAGQAPVTIQSGKRSNATFRWACDKRLRKHMSVLANSTRHWHP

SEQ ID NO: 446635 - protein, 459 aa, unidentified
MTWRLEPERETEPDDQVHHELLPRARGAEWSGNRSLHQPPKRKPQGEYTTMDVIYSHVCGLDVHKKTVVACVLTPEVKEIRTYATMTDDLLQMVDWIKEQSVTHVAMESTGSYWKPIYNLLEASGLSPLVVNAKHIKNVPGRKTDVRDAEWIASLLQRGLLKGSYIPPRDQRELRELLKYRRSLIQERAREINRIQKVLEGANIKLSSVATDILGKSSRAMLEAIIAGEEDPEALSLLALGRLKNKREELKRALRGLIGPHLRFMLEQQLRHIDALTQLIAALDEEIERQMRPFDLPLERIRNIEGLGKRTTQEIIGVIGTDMNRFPTAAHLASWAGVAPGNNESAGKRRSGRTTKGNPLLRSALIEAAHAAARTKNTFLSRLYHRLAARRGSKRAIVAVAHRILVIIYHLLKEDQEYRPLSPTYYEKRRREQIKKQAIRKLNEIGYKVVELAEIEQGA

SEQ ID NO: 446636 - protein, 360 aa, unidentified
MRQSNKNDFSGQNIYVGIDVHLKSWHVTVMTDYGFKRKHSQPPSAQALFEHLSRNYPGGTYRAIYESGFTGFSTYYALLPYGIDCVIAHAADIPTGQNESVMKSDAVDSEKLARTLREGSLRNTVHVPSRDILDHRGLVRYRKRLQDTLSGYKSRIKHLLYSNGVTIPESHSSSCSHWSRRFIRWMQEDVRLLSPTRRTLERQLEHIEALRREVLSITAEIRMLSRSERYEGKVDLLRSVPGIGLITAMTLAVEIEDVGRFPSQRDFASYIGLVPTCRNSGEKVRTGEITFRGNNRLRNMIIESSWVAIRMDRDLAAAFGRYCARMKPQNAIIRIARKLTNRIFAVLKSCKPYEYDKCCL

SEQ ID NO: 446637 - protein, 354 aa, unidentified
MESVTYVGLDVHKSVVVATAIDSSGNRIDQRKIEPIDSELTEYLRGLPGEKRVAIEATSVWERYFDAALQAGSFPVLSNPLKTRLIAETSLKSDRVDSEALATLLRLNALPTAYAPPPEIRSLRRLVRDWVFFQRKLVAFRNHTYAILLAKGIPHSPGILSRKRSRETLRGRLPEIDRGLDGIRALEALLAPIEKDLEAAAEGSREAQLIRTIPGIGALTAVTLAAFLTPIERFRNVRQVIAYCGLCPTNHQSADTSYQGRLRPDCNHLLQWILVEASWQHRARVRTGLVARAGKRAGRRHSRGGGAVTAAQRLVQLVYAVLRRGTPYTAHAPERLRHCPDPATPVSQSAVARA

SEQ ID NO: 446638 - protein, 352 aa, unidentified
MELLSTIETKEEETEMKITTIGLDLAKSVFHVVCFDARHQEVGKRMLRRNQVREYFAQREPCVVVMEACAGAHYWGRELGKLGHTVKLIPPQFVKPYVKGNKNDYNDARAIAEAATRPGMRFVGIQTVEQQDIQALHRLRAQQVKQRTALCNQLRALVAEYGIVMNKGVAALRRGIPGLLEDAENGLSEAFRALLSRGYEQLLELEEHIDDYTRQVEAHSRQNEQTRRLQTLPGFGPIVASVFASVVGDGSAFKRGRDVSACLGLVPRQHSSGGKEVLLGISKRGDKYLRSLLIHGARSVVLHAKHKEDALSRWVNRIRERRGTNKAAVALANKLARMGWALLRHETVYRPA

SEQ ID NO: 446639 - protein, 481 aa, unidentified
MRRLMGIDLGIASAHTVRVLDEAGREICRRRCEPTVVSLSAVEAAALAGAEAGTRLEVVMEPTGPAWLPVAVFFIGRGHSVYRVASAKAADLRRFLSRHAKSNGIDADTLARLPLVDPSGLRALQLPSAERAALDRRVRACDRLTRAATQHKVRLRDLVRQLMPATPLGTDISRSDLAVLQQFADPRVLLAAGLATLTEVIAEASKNRLGVDRAQEWIDAAAAAVELYRDYPAMPYQDLAAEVASEIRLLDAIEAELADHAEQREHAYRWTDLGQLARSLPGLATISAPVLAAVMGNPARFPTGAHFKAYLGLVPRASETGNTDRKGQPMSKAGSRLLRTTLIRAADNARRQDPQLAKIYYTMMTERGAEHIKALCIVAAHLAERAWIVMNRQMPYVVCDTTGNPITTEEAKKIIADRWTVPAAVRAQRRSTKTKAGKAPQQVLTGHDKSDARSADKTRRPSPRRSSPPAPDPVKPTRHGH

SEQ ID NO: 446640 - protein, 406 aa, unidentified
MIFVGLDWSEAHHDVCVLDDQGMVLAKGKVSDDVSGVGRLHAMAAEHAEDPSEVVVGIETDRGLLVGSLVQAGYRVYAINPLAASRYRDRHAVSRAKSDPGDAKVLANLVRTDRQNHREVAGDSELAEAVKVLARAHQNLIWSRQRQVNALRNTLREFYPGALRAFTTSQLATIEACSVLAMAPTPSWARDKLTLQRLRRSLSASGRKRNLDRRAGQILHALQAPELSAPALVEQAYGDVVGSLVVVIDGLTHQIAKLEAELAERFEGHPDAEIITSLPGLSSVLGARVLAEFGDDPTRYQDARARRRYAGTAPITRASGTRLVVLARVARNRRLFDACYLWAFSSITTSAGARRYYDAHRARGKTHHQALRALANRWIGILHGCLTRHEPYRENVAWVAPVEAAA

SEQ ID NO: 446641 - protein, 348 aa, unidentified
MTTTPLASIGIDIGKEVFHVVGFGTDGKIAFRRKIKRLSLVETFKRLPPSIVGMEACLSAHFVSRSLRQLGHQPRIIPAIYVRPFVKGQKNDYNDAEAIAEAALRPNLRVVREKTQDQLDLQALHRVRSRLVSRRTATINQIRAFLIEQGIAVRTGATALRNSLMAILKDRQDEISPRMRDLIAGLYEDWICLDERIETIAGEIETIGEKEANCRRLMSVPGIGPLISTAVVAAIGTGEAFERGRDFGAWLGLVPRQYSTGGRSILGRISKRGSKYLRTLFIQAANVILMRPQNWERFSFGTWLLNAAPRLHRNKLATALANNLARIAWSILRNHKTFDASRHEVTAI

SEQ ID NO: 446642 - protein, 342 aa, unidentified
MKFYCGIDLSARDCQVCVIDEQLKVLVQQKLGNELPKICRLLEPYKANLKIVVESTFNWYWLIDGLQAEGFEVVLAHTLGLYLITGAKVKTDRRDAYSLAKLLLVGAVPTAYIYPVETRPVRDLLRRRMHLVQVRAGEYGSLRRLLLRQGILSSKQQEIKTATEAELEQWFEHPLVRLHASQELRRIALYSQQIAELEKTILALAQTAPSYDRLLKLPGVGQTIALTILYEVGELTRFANPKVFSSYCRVVPGIAQSGSVSGRGRASKQGNHYLKAAFSQAAVHAVRCYPKVRRYYERQLKRHQGRGRQMICYNIIAHKLAQAAFHVLKEQIEYREELLFGP

SEQ ID NO: 446643 - protein, 343 aa, unidentified
MDHFGGLDVSVKETSICIVDDTGRIVKEVKVASEPEALLKVLGKPAYRFKRIGLEAVPLSQWLFSALAEAELPVVCVETRHMQAMLKAQINKTDRNDARGIAQMVRAGLYRPVHVKTLRSQKLRMLLTHRKLLQSKAIAIENDLRGTLRNFGLKVGMVGKVKFESRIKELVDNLPDLALLVEPLLIVRRALREQIIILHRRLLAIVRSDEVCRRLMTTPGVGPVVALTYRATVDVPARFRKSKSVGAVFGLTCSRYQSGEIDWSGRISRCGDEMMRVMLYEAAQSMLRSKKWSWLKAWAMQIARRRGMKKAIVALARRLAVILHRIWVDGTEFRWTREAVPAA

SEQ ID NO: 446644 - protein, 344 aa, unidentified
MSTIKVVSIDIAKSVFQVCVWMADGSVAWNRKISRQKLLHTMRQFPPQTLIAMEACSTSHFWGRTLISMGYDVKLIPTQHVKAFARHQKNDANDALAICETACRPGIHFVSVKTTEQQDIKALCSARQLIVEQRTALANQLRALLAEYGVIIPAGLQRLQQQLPEVLEDGDNTITFTLRRLLSLLREDMQMLTERIDVLDKELAELSSQQVAYHHLLTIPGVGPLIAAAVVSEVDATQFSSGRELSAWCGLVPRQHSSGGKQRLSSMTKNGNRNLRTLIIHGARAVMRCVQKRDDSLGRWVKAIELRRGFLKATVALANKLTRIIWRVLTDSVDFSMNRAFAGS

SEQ ID NO: 446645 - protein, 402 aa, unidentified
MALVFAVVLSLLILEDVMPRRKPASSQPDPATAALLQTLNPHAAGIDIGATELWVCVPPSAVASPSAPSAPAVLPPHIRRFGAFTADLHTIAAWLRQCQVTTVAMESTGVYWIPLYDLLESAGFQVLLVDPRQVQRAPNRPKTDVHDCQWIQRLHSLGLLTAAFRPEEPIRVWRSYQRHRASLIEDAGRHLQRMGKALEQMNVKLPEVVSDITGLTGMGILRAIVRGERDPQELAKLRDHRCKESAETIARALQGTWQPEHLFALQQSLALYDYYHEQIRDCDRVIEAHLKGMALPEVPPLEPTRRVRRRKDNEVTFDARQRLHHVTGVDLTAIEGIEESTALVVLSEIGTDMSRWPSEKHFGSWLGLAPNPRKSGGRVKSSATRPGVNRAAQALRLAAKNL

SEQ ID NO: 446646 - protein, 423 aa, unidentified
MDILYERVAGLDVHKDTVVACVRIVAEGKTARECRTFSSTTEQLIELRAWLEECRCTHVAMEATGVYWMPVFKILGEGPFELIVANAAHIKNVPGRKTDVNDATWIADLLACGLIKASFVPGEDIQELRSLTRTRKQLVREQTRHVQRIEKTLAEANIKLNSVISDIMGASGRRIIEAMIKGVRQPRQLAELAGKQIKATPKELYDALHGRLTDHHRFLLDLHLKQWDGLDETIRKIDREIDQRIGRLHTKGGSGEVSFRTMIELLSTVPGISTLSASAIVSEIGCDMNRFPTAGHLVSWSGLCPGKNESAGKRKPSRLRKGAPWLKTMLVQCAWAAKRKKDSYYRAQFFRLQSKRGPQKAICAVAASILTAVYHILKNGTEHHDLGASYFDRRPLELKAGRLVARLKKLGFNVQLQPVAEAA

SEQ ID NO: 446647 - protein, 341 aa, unidentified
MYHTGCDVHKKTCHLQHMDEDGALGLSKNVPTTREALAKFLDRLDGSTTITLEATRGYWWLNQFFVRHPKVSQVNVVDSRRSRKLAQELSVRSGYGRAKNDRIDAEMLAEQTRRDLAPTIHVPTPSQLADRTLNRHHLMLVRLKTMAANRIHGILSMHGVFTAIAMLRNNVAQRDQILRELPGYVELFVTNMLKQIELFDQQTDQCDQELDKMLPRSNPTIKLLMTAPGIGIVLARTIATEILDPSYWREPKYLLSYAGLAPLQNESAGKKGPMKLNQFCNYYLKYAFVAAAHGARTHPRYCRKYEQDVKQHGKIRAKLNLARRLAKAVYWMLTRQQPYKF

SEQ ID NO: 446648 - protein, 400 aa, unidentified
MNITHSIGLDIHKSSARYHILDSAAHRVARGPLKAAKAAVQQLLEKLHADDPATVLVVAEATGMLHLDFCEAFEKAGCQVVAINPLYGRNRSISNSIRDNKKDKLDAESLAELGLRDREELLKRFAFHCPVERFELQRYVSSSKILRKSLTNIIKHTATTVHTLFPELDELGLSINQVRVRRLLRDHPSPARIAALEVAELSRYLGNKAAALKQAAAQSFAIQAIGVTCEEGLLGTLLDTIEHLQEQLKQMDRKIDQLLISCAGTETIRLVRSIPGFGAKTTPAILAFIPPERLQHGSKKQITRKLQALFGTDPRVKESGKWKGTTKISKRGVGIARTALFQTAFCGMTHDPQLRQCYVSLKARGKNHKQATIDLMRKQLGRLVSVLVNQKTFTHIPSQL

SEQ ID NO: 446649 - protein, 415 aa, unidentified
MKAWNEITHYAGFDWAHDHHDLIIVDRSGAIVADFAIEHTAEGWQRWREQVGVLGAENLAVCVETSQGLVIEQLLESGVSVYPIAPVSSKAYRERKAPSGTKTDRLDGWALADALRLEGHRWKALAREDPLIAELRLLCRDEVALIEERTALVNQLQSALQEYYPAALEAFEDWRLPAAWAFLEVFPTPAELAAAGQRKWQKFLHMHKLARPQTYAKRLEIFARASELAAGEALTRSKSRLALARIRMLRVLQSQIEGYRAEIEKLFAKHPDHHLFGSLPGAGPKIAPRLLGEIGSDRARFDDPSPLQALAGTAPVSYQSGQIHKVYLRRHCNKSLRAAIHLWANLSRRASPWAELYYRALRARGKSHASALRCLGQRWLKILWKIWQTHRPYDPDLHARNQLKHGSWVLTLQSA

SEQ ID NO: 446650 - protein, 337 aa, unidentified
MNIVFLGIDLAKNFFQLCGLNQAGKPVYTKRTGRKELLQTLANIPACLIGIEASTGAFYWQREFEKLGHKVKVISPQYVKPFVRGQKNDGNDAQAIAVALMQPTMQFVPPKSPEQQDIQALHRARQRIVNHRTATVCQIRGLLLDRGIPIGSAVSRARRAIPLILEDAENGLSSRMRRTIAELYDLFNDPGLRIHFFDKEIETVFRQSEACQRIAKVKGIGPETATAVVAIGKGTEFKNGRHFAAWPGLVPRQHSSGDRQVLMNMTKKGDKHLRTLFIHGARAVVRVATNNNDGHMNQWVNRLKERRGFNKTTVAVANKNARIIWSMLRNDTGYQVV

SEQ ID NO: 446651 - protein, 332 aa, unidentified
MMAQSELVVVGIDVAKDKVDACIRSLSQRQTFPSTPDGRRALIRWLRKHKVGKAAMEASGGYERDWAKALREAGIEALIVDPKRVRHFARSAGRLVKNDPIDAEMIARFAETFVEAKGQAYDAARERLVQIVNARQALLDVRTSLHNRSEHSAQDVVQKMQARLLKSIADEVAKLEAAIAAMIKATPHFAELAEIIESVPGLAEITSAGLIAAMPELGQVSNKTAAALLGVAPYDNDSGKHRGDRHIQGGRRKVRNLFYMPCMGAATRHNPMLKAFYDRLIAKGKEPKVALTACMRKLIVILNVMIARGEKWDATRYEVSDPARLPPSACAA

SEQ ID NO: 446652 - protein, 452 aa, unidentified
MARKKKLEMEIINPHAAGIDIGSRSHFVAVGQALEDVQEFGVYAEDLSAICQHLKSFGITSVAMESTGDYWQNLFAELIKHNFEVILCNGKFTKHAKGKKTDVKDARWIQKLHALGLLSSSFLPDEQTEILRTYTRQRGNIIHQAAAASRKMQKYLKFLNFRLDVVVKDVCGLTGMKIIEDICKGNLDPHQLAKHRHYNCRKSEAEIAKALHGNNREDFLFGLKQEFDTYQFLQRQLKACDKQIDAFIKRYFRSKPELKKLKTEAKPHKRENKNAPAIKNFNQLAYQYFGGVDLMAIEGLSHSTVLSIMAEIGPDGFKKFNSSKQFVSWLRLAPNNKISGGKVLSSKVPKGSNRLKIALRQAANAIGNLKDTHLSDFFKRVAFRKGRQAAVSATARKLGVIIWTMITKKIAYQPPREYLYLDQKRKLGLVKRIKKQIDKFDLKPEDIGFVTN

SEQ ID NO: 446653 - protein, 312 aa, unidentified
MTQIICGVDVSSEALDARVRPGGDEARFAATAEGIAALAAFCRERQVDLAVMEATGGYEKLAYTLLWSHGIPAAVVNPRGVRQFAQSMGSLEKTDRIDAGMIAWFAQTKRIVAQQPPHAAQERLRALVTRLRQLTDLRTVQNNQLRLVTEPGVRDLFADLLAVLARQIRCIETEIAALLDADPLWRELNTCLRAIKGVANRTVARLMAELPEIGTISNKAAAKLVGLAPLANDSGKRKGVRVTRGGRATVRSILFVVAEIVRRHNPHFADFHKRLTQAGKAKKVIRIALAHKLLVQLNAKARDARRELALAA

SEQ ID NO: 446654 - protein, 420 aa, unidentified
MARTVDIVYPVCCGMDVHKNFLVACIATTDERSNTTHQIKRFSTFAGDLRRLANWLAANNCHDVCMESAGRYWIPVFNTLEKTCNVCLTHPKYVKAIKGKKTDKKDAKWISELFKCDLVRSSFIPPPDVRQLRDLCRYYVKLTYMCSSEKNRAQDCLTMCNFKLDDVFSDIFGKSATRILDALLKNGNSDFDIAPLISGKCKATIEQIRSALDGELNPAQVDKLKLIRLHLEYLTSLKDSLEQVILHLAAKYQPQIDLLMTVPGIGEPLTAIRILSEIGADMSVFETSKQLCSWAGLTPQNKESAGKKKTTRIGRAGAYLKPLLVQIALAAVKSEKHLELKNKFLSLKKRRGGKKAIIAIARKLLTAVFHMLSKSESYNADLYRMSDKSPVKRELSLEQALGLLQKQGYSVRNWLLPVPS

SEQ ID NO: 446655 - protein, 419 aa, unidentified
MIDTGDIDVFLGLDVGKGEHHATAVTPAGKKAFDRRLPNTEPKLRELFAKLQAKHGTVLVVVDQPASIGALPLAVARDMGCPVAYLPGLTMRRIADLYPGEAKTDARDAFIIADAARAMSHTLRALDGEDETIAELEMIVGFDDDLAGEATRVTNRLHGLLTQIHPSLERVLGPRLQHPAVLTLLEQFGSPTQIRKAGRRRLVTLLRPKAPRMAERLVEDIFTALDEQTVTVPGTDAAALIVPSLAASLNAVLDQRKLLAARIEELLESHPLSKVLTSMPGVGVRTGARILIEVGDGSTFPTAGHLAAYAGLAPATRSSGSSIRGEQPSRRGNKQLKRAFFLSAFAALGDPASRAYYDRKISQGKHHTQALLCLARRRADVLFAMLRDGTFYEPQPAKAAWPAETALRGRTIPEMHRGI

SEQ ID NO: 446656 - protein, 396 aa, unidentified
MKAKKDRYGSVAGIGLDVHYQFSKVTMRSFDEKVVCRGTLEHRGRAALREALSQWPKDVPVVMEASFGWGWLSDEMLAAGLDVHLSNCYKLERLRQARGQVHTNKKDADLLSLLPLEAARWWEVWRAPRDVRDLRELTRYWITLKAMDVEAKNRLHALCHRHGIFYDFKDLFGGRGRAFLAEVARNGLFPDGQLDEGALFHWRGQVKLIEHLREQLADLTRELRKRLTRSALASRLDGIPGVGLILAHVLMAEIGDINRFAGHGRLASYSLLAPRAHDTGLADPIRTTIGRRLGKKGNHVLKWAMIVAARGAVRKGGKWRNIFDHYTAGGRNSRNRGYIKVARELVKVVDVVWRKNVAYSDTPPARSGCGRDRPRRDRASRSGTGQLSNVMAYARQ

SEQ ID NO: 446657 - protein, 451 aa, unidentified
MSRPQVIDDEEHEQVHDRVAAIDVAKDTGMVCTRAPHPSRPGARRSTVWTVKARMGTVRALGRQLARDGIEIVTLESTSDYWRIWFFVLEACGLAVQLVSASQAKNLPGRPKTDKLDAMWLARLTELGLLRASFVPPRAIRDLRDYTRARTRLVQERTRCFQRLEKLLEGALVKLSAVASKLTTVSAQDMIKAMIAGERDPAKLAALARTRMRARHDDLAEALDGMFDNHHGELAGLLLDHIAFLDERVAQLTARAAGLTAAMPEAWGVNGDGTTGPDAGTGPDAPVLNAVARLAEIPGISEDLARAIIAETGLDMSRFPTAAHLVSWAGLCPAARQSGPRTRAGKKGQGDTWLRGSLGQAATGAARTDTFLGERYHRIARRRGKAKAQVAVARSILVVIWHLLAGPAARFTDLGSGYYQARTDKDRKVKNHIRQIEALLGHPITITPKAA

SEQ ID NO: 446658 - protein, 339 aa, unidentified
MTIIGFDIGKNEIIGARISKTGIQKEVYCVVNGKKEIVSFLRSLKTKYGKLGISVEATGQYHRNLCLACLRLDIPCWVLNPVITKQFTRATVRKKKTDITDALATARLALQKQGTLATKEMFSCLKKINRVNYRLGKMYQVLHLMNDVFSSALPEEKEVIKRLDNISCLIEESVKQINVRIDKEIDKDLASLLSSIVGIGPAIARTLIVEIGNVERFPSGKELVAYAGLDPKVKQSSMTNKRNVRLTKRGSPYLRRALFIAASIAQRHDLDIKRYYEKKRNEGKTYREATCAVARKIVYRVYAVWKRKTPYIRSEEEKTEEKKEKTRIKQCFPQEKVLT

SEQ ID NO: 446659 - protein, 350 aa, unidentified
MRSIGIDLHKRSMTACVIDKRTGETFTRSFRCQDEARILEFFSRLEPFEAVVEASATYEWLWLLLEPVAERLVLAHPKKLRIIAESKKKTDRSDAFVLAQLLARDEIPEAYRPTPQEREYQHLVKHRHCLVRDRSRVRTRVRSILAARNVDVPGLFSRDDEDWIEPLSLPPAESFRLREFWGQLAEIDQRIVTAEEELERFREAAPESQKRKHEIVRSVPGVGTVVADVVVSTLGDVNRFPSIKKVTSYAGVVPGFRESDRKRKELPITKEGPTILRWALIQAAWRAVRHSPYWRDTFELLAARRGRKKAIVAIARRLLGVIYTLLKKGEKYVTKQEGGGRKLEPAASRT

SEQ ID NO: 446660 - protein, 403 aa, unidentified
MSTLIGIDWAKDEHYVCIMNHHGAQIARFAIPHSVKGFSQLRRQIDKLPVSASDCLVGLETAHSLLIDFLWSCGYQVFVIPPSVVSSSRPRLRASRAHDDPSDAFLIADLLRTDRHRFAPWQPDGQLICQMKAKLNLIDSLTKTITAHSNRLQAVLLRYYPQTLGLFSEVKTQTCLQFLIAHPTPQAAQALSYAAFSAFCHKARYTHPERLPDAYARLTQAAPRPDPVVVAAYQGETVFLAQLLLQLVRHKSQLIRQVQGLFLQHPDQTIFDSLPGAGRLLAPKLLVMFGDHRDRFPSPAAIRALAGTCPITIKSGHKKHVRFRKACNRAYRQAAQQFAIASVAEAEWAAAYYARCRSRGHSKNHAYRCLANRWLGIIWKLWQTHQLYDETYHLQQIQRHRRR

SEQ ID NO: 446661 - protein, 356 aa, unidentified
MTIMAFDLGKFNSVMCLYNTNTQEMAIETVGTERDYMSNLITHYQPALVVVEACGPSGWISDLCGELKIPIIVCSTNEEAWLFKNVKRKTDKDDAIKLAKLAAIDQLVATHVPRKEIRERRRLVTYRKKIVDRINRCKCTIRSIFANQGIKISTGAKTWHTGRQFLIDNSKPLSECSVDELWRGELHLELIQLDALEGHLKSIEKQLEKIAKTDKQIQRVQTINGVGRVTAEAIVNYIDDPHRFKNGRQVGAYAGLVPRQYQSGNTDRRGRITKRGPRLLRTILLECAWCSLQYNQWARETYDRIHHDTQTRKKKAAIAVARKILVLAWALMRDEVDYDPERNLKPASEAEQKKAA

SEQ ID NO: 446662 - protein, 344 aa, unidentified
MKITRVGLDIAKRVFQVHGVDEHGKSRVSKKLARAKVLEFFVQLPPCLIGIEACGGAHYWGRELTKLGHTVKLIAAQFVVPYRKRGKNDANDAEAICEAVGRPNMHFVAIKTEEQQSVLMVHRARTLVVANRTAQVNQIRGLLGEFGLVVPKGVAKLRRQLPQILEDAENGLPALAREVLAGLREQFHEFDARVAAYDRQIRVLAEASEPAQRLMKVEAIGPQTATALVASMGDPRVSKSGRSYAASLGITPRQHSSGGKARLGQITRQGDRYLRTLLVHGARAYLRVVDKKTDAKSAWARRLKERRHVNVAAVALAAKHARIAWAMLAHGTEYRPSGPEVIAA

SEQ ID NO: 446663 - protein, 347 aa, unidentified
MIEGRKQTVSAGEQRPGGALELVLGVDTHLDAHVAVALDQLGRRLGAAILPTTAKGYEELLSWAEGLGPVRRAGVEGTSSYGAGLARYLSSRGIEVLEVERPKRRWRGTRGDGKSDQADAEAAARVVLAGEAAGVPKSSDGEVEMIRVLRAARRAAVKARTQAANQLKTLVVTAPDGLRGRLRELSTKALVATAVRLRPGERPDNPEEATRFALRSVARRYRALSEEIAELDAQLARLVAEASPGLVALPGIGTDHAATLLVAAGDNPERLRSEASFASLCGVSPVEASSGKVVRHRLNRGGNRDANRALHSICVVRMGWDRRTRAYVARRTTEGKSKREVMRCLKR

SEQ ID NO: 446664 - protein, 338 aa, unidentified
MKLYGAIDLHSTNSVTVVINEQDQVVYQKRLPNDLAQIAQQLSSYRRSLQGIVVESTYNWYWLVDGLMEKGYRVHLANTAAIQQYNGLKYTDDDSDARWLAHLLRLGILPEGYIYPKQERAVRDLLRKRGQLVHQRTANLLSIQSLISRTTGNSINAQYIRALNIERVDGVLPNPDHVLALKANLAVMNSADAQIEILEKAVQDRVKLRPQFRFLKTVPGIGPILALTIMLETGEIERFASVGNYASYCRCVGSKKISNGKRKGSGNTKNGNKYLAWAFVEAANFAIRFNSRIKSFYQKKKSKSNAIVAIKAVAHKLCRACYYIIKDQVAFDITKAFA

SEQ ID NO: 446665 - protein, 340 aa, unidentified
MDEYDGRQYVGVDLHRRRSVIVRMTPEGDRLGPAVRIDNDPFTLAEQVASWGENPEVVLEATYGWYWAADVLAEAGAVVHLAHPLGVRGFAYRRVKNDERDAADLADLLRMGRLPRAWIAPPAVRGLREAVRHRCKLVAIRSGLKAQVHSVLAKQGVRVPVSDLFGVGGQQLLDRLELDAPYAARVASLRRLIDAFTFEIDVLGRRTAADLRGHAGWRAIQAIDGVGPVLAAVFVAEIGDVHRFARPEQLCSWAGMTPRHRESDTKVHRGRITKQGNHLVRWAAVEAVQRLHGGPLGSARARVAERRGANIAKVAAARKLLTLVYWGLRDGHIRCLARPA

SEQ ID NO: 446666 - protein, 395 aa, unidentified
MFIVGIDVAKRSHEVCMITSDGQTVQRPFSIRNNCTGYNLMLEKIRKHTNIKSQIVFAMESTAHYWLALFTRLRKDGYHVILLNPIQTSAMRDMFIRKIKTDAKDSFIIAELIRFGRYAESNVAQDRLLALKELCRNRFYLVDMAGDLKRKLIALIDRVFPEYEAQFDTIFCKSSVALLKKYPTPQKLSNAHLDKLTELLWNSSNGHFGEWKARELKDLARNSFGVEDCDGAYSTLILLMLDQIQSLSGKADALEKEISRLFQSFDTTVTTIPGVGPIIGAVILSEVGDISRFSSADKLAAYIGVDPSVNQSGEFQAAHAHMSKRGSPYLRRCIWMASQVAVQRDPMFRAYYEKKAAEGLKYMTIIGHVTRKMTTVIFAILRDHKVYEPVLPTAA

SEQ ID NO: 446667 - protein, 353 aa, unidentified
MRTYYVGMDVHQASIVIVVLNGAGKVKMESIIETGAETVRGFLKQLRGKVYVTFEEGTQATWLYDVVRPLVSEVVVCDPRQNKLLESGNKSDRVDARKLAELLRNGSLRAVYHGNQGVRTLKELVRNYDCLVGDTTRVMLRLKALFRGRALACAGHDVYRSERRAQWLAKLSEPGVKQRANCLYEQLTALQRLRQEAKRVMLKEARRQPAYQLLLSIPLLGPISVAQLMAVVGTPFRFRSKRQFWAYVGLAVVTRTSAEYVLVNGLVRRSSRPVATRGLNRNHNHLLKKVFKNAASSACVSGPFKPGYDARVAQGMDASLARLTIARQLAAITLVIWKRGEQFAPERLKQQVA

SEQ ID NO: 446668 - protein, 345 aa, unidentified
MDHFAGLDVSVKETSICIVDDTGKIVKEVKVASEPDALLAVLTNPAYRFKRIGLEAGPLSQWLFSALAEAGLPAICVETRHMRAALKAQINKTDRNDARGIAQMMRAGLYRPVHVKTLRSQKLRMLLTHRKLLQSKAIAIENDLRATLRNFGLKVGGVGTVKFEARIKELVEKAPDLMMLVEPLLVVRRALREQIGILHRRLLAIVRDDDVCRRLMTVPGVGPVVALTYRATVDVPTRFRNSKAVGAVFGLTPSRYQSGEINLTGAISRCGDEMMRAVLYEAAQVMLTRTIKWSWLKAWAMQIARRRGMKKAIVALARRLAVIMHRIWVDGTEFRWTREQAAATA

SEQ ID NO: 446669 - protein, 376 aa, unidentified
MKTVRSFVGMDVHKATISISVAEDGRSGLVRFIGVIPNTPEAVHKVAKQLTRHGELDFCYEASGCGYGIHRQLTALGHKCMVVAPSMIPRKPGERIKTDRRDSEKLAILHRSGDLTPVWVPDTTHEALRDLVRARVDASMHPMRARQQLLAFLLRHGRSYPTGKHWTQRHRSWLAGQVFKEQAHGIVFHDYLETVWTAQQRRDALIEKISAMVASWSLGPLVEALRGLRGIDTISAATFIASAGDLSRFESPRLLMGYLGLVPSEHSSGGTIRRGGITKTGNREARRMLIEAAWSYQYPARIAKEKAEILVKLPKNIRDIAWKAQTRLCTRYRSMVARGKKPTVVVAAIARELAGFIWAIGQEVRCNNRSIAAVLV

SEQ ID NO: 446670 - protein, 425 aa, unidentified
MEVIVERAAALDVHKAQVTACVRLPAGRARRTQAVAEFRSTVQGLSALRDWLRAHHVTEVAMEATGVYWKPVWAILEDDFELLLVNARHVKQVPGRKTDVSDAAWLCQLLEAGLLRASLVPPKPIRALRLLTRYRKTQVRERQREANRLHKVLEDTGIKLDCVATDILGVSGRAMLDALVAGTTDPEVLADLARGRLRAKLPALREALEGRFDARHALLVGAILAHLDFLEEQIDSLSEEIGEALAPHAAAVELLCSIPGVQQRTAENVLAEIGLDMSRFPSAGHLASWAGQCPGNHESAGKRRSGRTRKGSKWLNEALTEAAIAAMRTKGSYLQALYRRLRPRLGHGRALGAVKHSILCACWHMLSSGELYRDLGGDYFLSRDPERQTRRLVRRLEALGHTVTLKDDTVMLKDGDTAMPKEPAA

SEQ ID NO: 446671 - protein, 355 aa, unidentified
MAVYIGVDFHPYEQTLAFVDEADGEIRYKRFLHSDKAGIKAFYRKCGKDAVIGTEATGSLWWFEKLLFDNGMTLKIGDPRMIRRAALSRHKNDHRDAETILDLLMRGTFPAITPRNEQSREMLDLLNYRHSLVSKRTSVVNQLQAFARSKGLPRFRLPAVKARKKIEEVETTQVERLLVSSRFVLCDELTRQIKAVEARLEEEANKEERAQLLMTHPGIGLINAMALVHTLGDVRRFRRKEEVVAFVGLDPLEKSSGETRRIGSISKRGSRLARYLLGQAAQASRDKKIRKFYSEVSRRRGRPKAKVAAARKLLINCYVMLRDGISYEEFTRRGEVGLYEGSGEVTGKPAQSLKV

SEQ ID NO: 446672 - protein, 351 aa, unidentified
METRFAVVIGLDVGKTGHHACALDPGGSRLFDKPLPQDEAQLRELFTELQKHGNVLMVVDQPNTIGALPIAVARDAGCAVAYLPGLAMRKAADLYPGRSKTDARDAFIIADTARTMPHTLRAVDRDNEVLSALKVLAGFDEDLAHETTRALNRIRSLLTQIHPALERVFAGGSLANSLTLELLIKYGGPTGLKTAGRGKVLRFARAHSRGDPEALIDQIFAALGEQTVVVPATAAVELVIPRVAGQVKELKEQRATVAREVEGMLEDFPLASVLRSMPGIGLKTAAQILLNIGDGSAFETPGHLAAYAGIAPVTRRSGTSIRGEFPARSGNKRLKNALFYSAWVASNHDPI

SEQ ID NO: 446673 - protein, 451 aa, unidentified
MEREEKRLEEFRRLRREIGGSPNYLVVGIDISKDNHDAMMRTPGGKIVYRRLSFHNTREGFENLLLQVEAMRVQHGLKEIVFGMEPTANYHKPLGEFLINQDYQVVLVSPEAASKNRSLLDGRWNKHDGKDCANIADLICQGKCLYYEYPSTQLRDLRNLLSLNRKLKKLEQGLRLRIRNHLVAQYFPEIDQYCHWGASEGLALVRWCLDPTVMARLSEEQLSQRLGTLGRTIAQRRRLSALKDQAASSIGCRFGVSVEFESQQVVKLLKDVRQTIESTREQIEAVCRKFKEYDCLLSIPGFGPTLSAMVLGAIGNPWRFHNGAQVLKMVGLDLSASSSGKAQGQPVVSKKGKAEIRYALYQAAMVASTRDKHFVAYFTDQITGREKENGIKTKKRVKLAAKMLMIGWTLMKKQECFDPRYLTSADPMVAAANSAKAQITGIPKVQPDPAR

SEQ ID NO: 446674 - protein, 464 aa, unidentified
MTKKGKKSTPSPENMPILHPHAAGIDVGAEEHWVGVPADRDAQPVQKLSAFTCDLHRLADWLTACRMTTVVMESTGVYWIPLFPILEARGFEVALVNARHVKHVPGRPKTDRFDCRWLQKLHTYGLLAPSLRPPEDICQLRSLLRHRDHLLRMTVKHIQHMPKSLDQMHLHLPHVMSDVTGVTGMRILRAMVVGERDPQTFAQYRDYRMQSNEETIAKALEGDDRAEQVFTLTQSLALYDFTQQHIAACDQDIERVLATFDSLVDPAEHPLPPPTTAHRRPQRNEPAFDLRTHLYRSTGVDLTQVPGLQAPTIHIVLAEVGLNRHTWPTDKHLASWLGLCPDHQISGGKVLSTGSRRVQNRASRALRMAAQSLRTSPSYLGAFFRRMRSTLGPAKATTATAHTLAKILYPMLKEKAPYRARSAEDYLPKDHERQLRQLRKQAQYVGFDVVPQTNHESPRHCCDD

SEQ ID NO: 446675 - protein, 348 aa, unidentified
MAKSLFAGIDLHSNNLMIGIVDQDGKRLKHQKLDCDLQQVIRFLKPFKPRFKSLAVESTYNWYWLVDGLRALSYPVVLANPAQIEQYSGLKHADDKSDAFFLAELQRLGILPTGHIYDPMLRPVRDMLRRRLSLVHQRTALMLSFKSLYSRTTGQAMSLSRLKGMELAEAKTLYEHPANCLIATVQKEHIGQLDQSVERIEKAVLKSAQELPCYKRLNTLPGIGRILGMTITMEVGEIKRFKAQGNLASYCRTVDSKRMSNGRKKGDNNGKCGNKYLAWAFVEAANFAKRYDDSCRKWFDRKAAKTSTVIATKALACKLAKAAWHVMAHNTDYDPNRMFPELAQSQAK

SEQ ID NO: 446676 - protein, 414 aa, unidentified
MEVVHTHCAGLDVHKKTVVAAIIVPASGGELIEERRTFGTMTDDLLMLTDWLLSYGVTHVAMESTGEYWKPVYNILENNFELLLINAQHIKAVPGRKTDVNDAQWIADLLRHGLLRASFVPPLGQRELRELTRYRITFVRERATLVNRLQKVLESANIKLGSVATDVMGVSARAMLEAIITGQATPEEMAALAKGRMREKRAELVKALSGRVKPHHRFVLSELLCQIDNLDETIERFNEQIEEYCRPFEEAVTLLDTIPGVGREAAEIIVAEIGSDMSRFDSANHLAAWAGVAPGNYESAGKRKSGRMRQGNKTLKTVLNQAAHAAAHTKDTYLAAQARHLTGRRGKKRAIMAVAHSILVIAYHLIQRQEPYRELGGNYFDQRSPEATAKRLVKRLERLGYQVSLQSQVATVAA

SEQ ID NO: 446677 - protein, 317 aa, unidentified
MDKVYAGVDVGKATLEVGIYGETWVGQYNYDVAGLEQLIEAVQARQVGLVVVEATGDLERRLVAALVVAGVPVSVVNPQRVRYFARADGRLAKTDRLDAQVLAKFGQAMQPALYEAQSAEGEELSALVTRRKQLVEMLAAEKNRLNTATGSVRRQVEAHIRWLEEEVKALDEAISQLIQTDPQWQERDALLHSVPGVGAVTASTLLAELRELGTLSRQKVAALVGVAPINHDSGRRRGERHILGGRATVRRVLYMAALTATRANPVIRSFYQRLLAAGKCKKVALTACMRKLLVILNAMLRDRRRWNPELALMPAPA

SEQ ID NO: 446678 - protein, 359 aa, unidentified
MSYISFDSQKKYTLAIVEDSKGNLLEEKRINHSKGCIRRFLENKPGCDYVAVESIGYWYWIVKEIEEAGKMPLLVNPRKAKLMLGMVNKTDKLDARGICLLQRAGTLPCVWMPPLEIRDIREISRTRMVLCRERTRIKNRILSIIEKYCLGGEFGDIKDKFGKKGKEIMKNCLRELPPNTSEVMEILMKHLEEIEDHIKFLEENIKENFKENEDLKLLMSVPGIGPILGVVILLETGDINRFLRSENYISYSGLSPVVKSSGGKVRYGRMRNDCNRYLKWAYSEAANSIAVNCDRKKELYLSQMYKKIKNRKNHSVAIGAVARNIAESVYFILKRKQYYKDRALEKRLEAQGRFYVMNP

SEQ ID NO: 446679 - protein, 314 aa, unidentified
MEKMTEYTIGIDISKSHLDVFRLEDESARRFENSAAGFRALVKWLGKGVVARIVFEPTGPYHRAVEKALSGKFPLVKVNPLQARRFAQACGTHAKTDAVDARMLAHMGAALDLEPDALVSDKLHDLRDLQVARTGLVKERTRLRNRAHVQTIALLKRQTKTRLAQVERHIAELNAAIAARIADDQSTARKRDILRSIPGIGPIAAALILTFLPEIGTLERKQAGSLAGLVPYSRESGTWKGKSFISGGRKPLRDALYMPALVAMRFNPDLKAKYAQLRKAGKPAKVAIVTLMRKLLETANALIKADRLWVEKTA

SEQ ID NO: 446680 - protein, 344 aa, unidentified
MTYYAGLDVSLRTVNICVIDDQGELVAETKLASDVQDIVAYLDKLNIEIESVALEAGTLTQYLTYGLQSAGFEVICMEARQVKGALSAMRNKTDKHDARGIAQILRSGWYSQVHVKSMQSHHIRMLLSSRKAVLSKCVDLENEVRGLFKIFGIKLPPKLGHGAFDSAVRDIIEIDETLSHALLPLLDARLVLYRTFRVLDNRTRKMAHADPVCVRLMSVPGVGFITALTFKAGVDDPKRFKRSRTVGAHFGLTPRRFQSGELDIDGHISKCGDADVRSTLYTAANALLTRSARWSPLKAWGMKLAKTRGHRKAVIAVARKLAVILHRVWIDDTQFRWGNEGARS

SEQ ID NO: 446681 - protein, 447 aa, unidentified
MTDERDGFPVLRRDVAGIDVGSEEHWVCAPSRTGDGRDVERFPATTPGLERLIAWLQDRRVRAVALESTGVYWIVPHEMLEQAEFEVRLVDTRELRRVPGRPKSDRRDCEWLQRLFSCGLLRGAFRPPETVCLLRTLVRDRATLIAERADWLRRMQKALDQMNVRVHRAVADLDGVTGMAIVRAIVGGERDPHRLAALRDYRCQKTEAAIAEQLTGHWRADHLFSLQQGLKMYDAITDRLADYEREILQQLAAMAQTDDTPPPPTNVNKARMIQKRGEEPLRQALYRISGVDLTTIDALGVETVNVILSEYGPDLSRFPTEKQFIAHLRLAPHQAISGGKPVRTPKKPQRRSARVTMALRMAATSLRRSRSALGAYYRRIAQRLGADVAVFATARKLAQWVYRVLRWGQPYVDEGAAVYEHRYRQARITRLAATAKDLGYALVSVEA

SEQ ID NO: 446682 - protein, 312 aa, unidentified
MTHACAAGVDIGRDYLDVGVEPSGLVFRTGNGASGIETLVRRLKREGVSRVVLESIGGYAGRLVRALADAGFEVGVIDPKRIRALRIAEGKRAKTDRLDAKLIARFALLMQDAARPVPNAKAFEIRALSTRRRQLVETIAMEKVRLKQTLDEVIADSCRRMIALLSEERALVEQRLQAELRAQPDGQARAELLQSIPGVGPAVSMTLMADLPELGGLDRKAVASLAGLAPHPNRSGTRIGQAHISGGRPCVRAALYLAAVSAARTDRGFKAEYLAMRRAGKPAKVALVAIARRIVVAANGMMKSGQPWQKPA

SEQ ID NO: 446683 - protein, 351 aa, unidentified
MMLIGVDYHPSFQTIAFLIEETGEYEERELNHSDGQAEKFYRDLKQRGICVRVGMEATGHSRWFERLLAELGFELWIGDPAEIKAKRVKKQKFDREDARLLLRLLRENNFPQIWVPDAENRDLRQLLWHRHRLVQMRTRIMNQLHALAMNEGFCWKKKLFSEKGRAQLEKLALAPWAGRRRQGLLELLDRMNPTIEELTAAVEREARKRPEAMRLMTHPGVGPLTALAYVLIIGTPTRFQRGKQIGTYVGMIPCEECSARKQRLGHISKQGNSLLRFLLVEAAQAAARVNPHWRRRYMHLAMRRHKSIAKVAMGRRLAVRLYWMWRNGCEYSPSLEFGSYAGQLGLGNGVK

SEQ ID NO: 446684 - protein, 438 aa, unidentified
MSNKVIFNLDELFISVGIDVGADFSWMSIALPNQQFVGKPYKILHSSIDSLTTAVSKIKEAEELYSLESRIFLESTGIYHYPLFCYLRDKGFNCSVINPIITKNSTNINIRKVHNDRFDSKKAALVGLKPDLKVSLMPSDLALNCRNLCREYYDLMDNRGAYVNKLQGELRMAFPQYLGIFSKVTINTSLTLLETYTSPSAFLKADKQEIIDIIKSTARFGLTYAQNKYNAIIQAATDANQFGYIIDSNIKRIRLYISFIRKYDEEINSILESLHELVDANEDSDFVKQIHLIETFKGAGFLSAVSIMGEIGDFSAFSKPKQLFAYFGLDPAVKQSGKFEGTKVQMSKRGSAIARRVIHTLTLQSISISRNGEAKNPVLREYYLKKCDSKPKLVAMGAVSHKVCNMIFAILRDNKPFKIIAPQEHIKQYNASKCDMAA

SEQ ID NO: 446685 - protein, 418 aa, unidentified
MKSIKTKKVTKINDKTVIATLDIGKNVQYGYFRAPNGNDVKPFKFYNSKKSYNAFWAKLCQFKNKQGLEQIVIGFESTGPYAEPLFHFLRKKPVKLVQVNPVHTKRIKELTGNSPNKTDKKDPRVIADVICLGHALTLVVPEGPAAELRRLTQARQRAITDRTAIINQLQHLIFVIFPEFLTVLKISTKTAWYFVKHFTTAEKIFALGLDSVGQIFKKVSRGKLGQDRAKQLHEAARDSIGISEGKQSIVFEIEHLVSRIEAEDQFIDSLEKQMRVYLQQIPYSQNILSIKGLAEVTVAGLIGEVADFNKFDTISEVMKLAGLDLYEISSGSHRGQRRISKRGRPLMRKLLFFAAINAVKSKGIMHEKYQQMLDRGMLKMKALVAIARKLLGLIFAIVRDKTKYVENYSDNYHYKLAA

SEQ ID NO: 446686 - protein, 475 aa, unidentified
MNVKGTKKKNQVVKANIFEQQELLKKAEVIKENLTASTWHELETNGKFDKNAKLSFISDDMLILGCDVGSETHYLRAIDTRGRELSKSAFSFSNDSEGFQSAKEWAVKIAAEQDKSQIVLGLEPTGHYWFCLATWMISNGISVVQVNPYAVKQTKEVEDNSQLKDDTKDPKLIANLVKDGNFGMPYLPEKLYAELRRLSMFRDQLNEDRIRTINRMHREMKIYFPEYKDALGKVDGAFSLELLKQAPFPDDLIALGEDGIRQIWHDAKLRGRGYSRAGEILQYAKASVGMKDGATAGKTAVKWFVQKIMELDAELAVIENQINQKCQKIPHAGNILEIAGIGENTLSGILAEMGDISRFDDVKEIQKLSGLGLVACSSGKHKGETKISHRGRKRLRYWLFQAAKSAVAHAEEFKELHVYYTTRPDNPLKKMQSLIVIACKLLRIIYTILKNGTVYDPKKMLADIRRQEKKEAIAA

SEQ ID NO: 446687 - protein, 342 aa, unidentified
MSEIITVGLDLAKNVFQVHGADGVGRAVLRKKLRRAQVLEFFSQLPSCVVAMEACGGAHFWGREIGKLGHEVRLIPPAYVKPFVKRQKNDMADAEAICEAAMRPTMRFVPVKSEETQGAAMVFRVRELLIRQRTQAINALRGHLTEFGQIVPQGASNTTRLIAIVEDPESDLPADAIPTLKALIAALTHLEAEIRKLDAEIARRAKENDVARRLMTVPGIGPLIATAIAVLAPPPETFRKARDFAAWLGLVPRQHSTGGKQRLGATTRMGERSLRRLLIIGANSVVIKRNVHKEAQPGTWLGSLLLRKPPMLVRVALANKMARIVWALMARGGIYQSPTAAA

SEQ ID NO: 446688 - protein, 344 aa, unidentified
MHETVVIEGQKKRLKKFNYFIGIDISKSELDYAILYNQKILFHREARNEPEDILAFVSELKKLSKFSMTKSVFCMEKTGVYGNHLLNCLRKMKANIVVENPLQIRNSIGLIRGKYDKIDSIRIAQYAEKNITGLRFWKAKRPIMYDLAALFSLRNKMTTLQTAFKTRFTDDEIFLNKKIQKSNGELCQNTIEAIKSDLLRIGSGIDDLIESDSRLKRLMQIITSVPNIGKITAIAIIHTTNEFIDINCPKKFACYAGVAPFLKESGTFKGKAKVSKIANRKIKSLLHVCAISASWRDAELKAYYIKKTKIEGKHKMTVINAIRNKLILRVFACVKQDKLYTRTN

SEQ ID NO: 446689 - protein, 316 aa, unidentified
MYLGIDVSKKTIDCCLIKEDSKRQKQFKNEQGGFEQLKQWLDDNHATSELKCCCEATGTYYRQLALYLKNYYKISVENPRKIKGYAISELQRAKTDKQDAKLIAMYCQEKSHRLREWQPPEKNQQELEELTKYLDYLTRQRATEKNKLHESPDYITAHIKTTIDNLTDQIKAVKQQIKQFYKQHPEYDQNRKRLMTITGIGETAASVLLSNYKKHEFKTSKQFVAFIGLDPKQHESGTSIKGKSRISKIGKADTRKALFMPALVAYRINAFPNLINRLKSKNKPIKVILVALMRKLAVIAFTLLKIGQDFQVERYK

SEQ ID NO: 446690 - protein, 414 aa, unidentified
MRIIYERCAGLDVHKKTVVACRIIRTEAGEWRTETRTFSTMTDDLLALADWLRVGGVIQVAMESTGVFWRPVYNILEGEFEVNLVNAKHIKFVPGRKTDVKDAQWIAELLQCGLLKASFIPEAPQRELRELVRYRTHLIDERTREINRVQKVLEDANIKLASVATDLMGVSGREMLAALIAGQDDPATLAQFAKARMRPKIAELERALTGRVKDSHRLLLKLHLEHIDDLNAKIVVLEEEIAKVLPPFDQDDLLARLQTIPGVGEKVAQAIVAEVGTDMSRFQTAHHLAAWAGLAPGKRESAGRNYSAKTSKANRYLKAILVQAATAVGRSKDNYLAAQYHRLAARRGKQRAKVAVAHSILVIAYHLIRRGTSYVDLGADYFDQRKTPAIQQQLVKRLERLGLKVTLEPISTAA

SEQ ID NO: 446691 - protein, 418 aa, unidentified
MTRGDDSRIIRIVHPICCGLDVHKESVSACVIFPDDKGEEQCDVKVFGTFTDDLMRLRDWLAAHNCPVVAMESTGVYWRPVHNVLEDSVQVVLANARDMHNVPGRKTDIGDSRWIAGLLRHGLLKSSFIPPQDVRQWRDLTRLRKKYVHTVGDYRKRTHKLFESANIKIDSVVSDLFGVTGRNLMQLLVADRKLTLSDIQTCVRGKLKGKEAELFRSIQGFFTDHHRFVLKMILETIATLEAQIEALDLQIRCAMKEHETLLDRMKQAPGIADVASREILAEIGPTLDSFRKDTALVAWSGLCPGNNESAGKRKSGKSPVRKHHLKTIMIEVAWAAIKKKDSYFKDKYYRLKARRGAKRAIAAIAHRILLGIYHVIKDGVDFRDLGGDYLTLRNKSQKVFHLRKQALAMGFDLVPQTV

SEQ ID NO: 446692 - protein, 439 aa, unidentified
MKALPILDERATGIDVGSERLHVSIGGAAPQVYGTVTRDVQALVAHLVEQGVRSVAMEATGVYWMTLYAALQAAGIEVLVVNGRHVRNLPGRKTDMSDCQWLATLHAHGLLRSGFVPPAEIRQLQDYLRLREDHVSLAASHVQHMQKALERMNVKLHDQIADLTGASGLRVVRAILGGQRDPTRLLELCDVQIRKHKAERVVESLRVTWKAEHLFALRQAVNAWDFYQAQIRECDQQIERVLHELGGPPGPDEPGAGRGKPGGTNTPRIAGLHRLLVQLCSGIDPTKVPGMADHSLLKVIGEVGTDLTKWRTDKHFAAWTGLAPGTAQSGKRRKNQARQLNRVGRMFCDMARSVGNSADTAFGGAYRRLKARRGGLVANKALARKLAVMFWRLMVHGVQYVEQGLKAYQARAALSEQRVLSRLARKHGLQLVPQPTVSA

SEQ ID NO: 446693 - protein, 349 aa, unidentified
MVAGEVDYVVGVDTHLDEHVLAVVASPGGAVLAQRAVAANGRGYAQALRFAQRYASGARVWAIEGAGHYGAGLVRHLSEHNEAVLEVGRLPRNERRLRGKDDELDAVRAARAAFTSEPLALPRSGQRREALRLLLVARRSAVDVRRESLVQLRSVIVTAPDALRDELRGLPVQRLLDRCNRLRRSTGAAPDELATRLVLRSLARRSVAATAEADELEHEILIHVRALAPQLLDEPGVGPIVAAQLIIAWSHPGRVRSEAAFARLAGVAPIPASSGQTTRHRLSRGGDRQLNRALHTVVLHRRQHDPTTQAYIERRVAEGKSRRDATRLLKRYLARHLYRLLQNQEPLMA

SEQ ID NO: 446694 - protein, 378 aa, unidentified
MQHFAGLDVATEESALCVVDADGAIVLETKIPTNPGAIAAALLPFARTLRRAGHEAGSQAPWLQRELAAMGLPIHCLETRHVRAGLAAQRNKTDKHDARGLAQMMRAGWFKVVHIKSPESYRLRLLLSNRRNLKRKFLDLENAIRHSLKAFGVKVGTKCGRGGFEAAIRDLVAHDSVLAGLCDSMLRARAVLWAEHMRLHNLLIKVTREDEVCSRFMAIPGVGPVTALAFKTAVDDPKRFKKARNVGAHFGLTPRRWQSGTSIDIRGRISKQGESEVRTVLYEAASCLMTRSKETNSVKIWGQKIAKRAGLKKAVVAVARRLAVIMHAMWRDGTFFEPGDSEPALRRQTKAGPRKAPARKLKAPAIAPPRKLLAAQSA

SEQ ID NO: 446695 - protein, 460 aa, unidentified
MNRKRSKSRINRTLPMMHPNAAAIDVGATIHMAAVRADRAPEPVRSFGTFTADLHRLVDWFTECGVETVVMESTSVYWIPIFELLDARGFTVFLVNARDAKHVPGRKTDVSDAQWLQRLHSYGLLRASFRPKGQIAELRAYVRQRERLLEYAASHIQHMQKALTEMNIQLHHVVADITGSTGLRIIRAILAGERDPEVLACLRHYSCHSSAETIAKALTGSYRTEHLFALEQALALYDAYHEKASACDVRIEAVLKELSIHRGRDIGSVPPASRRRHRTDQANALAFDVRAALFALLGKDITRIDGLGPYLSLKLIAECGDDLSSWPSAKHFTSWLGLAPSNKVSGGKMLSSRTRRSGGRAAALLRLAAVTVGRTDTALGAFYRRLSSRIGKAKAVTATARKVAVLFYNAVRHGMEYVDPGASSYETRYRTRVVNNLHRRAKAFGFVLQPLEPKAGAVVS

SEQ ID NO: 446696 - protein, 356 aa, unidentified
MTRLAGVIDGVIGVDTHRDTLAAAVTDMVGGLLAQTSVPADGAGYCQLFEFARVQVPGRRCWAVEGAGSYGAGLAAFLQARGERVVEVARPKRPARRTGAKSDALDAVRAAREALAQDHLLTPRRRGDREALRVLLATRHSACAAKVCAINQLKALIVGAPDELRAELRGLATKRQIMRCARLRDRPSRSLEHRMTIKALRLTAQRIQHLAGEAAGLRSDLERLVAAVAPWLLELPGVGPISAAQVLVSWSHAGRLRSEAAFAALAGANPIPASSGQVTRHRLNRSGDRQLNRALHTVVVARLRDDPDTHAYAARRTSEGKSARDIRRCLKRAVARQLFKLLERYDRSAVEVIKMA

SEQ ID NO: 446697 - protein, 438 aa, unidentified
MSNKVIFNLDELFISVGIDVGADFSWMSIALPNQQFVGKPYKILHNSIDSLTTAVSKIKEAEELYSLESRIFLESTGIYHYPLFCYLRDKGFNCSVINPIITKNSTNINIRKVHNDRFDSKKAALVGLKPDLKVSLMPSDLALNCRNLCREYYDLMDNRSAYVNKLQGELRMAFPQYLGIFSKVTINTSLTLLETYTSPSAFLEAGKQEIIDIIKSTARFGLTYAQNKYNAIIQAATDANQFGYIIESNIKRIRLYISFIRKYDEEINDILESLHKLVDSNEDTKFVKQVHLIETFKGAGFLSAATIMGEIGDFSAFSKPKQLFAYFGLDPAVKQSGKFEGTKVQMSKRGSSIARRVIHTLSLQSISISRNGKAKNPVLREYYLQKCDSKPKLVAMGAVSHKVCNMIFAILRDNKPFEIITPQEHIKQYNAAKCDIAA

SEQ ID NO: 446698 - protein, 373 aa, unidentified
MADYMADYREAFVAFDVAKIKHAVAVADSGRAGEVRFLGEIENRPVTIERTIRKLAKRYDRLHVCFEAGPTGYGLYRQVGDLGHDCMVVAPALIPKRSGERIKTNRRDAVTLARLHRAGELSAVWVPDIVHEAVRDLVRARQAGAEDLRRKRQQLLSFLLRHGRIYDAGGHWTLAHRRWLARQAFEHQAAQIVFQETSDAIEDAAQRLHRLDEQLAAIVETWSMKPVVEAYQAMRGASFLVAVIFAAEIGDVRRFETPSQLMAFLGLVAGERSTGDTVRRSGLTLAGNRRARRALVEAAWTYRYPARVSEPLRARLEGLPKAVRDIAWKAQVRLCARYRRLAAAGKKPPVIAAAIAREMAAFLWAIGREVAPS

SEQ ID NO: 446699 - protein, 331 aa, unidentified
MKNKEFVGIDVSKNVLDVFILSAQFHFTVSNSPEGFAQLLEIVSSKLKESFLRVFFCFENTGRYSRLLSLFLQDGSFGFAALDALDLKRSMGLTRGKSDKKDARTIAIYAWRRRDELTTTKLAGPVLDQIRQLLTLRDKLIRHRTAFKNTSRDLYDGYFDGEFDFIKERQESMLSNLQKEIDLVDKEIIRIINLQDDLLINYNLLRSIPGIGKVLSVYLIALTHNFTRFDTPRKFACYAGIAPFEYSSGTSIKGKTKVHPCANKHIKSLLNMAAMASIQINGEYKMYYQRRLAEGRNKMSTLNIVRNKLVFRAFAIVKRGSPYIDLHKFAA

SEQ ID NO: 446700 - protein, 477 aa, unidentified
MAAKKDGKTGTDPEGAGAAPEHGGDGAEVAEDRVQVVEYAAAIDVAKGSGMVCTRVPGSRPDRRRQKVWRVEATYAQVIALMDHLRCEGIQRLVLESTSDYWRIWYYLAEAAGLEAWLVNARDVKHLPGRGKSDKADCVWHCKLNERGMLRRSFVPPEPVRDLRALTRTRARLAQDQARHQARVEKILEDALLKISVVISDLFGASGRRFLDALVAGERSPKALAALGDPRLKATRRELEDALTGRFRDIHAFEISTHLRIIDAINEEITRLDDKIEEQLALVPRTAPACTACGLAGGGHAPGCADEQVPLLGLAARLDEITGVGECNARAIIAELGTDPSQFPTPGHAAAWARLTPRTRQSGETARPGRTGKGNRYIRGALGQAAMTAAKTDTRLGAMYRRIARKRGKQKAIVAVSRIICEIAWILICDPAARYHELGPDYYTPRSPARQTRDKIREIERLNPGKKVILADADAAA

SEQ ID NO: 446701 - protein, 342 aa, unidentified
MTLYIGVDIHARQQTLSYLETADGTTGQVVLDHEVDDVAGFYRQFQGEVIIGIEACGYTNWFEELVERLGHQLLVGDAAEIRRLARRRQKNDRRDADLLLDLLVHDEFPALYRYCQESREVLRQLRYRHKLVKLRTMVANTLHALALNAGLSLRAKLLTKGGRQQLSALPLSAISQQQRNELLSLADELTRRIQLVEQWLAVQAVRDGRVQRLQTHPGVGLLTSLCVVHTLGEVQRFSSTRKVAAYVGFDPMEDSSAERKAYGGISKAGSRLLRYLLIEAGQTAAKDDEQLKQFYRRLLPRRGKARAKVAVGRKLLIRCFIMWRAEIDYAEFLRRGQKEETE

SEQ ID NO: 446702 - protein, 415 aa, unidentified
METGKKERIFIYEKRKTAFIGIDMHKDIHVAVVIDCWTNILGEITFENRPSKFDKFMQDVKKIYKDLTPCFGLEDTRGFGRNFASYLLGHKYTVKHVNPAYTDSMRSSAPMSKKNDSFDAFCVAKVLRDMVDTLPDEEHNDLHWTIRQLVKRRNSLVKGIVIAKNQLNSNLTNVYPSYKKYFCDVDNKTALLFWEKYPHPQYLKGVTPELLLEELRTIHKGMKQEQAEMILTLSEQNSPKEKDFQYERDLIIKSLVREIRFKKQENEDIDNELERLVDLTGYKLQTMPGINLITASNIISEIGNVERFPNSDKLAQFCGVCPVNFSSAGKGKDQRSRQGNRVLNAIFHFLAIQLVQISPSGKPRHPVFREYFEGKIKEGKTKPQALVCVSRRAVRIIYGMMRTKTEYKPFEKVQE

SEQ ID NO: 446703 - protein, 421 aa, unidentified
MLGVGIDWAEEFHLVALGSPGEGVISVLRVEHRPEAVSALVERIAGLEADPAEVRVVLETRHGLLVEALVEAGYTVLPVNPELVSRRRGPARKKDDAEDARICCLLALDRHAGLRRLIPHGQVAGELRSIARDDERACRDERRLLNRLRADLLVTFPAALAIAGDDLGATRILRLLERWPTAQALAAASRDEIIEFGRAQRTGYLARFADRIAAALAEDHFTAPGHLARAKIDTIRLTARQLLLIDAQRRAWEKRMGELLLGTPGQPPEDQPGQAFPGGETYLSFPGLGRRLAARIAGEIGEHIEQFTTPNSLQCYAGRAPVTRRSGKRDLVVAHRLACNRYLADAVHKWAFASLRRSEWARDFYDTQRARGKSHHAALRALGNRWLEVLWHCLTHDVPYDEAVHTANRNRALAAITSSAA

SEQ ID NO: 446704 - protein, 339 aa, unidentified
MNFIGVDLHKKIITVCVMNEKLSVVARKTLYCNQPDQIVEFFRQFQPFRVVVEATASYLWFVELVEPLAEKIVLANPKKLRVIAESTKKTDRLDAQVLAEFLARDMIPQSYMPTPRQRQHRALVRHRQYIRGRMTSVRCKIRRILSDYNVDRKDLFSAQCGKAYLKQVPLSDADRFVIKQLWSEYEDHQARLLALTKKIKAFAAKAPKREAEARQIIKTAPGVGTVTAEAVLSELGDVSRFRNAKAVCAYAGLVPAVRQSGGKKSQDLRITKEGSGLLRWALVESAWRLVNTSPKWSAIFMRLRKRSGSKRAIVAVARKLLCVLYAMLRTSTPYKVITT

SEQ ID NO: 446705 - protein, 349 aa, unidentified
MTQFNRIGLDTSKAVFTLHCVDEAGKPLLRVNLRRAQLIPFFKKHASTVVAMEACGGSHHWARKLIALGHEVRLIPAQYVKPYLKRGKNDRNDAEAICEAAGRPGMRFVLAKTEDQQAQAMVMKVRTTLIDQRTQLINALRGHAAEFGVIAAKGISKVLPLLTAIAAETTIPAIAREMMALLGQQIDHLNNQIATLEARFAAMHQANALSQMLATAPGIGPVIALTFAIEVDVSAFETGRHLAAWLGLTPQEHSTGGKQRMGGISRAGNERLRSLLVEGAMSVITAVETRGSKLATPWLLAMLARRPKKVVAVALANKMARMIWAMMTRREAYRRPAAAGAGCRPAVVS

SEQ ID NO: 446706 - protein, 319 aa, unidentified
MAATAQLRKLFVGIDVSKDTLDVHIHPQGESFKLARNGDGVEQLVQRLKELELAAIAVEATGGFEGMAVAALGAAGLPVVVVNPKQVHNYAKALGLNAKTDPLDASVIARFAEAVKPEIRPLPDEETVILAELLARRRQIVQMITAEKNRAFRVATNTGLQKSIGRVIDALDRELARLDDDIDRTVKGSPLWRENEDLLASVPGIGKLIARTLLAEMPELGHITGKQAAALAGLAPWTRQSGQWRGKAFIGGGRAVCRSMLFLAAMVAVRHNPDLKAFSLRLLNAGKSKKTVLIAVARKLLTILNAILRDRTPWAPRIA

SEQ ID NO: 446707 - protein, 345 aa, unidentified
MAIVEVTCPVTGGVDTHLDTHVAAVLDGTGGVLGVESFPTTPAGFTELHDWMIRFGDIERVGVEGTGAYGAGLARFLRGCGLEVIEVDRPNRRARRQAGKSDPADAVEAARAVLSGRATGIAKTGDGAVEAMRALLIAKRSGREARISCLNQLRHLGFCGPDDLREAFRGVPRTALGARAAALRPRVGGDDVAHATKIAMRTLGRRVLALDADNDELDALLAGLVHTTAPDLLGVYGVGVDTAAILLVAAGDNADRIRSEAAWAHLCGVAPLPASSGKITRHRLNRGGNRQANHALWRIVFTRLGSEPRTRDYFERRLAAGLSKREIIRILKRYVAREVYRHLPR

SEQ ID NO: 446708 - protein, 363 aa, unidentified
MFTERTSVGLDVHARSVAAAAIDGLTGEVLRTRLTPSHEHIRAWVSELPGPVAVAYEAGPTGFGLYRALTDAGVRCEVVAPSKLQRPSGDRVKTDARDALHLSRLLRLDEITSVSIPSVSQEAARDLVRAREDCRGDLMRARHRLSKLLLRYGIVYYGGKAWTGTHDRWLRTEAAPRLSTPATRMAFDADYDHVLTMQARRGRLDAAIEAIATNSEFTPVVRRVSCLRGVSTLTGLALAVEIGDWNRFTGNTIGSFVGLTPSEYSSGSSRSQGPITKTGNTHVRRLLVEAAWHHRARYHVGAAMRSRWDLASPAARARGDDGNRRLHGRWAGFLERRKRPTVANVAIARELAGWCWSLAVMQD

SEQ ID NO: 446709 - protein, 412 aa, unidentified
MQVIHARCAGLDVHKKSVSACVLCWESGTKKSPAVRVFGTMTRDLLELADWLKAQGVTQVAMEATGVYWRPVWSILEGQFSLMLVNPQHIKAVPGRKTDAKDCEWIADLLQHGLLQGSFVPPTPIQDLRDLTRYRAELTQSQNRVTNRIHKLLEQANIKLGSVVSDALGVSGRQMMRALIKGEEDPQQLAELAQRRLRSKIPELRLALQGKVRDHHRFLLGEFLDEWEDIGQRIARIEEEIERRLTPFDEAVALCQTIPGVDWLTAANLVAEIGVNMEQFPSASHLASWAGLCPGNHESAGKRMSGKMREGNRWLRRTLCQAAWAVSRKKDCYLATQYRRLASRRGVKRAVMAVAHTMLIIVYHVLKTGRTYQELGGTYLEEINKERLQRYFLKRLKGLGLKVTVQPLIQSA

SEQ ID NO: 446710 - protein, 491 aa, unidentified
MAEKLNSEVFLFNSETGELLNEQSESEIQYLKAYGCGIDCHSKFLQISVLVRVNESIREYRNQFDTDWDSVIRARDWVLSVLETYASPPADVSCGLHYCIESTGSYHVVVVKAWKGMPSIINPSFAKAGRKKTDILDAALLARSDLSGIWPESFIPSIEVDELRVLLAERNNFNQLASRISNRINNMLLKFGYTIGREGSVTKVKNIRNRIEDIVSVCPSKADDICPLSIPDDMKSVFKEEYRQYDMYKRLVSEYDRKITHKIRSMNWETGNGTIDGRKMLRLLCTVPGVGEQTAIVWMARIVTPKRFPNEKALAAYCGLDPSLKVSAGKVTSTVKRGGCKDLHSMLCQAASNLLRRHNEPFGRWGYNIAIRSGRWKKGVSAVARKLAVALYFMSLRCEEFSYEKYKILTEPNVVDIPIEQLAELDSSYKRYVRILMSNGITTTKTMVHEYYICNLTNIKGLGKKFYSLLTDFVENQNHYKKLAEDGYEKE

SEQ ID NO: 446711 - protein, 279 aa, unidentified
MNYMGIDHHKQYSHITLVDKRGQEIKSGRVENLRREVEEFLKGVEGKIVAAIEAGRSSYTMVDLMKGLGVEVKVAHSKELRAIAAAKIKTDKRSAETLAHLLRADLIPEVYQRREENRQAQRVLRQRVFFVRSLTRVKNRIRALLAQQGEEVQSEVSQVRNIFSRVGQRLLRELPLAEPDKSLLQSLLKNYKHLEARIKESDRLVHRLYREMKPARLIRTVPGFGKFLSVLVATEIADIKRFTKVGSLHCYAGLIPSTYSSGQRSYQGRIIKEGNQWLR

SEQ ID NO: 446712 - protein, 451 aa, unidentified
MSKKQMSLEVVNPNAAGIDVGSRSHWVAVGQDAQDVKEFGVYSEDHLNLCKWLTEHSISTIAMESTGTYWQNLFSSLVAFGFDVILVNGKQTKNIKGKKTDIKDCQWIQKLHSLGLLSSSFLPDSTTDIIRTYSRHRQNLIKQSSRTVLKVQKYLRLMNLRLDVVVKDVVGLTGSKIITEFIAGEWSGKKLAQHRHYNCRKSEEEIAKALQYNGRNDYLFALKQEWDTYLHLQKQIQDVDAEIKKLLEDIIDKDDNKKQHVATKKTHKRKNKNTIEGTDMNQIAYQYFEGIDLMAIEGVNDSTIMTIISEIGLQGIKKFDAAKQFTAWLRLAPNNKISGGKVLSHHLPKGSSRLKIAFRNAANSIGNLKEGHLADFFRRINYKKGRATAVSATARKLAVIIWNMLAKGDPYNPPTQYVFLDEKRKLGLVKRIKKQMAKFEIQPEQLGFITS

SEQ ID NO: 446713 - protein, 309 aa, unidentified
MEHLVGIDVSKDRLDVHLRPSGESFAVARDGDGLAALVERLQALAPALVVMEATGGYETIVASALGAAHLPLAVVNPRQIRAFARATGKLAKTDRLDAAAIAHFAEAIRPPARPIAEPEAQALGELVARRRQVIEMMVAERNRRRTATQRRVLRAIDRHLELLQAELSELEGDIDGAIRNSPAWQADADLLTSVPGIGKATLRTLIAELPELGRLTRRKIAALVGLAPINRDSGTMRGRRTIAGGRSAVRAALFMPAMVASKKNPLIAPYYKKLRAAGKTAKQALTACMRKLLVILNAILRDRKPWQPA

SEQ ID NO: 446714 - protein, 347 aa, unidentified
MNKPRYFVGIDIAAATFTSAIGEMGEKWQLTVKATPFDNTFDSFPKYLAWLQAHGVRPENAILCMEATGVYNEVLAHFLVANHYGVAIEPPLKVKRAFTPEGHKSDAVDCGQISEYAYRFWDELSLWAPRQAVLEQIKTLLATREQFVAEKAGHQHALLALQRKAIRTPLAEQLHATAIAQLKAHIRQTEAEIQRLIDQDPPAHHTVALLMTIPGVGLLLAAHLLITFQNAPQPLSPKDLAAFVGICPYENSSGTSLLHTPTSRHYGPPGLRKLLFLAALSLRTHNPSFRTYFQRKKDAGKPAKLVINNIANKLLKIVVAVVRTDTAFIPGYRSINPRLLKPALTKS

SEQ ID NO: 446715 - protein, 329 aa, unidentified
MKRTWFIGIDISKKTLDVAIYDLMLQTGKDHFRVENDQKGFKQLIKQLKNKGVELKEAFICLEYCGVYGLEIGLFLENKVAFSFIAPLHIKRSLGLTRGKNDKLDAFKIARFCYLFRGELKPSKMPSKIMIQLKTLMAERNRVVKAAKAEKQVLKEFANQFDESAANRIKTRIQVLEKDVKAIEKEIIEQVEKDVKIHENYQLLRSIIGIGLVNAVMMILCTNNFEGITNPRSFACYCGVAPFEYSSGTSIKGKTRVSNLANKKMKADLTNAARSAVINDAELKLYYKRKREQGKDHGTVMNAVKFKIITRAFAVINRRTPFVLLRQAG

SEQ ID NO: 446716 - protein, 473 aa, unidentified
MSKGSGTTRGDRRRNERRARLRRVLPRDGAVIGIGLAEEKQAIAVIDHDVRVLARKTVRVKVFRLGPALDWAVAQARARGFASVTVACEPTGPRWMQVQRLCAERGLPLVCIQPLVSHIAREQQDYTSHKTDEADCVMIARLAVELHCYLPGQLDETWAHLRHLGRRRNQLITAATASVQRIRDFLSVAWPVATETCVRPFESVTWLAAMQVVTSCCGADPGKLAASGAEAFTALVRQAMPGWGGARPSGRVCPAVFAALTDTEGVVASHRRGLLRRCADELGDLHRTRAQLRAVEADMVAVLARLGLARLADIPGLTAVGAAAILAETGDPRRYDSSSSLVKHSGLSPADNASGAFSGQARISRRGRPGLRLTVWRAVWAVLIHNPVMAAKYQAMTQASDTAASAPADAGSRQVSAAAAAARARRAKARVACAASLLRWIYSIVGHDTGWDPAVASGAAARQHASGNRQEAA

SEQ ID NO: 446717 - protein, 424 aa, unidentified
MKVTYQTCCGVDVHKSFLVATIVKTTGGIEPSYQKKRFSTFNSSILEFKQWLLDNDCHDVCMESTGKYWVPVFNLLEDEINVVIANPKWVKAVKGNKDDTKDSKWIVDLFRLGLVKGSYIPCKIVRILREYTRYRYKLVSCRSSEKNRYQNTLTVCNVALDSVVSDIFGKSSMSIIDYLLEQSGTSINHEEIASKLLRSLKSKEDAVIESVEGYQMTDAQKYRVRLVRAHMDYITAEINDVDKMIENMISSNPDFENAVQFLCTIPGVKRDSAITIISEIGTDMSQFSSSKRLCCWAGLTPGSNESAGKKKSVRITRAGVYLKPALVQCAHAAVKSDKSPYYKKKYESLVKRRGKKRAIIAIARMILTAIYQMLSTGEQWNPSDLYKIDMPVALVEKQKAKAIKQAKKLLQREGILPPDEPLAS

SEQ ID NO: 446718 - protein, 339 aa, unidentified
MTEITRVGLDLAKNVFEVHAVNAQEQVVVRRSLRRSQVLTWFAKQPPCLIGIEACGTANHWARELSTLGHTVRLIPPAYAKQYVRRNKNDAADAAAICEAVSRPSMRFVPIKTVEQQADAVTHKARQILIKQRTMAMNSLRSLMAEFGIVIPQGPQHIGKLLAILADPEDTSVAAVARTALNTMSQVLSALEMQIGVLDKDIRVRARTDVTARRLDTIPGFGPILSSAIAAIVTDPRHFDSGRDFAASLGLVPRQDGTGGKVKLGPISKRGNGYLRRLLVNGATAVLNGKNARNDPWRAKMLDGKPRKLVAVALANKMARIAWAVMTRQEDFRPRAVPA

SEQ ID NO: 446719 - protein, 389 aa, unidentified
MTSKKITRRTELPVATTTPAVQGRNVFGADPHKRTLTATVLDERGGVLGTSVFKVSGDGHRAMETWALSFGPVATWGIEGASGIGRHTAVYLVRQGHDVRDVCPNRTSERSRGRCQGKSDALDSVRIARETQADPETPVAFKRAGPDRGPDEKTELMALWHKVRRSVLKSRQHLLNEAEAMLMDLPEELRVELPDTPDVQSRLRHLVARDHSKSSDAVTELRLRLLEEMTMTLSGLEAKEKEATAALATLIQAARSTLDGLCGLSTRSVAELLVEVGDPRRMTEGGFAKFNGTAPLPASSAEGDGEPLRHRLNRGGNRRVNSVLHLMAITQLRCEPRARHLYDHARQRGHTKKEAMRILKRHLSNLVYRRMTTDINARDSSEGSHQIAA

SEQ ID NO: 446720 - protein, 427 aa, unidentified
MICAAVERGAGIDVGKKWLSVCIMIGPLNGEPRVERQRIGVNVADLQRLREWLCKEAITHVVMESTGSYWKPVFNVLEDSVKVYLANPYEVKNRRGHKTDDKDGWWLAHLLRHAMIHPSFIPPRPIRELRDLTRRRERLNGAGTAEKNRVQKILEDANIKLGNVLSDVFGASGQLMVDALLEGKGAPGQIAQFAKGRAKKKIPAIIAALEGHQMSEHHRQMIRYSLAHMKFVEEQIEEIDKDIAAKIHEAGLDRQWQILQTVPGVQERSAAKILAETGADMTQFPAPRNLSSWAGVCPGNNRSAGRNRSNRPTGGNPWLRAALTECAWAAAAKKNCFLKEKFWRLTTKSRGKKNLALVAVAHSILQLVYDVLRTGQPYRDRQAPALSEQQQERLIRHHVRRLGKLGVCVHSLRSGKAVKQTPIVVPN

SEQ ID NO: 446721 - protein, 345 aa, unidentified
MEIRTIGIDLGKTVFHLVGINARGEVVVRKKCSRTQLLRFTSNLPACLIGMEACGGSHFLGRALKEQGHDARLMPAQYVKPYVKTNKNDYIDAEACAEAVTRPRMRFVPIKSDDQLDLQSLHRVRERWMVRRTAVINQIRGMLLERGITIAKGRRHIEESLPGILEDADNKLSGALRVLLSELRREMQYLHGQIEECSKLIERIAGELEQCKHLLTVPGIGPVTATATVAAIGNGAAFKRGRGFAAWIGAVPGEHSTGGKQKLTGISRRGNKYLRKLFVQGAHTVLLQRSKQEPGLRMWLAKLVSRKRPQVATVALANKMARIAWAVLSKGEAYRPPLAAQTVAA

SEQ ID NO: 446722 - protein, 427 aa, unidentified
MYRIAGIDVHKKKLAVVVSDVEVHGEYQFERGWFGANPEQLRCLSQWLVEHQVEEVVMESTALYWKPVWGALERYWQPICEKGEGAGATSGILHLAQAQSNRGPRGRKKDFRDAERLVKRLVADELKLSFVPDWEQRLWRTLTRRRYQLTRARVQLQNQLEALLEEAHLKLSSLVSDLLGVSARRMLQAIADGETNPEALAGLADRRLRATPAQLSDALGACTELHAVYRRLIKMMLGELKVIEEHTAELNQELATLLRPHQDAVERLAEVPGLGVDSAQQILAEVGANAVVFASDKNLCSWVGICPGDEESAGESSSHRCPQGNRQMRRLLNQAANAAVKTKGSIFEIVYRRLVPRLGHNQTIGAVAHRLCRLIWLLLRKGVRYEERGPAVSQRSRQNRTSKMIRELRTLGYRVEFLNAVPSNPMP

SEQ ID NO: 446723 - protein, 327 aa, unidentified
MKKNPAPVYVGMDVAKATLQVHLNGHQFEFKNDAKGHAQLSKKLAKLTLPHVVCEATGGYERPMVEACHKAKILVSVLNPAHTLAASQAQGKRAKTDPCDAAALTDYGQRFQPQPTATLPPAVREITELTLWLKQLIDNRAVVRTQAEHQTNAFVGQRHAELLAHYESQIATVEQEIKKMVQAQASFQQRVDCLTQIEGVGFRTALLTLVFLPELGAMSRGGTAALAGLAPWTRDSGTMKGKRFIGGGRAQVRPVLYMAALSASRCNPVLAPFYVGLKKRGKPSKLALTAVMRKLLIHMNSKLKKLAAKPVPEKPGTAKKTEKSLAK

SEQ ID NO: 446724 - protein, 432 aa, unidentified
MKFNQSSKQNQRISRISETTLVIGTDIAKHNHVARAFTYRGIELGKRCLFQNDENGLLDLLAWAESIQQEHGLTDVLLGVEPTGHYWFPLFHFLKQRSIEVVLVNPHHVKKSKELDDNSPTKNDIKDAKVVAKLVIDGRYTQPQLPEGVYADLRVLMNQRDRLCGDLNRVKGRIHNWLDRFFPEYRQVFKDWEGKASLITLQHFPLPQDVVSAGETTVVATWKKNDVKRAVGPKRAGLLYRKAQTSIGLTEGATAAKHELAMYLEQYAMLCRQIEQLMEHVADLVEQIPGATHMMSIPCIGLITVAGFLAEVGDLSGYDHSRQIVRHAGLSLRENSSGLHKGETTISKRGRCRLRALLYRSALTLLAPNPAFLALHLYSTTRRDNPLKKKQSMIAISSKLIRVMFELGRKQKNYDVSKVLGPHREAQLQAAA

SEQ ID NO: 446725 - protein, 310 aa, unidentified
MGRSRSKVCGIDVHKKFLVATVLDRRGEKRTEKIQNSLEHLLQLREWILAEQCEVVAFESTGEYWIPLYDVLEGSVETIVANSYHIKWIPGKKTDTIDSEWIAELALNDLITPSRILKKEKRDIRALTRLREKLVNERTDHKNRVHKILDSACIRLATFFSDLFGKTGLKILKYILSGVPPEEIVRKLPKRLHPHSDAILDTIRTQLSTQQLIQLQTSVTMIDLLNDRIKELEQTILNELHKDRRKLQILMSIPGIGVIGATTLLAEIGDVNDFSSPDKLTKWAGITPRVYQSADKLHTGSITKQGSKHL

SEQ ID NO: 446726 - protein, 312 aa, unidentified
MADLFHGGIDVASDRLDVMLLPHGQCFWVGNNAVGWGELVERLRGLCIAAIGIEASGGYERGVLRALLAAGISVRQINLFKLRQFAKARGVLAKNDRLDARMIALFVATMPTRPAQRNEAAEQMAEIVTARRQLSDEKVAAENASRLFEDAILRRLYRRRLMRLALDIALLDKRLAAMVSANVALAQRYRLLTSMPGVGPVLAFTLIALLPELGQMSRRQVAAIVGVAPYDFDSGKLKGMRCIWGGRAPVRRVLYMAAVTACRYNPSLKAFHERLSAAGKKSKVAIVAVMRKIITTLNAMIRDNAAWNARFA

SEQ ID NO: 446727 - protein, 378 aa, unidentified
MNRIIKIGMDVHTTNYTLCIFEPSFEHDGTVHCITQVKPEIKKIIHVIETFKKKHENEELNIVCGYEAGCLGYSLYHELKEKGVECVILAPTTMKTEKGGRKLKNDYRDAKMIAECLAYGGYSAVHVPTELDNSVKEFIRMRDDIKENLKSIKQQIIAFLTRNGKQFEGKSYWTRKHIDWINTVSFSEPLLQDTLKEYMIEYNHLCDRVETLDKQIEEVSLKEEYVEKVQQLQCLIGIKTHTALSLIVETSDFNRFKKGNMYSAYLGLIPGDDSSGGHEKKLGITKAGNNHLRRLLVEAAQGYTRGRVGFKSKDLKSRQEKCSSEVVAYADRANERLRRKYYRMTLRGKKFNVAKTAIARELACFVWGIMTDHIDLCN

SEQ ID NO: 446728 - protein, 373 aa, unidentified
MVYQHYWVGLDAGHLETAVCLIDAEGGILFEAICETKSGPIRDILRRFGVEAAQCLTIEAGNGTQMVRELRSYGFPVQVVDVRKSSKFLAIRRQKTDVHDARGLAELGRLARSMGSQVFVKPMEHQNIRTLINVRRTMLKNRARTDALIQSIFRLYGGNVKLLNGRGALAAEVNDQVRKMRQHGLEIGVNLQPLVEIAEALREQISILDRQMRDIASNNPTCRNFQTIPGVGAVIALSFYSAIGDPYRFERSRDVGAYLGLTPTLYQSGATSRRGRISRHGNKLTRMHLITAATVLLCRIEIESRLRTWGLELAQRVGFLKARVAVARKLAVIMLGMWKSGSPFRPDGTSSLFLQQEEAGLDPVLISGTQISL

SEQ ID NO: 446729 - protein, 354 aa, unidentified
MTDIKYIGIDVHQATSVLAVVNRRGKLISETIVDTSFTTIIDFIKSQRGTIWATFEEGTQANWLYDIIEPHVAKLIVCDPRKNKQDGSKDDKIDARRLANLLRMNGLTAVYHGKGEIRILKELARSYINLQQDSNRVMNRVKAMYRGRGISCRGKSVYRPENRQKWLEKLDSHGSRERAKRLLQQLDLLSELNSEAVKDLVRESRKYKDYKLLRGIPGIGPIRAALILAFVMTPHRFRNKRQFWAYIGFSVVRRGSAEYEIVGGVLKRSKKKPLPRGLNHNYNHVLKNVFKGAALTAAYRGPFKELLDQRVENGTAPNLALLTLARKIASITLALWKKGESFDIERHRLSEQTT

SEQ ID NO: 446730 - protein, 324 aa, unidentified
MTKSTNETQYVGIDVSKAHLDIAVRPTNVCWQENNDIQGISSLVEKLTRLRPTLIVLEATGGYEMPGACALGAAGLPVAVINPRQARDFAKSLGRLAKTDKIDALMLAHFGESVRPEPHNLPDEQALQLQALLVRRRQLIEMLVAEKNRMHTTHQTVRPHLQEHIDWLEEKLGEIDQELHDQLRQSPIWQEKEDLLRSVPGIGPVTSITLLAELPELGQLNRKQIAALVGVAPFNCDSGRMRGKRAIWGGRACVRNALYMATLTASRFNPIIRAYFQHLVDQGKPFKVALVACMRKLLSILNAMIHTMKSWQPNLAVPKPLPIP

SEQ ID NO: 446731 - protein, 367 aa, unidentified
MQVLRYGIGLDMAMEKFDACISVIDADQKVTIKASRSFNNNPKGHQQLYKWVTSHCCLAVPVIFLMEATGIYHETFAYYLYSRGCSISVVLPNKAKKYKQALGLRSKTDGIDAKSLSRMICEQALPAWVPMSKTIYLLRAITRQIESVSKDITRTKCQLHAQKFAMYKNKEVINCMKQQLKLFQKQKDQLQQQALLIIESDAALNEKFEKICRIKGVGKLSLAVIIAETNGFSLFEKVGQVVSYSGYDIIENQSGKHVGKTRISKQGNGRIRRILHMPAFNVVRLKQKPFSDLYQRVHDRSKIKMKAYTAVQKKLLILMYILWKKDAAYDPSYLQTSREKEPVLSFVTADVLARQKNSSAVEQSYTR

SEQ ID NO: 446732 - protein, 348 aa, unidentified
MDYYAGIDVSLEYASVCVVGAGGKIVREGKVLSEPEALIAWFGSLGVRLERIGLEAGPLSQWLYAGLRQAGLAVELLETRHVHDAFKAMPVKSDRNDARGIAQLMRLGWFKPVHCKSMAAQETRALLTARKLIQSKLLDVENSLRGILRGFGLKVGKTTAKSFAGRIDELVAGHPNLEAVAAALLAVRAVLLREFDGFEKRVRVMARSHAKARLLMTTPSVGPIVALTYASAVDDPTRFKSSKAAGAHFGLTPKKYQSGETDVSGRISKIGDAAVREALYQAAHVMLTKPVKGCTALKSWAMRIAKRAGMRKAKVALARKLAVVLHRMLADDKPFNPTAGAKAVTAAA

SEQ ID NO: 446733 - protein, 352 aa, unidentified
MNQITTVGVDLAKAVIVVCAADVEGHVQYFKQLSFKAFAQWVAMLPPCTFGMEACSSAHHWGRRLAAHGHTARLMGAEFVKPFRKSQGAKNDRNDAQAILTAMRQPDMRFVSVKTIDQQAILAWHCMRRGWTDEKTALMNRLRGLLAEFGVWLARSPEALMRAIPQLMEDEKLPERLRPLLTAAQVEMRRLDERIESCTLEIRAHAKHSEDAQRIEGIIGVGSITSSAIVATVTDARDFKNGRQMAAWLGLVPKQYSSGGRTSLGRITKRGDTYLRGLLFQGACSALMAATRKAPEKRGRLQHWMVEAHQRLGYYKAVVAIANKNARMIWAILAKGESYDPDAWQRYAPRPV

SEQ ID NO: 446734 - protein, 316 aa, unidentified
MNTHIVVILGVDVSKSMLDVGVQDGSWRASFPNDATGIKSLIRMARKRFGSFIVGLEPSGGYERSLVEALLDENLDVRFADARRVRDLARAHNAPAKTDAIDACFIARFIAETGGRVIKRDPATQALSAIMSARAFLVESAQRLEQRLSHEHQVDARRALTRQLRRLKAEICALDLAAQKHVAAHAHLAEASRRLQTAPGVGPIVAMTLLGELPELGSLNSKQIARLVGLAPFIRESGQWKGRAHCSGGRMRPRNILYLAAMAAKRCHKPSKAFFDKLVSNAKPKMVALNALMRKLITQLNAMMRDHTDWAKTTPS

SEQ ID NO: 446735 - protein, 389 aa, unidentified
MGGRAEVVREFSTFTADLVRLGDWLVSERVTQVVIEATGVYWRPVWHVLEERGRYELMLVNPRHVRNLPGRKTDAGDASWLAQLLECGLLRGSFIATKEMARLRDLTRYRTKLIQERTREIQRVQKLLEDANVKLDSVISDVMGKSAREMLDALITGEADVEAMAQMARTRMRAKIPELRLALDGRFDDHHRLMLSMHLEHIDHLSAMVAGLDSKVDELMGPFDESATRLLSIPGLGKRTVETIVAEIGVDMSRFPTPGHLASWTGLCPGNDESAGKRRSGRARKGNEALRTAMCEAAWAASHTRDTYLSAQYRRFKRRMGTKSEGKAIFAVAHTMIVIVWHLLHDNTSYTELGPDYFDRRNDADARRRYLIRELEKLGSTVTLQPAAA

SEQ ID NO: 446736 - protein, 345 aa, unidentified
MKITTIGIDLAKNVFQVHAVDERVKVVLRKQLRRDQMTAFFANLPPSVIGMEACGSAHHWARTLKGFGHDVRLMSPQFVKPYVKSNKNDVADAEAICEAVARPNMRFVPVKSVEQQAVLSLHRVRQGFVKARTAQANQIRGLLGEFGLVMPAGISHIAKRVPSLLEDGSNLLPGSFRQLMTRLTEHLKDLDALVDEFEAQIKAWHRSSELSMKLEKIPGIGPLGASALVASIADAKSFANGRQLSAWLGLVPRQHSSGGKPALLGISKRGDVYLRTLLIHGARSAIVAAQRKAVNTNVWLTGLLGRRHPNVAAVALANKNVRTVWALLAHGREFRPNYASQLLAA

SEQ ID NO: 446737 - protein, 353 aa, unidentified
MSSEKYIGLDVHQATISVAVVDSQGKVVMESILETRASTLLEFFAGLRGSLFVTFEEGTWAAWLYDLLKPHVTEVLVCNPRKIPLLKQGNKSDQIDARKLAERLRLHDLKPVYHGETGVRMLRELARSYLTIVKDLSRVMNRLKALYRSWAIPCAGRDVYYTRHRSQWLEKIAEAGTRRRAEQLYQQLDMLQHLRQQARRELLAESRKHAITARLRKIPSLGPIRSALAVALIQTPHRFRSKRQLWTYSGLGLETRDSGEYQFVKGQPRRRKKQATIRGLNKDYNPDLKGLFKGAATRASVQPGPFQEFYQRSLAKGIKPTMVRLTLARKIAAITLTLWKKGGSTGHPVGVVV

SEQ ID NO: 446738 - protein, 437 aa, unidentified
MKVMYERVAGIDVHKKMIKVAIRSPGARPWTRKTEILTFRTFYGVLREVARELRRRGVTHVVMEASGIYTEPVYHALCEEDGLEVLVVNPAHVKAVKGHKTDARDCARLAELLECGLLQGSYIPPRELKEVRDLVRYRIKKVQARTSEIQRLDKTLESAGIKLGSVVSDVTGKGPAAMTGALIDGERRGKVLADLALGRARSAGKLADLTMALEGRFTGHHAAMCRLVLDQVRLLDAAVADLDERIAAAAAPWQREIALLKTIPGFGDVVAWAWIAEIGPDPRRWFASGGKLASWAGLAPGNHVSAGKRRYGRTGDAGTYIKPVLVQAAWAAIRVKGRLQARYHKLVRRMGGPKNPAAVKKAIVAIAHTLLKIAYSVLSNGKAYQDPGKDFYTRRETPGQRQAWLERQLRKLHPGCTVTITVSPPEAALPPGANRQP

SEQ ID NO: 446739 - protein, 419 aa, unidentified
MFSDTTLIVGVDVHRRTNVMLVMDGHGDVVDSHRRFANNGAGTARFADYLAQMVQSNGFQTIHLAAEATNNFWLPFFHQISQSATLAQWPVRLYPFNPRLVHNFKKALGEEEKTDLRDAGVIAERLRFGKELPRPFAMEEMYLPLRMLTRYRYHLVRELVRVKSYCLSLVYLKATDYSDKDKRPFSDIFGATSRAVLREFATLDEIANMPFDELVEWLDVKGKRRFPNPEENTRKLQQVAADAYRLPDEWAAVIHDIIALNLRHIALLENLIARVETAIAQQMEAIPHMLDTVPGIGPVFAAGIIAEIGDLARFEYNEAKVASYAGLKWPRSQSADFEGQDTRLSRSGNHFLRYYLCEAAQVVRLHAPEYRDYYNRKYKEVRKHQHKRAVVLTARKLVRLVVRLLTTNEPYRLRQAPND

SEQ ID NO: 446740 - protein, 356 aa, unidentified
MSQEKYIGMDVHQATISVAVMDASGKLIMECLLETKAATIVDFIQGLHGTLSLTFEEGTSAAWLHDLLKPQVSRLIVCDPRKAALLKEGNKSDRIDARKLAEMLRTNQLKSVYHGEHGLRTLKELGRSYLTITQDVTRSMNRIKALYRSWAIPCSGSTVYAPRHRAEWLAKIEQPGVRIRAERLYQQLDSLQALRLQARCELLGESHKHAAVQLLRQIPSIGPIRSALLVALLQTPHRFRTKRQLWAYSGFAVETHDSGEYRSVRGKLQRNRERITVRGLNDNHNKDLKNLFKSAAISASTRPGPLQDFYVALVGKGIRPTMARLTLARKMAAITLTMWKKGVSFDPKQLHRQAPA

SEQ ID NO: 446741 - protein, 378 aa, unidentified
MKNDNRYVGLDVHAETIAVAVVETDGEVCFLGTIPNRAETVRRLVKRLGSVNRLRFCYEAGPTGYVLYWQLTGLGAHCDVVAPTLVPVKPGDRVKTDRRDAEKLAVLYRGGHLTPVWVPDRAHEALRDLVRAREAAKSDQLRARHRLQKFLLRHGRRPPQGIKAWTQKHLDWVRREVRFDAAAQEAVLVDHLAEVEHARERIRRLEGSIDVAVEAAPACMRAVIEALQGLRGIAKVSAATIVSEVGSLSRFRKPRQLMGYSGGVPREDSSGDRVRRGSITKTGNAHLRRIVGEAAWSYRHRPTVRGELLKRQAGLSEEVKAISWKAQHRLYSRYRRLIGKGKTKQQVITAVARELLGFIWAIGVHVEQQHGTAARRAA

SEQ ID NO: 446742 - protein, 361 aa, unidentified
MQFVGLDVHGEATAISVRSARGRVLRRLIVPTTSAALRRAFLKTRGRMRIVCEAGPLARWVRDTLETRLREVIVCDRRRTRLVAGGSKNDKIDADKLSELLWKNDLRPVYVPRDSHVFLRRLVTHYLRMLRDRSRILFRLRALFLESGIRVVTPRSAPERVPIHRLRDAGSKYVARSYLAQLKTTSLLLTAVREELLELARTFPAFELLQTVPYVGEMRAAQLIAIVGHPERFRSRRRFWSYGALGLIQRTTSEHRVSNGEVVRNERTRGLRLAKTGQPLLKKVLRDIALFSSLGRGTFREIYEAHIARGVKPGTARLALARKVAAVIRAVWRSGAPFDASMMKTQIGASGRVSDHEFGLE

SEQ ID NO: 446743 - protein, 369 aa, unidentified
MADYREAFVAFDVAKIKHAVAVADSGRAGEVRFLGEIENRPVTIERTIRKLAKRYDRLHVCFEAGPTGYGLYRQVGDLGHDCMVVAPALIPKRSGERIKTNRRDAVTLARLHRAGELSAVWVPDIVHEAVRDLVRARQAGAEDLRRKRQQLLSFLLRHGRIYDAGGHWTLAHRRWLARQAFEHQAAQIVFQETSDAIEDAAQRLHRLDEQLAAIVETWSMKPVVEAYQAMRGVSFLVAVIFAAEIGDVRRFETPPQLMAFLGLVPGERSTGDTVRRSRLTLAGNRRARRALIEAAWTYRYPARVSEPLRARLEGLPKAVRDIAWKAQVRLCARYRRLAAAGKKPPVIAAAIAREMAAFLWAIGREVAPS

SEQ ID NO: 446744 - protein, 343 aa, unidentified
MEHYVGLDVSLKQTSICVVNQVGSVVREGVVDSEPEAIATFVRSKAPGAVRIGLETGPTATWLWTELKQLGLPVICIDARHARAVLKMQINKSDRNDAAGIARIMQTGWFKEVRVKDLESHSVRALLASRALLVKIKRDLENQIRGLLKNVGLVIGRAKFNVFTVRAEELIEDRPELMAVVGPLLKARQAIEQQTDDLDRKVLKLARYDAQVRRFMTVPGVGPITALCFKATIDDPTRFKRSRSVGAYVGLTTRRHASGEVDWTGRISKCGDAMLRSYLFEAAGVLLTRVPKWSALKAWGMRLAKRNGLRKAKVAVARKLAVILHRMWIDGTEFNWSKKEVAA

SEQ ID NO: 446745 - protein, 408 aa, unidentified
MRAVMIGIDPHKGSHTAVAISAAEEPLGELRVCASAAQAGALVAWAAPWPERTWAVEGAGGLGHLLAQQLVAAGERVLDVPPKLASRVRLLQAGDTNKNDPNDALSVAVAALRSKARREVAAEDHAAVLKVWAKRHRDLARARNQVACRLHAVLCDLLAGGISKEITAAHAARILEQVTPSGPVAAARRELAGQFLEDLRGLDAQLRDTKKKLAAAVRASGTSLTEVFGFGPASTGTVIGDVIDVTRFPSRDHFASYNGTAPVEVSSGNRKTCRLSLRGNRRINHALHMAAITQIRHAHSDGRAYYDRKIAEGKTCKEALRCLKRRISDAVFARLQADARQATAAAAAKGPGGQPGNDSDSSAAGSHPERQLFGQATPEPATATLRRATPRRLPTPARPTAKKIRQTS

SEQ ID NO: 446746 - protein, 417 aa, unidentified
MHTHYAWFLGIDGGYEAHQICLMDATGLIVMERQVAHDAAAVQTAITALLDRTGAAPAQIAVAIETPRGAVVATLLERGFAVFALNPKQLDRFRDRHTVAGAKDDRRDALVLADSRRTDPRAFRRVQLDDAVVMQLRELAHAEEDLKRDLGRLTNRLRDQIYRIAPAVLPLCPAADEPWFWTLLEQAPTPAAHRALTRTDVLTLLKRHRIRRLTAADVLAATERPAFYLAPGVVEATREALELLMPQIRVVAAQLKRCEARQADLLAVLRERPASEAEPGEHRDVEILESLPGVGRMVTVTMLVDATQPLATRDYDRVRAHVGVAPITKASGKRRLVSMRYACHPRLREAAYHWGRVSLQHDAASAAYYRRLRARGHTHGRALRSVVDRLLRILVVMLRHRTLYDPIRFVIPVAVPA

SEQ ID NO: 446747 - protein, 341 aa, unidentified
MSSLVCGLDIHKSSVFATVMNYGGEVIERKKLGDKDDVVTFLGQYQIDKVAMESSTSIVPVYRALRGRGYKILVSHPKKTRLIAESRIKTDRVDSWALTELVRLDALPLSYVPSDDIAALREKVRRRAFLVRMRSKLKVKIQVDLTVNGLTPPSEFGLFSRKGIAWLHNLQSDPVESYLPVLSTLTIQIEKLSKELRSMAPEDEDVKLLMTIPGLGYYSALLVKSEIGDISRFPDGEKLCSYAGLVPSVSSSGSHKRHGPITKEGSRWLRWIMVESVRIHLKYDTGITRAYHAIAERKGTGIAKVAAARRLLMCCYSVLKNRQPYYDPAGHYQPSCSGRGE

SEQ ID NO: 446748 - protein, 375 aa, unidentified
MKEKVRFLGLDVHAETIAVAVAEPEGEVRSLGTIPNRAESIRKLIKKLGPAAKLRACYEAGPTGYVVYWQLAELGVECEVVAPTLVPVKAGDRVKTDRRDAEKLARCYRSGDLTAVWVPDEGSEALRDLVRAREAAKQDQTRARHRLSKYLLRSGQRPPTGVRPWTRPYLIWVAQLRFTQIAQESTRQDYLHEVEHMRERVSRLEQAIMEAVKLASPALQQVINDLQALRGIADISAVTIASELGQLSRFESARQLMGYCGVVPSEDSSGKRTSRGGITKTGNAHLRRIVVEAAWSYRRPPAIWYGLRRRQENISEQTKEIAWKAQHRLHKRYMKLGAAGKDQRKIVTAVARELLGFIWAIGTRAETVVSEHVAA

SEQ ID NO: 446749 - protein, 434 aa, unidentified
MDIVHPRVAGIDVHKRVVWVAVRLPGGTPGERKVMVRGFKTFWRSLQKMTGWLAELGVSDAAMESTGVYWWPVYHALAQAGTIEVCVCNAAHMRNVPGRKTDIRDCQWIAELHEHGLLRPSFIPGQQVAALRARTRYRKKLIEHRASEGQRLSKVLEDAGIKIDSVASELLGVSGRDMVEALIGGERDPARLAGLARGRLRAKLDDLQMACDGRFTAGHAQLCRIHLDAYDLLTGQIATLDQLVEQAAEPFAAVIARLVTIPGIGPRLAQVIVAETGGDMARFATSARLAAWAGLAPGDNESAGKRKRAAARKGNPHLRAAMVEAAWAASRTASRPGARFRRLARRFGRLNIKKAAVAVAHTLLCVAWAVMKDDSDYAEAGADYYDLRDQRNHEHLIRHHQQALARLGCQVTLIPPGDGQPASTGSASPQYPAA

SEQ ID NO: 446750 - protein, 342 aa, unidentified
MENVILVVGIDISKDDFHVCAKEKTADGNAKVKGSRSFKNNDKGFAELALWVLKREKSGGSVRYIMEATGSYYEDLAYYLYEAGNRVSVVLANKIKHFAKSLNVKTKTDKVDSAVIAEIGVEREMPEWRPMSSKYKELRDLCREMLSLKKEKSRAMCQLHAMNYSHDKTPSVVKIKKSQIDFYEESILEIEAELERLVNADPELKHRIDKIQKVKGLKMNTIIVVLCETNGFQMFESIRQVVSYAGLDVVMKESGNFKGKTKISKKGNNRIRQCLFMPAMSAIQHNAKIKDLYCRIVERNPDIKRKGVVAGMRKLLILIFVLWKKNEEYDPNYVWQKNDIGK

SEQ ID NO: 446751 - protein, 307 aa, unidentified
MRFYTQQHQFYCGIDLHARTMYLCMLNRDGEILMHRNMPAGPDPFLKAIAPYREDVVVCVECIFTWYWLADLCAREGIPFVLGHALSMKAIHGGKAKNDTIDSQKIAVLLRGGMLPQAYGYPATMRATRDLLRRRMHLLRKRAELLAHVQNTNSQYNLPSLGKNIAYKANRGGIAERFPDPAVQKSLEVDLALIGHYAQLLNDVELSIVHTAKQPDPQTFARLPSVPGIGKILRLVLLYEIHTIDRFPRVQDFVSYCRLVKCAKESAGQRYGTSGAKIGNAYLKWAFSEAAVLFLRTNPAGQKYLAR

SEQ ID NO: 446752 - protein, 366 aa, unidentified
MKKTSTVRVNKNTIFKGHKLTIGLDLGDHWSCYCVLDEAGEILLEQKVAMTPEAMKQTFSKVPQSLIALETGTHSPWVSRLLTELGYKVIVAHAQKVQLITKSSRKDDRHDARTLARLARIDPELLGPVRHRSAQAQIHLTVIRARAELVRARTALVNAARGLVKSYGQRLPKCGTRQVSRELGAGLPAELREVLEPLLKEIESLNERIQEYEVRVEKIAKESYPHVELLKQVKGVGTQIALTYVLTLDDPQRFAKSREVGCFLGLRPGRRDSGESQPEMHISKEGDRYLRTMLVQGAHYILGPFGEDSDLRRWGLKLAARGGKSAKKRAVVAVARKLAVLLHKLWVSGEVYEPLRNSQKAIRAAA

SEQ ID NO: 446753 - protein, 412 aa, unidentified
MADDTISWFAGVDWGSEQHQACLLDAAGGIKGERAFRHGGAGLAALCDWLVSIAGDPSSVAVAIEVPHGPVVDALQDRGFAVHAINPKQLDRLRDRFSVAGAKDDRRDARIAAAGLRTDPQLFRFVQIGDPRVIELREWSRLAAELQQERVRLGNRIRQQLWRYYPQLLELSDDITAVWVLELWLMAPTPEKAARLRETTLARLLKQRRIRRIKAETALGILRAPVLKVAPGVTEAAVLHLRSLIARLRLANNEFRQAECKRDELCAALTQTKTADATAPSDAAILASLPGVGANTLAVLLTEASGPLTRRDYSALRTLSGVAPVTKRSGKSCIVVMRQAAQIRLRQAVFHWARVAVQNDPKSHSRYEALRARGHSYGRALRGIGDRLLGIACVLLQRRDLFNPQQGVTASA

SEQ ID NO: 446754 - protein, 445 aa, unidentified
MVKTKKTFEIINAFSAGIDISSTEHFVCVPDYCSEDPVRKFGAFTEDLHKMIAWLKECKITTVAMESTGIYWLQLYLLLEESGIDACLVNAQHVKNVTGRKSDVQDCQWIQQLHSFGLLANSYQPKNEIRVLRNLMRSRGSLVEKRSSAVIEQQSALDYMNIKLHNVLSDLDGLSGQTIVKTIIKGERNPVVLSQLAHPRVKTDRKIIQKSLEGTWRDEQIFLLKQAYESYCFFNDQIAALDKEFEKQVLLINKQIVQHDEKPSKTRSKKSGLNFKADQYLQMIYGVDITRVEGINEHSAMQLYSELGVDIKNKFPTIKRFISWLNLAPNVKISGGHVLSSKMRKRKNRAGQVFRRCAYGILNSKGHLGNYVRYKKAKKGAGTAIVATAQKIARMFYKMVTEKVEYDNHLLAERIEQNWIKKIEKTEKYLEKLKLQIPDIICITN

SEQ ID NO: 446755 - protein, 412 aa, unidentified
MQVLYPCCCGIDVHAKTAVVCLIKQGKRQTRTFSTMTDDLLRLSDWLTVEGCTHVAIESTGVYWKPVFNILESVLTVILVNARDAKAVPGRKTDVRDCEWLADLLRHGLLRASFIPPLEIRELRELTRYRQTLIKEHTAVANRIQKLIESANIKLGQVATDVLGVSGRLMLRALADGEEDIERLVELARGSLKEKKSELRRALTSRLTPAQRFVLNELLTRLGELEAATARVGEQIMKEVAENADPFVPEAVKLLQTIPGIGLRVAEVIISEIGVDMKRFPSDAHLASWAGVCPGNNESAGKRRSGQTTKGSPYLRAAITQAAWAASHTKNTYLAAQYHRLIKRMGKNKALVAVAHSLLVIVYHVLAQRADYRELGGDYFDRQHQQTQQQRLVKRLEAMGLKVTVEALPEAA

SEQ ID NO: 446756 - protein, 334 aa, unidentified
MRKEQGCLIAVGVDVSKETLAVCEKFEGEKKFYELKNDSESVEKLSKGLKKIGYKGMIVMESTGRYHLLLALGLKDEGLDVRVINPLISKKHASSSVRKVKSDKKDSEMLAQVAICEEKLPETFSLGTNEILLKKKMSLVAMMDKELQKMKAAIGELDSISKEIGFELSSPEKKIMETVSLLEKQKKGLERELEKIMKEEQSEEVRRYVTIPGVSLYGASVISLFFSPMYALSPKEWIAFAGLDISIRESGHWKGRGKLTKRGNGYLRKKLYQAAWGATMHSKDFKEYYYKLKAKGKGHKESLIIIARKLVIIMFNLAKKNEDYDPSKIVLAIA

SEQ ID NO: 446757 - protein, 403 aa, unidentified
MNAVGIDVSKGKSMVTILRPFGEIVSSPFEIKHTSSDILSLIKLIHSIEGESRIVMEHTGHYYEVLAQQFSAAGLFVSAVNPKLVKNFNNDSLRKVKSDKADSIKIARYALDKWQNLKPYSIVDELRTQLKAMNRQFHFYVKQKTAMKNNLINLIDQTYPNANTYFNSPPRSDGSQKWVDFVYTYWHVDCVRKMSLNSFVKHYQNWCKQKKYIFNKSKTEEIYTKATELVPVFPKNEITKRIIRQAIAQLNSTSATVETIRILMNETASKLPEYPIVMQFKGIGPSLGPQLMAEIGDITRFTHKGALTAFAGVDPGVNESGSYAQKSVPTSKRGSSNLRKTLFQVMDVLIKTMPQDDPVYQFMDRKRAQGKPYYVYMTAGANKFLRIYYGRVKEYLCILSESS

SEQ ID NO: 446758 - protein, 285 aa, unidentified
MVDGSVAWNKKISRSKLLDTIRQFEPGTLVAMEACATSHFWGRTFASMGYCVRLIPAQHVKAFVRSQKNDANDALAICETAFRPGIHFVSVKTTEQQDIKALRNTRQLMVEQRTALANQLRSLLAEYGFTIPVGILRLQQQLPELIEDASNSLTFTLRRLLSSLREDMQALNERITSLDSEIAALSSQQIAYRHLLTIPGVGPLIAAAFISEVDATQFSSGRELSAWCGLVPRQHSSGGKQRLSSVTKNGNRSLRTLIIHGARSVMRCVKKRDDSLSIWLQIEGS

SEQ ID NO: 446759 - protein, 348 aa, unidentified
MSISMIGIDTAKSTFQLHGVDATGKVQLKRKLRRDELIPFFEQQPRCTVVMEACGAAHHWARVLSGIGFEVKLIASEAVKPFVKRGKKNDPADAAAICAAASRPEAKFVAVKSLEQQGVLALHSVRSLLVKQQTMLANAMRGLATEFGLVVPKGMDKLEELMALVEEDESFPEQARKAFAELREHCRVTTERIEKLERQIVAHARHGDTARRLATVPGIGPITASLIAATVGDTIGNFPSARHFAAWLGLVPRQHSSGGKTRLGRITKAGNRQIRTFLVLGATSMVYRAEQWNSAAGAWVRGLLERRPVRHVTVALANKMARIAWAVMARNEVYRAKGGVAPAAAATA

SEQ ID NO: 446760 - protein, 409 aa, unidentified
MAAVMIGVDPHKGSHTAVVIDQAEMALDQVKVRACTAQAERLLAWAAAWPERTWAIEGAGGLGHLLARQLVAAGERVLDVQPELAARVRLLAAGDVNKNDPDDARSVAVAALRSAACPQVRAEDHAAVLKVRAKRHRDLSRSRNQVTCRLHAVLCELVAGGVSKQIRAAAAARLLDQIQPCGAVQAARRDLAGQFLADLRRIDAQRRDTKKTLAAAVRTCGTTVTEVFGVGPAVAATVIGDVRDISRFPGPDCFAAYNGTAPAEVSSGNRKVYRLSLRGNRRLNHAIHMAAVTQIRYRHTKGRAYYDKKLAEGKTAKEALRALKRQVSDAIYQHLKAGARRAAATAGPGGHPGNGSVASAAGSHPEHRLFGPATPGPESTLRPRPGPSQATRPGSSRRTRRSVPSHTSA

SEQ ID NO: 446761 - protein, 296 aa, unidentified
MKTIGAERQQTTEGGVILGVDTHLDLHVGVALDHLGRRLGEAREPPTANGYEELLIWAEGFGPVGCAGIEGTSSYGAGLARHLAAKGIEVLEVERPERRRRGSRRNFEKSDPSDAEAAARAVLAGEASGVPKSADGTVEMIRTLRSARRSAIKARTQAANQLQAFRVTAPEGLRRRLRGLWTKDLVSVAARFRLGDGPTDVPTATRFALRSVARRYEALSAEISELEAHLERLVAQGAPEILSLPGIGTDNAATLLIVAGDNPRRLKSEASFASLCGVSPIEASSGKVLRHRLNLE

SEQ ID NO: 446762 - protein, 419 aa, unidentified
MQRLPQEEFAAFVGIDWADATHDVCLQAVGGDKREFSRLEHQPEAIDAWAHALQERFAGHPVAVCLELNKGPLVYALRKYAFLILFPVNPATLAKYREAFTPSHAKDDPTDAELQLELLLKHRDKLQPLIPQSAAMRALEQLVEHRRRLVGDKVRLTNRLTSTLKNYFPHVLQWFEDKDTTIFCDFLAQWPTLNAAQLARRTTLERFFRAHHVRYTNVIDTRLQAIKHAIPLTTDEGVIAPHALLVQALVAQLRVLLHAIADFDHAIAQRAQSHPDFPLFAALPGAGAVLAPRLLVAFGEQRERYASAAELQQYVGIAPVTERSGNKTWVHWRVQCPKFLRQTFVEWAAESIRHSFWARTYYQQQRDKGSSHQAAVRALAFKWIRILFRCWQNRTPYAESVYRNALKHRGAPLLHNLAH

SEQ ID NO: 446763 - protein, 348 aa, unidentified
MKKIITIGLDLAKSVFQIHGVGPDGSVEVRRKLRRSELLTYFTRQSPCLVGMEACGGAHYWAREIAALGHEVRLIPPAYVKPYVKRGKTDAADAEAICEAVTRPTMRFVPVKSAEQQASAMVLKARALLVRQRSQSINALRAHLGELGIVAGTGVAKVAGLIAIVRDHEDARLPAAARFALKALADQIDRLTKEVEALERQLVAEVRRDNDMRRLTTIPGVGPITAAAIKALVPDIAGFKSARHFAAWMGLTPKPHSSGGKERLGSISKMGNATLRTLLVVGATSVLRHVRKGAGGPEWLIGLLARRPAKVVAVALANKMARIIFALLTKGGEYRKPEWARGMEPVAA

SEQ ID NO: 446764 - protein, 353 aa, unidentified
MKCDKYMGMDVHQAMTVVVVLNADGRVILETMVLTEPAAIIRLVQSLSGPLRVTFEESTQAAWLYEVLRAHVTEVIVCDPRRNKLLEDGSKADQVDARKLAELLRAGLLRSVYHGHEATRNLKELVRAYETLSIDTQRTMARIKAIYRARGIRTPGRGVYQLKQRQRWLELLTEAGIRQRVAWLYEQLDQLKPLRRKAKQAMLAESRRHRAVSLLRTIPQMGPIRCAFIVATVDTPHRFRTKRQFWSYVGLAVVTHMSSEYEMTAGRVVRRRKPVATRGLNHNCNRRLKEVFISAATGGSLHEPYKPFLEKLKENGMRAEMARLTLARKIAAIALIVWKKGVAFDSTKLNCTT

SEQ ID NO: 446765 - protein, 345 aa, unidentified
MKYIGCDFHPSFQVIAMLDKETGELVERRLLHTEEARSFYQELQGPVVVGIEASGNTHWFESLLARWGHELWIGDAAAIARQEGRKQKHDRRAAALILRLMLENRFPKIWVPTVAERDVRQLLIHRQHLVRMRSRIKNQLQHIALNQGWQKKRKLWSEAGLELLRNLKLEPWTGQRRDTLLAMLAELEQKIRPLDQAVEKEAFACQGARRLQTHPGVGPVISLATVLTMGDVKRFEDSRSWVSYLGLNPSEESSGQRRRLGAISKQGSPFLRYLLVEGASSAAKGDKSLARMYARLKAKKHHGVAKVAVARKLAVRLYWMARTEKSYPHAGEPESSRWPKLWPSR

SEQ ID NO: 446766 - protein, 339 aa, unidentified
MGLYSAIDLHSNNSHVAIIDEQHKRVFYRKLDNDPELIGNAFAPYRKELKGIVIESTLNWYWLADYLMEEGYSVHLANPCGIQKYSGLKHADDKHDAFWLAQMLALKILPEGYIYPKADRPLRDLLRKRAHLVRVRTALVLSLQNIVMRNLGLKVRADHLKWLTRDPVAGLLNHQQELALAGKASKETIDFLTRQIQRIEKAVQSKTVLKEPFPKLQTLPGVGDILGMTILLETGPIERFKDAGHYASYCRKVSSRWTSNQKTKGKGNTKNGNRYLSWAFSEAADHARRTHKPSREFYNRKLNQTNASVAHNALAHKLARAAYFIMRDDVVFKEDRMFP

SEQ ID NO: 446767 - protein, 368 aa, unidentified
MPDVSSTAPADVNQWIVFDVHKNSLVAGVLPASGGTPQVSRLENTERSIRRFIDRAGETSTLAVAYEAGPCGYDLFRFLSGIGVACDVIAPSLIPVRAGDRVKTDRRDAKKLVRLYRAGELFFVAPPTPAQEGLRDLVRCRDDLRCARTAARHRVAKALLRHGHIYREGKQAWTVKHREWLDRQRLDDPLAQLALEQMRAHLDGLDAQLATLDHELAQIAEREPWADPVAWLCSFRGIATHTALGLLAEIGDFRRFGHPRELMSYLGLTPSEYSSGDQQHRGHHWPRPATATPGACWSRPPGTISTPPASPNGSPPTAATSHPRSPPVPGRHRSVCTIATGPSAPTASARPSPLSPWRASSAASSGPR

SEQ ID NO: 446768 - protein, 382 aa, unidentified
MNNSAAGENIAGGRFASARSRSLEGNRKTVNCRLPGEPEALAATSNRTTPQEGCNISSVDGRAKQQQKFKPQHVAMNNPEQQPGSWLEQRGFGGLDWASQKHNVVVVDPQGKVIEDFEIEHSALGWKKFRERMQPYGSIPFAIETSQGAAVEQLLEAGMEVYPLNPKSAQSYRERKAPSGVKGDRLDAWSFADACRVDGHGWKALRPEDALVKELRLLCRDEVVLIEQRTAFINQLQHAGPKIAPRLLSEIGDDRDRFGEQPQALQCLAGTAPVTRQSGKPRCKPPCWPVHQRWACDKHLRHAIYLFAEQTLTRCFWAELYYRHHRQKGRSHADSLRRLGQRWLKIIFRMWMDRVPYDAMLHHQNQIKHGSWVLQFNPTQPN

SEQ ID NO: 446769 - protein, 429 aa, unidentified
MQNESTPDARGPVFCGVDTHADSHWLYVLDWRGRKVLSRQFPADAAGYEALAGAIAAAGEPACIAMEGTSSYGAGLTRHLASLGMPVREALSPARTQRRRPGQGKCDEADAERAARAAMSGSRLGTPKSQDGWVDGVRCMLAARSGAVKARTSAINTARSLLTTAPEGLRSRFRGMGGPRLMEELPSVRAEGALGAALGALADLWAAARDAALDMERAIEASLEENCPALLAMYGCGPVSAAKLAVAAGDNPGRLRSEASFAAICGACPIPASSGKTVRHRLNRGGDRQANSALHEIARQRVMRDPETAEYAERARGRGKSDREVMRCLKRYVAREAYRALMHPHEIRRPADASELVAARRAARVSQVRAASILGTSEKYISMLERGQRELKPIRRAYEAWVEAGLPLDWDRQAFEAERKMDSKKHLAK

SEQ ID NO: 446770 - protein, 397 aa, unidentified
MYIVGIDIAKRKHEAAVIDGEGTVIIKPFSFTNNCSGYNRLLAMLTKAKLPLDEVSFAMEATGHYWLALFTRLQKEGFRVQVINPVQTNSIRSFYIRQAKTDPRDALLIAEVIRFGHFSESTLHPENIYELRELCRGRHAIVSMQADVKRKVVALLDQVFPEYETAFTNLFGDTSMAILQTCPTPKELSETPLEELCHLIEVSSHKRFRMAKAQELQALARNSFGFAMAGDVFSTMIRLYAKHLDFLKQQVREMDRKIAEIMETLDTPITTITGIGPTLGAYILSEIGDISRFSSAAKLAAYAGIDPTMRQSGEYNGVRNRMSKRGSPYLRHAIWLAASSAVLHDPALKLYFQKKRDEGKPYMASVGHACRKMVSIIYAVMRDNKAYTPCIPNEISA

SEQ ID NO: 446771 - protein, 418 aa, unidentified
MKILNIDTFAALIGIDWADTKHDICLQAKGANKLVYSQIQHKPEAIETWALSLRKRFEGEKIAIALELKSGPLVHALLCYDFITLVPICPKGLSKYRESFTQSGAKDDPTDAYLALDFLSRHPDKLKPLNPDTEETRIIQRMVEHRRVLVQERVRTTNRITATIKEYYPQALEWFNDIDTILFCDFIEQWPSLQNAKKAHKNTLETFFYSRNSRHKSVIDKRINGIKTSIPLTDDNGVIEPNQFLVLALLKILRQLIEAVKQYDKFISEKFKLHSDFELFNSLPGAGPVFASRLLAAMGSNRERFQSSDELVRQVGVAPVVERSGKKTWIHWRYSCPKFVRQTFVEWAGYSLRESYWAQEFYGVQRAKGKGHQTALRSLAFKWARILYRCWKNHECYDEAKYLMVLKKKGSTLVAHNS

SEQ ID NO: 446772 - protein, 354 aa, unidentified
MTIVAHSRPFVVGVDTHAKNHVYAIIAGNTGELIATRDFPTTGAGINRAIAWVARHTGADLATLWVIEGAASYGALLAGSVGAAGYPVAEAARMDARHGVGKSDPLDAHRIAAAVLPLDEQQLRQPRLNEGVRAALRILVTARESMTTERTRGVNALTALLRVNDLGLDARKPLTGIQIAEVSRWRSREEPLATFVARAEAVRLAKHITELDADIKTNNSRITGLVEISEAAPLLKETGIGPVTAAICLTVWSHRGRVHSEAAFASLAGASPIQASSGNTVRHRLNRGGDRTLNKALHLIALSRMTFDPTTIDYVRKRQAEGRTKKEIRRCVKRYLARRIYRTLNAANPGPCHA

SEQ ID NO: 446773 - protein, 348 aa, unidentified
MIIIGVDFHPEFQQIAWVDTDTGEFQEKRLAHREEAEKFYRALAGKKVRVGMEASGHARWFERLLSELQFEQWIGDAAVIHSKRVRKQKTDRQDAQLILQLLLEDRFPQIWVPSWENRDLRQLLWHRHRMVQARTRIMNQLQAVALNEGLRCKKRLWGERGREHLGSFRLAPWASRRRQDLLELLDRLNPTIAELTQAIEQEAEKCPAAQQLRTHPGVGALTALAFVLIIGEADRFHCGKQVASYLGLVPLEDSSGKRRRLGHITKQGSSILRFLLVEAAQVTVRRLPEWRSKYFHLALRRGRKIAKVAMARRLAIALYWMWRKRWDYEQVKKFGSHAGQPENRHGVK

SEQ ID NO: 446774 - protein, 353 aa, unidentified
MKEHFIAFDVHCEFCEMAAITHTGREIRREHCETTIPALVAALEAVRRPRVLTFEEGSLADWLSRNLRPHVDRLIVCEPRRNALIAKDGDKDDPIDVGKLAQLLRGGYLKEVHQPQSLDRSLLKQHVSFYHDRVRERVRQGHQLVAQFRRHGVFASINDLVDEEEGRRFWRQLPQRKTLLLDLQCLLQVYRLLISQEEQVRAELVRLARREEPVRRLLALPGIGWVRALTFYVYVDTPARFPSKESLWRYCGIGLERRHSGMGRCQVRLSKSGNRRLKDVLLGAAKSAIASGDNPFADKYHHWIHQEGLHPSIARRNVARMIAGTMRSLWLHGSAYDPERVCGAGRVSSTARS

SEQ ID NO: 446775 - protein, 406 aa, unidentified
MEGPIITVDVSKGSCHYQPFIENGHPMRKPKQLSATIDGFQKLGQTIKDLEAKTEREDIPVIFEATGVYHRPLQKYLEDHKIRYYIISPLLSATYRKTDLHSNKTDALDCAHIAKAYYCEKELRQYQAQPQEYKRLYQLSRIYESELVHLRKRKVSLRSMLDIIYPRIDKTFKGNQNLYDPIPMEILKRYPHPSLLLSHRENTIVKNVGHRTGHLKGYTERIVHKIYEKAKECYSGCEINDIEVLKLPSLIENVQEQKKKCDSLLKEMIEIARTCPYFASVVSIVGIGENLAARIIAELGDVSRFDNRAAIVAYAGLNPKIQQSGDIDGLHLKISKKGNKHLRCLLYLGAQCNYRLRKEDPLYEFTKKKRQQTQCPLSSKAAYTASAHKLLVIIYSLCKNGTLYHS

SEQ ID NO: 446776 - protein, 452 aa, unidentified
MTGRKKPHKQDGMALIHPHAAAIDIGSRMHVAAVAPDRNAMPVRTFGTFTEDLYRIADWFEECGVTTVAMESTGVYWIPAFEILEERGFDVILVNARDACHVPGRKTDVSDAQWLQRLHAYGLLRGSFRPHGEITALRAYLRQRERLLDYAASHIQHMQKALTLMNFQIHHVVSDITGMTGMRIVRAIVEGERDPAVLAQFRDARCRASVDTIRQALIGNVRDEHIFALTQALDLYDLYQAKVVDCDRRIEAVLASLERPDAQPAASLPKPRHHTRPPNAPAFDAREALYAILGVDLTQIHGIGPYLALKLVGECGTDLSAWPTAKHFTSWLSLAPSNKISGGKILSSKTRRSNNRAASLLRLAAITVGRTETALGAFYRRLSARVGKAKAVTATARKIAVLFYNTLRHGLIYADPGAKYYEERHRERVIMNLTRRAKALGYSLSPADPAPA

SEQ ID NO: 446777 - protein, 468 aa, unidentified
MSEVRLGIDVACRADHRASLADERGEFIWSSWKFRTTTADLERLWAKIPDGASVTVILEPTRNAWVPLSAWLQARGATVILVPPEQSADLRDYYNKHTKTDRLDSRVLARLPLLHPEGLRSIDNLGPAQSLRRAVRHRFSLVKRRSAASLRLDALVELLGPGWADSLGSATASKTALVILEKYADPRALKRLGRSRLAAVLIRSSAGLWRQDKADELLAMASETLELWSGGGIDFTELAHDIASEVRVLRQLDDEIAGADKRIAVLYDEADPKGIVRSAPGLGPVLSAAILGNAGDFNRFANLAGVRSFTGFVPKIDQSGLVAAHKGITKAGDAGLRQALYLAADHARHIDPTLAQRYHRLVMVEGKHHNSALCSVSAVLITRIAACWRKGEPYNLRDEDGEAITEAEGKAACTDRFKIDPKVRAARRRNTPAKVLKNRAAGRGRKESAQKVAPATDPPQQEASENVA

SEQ ID NO: 446778 - protein, 424 aa, unidentified
MKVTYQTCCGVDVHKSFLVATIVKTTGGIEPSYQKKRFSTFNNSILEFKQWLLDNNCHDVCMESTGKYWVPVFNLLEDKINVVIANPKWVKAVKGNKDDTKDSKWIGDLFRLGLVKGSYIPCKKVRILREYTRYRYKLVSCRSSEKNRYQNALTVCNVALDSIVSDIFGKSSTSIIDYLLEQSGTSINHEEIASKLLRSLKSKEDAVIESVEGYQMTDAQKYRMRLVRAHMDYITAEINDVDKMIENMISSNPDFENAVQFLCTIPGVKRDSAITIISEIGTDMSQFSGSKRLCCWAGLTPGSNESAGKKKSVRITRAGVYLKPALVQCAHAAVKSDKSPYYKKKYESLVKRRGKKRAIIAIARMILTAIYQMLSTGEQWNPSDLYKVDMPVALVEKQKAKAIKQAKKLLQREGLLPPDEPLAS

SEQ ID NO: 446779 - protein, 318 aa, unidentified
MAQKGAVVGIDVSKGKVDVAIRSAAATASFADNGEGRRELLKWLAQHGVHKAVMEATGGYEQSWRRLLATAGLEVAIVDPKRVRHFARSAGRLAKNDPIDAQMIAWFGEVFDDLAGKLDDEERRQLEQLVTARQALVRLQGQIESWGEHEQPKLVQKAHQALLKTLAVQLDKLDAAIEVQIDKSPQFTRQAKIIRSVPGLGDVSVSAIIAFLPELGHVDRQAAAALLGAAPFDDDSGERRGQRHIKGGRRKLRNLLYMPVMGAATRNNPVLKACYQRLLAKGKAAKVALIACMRKLIGILNAMLRRGETWDPGKHAIA

SEQ ID NO: 446780 - protein, 319 aa, unidentified
MSEPAVFVGIDVAKATLDVAVRPSGAGWVSANDEAGIQALLGQVRALGPTLVVLEATGGYEHAVAATLATAGVPVVIANPRQVRAFARATGQLAKTDAIDAQVLALFAERVRPTPRPLPDDATQALEALLTRRRQLLEMLVAEKNRFDVARASVRRDIGHHIRWLERRLGDLDRGLHDAIRTSPVWRAQDDLLQSVPGVGPVLSGTLLAELPELGTLGRKQIAALVGVAPLARDSGTHRGRRTTWGGRASVRTVLYMATLTATQWNPVVRQCYQRLRAAGKPHKVALTACMRRLLLILNAIVRTQTPWRATPTAARATP

SEQ ID NO: 446781 - protein, 373 aa, unidentified
MPKYSTAFGMDVHLRSTTVCALDADTGEAVTRRFPGNPWGEIAGWMDGFPGPSLAAYESGYLGFAPQRELAGLGVECVVAAVSKIPRSAADSASKNDRNDAARMAKAILAHDISPAWVPSPEVEGIRDLAGAYDGATARLAAAKQRLLAFLAKRGFVYGGTTPAGNPRKYWTYDFLRWLDKVRPEDDGGVRTLAALRNEVEAAAEARADLLSEYRAAVDASPIAAEAAALQSIKGCAFALAAAFASEVGDFTRFRSGRQVTAYFGLAPSQRSSGDSVRLGGISGAGNALVRKLAVEGSWCYAAARHQPKLMPRDTGVPLEIRMHGRKGSERLLRRREEMLARGMPAAKANAATAAELVRWLWALGMMCREGAE

SEQ ID NO: 446782 - protein, 343 aa, unidentified
MQITTIGLDLAKHWFQVHGVDANGRVVVRRRLWRSGVIAYFRSLEPCLIGMEACATAHYWARELTALGHTVKLMPPAYVKAYVKRNKNDAADSEAICEAVTRPSMRFVPVKDAEQQSVLMLHRARSLLVRQRTMLVNALRAHLAEFGIVAPQGLRHVEILTKTIAHQEAQLPERARSILQTIVDQLNGTMARIREIEGRLTKWHRQSRVSRLLATVPGVGVMGASAIAATVADPSLFRSGREFAAWLGMTPRQNSSGGKERLGRTSKRGDKYIRSLLTAGAVAVLRHARNRPTRDGEWVRALLARKPTKLAAVALANKTARIVWAVMMRGDGYRLKEVFEQPA

SEQ ID NO: 446783 - protein, 391 aa, unidentified
MSKTCRVVIGMDPHKRSATIEAMAADEQVLGGGRFGTDPAGFEAMLAQAGQWPDRVWAVEGCEGIGKHLVLRLLDAGETVIDVPAKLSARMRVYATGQGRKTDDTDAHSIALVGVRMTGLRHVVGDESLEVLRLLVDRRRRIGEDHTRMVCQLHVLLLELLPGGAKKDLSAAQARKLLAGVRPKDVAGKTRKRVALELVADLERVYTRKKAANKELAALIKQAGTGLFGLHGIGPSGAARLLVEVGDITRFPTKGHFASWTGTAPIDASSGDNVRHRLSRGGNRQINMALHMMAVVQLRNATQGRAYYDRKVAAGKTPNEAMRCLKRRLSDIVYRTMLDDLVASAGTGPGGHRGNDSESGAAGSHPQTGSSDKSLPGPATVKPRTSRRNAA

SEQ ID NO: 446784 - protein, 435 aa, unidentified
MKKFLSCCAGIDIGKREMTATILTGSPDVEPLQQAQTFGTTVQELNRCLEWLRANQCFTVVVESTGSYWIPVWNVLSEQLAVIVANPEHVKARRGEKTDPEDSRRLAERLRVGDVRGSFIPSQEIVELRDLTRRRKRLLSNANGERNRIQKLLEHANIKIGNVVSDVFGATGQNILHALLEHPDQSAAELAELAKGKLRKKREALRQALEGHRLNDHLRWMIQHSLDHLMFLEQQIAELTERTLEKLKRFQREYELLQTIPGIGAETAAVIIAETGANMAQFPSARHLTSWAGVCPGNNRSAGKQKSSSIKRANKWLLAALVQSAWATVRERGSIFRKRFYRQMMHRGKKRAVIAAARALLAVVWQVLQKGVPYAEPSNELFQQREHSKKVRHHLQKLKELGVDITPLELPPLPELPKPQPAFARPLGALGIHAR

SEQ ID NO: 446785 - protein, 400 aa, unidentified
MLSIGIDVSKGKSTVCGMKPGGEIVYTPFEIQHTREGMSDLVSLLRSSGEEVRAVLESTGNYHCPVVAALLENGIFVSVVNSLRMKRFCSQSIRKVKTDRIDAMQIALYGLAYWQELQPARLPEDTYRELQLLARQYYQMTSMLIKAKVDFNALCDQVLPGMQELMNDHAGRHKLSDFVLRYHHTTHILEMGETRFRKDYCKWAEKKGYRNCERMAAHIFATAQNGIPVLPNAPSTQIVITEAIRVLHTVEASRDAILTQMQALAKTLPEYSLVREMPCIGDTLAPRLIAEIGDVRRFHSKRALIAYAGIDAPPYQSGKFCANNRHISKRGNRYLRKTGYEVMQSYVMHKPANDPIFTFIEKKRSEGKCGKLAMVAGLNKFLRVYYGKVTELYRSLPAIE

SEQ ID NO: 446786 - protein, 354 aa, unidentified
MRQIYERVAGLDVHRDNVVACVRRLGPRGGLVFEKDRFTTTTAGLRELEAWLADRHVELVAMEATGVYWKPVLYALESRFAVWLCNARNVRRVPGRKTDLSDAEWLADVAAHGMIRPSFVPPPPIRELRELTRYRRTQIDARAAEIQRLEKVLQDAGIKLTSVASRVLTQSGRAMIEALIAGERDGTRLAELAKGKLRPKIPALTEALTGHFGSHHAVACQRILGHLDFLNESVAALTEQVDARTAAFAPIYALLSPVPGLDRLTIDVIIAETGADMSRFPTPGDLASWVGLCPGSHESAGKHRRVGTTNGNPWLRRALIESARAAARTKGSYFGAQYHQIARRRGPKDRKSVV

SEQ ID NO: 446787 - protein, 397 aa, unidentified
MDTLIERCAGLDVHKETVVACVRVPTRGGGREQCVQTFGTTTAQLLALRDWLVAHGVTRVGMESTGVYWKPVYYVLEDAVECWLLNARHLRNVPGRKTDVADAAWICQLVEHGLVRPSFVPPKPIRELRNLTRYRKAQIEERTREAQRLDKVLQDAGIKLSSVASEELGVPGPELLAELARGTLRKKIPALREALHGRFGPHHALLVGTILAKLEFLDEALAQLSAEIAQVIAPFTAEAVLLRTIPGVDRRTAEALIAEIGVDMTRFGAAGRLASWAGWCPGNHESAGRQGSGKTRKGSKWLRTYLTEAAKAAAGAKGTYLAAQYARLRGRRGSARATVAVGHSILVAAYYILDRHQPYSDLGPDYFRRRHSREHQMRRLVRQIEALGFRVTLEEAA

SEQ ID NO: 446788 - protein, 345 aa, unidentified
MKHCGGLDVSVKETAICIVDETGKLVRETKVTTEPEAIVAVLTEAEVEYTRIGLEAGPMSQWLVTGLLEAGLPVVCVETRHMKAVLKAQQVNKSDRNDARGIAQMMRVGLYKPVHVKTLASQHERMLLTSRKLLRDKLQDVENELRGTLRNFGLKVGVVSTGHFEARVRALVVEHSPLEAIVAPLLAVRRVLREQFAVLHKMVLERIRRDRLCRRLMTVPGVGPVVALTFRAAVDQPQRFARSKTVGAHFGLAPRRYQSGDTDYDGRVSKCGDAMMRTALYEAAQVLLTRTQKWSWLKAWGMQVARRRGGKKAIIALARRLAVILHRMWIDGSQFRWRKEVNAAA

SEQ ID NO: 446789 - protein, 332 aa, unidentified
MQTLAIDLGKQSFHIYGITCEGEVISRKVSRAKLIDAVTRLQPQSVAMEACASSHHWGRVFEALSYAVRLIHPRFVKPFVKGSKNDAVDAEAIFEAANRPTMRFVPLKSVEQQDLQALHRTRDRLIVQRTALINHTRGLLAEYGVVMPAGASRFRLQVDKMIEIAELSHLAKDLFLKLVEEYRDLDARVSTLDDMLVDICRRDDRCKRLTTLPVVGPIVATSLIAAIDDGRHFASGRALSAWIGLVPRQYTTGGKPRLGGIGNRANHYLRRQLIHGARSALLRIAKHDDRRSKWAQELQSRAGHNKTLVAMANKTARMAWAMLRSGESYKMA

SEQ ID NO: 446790 - protein, 359 aa, unidentified
MQQSNKINFKGQNIYIGIDVHLKTWHVTILTDYGFKRKHSQPSSATALFEHLTKNYPEGNYYAIYESGFTGFSTYYSLTALGINCVIANAADIPTSQSELLMKTDAVDSEKLARTLRDGSIKNYVYVPERAILDHRGVVRYRGILQRKLGGSKSRIKHLLHTNGVEIPDCFSRKTTHWSRNFLRWLHEDVKLLSPTRRTLEYQLELVEYLRQEILSITREIRELSRSDKYSKRVNSLLSIPGVGLITAMSLIVELGDINRFRGEKAFAGYLGLIPTCKNSGEKIRTGEMTPRGNKRLRTMLIESSWIAILYDKALAAKYAELRVKMGSQKAIIRIARKLSNRIFSVLKSEKIYEYDRYI

SEQ ID NO: 446791 - protein, 338 aa, unidentified
MNKLSIIGIDLAKNVIQLHGNDVNGHTRFTRKLKRKEVLAFMANQPKSLVAMEACGGAHYWARMLQEQGHEVKMIHPRYVKPFVQVHKNDARDALAIAEAAARPAMPTVAIKSVEQQDIQAIHRVRERLVKEKTAISNELRGLLGEYGIVMAQGHKSIRESVLTILENAENGMSMKGREIINDLREQWLDRESRISEYDKALKIIAKDNVICQRLQSMPGIGPVNATLLYSYVGDHDHFASGRHLSASLGLVPRQHASGGKENLLGISKRGNKHVRKQLVHGARAAYKVLIKDDNKSRLGLWVKRMEGKHPNKIIVALANKMARIVWALMKNETTYQA

SEQ ID NO: 446792 - protein, 377 aa, unidentified
MKKELYLGLDVHKDCMATVVAEEGRTGQVRDTGVISNDLHALEKWIARLRKAHGKEVLLRACYEAGPCGFGIARRLRQLGVECEVVAPSMTPTRTGDRVKTDKRDARKLARLLRAGELTAVYIPEATDETMRDLCRARSDAVDDRRRSRHRLKGFLLRHGYRYQGKSAWSAAHERYLRELVLPHPAMKVILEEYLQAIAAAGERIERCEMGMRDLLEKWRLAPAVRALMAMKGFQIVAAMILVSELGEVHRFSHPRQVMAYLGLIPSERTSSDRRRQGAITKCGNAHARWLLVECAQHYATPPKVSHQLSRRQQGQEKEVRAISWRAQHRLHSRYTRLLGRRLLRNKAMVAIARELCGFVWELLRTQPCYQAKSTLS

SEQ ID NO: 446793 - protein, 370 aa, unidentified
MSNATTFVGLDVHARSVKACAFVPETGETIRKSFGYEPGEIASWVSSLPQPARCVYESGVTGFHLCRELNAMGAACVIGAVSKMHKPAADRGRKTDRRDAQFLAVQLALGVVTEVHVPDAECEGARDLARALADARDDAVRAKQRLSKFLLRHGLVYDERNAAGQRRNRWTGDFWAWVGRIDLGDAAAMATLDHYCERVREADAAKAALEAKVKSLAQQPRWKPTCDALKCLKGIDAVTAASIACEADGFARFATASGFAAWVGLVPSEHSSGESRFRGGITKAGNKHLRKLLVEAAWHYKGASRSPKDLAKGQVVDAATRRHANAGVRRLVDRRRSMDDAGKQSSVANAAVARELACWCWAVGRMAEGA

SEQ ID NO: 446794 - protein, 449 aa, unidentified
MKSLPVINPNAAAIDVGSEHLHLSIAGDAPVVFGTFTDEVYRLRDYLKAQGVTSVAMEATGVYWLYAYAVLEAAGLEVVVVNGRHVRNLPGRKTDMADCQWLATLHAHGLLRGGFVPPAAIRRLQDYQRLRADHIIGAGSQVQKMQQALERMNLKFHDVISDLDGVSGLKVVRAILAGERAPQALLLLCDPQIQKKKGDRVLRSLKGTWAPEHLFALGQGLAAWEFFQKLLGECDQQVEVVLRELAGPEPAVPDPAAAAERPGKKAGKNAPQIEQLHQLLLRLCGGKDVTAIAGIGDALLLQLLAETGPDLKAWPSEKHFAAWLGLAPGSRQSGKRKGSVKAQRNRAGRLFCAGARSLVQSVDKALGGFYRRLAARKGGLVAMKALARKLAGLYYRVLRYGLAYAEQGLRVYEEKYAESQRRLLAKLAAKQGFKLVSLQLEAHPTGVGV

SEQ ID NO: 446795 - protein, 407 aa, unidentified
MSTNTDVFAGLDWAVHTHAVCIIDASGAVRDRFEIAHDRQGLAELMRRLTRFGPSVRVAIERPSGLIVDALLEAGHQVFPIHPNAVKASRPRYRSHGAKSDASDAYLLADLLRTDGHRWAALSPQSDSIRALRALVRSRDDLVTTRVALGNQLHSTLEAFWPGAACIFADITSPIGLAFLRRYPSPASAVRMSEAQLLRFCRAQHYSGRRSPAELLARLRAAAQALPGKLTTESMAQVVRSLVSVLNPLIAQISDLTRRIERFVESLPDGQIIMSFPRAGRVCAAQILAELGDVRERFPTLDRLAAEAGTVPVTYQSGKTRSVTFRWACNHRLRQAITCLADNSRHASEWARGIYVAARARGCDHPHAIRILARAWLRIIWRAWTDRKPYDPTLHLGALKLASGAAG

SEQ ID NO: 446796 - protein, 387 aa, unidentified
MRHQSRIRKEPVVDTDAITYVGLDVHKRTVVVSMLLPGRTEPVEWQEPHDATVARRLARRLLRESPGKVVCCYEAGPTGYVLQRRLRTEKVMCQVVAPSLIPVKPGSRVKTDRRDARKLAGLLRAGLLTEVHPPSEEQEALRDICRCREDVQQDLIRARHRLSKFLLRRHYIYKETKHHWGTRHMAWLQQLRFEDPASQAVFDSYMLSIEQLDERLLQLENKIGEFGCQEPYREPVSWLRCFRGIDMVTAMSLVAELHDFRRFTSPRQLMSYLGLTPREDSSGERERRGSITKAGNSHVRRLLVEAAWHNRFRPAIGLPLRQRRQGQPARVIAIADRAQERLYRRFVRMTFKGKPSQKVIVAMARELVGYIWAVLYWQPEVESAMVE

SEQ ID NO: 446797 - protein, 409 aa, unidentified
MEVLFARCAGLDVHQKTVVACVRLHGPDGRAKTETRTFATHTAALLELSAWLEENGCTHAVMEATGVYWKPVWHILEESCALVLANAHYVRNVPGRKTDVSDAAWLADLLAHGLVRSSFVPDRPIQELRDLTRTRKQLVRQRAQHVNRLHKVLEDANLKVGSYITDITGVTGRAILGSLIAGETDPAKLADLRNPRLKTPRDELVLALNGKVTQHHRFLLQMHLDQIDSADRSVATLDVQIEELTRPLAEAVGRLADMPGMSETSARVVLAEIGSDMSRFPSARHLVSFAGLCPSLNQSAGKSRSAKLKKGSVWLKTVMVNCAWAAARAKNTYARAQFHRLKARRGSKKAVVAVAASMLTAVYYLLRDAVPYRDLGATYFDRRDQTKLANRLRRRLEALGFSVQMQPAA

SEQ ID NO: 446798 - protein, 339 aa, unidentified
MDTIRFLAIDLAKNVFQVHGVDAAGKLVLRRRVGRAQLTELVLRLAPCTIGMEACSSAHHWARQFLQQGHTVKLISPQFVKPFVKGNKTDGNDAEAICEALQRPSMRFVPIKSVEQQDVQSLHRARSRLVSNRTGLVSQMRGILAERGIVFAQSITRARREIPVIVADTSNALTPLAREMLADLMDQLRELDRRIAGFDRRIDLVFKASETCQRIAQIEGVGPKTATAIVAAVSDPKDFRNGRHFAAWLGLVPRQSSSGDRTHLLGISKRGDRHLRTLLIHGARAVLRTAPTKHDKKHAWALALKARRGTNRAIVAIANKMARVIWSMLATGQSYQKAG

SEQ ID NO: 446799 - protein, 416 aa, unidentified
MKIYPRTRAIQRYIALDIHKEYVLAGGMSATQEWLLPPRKIEMSRFGEWAVKNLCETDAVVIETTTNVWDIYDLVQPVVGHAVVAHAGAVRQIAEARVKTDKEDVKRLIRLLIADIVPEVWVPPQHVRELRGMISYRQQLVKTGAMIRNRLHSLLHRHNLVLPEEGLASQAWWEEQEKISPLEKMQISQEIAMLEQIEKHKADVDQELGRQSLGETWSRESVRLMQLPGIGVVIAMTVLSAIGDIHRFESAHKLVGYSGLGAGVHDSGKEHIEKRITKSGRKELRWAMVEAAWRAVRMSPYWKEQYEKYLRRMRRPNQAIVVIARKLLVAVWHVLSKEETDERASEEDLAYKMLLWSWSMSADVRQGLTHKQFAKYALMRLGVQTDLTRFVRKNVPRRIAPRDEVLVRMAELGLTD

SEQ ID NO: 446800 - protein, 387 aa, unidentified
MKIMAGIDLHSNNAVCGLVDSEGKRLLHKKVPCDLRCVLAVLEPYKQRLESVAVESTFNWYWLVDGLQEHGYKVALANPAAMQQYNGLKHTDDKSDAFFLGELQRLKILPTAHIYDRKTRPVRDLLRRRLLLVHQRTSLLLSLKSLHARTTGYSLSLALAKALPPEEAAKLFRHPADQLIAREQAQHIGQLRQSIQAIEKMVLGDVKKLPCYRQLQTLPGVGSILALTITLETGDITRFPSAGDYASYCRTVDSARLSNERKKGQNNEKCGNKYLAWAYVEAANFAQRSDGPCRRFFDRKLAKTNRFVATKALACKLSKAAWYVMSQGVDFDWARAFPGPRPEAQTQRSGKAQAGQATKQTELKKKTDLGRASVNPSKGSGSKTLRD

SEQ ID NO: 446801 - protein, 342 aa, unidentified
MTIVTGFDVHRNQITFDALDLESAEVHRGRIEATPDAVRAWLGRFPGRELHVAVEACTGWLFVCEVLSEQGAIAHLAEPAETAARRGSKRRAKTDRADAQHLRELLAAGRLPEAWIPPAHVREWRTRTRLRKTLVDERNHWLQRIQATLFHHGIPAGALPARLLTPSGRAALTELALPQAARERIEVALALIDAIEAQLVPLEREIRRLARRQTGCKALMTHFGIGELTAPTILCELGDVGRLSASRKAVRAVGLDIGVHRSDRRSRPGKLTRQGPPQARWALYEAAQSACRPTSPDHPAYLELKARGLSHTRASLTIARRLTRRCFHTLRELGPAALEPLT

SEQ ID NO: 446802 - protein, 322 aa, unidentified
MAMLSFGGIDVSKDRLDVVVLPEEECSSVPNDAAGWAELVERLRGFSITAIGIEPSGGYERGAMRALLAAGMPVRQVNPFKLRQFARASGVLAKNDPLDARMIASFVTIMPTRPAQRQTPAAERLAEMLAIRRQLSAEKVAAENASRLLEDAMLQRLSRRRIVRLAADIDLLDKRMVEIVATDDALVHRYRLLTSMPGVGAVLACTLIALLPELGRMSRKQVAALVGVAPYAFESGTLKGRRCIWGGRAHVRQVLYMAAMSASNWNPVLKAFHDRLTAAGKLPKVVIVAVMRKMITMLNAMVRDDVVWADRLSGRHVLPTAR

SEQ ID NO: 446803 - protein, 441 aa, unidentified
MAMRKREDEWVFPNAAGIDVGASSHWVAVPKHLADEPVREFGAMTDDLNALADWLVACGVDTVALESTGVYWIPIYEVLEQRGLKVWLVDARQMKYVPGRKSDVLDCQWLQRLMSLGLLRAAWRPGDEVCVLRAVVRQRDVLLAEQGTWVQRMQKALVQMNIQLTEVLTDVMGMTGQAIIRDIVAGERDPAILARHHNARLKASAQDVRRALTGNWRDEHLFLLKQSLAIFDDLAKRVQECDAKIEALLAPLQQHKVNLKASRKGKGKNNPAFDVRQAMANWAGVDLTRIDGLGVSVVMKLLSEIGTDLSRFANVKHFCSWLALCPGTKVSGGKVLSASTKRSANRARQALKMAAMSLSRSDSALGAFYRRLCSRMDKPRANTAVAHKLARMVYFMLTRGEEYVDQGRERYEELQRQRSIASLRRRAAALGFQVAPLVATA

SEQ ID NO: 446804 - protein, 320 aa, unidentified
MNIRYICKKTAEMKEIGFVQLVSVGCGIDVHQNLIVASIRKSSNDEEVETREFNAYTSSLKSLREWCKSEGVTHVAMESTGVYWKPVFNVLEEDFEVILVNARHVKNVPGNKTDKKDSRWLSKLLLSGLLKGSFIPPCPIRELRDLVRYRKKVTGQIASEKNRIIKILEDANIKLSSVLSNVDGVVGTKIINDLINGETSVEKLLLHYHGKQKVSREEFRKALEGKVSEHHKLMLRFHKDSISDKEYQLKRLDEAIEKATKAYQVEIDLLQTIPGVGKESAISIVSEIGVDMSRFPDETHLSKWSGMSPGLCETGGKKKL

SEQ ID NO: 446805 - protein, 279 aa, unidentified
MEYYVGLDVSLKQTSICVVDQAGLVVREGVVDSDPEAISVYVTSKAPNAVRIGLETGPTSTWLWTELKRLGLPVICIDARHAKAVLKMQINKSDRNDAIGIARIMQTGWFKEVHVKDIDSHSVRALLASRALLVKIKRDLENHVRGLLKNLGLVIGRAKFNVFAVRAEELIEGRPELVAAIRPLLEARNAVEQQVSELDRKVMRLARHDAQVRRFMTVPGVGPITALAFKATIDDPTRFARSRSVGAYVGLTSRRHASGEVDWTGRISKCGDAMLRSYL

SEQ ID NO: 446806 - protein, 357 aa, unidentified
MGKPINNLSSVTCVGLDIAKNLFQVHAIDASGAVVAAKRVRRSQLLTLFASLPRCLIGLEACSSAHHWARALIALGHDAKLIPPAYVKPYVRRNKNDAADAAAICEAVGRPNMRFVAVRSVDNQAQLMRHRTRELLDGDRTRMLNALRGHLAEIGVVAPQGVQHAYALKRLAADGFDENGEIIVPDCVREALAPLVRQIEAVDAEIAALDEKIKALVKSDDTARRLMTIPGVGPIIASAVVATVQDAGAFANGREFAAFLGLTPRQSSTGGKERLGRITKMGDRYLRKLLVVGACAALVHRKGHHDALRCWADQLLTRKTVKYKFKLTAVALANKLARIIFALLTRGGEYDERPVAA

SEQ ID NO: 446807 - protein, 318 aa, unidentified
MTQDLFIGIDVSKAKLDVAASPGEHSWTVSNTEEGIQELISKLRQLGTPKIILMEATGGFERRPLVLLGAAGLPVTAINPRNARDFAKSIGLLAKTDRVDAKALALFAQKIQPPCRPLPDAETRALQDLIVRRRQMIDMLTAEQSRLAIVESAKVKREITQHIAWLKKRIHITDYDLDQTIKNSPAWQPKSDLLKTVPGVGPLTSSTLLALLPELGSLTNKQIAALGGVAPFNRDSGTLRGRRCIWGGRAAVRSVLYMATLAATRFNPTIRAFYQRLRNLGKLPKVALVAAMRKLLTILNAMVRDQTPWHSSNTEISS

SEQ ID NO: 446808 - protein, 449 aa, unidentified
MSSHKGNAAGLPVIHDRAAGIDVGSRFHVVAVGADLCNEPVQTFQAFTSDLQRMADWLMAMGITTVAMESTGVYWVPVYEVLEGRGIDVILANAREARAVPGRKSDVNDAQWLQRLHACGLLRASFRPGRDIAALRVYLRLRERHLDYGAAHIQHMQKALTFMNLQLHHVVADVTGVTGMKIIRAIVNGQRDPEVLAQMRDVRCKASLETVRAAMVGNYQPEHVFALTQALALYDFYQACVDECDAQIEVVLAALTAEKASPSAPLPKARHRTVQPNAVSFDVRPVLYQLAGVDLTQIHGIGPYLALRMIAECGTDLSRWRSAKHFTSWLTLSPGCKISGGKVLSAHTRKTTNRVAAHLRLAAVTVGRTNTALGAFYRRLSARIGKAKAVTATARKIAVLFDNAMRFGIDYQDPGASHYEQKYRERVVKQLHRRAAEFGFTLQEAVSVS

SEQ ID NO: 446809 - protein, 370 aa, unidentified
MHETITSFVGLDIHKDSVAIAIAPAGRGAAQFIGTTASNLAQVCKVLTRQKCVPSRTLVVYEAGPCGFGWARHLNAHNWRCEVISPAHIARSAANKVIKTDRRDALLLARESRAGNLTPIVLPDSRDEALRDLSRAREDALAARLRARQQLKSMMLRHGRSYHSNTWSEAHQRQLADVRFDHPAQQIAFDEYRQMVAEAHERLERITQALREQCAEWRMRPVVDALMCLRGFDFLAAITIVAELGDLTRFAHPRALMSYLGLVPSEHSSGNTRRQGAITRTGNRHARRILVESAWTYRFAAHVGRDQQVRQQHQPKLIRDIAWKAQLRLTQRFRKLNRGRKMKMTKVCVAIARELCGFIWDLARHVPVNP

SEQ ID NO: 446810 - protein, 392 aa, unidentified
MSHQDYHFDASRSLTALEQGSTIIAVIEMSQSKWLVAALVPGVERHPLKKFDAQEEGLLKLLHRWRNEAGQAGREIKRIVVAYEAGRDGFWLARWLRARDVEAYVIHPTSIAVSREHRRAKTDRLDTELLMRAFLGWLRGEKRHCSMVAIPTIEEEDARRPNRERQNLVTEQTRIVNQMKAIFVRFGIRAFRPTLRKVEGKLKDLRTAEGSPLPENTRAELCRHLARLHVVRDQIRAVEQERLRKLAAAPAVEKGSHVMVRLIARVLGVGIETADMLVNEVLSRRWRDHKAIARYAGLTGSPDESGKRRRERGLARAGSARVRCGMIQFAWRFVRFQKGSALAQWFAARTADRRASTRKTMIVALARKLLIALWRLATRGEVPPGIILRPAS

SEQ ID NO: 446811 - protein, 368 aa, unidentified
MKTILYIGLDVDDKAFHLTIINSKTGEFTYLKTRPILSKLIEKLLAYHSKSSDFKICYESTYIGFSLCRGLRAQGFGCDVVASGLIPEAAGHKVKTDRTDSEKLAKFYMKDLLTPLNIPDEEDEAERDLVRSRILVSKQVVKTKNHIQSLLRRHGIDYRNEEKALNLWTDKYRKWLYGKTSKLNEHLKINLNLLLSQLEFLESSLKTYNKEIESLAESEKYKKKVNALVAYRGIETLTAMKVITELGDIKRFSHPRKLMSFLGFDIREYSSGGKERRFGITKYGNKVVRTALVEATQRCSTPPKVSYKLKYRRKETPTELVVVADKCMQRLYKKSNHLLAREKNRNKVKVACAREMCGFIWESLMRVS

SEQ ID NO: 446812 - protein, 387 aa, unidentified
MSPTIAARRPAAVDYERTLILSIEVSNQSWVLAAQVPGLPHTKAKRTVDPEAEALMAAIAGYRSRAAAMGRSIERVIAVYEAGWSGFWLARWLTRHKVEVYVIQPSSVPVDRRMRRAKSDGIDAELLLRTLLAWLRGEPRVCSMVPVPDEADEDARRCIRERTELISERVGLTNRIGAVLATLGVTDYNPLLRNRHHRLAELRTGLGEPLPPNAHAKIVRLLARLELVLAQIAELERERDAVVETETPDHASKMIQQLISLRGIGVQSATVLVREAFVRRFANGKALGSYAGLTSSPYSGGGIDREQGIGKGGNRRLRTVMVELAWLWTRYQPAAAQVCWFRERVGSTGRRVRKIMVVALARKLLIALWRFVIDGVVPEGAVLKPAA

SEQ ID NO: 446813 - protein, 410 aa, unidentified
MKLFIGIDSSQKNNQCCIVDHNGNKVSELRVSNDLPGAQKMQALIEHKASEFYVTELKAATEASSMYDFHILEFLSGSQTLTKYNLKLYRFNPRLIKAFKQSLKIRDKTDPNDAYAIAEYLRFQSEKAEEYRAKLDHLPLQRLTRFRCHLVSQLVRERNYFLNQLFLKFSAFSKGKPFSDTFGATALAVIEEFMTPDAIANADDEELIQFVIKHGKNQFPNPEEIVKELKYVARESYRLRPQLAESVHRILCLSLSNIRALKSSLKELDDTISKQLNAFSITLTSIKGIGTVYAAGIFAEIGDINCFSSESQIARLAGLAWIRHQSGNFEAETRRLDKQSNKYLRYYLVEAADSLRRHNPEFSAYYQKKYAEVTKNQHKRALVLTARKLVRLVDYLLRTNKLYQPNIILT

SEQ ID NO: 446814 - protein, 287 aa, unidentified
MKHYAGIDVSLNSSSVCVVDESGKIVREVKVPSEPVALIHCIKSLGVRVERIGLEAGPLSQWLYGALRESTLPVELLETRHVKAALSAMPVKTDRNDARGLAQLMRLGWFRPVHCKSMAAQEVRALLTARKLVQSKLYDIEMSLRGILRGFGLKVGPTTSRSFAARINHLAAGHPSLEIVAEALLSTHAAALCAFANLEKNVRQISRADARVRLLMSTPGVGPVVALTYVSAIDDPKRFTSSKRVGAHFGLTPKKYQSGETDISGRISKTGDSSVRAVLYEAAHISS

SEQ ID NO: 446815 - protein, 387 aa, unidentified
MNVKARRTKKQVNVENWAINLLPKEELSKKIEVVEKELRSYTWRDLETNGKFAKNDKLSFITDDMLIVGCDIGSENHYIRAIDVRGRELSRGAFEFSNTSEGFENAKAWVLALAAKHDKKQIVLGLEPTGHYWFALAAWMISNGISVVQVNPYAVKQSKEIENNSQLKDDRKDPKLIANLVKDGNYGMPYLPEKVYADMRRLSMFRDQLTEDRIRNINRLHRELKIYFPEYMDAFGKIDGAFTLEVLKVSAIPTDITALGAEGMKNIWHNAKLRGRGYSRANEIVSYAEKSVGLTDGTDAGREAVKWYAEQILRLDEQLAEIESALHEKCREIPYAENILAINGVGENILAGILAEMGDISRFDDVKEIQKLSGMGLVACSSGKHKG

SEQ ID NO: 446816 - protein, 338 aa, unidentified
MRLYVGMDLHSTNCYTGIIDENEKQRFAHKLPNDKAKIIAALAPYQHDIVGVVVESTYNWYWLVDRLMEEGYKVHLANPAAMKQYEGIKYIDDKHDAFWLAKMLKLGILPEGYIYPRESRGTRDLLRQRSRYVVQKTSLKHTLQQIVCNQTGVTLSNNMINEIETEKLYSLLKNEDVFFSAGSMIETIRFLEGKIEAIEKRVLSQVKVGPIYPLLTTVAGIGEILGMTITLETGPIERFNSAGQYASYSRCVPSSHWSNGKQKGRGNVKNGNKYLSWAFAEAANFSIRYCKEAKQFYQKKCAKTNQPSAYRALANKIAKACYFMMKEKKAFDVERLFY

SEQ ID NO: 446817 - protein, 375 aa, unidentified
MNQFIKYVGLDTHKDTIAVAIADIAGGKPRYYGEIANTPTALTKLMKDVSPNGEIVSYCYEAGPCGYGIYRQISGSGHDCSVVAPSLIPTKPGDRVKTDRRDSENLARLHRAGELTPVWVPDQEQEAIRDLTRAREDMKHLERQARQRLCAFLLRHGQRYESEKSKWTQAYWRWLERIKFSHRVQQTVFQEYIDSVKQQQQRVADLEQAMHEAMADWTLAPVVTGLMALRGCRLITGMTVVAELGDITRFDSPRQLMSYLGLVPSESSSGPKTRRGGITKTGNGHVRRVLIEAAWCYRFPARKTAALQRRAEQAPDEVQAIAWKAQKRLCGRYQALSKRGLLPQKTCAAIARELTGFIWAIACEVMPKNATKANT

SEQ ID NO: 446818 - protein, 344 aa, unidentified
MKKNLFFIGLDIAKADFAASIYQTPDKPIVTKEAIPNDRKGFEMLLLWLYDYHIDKKNCRICMEATGVYSQAIAYYLLFQGFPVSVEPPLKVKRAFDPVGHKTDPVDSKQIAEYAYRFQDELTSWKPRDEILEKIRQLLSVREQFTKQKVALDNSIQAYSKQRVQVTLIRKAQKETLNQLKKQITLIDKELEKLIKQDPEIFQRANNLDSIPGCGMLLAAHLLVITENFTKIQNSKRLAAFIGIVPYQHQSGTSVFKKAKIRHFGPGPSRKLLRLAAQSVATHNVTFRRYYLRKLDQGKAKPLVLNNIANKLLKIACTIIRNNTRYIKDYRSIHPMYLKSLKSA

SEQ ID NO: 446819 - protein, 372 aa, unidentified
MTSIIYVGMDVHTINYTLCCYSMEDDRFFAEVQVEPDAKNILKYLARIEKQQSRDCRIVCGYEAGCLGYSLYHQLHAHGIDCVILAPTTMMTKPGKRIKTDRRDARLISKCLAFHTYSPVYIPTEVDNAVKEYIRMRDDANSALARVKQQIIAFCIRHGKIHDGKSYWTNKHLEWLSSLDLGNKILSEVLQEYLIRYYQLREQVDMYDMRINELAQAEPYRQKVEKLGCFRGIAAHTALSFCVEVGDFRRFATAQQFASYLGLVPGECSSGDKQQYTGITKAGNSHLRKLLVETAQVFGRSATKSGKSVALKERQAKCDSLTVAYADKANARLKKKYFKIAMRSKVNIAKTAVAREMACFIWGMMTDNISCA

SEQ ID NO: 446820 - protein, 342 aa, unidentified
MAEYVGLDVSKEETSFCVMDISGTVLSSGKALSDPDALFRMLRQHTLCPERIVLETGTLSNWLARGLRDHHMPVDVIDARQAHAVMKLQHNKTDANDAHLLATIARTGFCLPVAVSSETAQKHRILVKARRHLVNQRRETQSAIRGFLASLGLRFAKGSGTFVARVREALMARPDLSPMIEPLLTSAEAQAEQIKRLEGEVKAQAWELASCHLLMTIPGVAHNTALAYVATIGEAARFASSRAVGAYLGLTSRRHQSGEMDYSGRISKHGDGLLRSLLYEAANSLLTVVKKSHPIKDWARRIKKRSSHKKACVALARKLAVIMHRMLISGETFRWPEKATAA

SEQ ID NO: 446821 - protein, 343 aa, unidentified
MQITTIGLDLAKSVFQVHGIDTTGQVVVRRSLRRSQMLAFFAKLPSCLVGMEACGTSHYWARELIKLGHEVRLMPPAYVKPYVKRGKTDAADAEAVCEAVTRPTMRFVPVKSPEQQAALSMHRTRDLLVKQRTQSINMIRGLLAEFGIDIPKGLERALLMARQIVDGKTPEVPIEAAKIIGTLSQQALDTHVRLHEIDRDLAVWLRGNDVARRLMTIPGIGPVGATALAASVTDPHQFRSGRQFAAWVGLTPLQKSSGGKERLGRISKMGDKYLRKLLVVGMTALVRRAKQNPAVDPRLADLLARKPTRVATVAMANKTARIIWAIMTRGETYRAGHRPALAA

SEQ ID NO: 446822 - protein, 476 aa, unidentified
MRRLLGIDLAITADNRACIMEETGRVIVERRFGRTRGELEDLLAVATDGLGQGDELVVVMEPTANAWVAPAALFSSRGAVVHLVPPEQSADLRRYYTKHVKNDRIDAKLLARIPLLHPEGLHPVSLPVGARGTLRRVVTRRARLSAECARHRGRIRSLLQLAMPAMPAALGDELGKGALAVLGRYGDPRSLIRLGRARLTQVLIKATRGAWRSERAEQILAAARDGVQLWQGLEGCDFAEVAEDLAAEVRLIRAIESELRELDARAAGLLDEIDPAGLHRSMPGFGERTATTVAGRLGDPSRFSGAPKVRSFAGVIPGTNQSGESESRPHLTKSGDHVLRHALFLAAETARRLDPQLAAIYHRQVVERGSHHTKAVCAVATALASRLVAVLMQERAYEIRDTDGTPVDAAAARAIIAARFTVPPEIRAARRQPRSAQRMKGRPVHGVRSKTSPSSPPVDEASEIDATRVLVGVDLP

SEQ ID NO: 446823 - protein, 429 aa, unidentified
MMTDKQQDTSEVAWVAIDVAKRWNAVLVEHPDGRRQAFKMANQREDHDRLVEFLHAVPGTVRIALEPTGDYHRLLAYRLVREGFDLRLVSSVAGARYREARFNSWDKNDPKDAEVILELLKQGLTQHYHDPLIQGIHDWQELAKTYLQVSRTRTRLQHSLLTHYLALYFPEIERFWCTTRNQWFIAFLLRFPTPSSITALTEDAFATEASALIGRRVNKRGKLAEMYLLAQQSIGLPVAPDSLAVATFRLQLGRYQELNRQRAELETTAHRLLHDQPDYARLLTIPGIGPIVALIIMAEAGDLRRFGHHRQFLKFCGLDLAKCQSGRTRGQERLSKRGNARLRCAFWMAAMRAIRMRENGFRDKFERYIRANPQDADLRRKAYTAVAAKMARVVYGLVKRQKDYRPRFECELPRGSIPLSRAVEAVRTS

SEQ ID NO: 446824 - protein, 385 aa, unidentified
MKPNSQVTLGEFFRQCVGIDISKNKFTACLYMYDRASDVGCCTKSIDFDNTKSGFNQMVKWSRKEAVKDYPLTYLMEPTGVYYERLAYHLYKIGQTIYVVLPNKARKFCESEGIKTKTDAMDARCLALMGCASRKLKPWSPPAAIYRELRQMTRFHADLCVIRRSVANRMEALDHMESVSKTVRKHCEKLIKEIDTLTEKNDKDIIRKVAEDKELLAKVKRIATARGLGVTTIVCVIAETEGFHLIENRKQLTSYAGLDVKARQSGKEDPKHRISKEGNAHIRAALYMPALVAVRHNRQIREAYGRICQKHPKEKMIGVAAAMRRLLMLIYTLWKNGEEYDETRDKTHTPRKKELEPEYGPEHCIETNQESIDWNAVDENGEPPF

SEQ ID NO: 446825 - protein, 343 aa, unidentified
MKFVGLDYHQSRSSICVLDQGGNKVFTREVKGSWATVVEEFKKIKNSTSEPVSVCFEATCGCGHLYDRLLPVVDRVAVADPAQVRRMFRSKRKNDRADALKLAQALLINQVPAVYVPSLSVREWRGLIVFRSRLVSKRTRVKNEIRSLLRNSGAIAPRGLWTKKGMHWLEREAELPEGSRLRLDLCLFELSNLQLQLKRVEKELNRRARRHPGVMLLKTIPGIGVRTAEALVAYIDDPDRFHRKTIGAYLGLIPCQDQSGDHNHLGHITKQGPAVVRKLLVEASWMAVRKSKTVRAYFDRIVGTDPDRRKIAIVATAHYLARVSLSLLQHNECWLEKTEREAA

SEQ ID NO: 446826 - protein, 362 aa, unidentified
MAKSTTVIAFDQHAATTVAAVLLPGQRTPALQTLASDSPTILRFVERLRRQGPIACCYEAGPCGFELQRTLSAHDIACEVIAPSLIPRRAGDRIKTDRRDAGQLAVLYRAGALTAIHIPTDQEEAARDLLRCREDIRTDLLRARHRLSKFLLRHGRRFTATKKAWSKRHQAWLRSQTWPLAALDQTHRAYLRAVDEALARLHSVEQDLRALLDLEPLRPRVQRLRCFRGIDDLTALTIAAELGDPRRFATAPSTMAFVGLVPSEHSSGPKRAQGSITKTGNAHLRRVLVEAAWHYRHHPFVGDALRARQRGAPDTVIAQAWTAQHRLHRRYHRLAARGKPKPHVVTAVARELTGFVWAALTQ

SEQ ID NO: 446827 - protein, 356 aa, unidentified
MQNNFQSPESVILGVDTHLDIHVGAVISQAGKLLGTRIIQTNQIGYQELFDWAKSFGVLERAGIEGTGTYGAALTRFLIKNSIYVVEVNRPDRSKRRLEGKSDPLDAENAARTVLSGSSKAIPKMQSGACEALRIISVARRSAVKARTQAINQLRSLLVSAPQDVRDKLWKSKPHECVAACINCEVSEYSPLRIALYSTLRSLAKRWGALTEELNELDESLDKLTRKYASNLRSQFGVGPQTAATLLAVAGDNPERLKNEAALVSLCGVNPLPASSGKTVRHRLNRGGSREANNALWTIALVRMRSDPRTRIYVDRRTGEGLSTKEILRCLKRYIVRELYPLILSDLTYANRPLLT

SEQ ID NO: 446828 - protein, 344 aa, unidentified
MAYHTALDVSLRSVSICIIDDEGVIHFEGKTDSEVEAIVACLKQFDPALKSVGFEAGTLTQYLTCGLQAAGYEVICLEARQVSSALSAMRNKTDRNDARGIAQILRTGWYSRVHVKSFDSHLIRALLTSRKAVLKKCVDLENEIRGLIRIIGIKLPGTLKHGIFDVTVREIIEHNEVLASALIPLLDARLVLYKTYLQLDNQARAMAREDPVCQRLMTAPGVGAITALTFKTGVDDPTRFKRSRTVAAHFGLTPRRFQSGEVDNTGYISNAGDPDVRSALYVAAHSLVVRSAEWSSLKAWGMRLAKTKGHRCAMIAVARKLAVILHKMWLDGTDFRYGSTEAAL

SEQ ID NO: 446829 - protein, 400 aa, unidentified
MKQAPPTVSGKLTASALSDMRLKGGAMNVIYIGVDFHARQQTICYLKTETGELVTCELKHQDKEQVRAFYQQFQGHVIIGLEASGYSPWFEAMLEQLGCEVWLGHATEIRRRARWRQKNDRRDAELILDLMLHDEFPRLHRPAVQSREVLRMLRYRQKLMKIRTMSKNSLQALALQAGLARGSRLFTKAGQQELSTAEMSPVMQWQREHWLQLLEPLNQQLLETMMWCKAQSRDDVCITRLRTHPGIGLLTSLCLVHTLQPVGRFRNTRKVAAYGGFDPVERSSAERKCFLGISKAGSRLLRYLLVEAAQTAVRKDEELKRFYKRLAERRGRPKAKVAAARKLLIRAYIMLRDEIDYAEFRRRAVAARLARRGQRPEVPEVLIGQPASAERQELVHGSEK

SEQ ID NO: 446830 - protein, 359 aa, unidentified
MGVMEGRERRIVGGVDTHKDLHVAAVVDEQDQVIETRCFATTRQGYRQMLTWMRSFGELQRIGIESTGSYGAGLLRFMQQAKVPVLEVTTPDRQDRRRRGKNDDLDAQNAAHAAFAGQRTVTPRSRDGMIESLRVLMACRKTAVSARRVALQMIHNTIVCAPDDLRDQLRRLTRMQLVRTLAAWRPDLTAYRDLDSAYRISLKSLARRYLELHDEIADLDTMITAIVDELAPNLVTRNSIGHIGAAQLLLTAGDNPERLQSEASFASLCGVSPVPASSGKIVRHRLNRGGDRAANSALHIIAIGRLRTDQRTRDYTARRMAEGHSKLDAIRALKRYLAREVFTLITQRRREINAARIAA

SEQ ID NO: 446831 - protein, 397 aa, unidentified
MRRLRYDREMRSVELHAKGAVMKKASTKTVRFVGLDVHADTIAVAVAEPGGEVRSVGTIANREESIKRLVKKLNGDGIWKACYEAGPTGYVLYWQLEKLGIECEVIAPSLVPTKAGDRVKTDRRDAERLARSFRAGDLTAVWVPDVKHEALRDLVRAREAAKCDELRARHRLGKFLLRHGRRPPEKLRPWTQRYLEWVKREVIFEEQAQQWTLEDYVNEVEHCALRIARLEAEIDAAVESAPPAMKEVIEALQALRGIAKVSAVTIVAEVGQLSRFATPRQLMGYSGAVSSEYSSGTKTRRGGITKTGNAHLRRIVGEAAWCQRHRPIVSRALKLRQEDLDPEVQEISTKALHRLHKRYVALLSKGKSSQQVATAVGREMLGFIWAIGVAVESKHAA

SEQ ID NO: 446832 - protein, 388 aa, unidentified
MIYVGIDIAKLNHFAAAISSEGGILIEPFKFSNDYDGFYLLLSKLAPLDQDSIIIGLESTAHYGDNLVRFLISKDFKVCVLNPLSTSAMRKNNVRKTKTDKVDTFVIAKTLMLQDPLRFISLKDLDYIELKELGRFRQKTVKQRTRLKIQLTSYMDQVFPELQHFFKSGVHQNSVYTLLKEAPTPNDIVSMHMTHLTHLLQTASHGHFGKDTARGLRILAQKSVGIHDSSLSIQITQTIEQIELLDSQLFHTELEMANLVTCLHSVIMTIPGIGTTNGGMILGEIGDIHRFPTPGKLLAFAGLDPSVYQSGNFQAKKTRMSKRGSRILRYALVNAAHNVVKNNATFKAYYDAKRAEGRTHYNALGHCAGKLVRVTWKMLTDEVEFNLE

SEQ ID NO: 446833 - protein, 345 aa, unidentified
MVATLLPGEENPVTDRIANEEAVIRRLVGRFADRSVLRCWYEAGPGGYELYRLLASMGVACQVVAPSLIPKGSSDKVKTDKRDSRRLARLGRAGELTPVRIPSPAEEAVRDLARARDAVLADRKRAQQRLTAVLMRHGRIWRGATYWTAAHRAWIAAQRYGEPALASAIGHYRAALAVREAELAALEAELMPWAGREPLAGPVARLGCYRGIAELGGLTLAAEVVDWRRFPAARAFMSYTGLVPAEYSSGERTRRGHITKAGSEPVRTALTEAAWSYRHAPAIGAGLRRRQHGAGPDTLARSWTAQRRLHDRYVHLVHHGGKAAPEAIVAVARELAGFVWAEMTA

SEQ ID NO: 446834 - protein, 334 aa, unidentified
MYSIGLDISKSSVNVHIPLTHLDLEIENTLKSFKALYSKLKKLYKKEVDKLVFTFEPTGSYSALLYRFCADKKIQVFLINPKQSSNFSKAIAQRNKSDKVDAKVLSQAIVVAREDEIAIPSVNLLVEEMKELMVYYKLKTKQRIQLSNHLESLESKQGNTSLIRRLSKEVKALKEIEAQVMDEMYELIKQDEALKEKYDAIESIDGLGKVSTVALLHLFIRYPNANQRQITSLAGLDPIIRESGTSIRGRSRISKAGARIYRGSLFMATISATRYNPQMKVFYERLKDNGKHTTLAQIAVMRKLLVIAHSLFKSGESYNKDIFLRTTGFIKMTD

SEQ ID NO: 446835 - protein, 315 aa, unidentified
MIVGIDVSKQSFDGVWGAAGKVKHCALEYTDKGIDELLERTSVDSHYVMEATGIYHTRLALKLYDAGRRVSVVNPLVIKRFSQMQLSRVKSDKADARLIRDYGEKHDLIPWSPSSSEITELQQAHSWLDDLIRERTRLDNRREALSHQATASDFVLSQMEGQRRHLNEQIELCEQHLEAVVKKSFPELYARLQTIPSVGPKTAIELIVITDGFRRFNDVKALCAYIGISPTTFSSGTSVKGKGGIAKMGKGRMRQLLYMCSWTAKSCNKACRDLCARLRAMGKPPKVINVAIAHKLVRQAYAVATKGIEYSEKYA

SEQ ID NO: 446836 - protein, 347 aa, unidentified
MTHYIGCDVHKKYSVFVVMDDKGRVSRPRRVEHDREGFRSFLASLPPGSPIAVETTGNWYWVIDEMERAGHLPALAHAMKSKLMMGQINKTDKLDADGLAMLLKNDTLPLVWIPRGELRDQRELPRMRLVLVHMRTALKNRVHATFAKYGIQFEKETDLFGTRGRQAMSKRMPELPPETRHSAEQELKLLDQLEEQIDLAEQRIRQVIAVTPDMKLLMSLPGVGPVLAITIALEVGDVGRFPDNQHLASYSGMVPRVNSSGGKTRFGKTRPDVNHYLKRAFVEAANVVVLNQSRWPRRHTVKLYQRVKANKGHGKAVVAVGRHLAESTYWVLKKKEPYKEPVSSKQG

SEQ ID NO: 446837 - protein, 419 aa, unidentified
MAFKIFRKNCCGLDVHKTWIFACIGITDANGRTEYFERRFSSFSKGLCELSEWLANHNCVDVCMESTGKYWIPVFNILEKSCNVVLAHPKYTKPQKGNKTDRKDAKWICDLFMCDMIKPSFIPPADIRHLRDLVRYRFKLTCMITGEKNRALNCLTVSNLKLDEVFTDVFGKSSRSITEYILKHPGEYFDVAPFVDRRCKHPIEEIQAAVDGAICEEQAIKLRQCLDHIDELEKHKNEIEREIFRVSNPYSDALALIRTVPGLDKNPFTAIQILSEIGGDMSVFPTDKHLVSWAGCCPRNDQSNFKIKSTRISRAGSYLKPVLVQVANALIKSKKHPEITERYRRIKSHRGHKKAIIAICRMLLTAIWHILTDLTPYTSDGYLIQRPAEEKKTLTTAQALNLLKSRGFIIKDDLAESTS

SEQ ID NO: 446838 - protein, 480 aa, unidentified
MNDRRLVGIDLGIISAHTVRVLGGDGSVICRRKAVPTVASLTQTEQAALAGAAPGTQLEVVLEPTGPSWLPIAVFFASRGHTVYRVSSAKAHDLRRVLSRQAKSNGIDADTLARLPLVDPAGLHPLQLPSAARAALDRRVRACDRLTQQAAQHKRRIKDLVRQLLPTSPLVGDLGHADLAVLERTGGDPHALLRCGQARLGRLIHTASTGHQDTQRAAQWLQAAHASLHLYADHPAVAFQDLAAEVQTEVRLLRATQAELARHATQREYCYHWVDPLALARSLPGLAEVGGPALVATMGDAHRFATAGTFRSFTGLAPRASQTGNTDRKGQPISKAGNRLLRTTLVRAADNARRVDPQLARLYWVQMVQRGKDHLGAVCVVAAHLAERAWTVLDRGMPYVICDTDNTPVSTEQAKQIIAERWTVPEEVRRRRRSTKAKGKAPQQVLQGHVTGAQGATRRPSPPASLGRPPAHVKLTKPPA

SEQ ID NO: 446839 - protein, 437 aa, unidentified
MEEVTDEPLYRERVCGIDIGKAGMVATIRVPSDKDPARRAAETRSFGTTRREVLALADWLRAWQVPAVVMEASGDYWKGPFYRLEAEGFECVLADAKQVKNLPGRPKHDPGDSRWLAACLERGAVTSCFVATPEFRIIRLHTRYRRDLTEERTREKQRAEKLLESAAIKLSSVVTDLHGVTGRDIMDHLIAGERSPKVLAQLARARARRKISELEEALEGAEFFTAEHAALLAAMLARIDRVNAEIARLSEVIETLLEPYEEQLQQAESMPGWGRRAAEDALAETGTDMTRFRTGAHLASWAGRTPLDNSSGKRKGKAKSKKGNRYLGGLLGETAIAAGKTQTREGARYRRLARRRGKAKALVAVGNTQLKVYHALLSSPGMRYEDLGPDYYERRAQVGRQVRHHVGKLGALGFDVTLCRIPEPEPEPGGTGNSHAD

SEQ ID NO: 446840 - protein, 371 aa, unidentified
MKSIFSVGMDVHKNSFSLCAYDGYTGEIVSESTFASDVKLVIKFIETLKSRYENDVEIKCGYEAGCLGYSLYKSLTARGVDCIILAPTTMQVSAKNKMVKNDRMDALNIAKNLASGSYKSVYVPDEEDVEIKEYIRMIHDFKKELKRVKQEICAFVLRHGYQYDGKSKWTIRYMNWIRELEMSEIQRETLNEYIAEMENLNDKINRFMNRIDEMYQSERYHEKVSKLRCFKGIETFAAMTIQVETADFERFPSAKAYASYTGLTTGEHSSGDKNNRIGITKQGNTVIRKTLVECAQSLVKGNVYAKKSQGLKSRQKGMDVNIIAYADKATERLKKKYQKLIERNVPRNKAIVAVARELACFIWGMETGNIH

SEQ ID NO: 446841 - protein, 345 aa, unidentified
MNKTIVGVDLAKKVIQVCIYTNRKVHSNTEMTPKAFTCWLVNSRPAPIVFEACGTSNYWKQLASSHGHDARLISSRLVAVVRQNQKTDKNDALAIVQASLLPDVNFIQGKTAEQQQLQSIVRLRELSIRQKTASKNQLIALLSELNIQVSNRNGGLRATIDETLEDADNGFSPSFRQAISTAWDQYLSLVEAIDIYDNCLEESLNYHPECKKLLKIEGIGILNAVNLYIALGCADIGAFSKGKVAAACIGLTPIQHSSGGRAKIGSIGRGFKNTLFRSQLITGAMSIVSKVANRPPKTKKEEWLKNLIERRGKKCAAVALANKNVRTAFAILTQGTEYKAEPLVS

SEQ ID NO: 446842 - protein, 341 aa, unidentified
MKKFIRIGVDLAKNFFQVHGIVREGAEAVSRKFTRTKFREFFLSVAPCRVGMEACGSAHYWARELRSMGHDVVLIAPAYVKPYVKRGKNDAADAAAICEAMSRPDMRFVPIKSADQQAALMLHKTRELLVKQRTMIVNALRGHLSEFGLIAAKGIQRVHELVALALGEEGLPEAARQAAALLAEQSEQLEGTIDTLERKIAETSAKYPMVRLLKEIPAIGPLISSAMAASYPDPGVFASGRDFAASLGLTPSQHSSGGKEKLGSITKKGNRYLRKMLVVGCTSVLRVAHKYKGALAEWIVAIKARKPERVAAVALANKLARICWAMLSTGEGFREELYTRA

SEQ ID NO: 446843 - protein, 394 aa, unidentified
MVYVGIDIAKDKHDCFIVNSDGEVLFDVFTIQNNMDGFEDLLFKIKTAEKNPDKVKVGLEATGHYSCNILGFLKNKGLETIVINPLYTSLSRKSISLRKTKTDKVDARTIASMIMSDVSLKPYSDKLYHNEDLKSLARYRFDKVAQRAKLKQSVSRLVNILFPELEKLVSTLHGNAVYEMLSEFPSAQHIASANLKHLTHLLDKASKGRFKRVTADEIRETARRSISSYLPAKSLELRHTIKLIRELNSEISEIEAEIKKIMDVIGSPILGIPGIGQNLGAMIIAEIGDFSRFGSPDKILAFAGCSPSTYQSGQLYSSHAKMEKRGSRYLRWALLNAAAYVCNWEPTFAAYLQKKRSEGKHYYVALSHAAKKLVRVLYHLEMTGEAYRPTTILS

SEQ ID NO: 446844 - protein, 343 aa, unidentified
MDHFAGLDVSVKETSVCIVDDAGKIVREVKVASEPEALLAVLKKPAYRFKRIGLEAGPLSQWLFSALAEAELPVVCVETRHMQAVLKAQINKTDRNDARGIAQMMRAGLYRPVHVKTLRSQKLRMLLTHRKLLQSKAIAIENDLRGTLRNFGLKVGVAGTVKFEARIRELVENFPDLAGLVEPLLVVRRVLREQISILHRRLLAIVRDDEVCRRLMTVPGVGPVVALTYRATVDVPARFRKSKAVGAVFGLTCSKYQSGEIDRNGRISRCGDEMMRVMLYEAAQSMLRSKKWSWLKAWAMQIARRRGMKKAIVALARRLAVILHRIWVDGTEFRWTRERAVAA

SEQ ID NO: 446845 - protein, 402 aa, unidentified
MAYDFVIGMDVGKYFHHACVLDSQGRQVLSKRINQHEGSLRKLFGKFLADDASVLVIVDQPNNIGRLTVAVAQDMGADVRYLPGLAMRQLSRIHAGNSKTDVRDAYVIAHAGLKLPDALRSVDRVEEVFIQLKVLNGIDEDLARAYTRLINQMRSALVGTYPAFEHVLRGQVIHRKWILHLLAKYGGPTKIRRVGRARLAAFARSHRARNPEPVIDAMLAAIHGQTVSIAGAEYAELGVAMSAKDALAKLEHRKEIEAQVLKLIQDIPHTEILLSMPGIGPRSAAQILMTVGDMSDFPDAAHLASYAGLSPRTNQSGTSIMSNSPNRAGNKKLKNALWQSSFASIRFHERSRQFYERKRKEGKRHNAAVVALARRRLNVLFAMMRSGELYRDISTVQQATAA

SEQ ID NO: 446846 - protein, 310 aa, unidentified
MEITVGIDVSKAVLDVHVHPSGDSFVLGNDEAGVEALVEQLGGLEGLVGIGIEASGRYERLAVAALAAAGLPVVVLNPAQVRHYAQAIGQRAKTDPIDARLIALFVEAVRPEPRPMADAQTQELAAVMARRRQLVAMLVAERLRRQQAAAGRVRSSITRIVTALEDALKQLDGEIDKLVRSTPVWRDKENLLASVPGIGKTIARTLLAELPELGSLTPKQVAALAGLAPYTRQSGKWRGKSFIGGGRSAVRAALFMGALVAARYNPVLKAFRDRLVANGKPKLVALIATARKLLTILNAIIRDAKPWRTA

SEQ ID NO: 446847 - protein, 358 aa, unidentified
MATNSLSRVEQFVDGFQSHSFWIGMDVHKRSYHIALLRTDGKSLTFVSPASPQFVVQLINRLAIHVAAVAYESGPTGFPLARELEAAAIPVMVVAPSRVPRPVTSGAKTDRLDCLKLASYAAKGLLHSIAIPSPEDEARRALLRRRHNVAASLRQCKQHIKSLLLFLGLDEPAEVENWQQGADESLRALSMVTAAKLTLESHLRELTFFRQELKEVESQLQQLTKQQTDRKTIACLKSVPGVGPILATTFSCELFRPERFTRAEEVASYLGLALMVRHSGEKTPSGRLVPVGQTKLRSLLIEAAWIWRGRDRYAQELYNRFLNRMGIAQKAIAAVARKLAIILWRLCIEQRPYRPATN

SEQ ID NO: 446848 - protein, 346 aa, unidentified
MDHYAGIDVSLECSSVCVVDASGKIVREGKVASEPEALISWFISLGYELSRIGLEAGPLSQWLFAAMREAGLAVELLETRHVRKAFEAMPVKSDRNDARGIAQLMRLGWFRPVHCKSIGAQETRTLLTARKLVQSKLRDVENSLRGILRGFGLKVGKTTERSFAGRIRELASGHPSLETITEGLLAVRTVLLREFNSFEKQVRRVARSDTRTRLLMSIPCVGPVVALTYGSAIDDPARFKSSKQVGAHFGMTPKKYQSGETDYTGRISKIGDAWVRTALYEAAHIMLTKPVKGCSELKSWAMRIARRAGMSKAKVALARRLAVIMHRMLVDGTLFNPASKQIAAAA

SEQ ID NO: 446849 - protein, 424 aa, unidentified
MNCTQNERINQVSEQTLVIGVDIASELNYARAFNWRGIEKGKVFKFFNNLEGFQAFNEWAHQVMSANKLTNLMVAAEPTGHYWFGLADYLKDEKLKLVLVNPFHVNRAKELDDNHPSKTDAKDPKTIAKLVIEGRYMEPYIPEGVYADLRIMYNCRQKVTKAMISLENQLKRWFKIYFPEYLSVFGNLSGQGSMAVLEKAVLPEDIISLGVDGINKLWRERKLRAVGMKRAESLYEAAVKSIGRREGSVGGRAEFRMLWEDYCHKMEQMEKLNIELESLLHKVPQAEEVLKMKGIGVVSVAGFFAEVGDLRRFESPKQIQKLAGLAIRENSSGKHKGQTTISKRGRARLRAVLFNAAIALVGRNGAFKSIHEYYIGRKANPLKKKQSIVAVSCKLIRIIYVICRHKEAYDEAKMLRDIRREQLA

SEQ ID NO: 446850 - protein, 375 aa, unidentified
MNEFSKYVGLDTHKDTIAVAVSDSCGKKPRYYGEIANTPEAINKLIHKLSPDGEVLSFCYEAGPCGYGIYRQITAIGHECAVVAPSLIPTRAGDRVKTDRRDSEMLSRLHRAGELTAVWVPDQEQEAIRDLVRAREDMKAMERQARQRLNAFLLRHGKIYESGKSKWTQTHFRWLERVKFAIPIQQIVFEEYVDTIKQAQQRVVGLEDEMHKAMPTWSLAPVVEALMAMRGIKLITAMTIMAELGDISRFDSPRQLMAYLGLVPSEYSSGKTTRRGGITKTGNSHVRRVLTESAWCYRFPARRTAHLQRRAEKNSEEIQAIAWKAQKRLCGRYRHLLDRGKIKVQVCTAIARELVGFIWAIACEVMNKPVALQKP

SEQ ID NO: 446851 - protein, 334 aa, unidentified
MKVEIIKQNVGVDVAKDDLKVALSIFTIDYRVVVRSTRTFRNTEKGFKQLQEWVNLKKHPDLALHFTMEATGVYYEGLAYFLYERSYNLHVVLPNLVKKYGESLGNKSKTDKLDARTLAQMGLERELRLWQPVSPSLLGLKQLTRERDALVCSRTAAANQLHAYRHQGKPNKDSIKRSIKLISIFDKHIKQIEKEIKNFVNQDKELKIKMEYLLSIPGVRLLTASVVVAETNGFAAFENIKQLTSYAGLDVRIAESGKWKGKSKISKRGNSHIRKALYMPSLSKITHDKATKQFFERIKTKKGIGMVATIAVERKLLGLMFSLWKKEEMYCVAK

SEQ ID NO: 446852 - protein, 344 aa, unidentified
MGEVSTIGLDIAKSVFQVHGVDVSGAVMIRKRVSRAKVLEYFGELPPCLVGIEACPSAHHWGRELQTLGHAVRLIPPSYVKAYLKRSKNDANDAAAICEAVTRPSMRFVPVKTKEQQTALMLHRTRQLLVRQRTMLSNALRGHLAELGIVSAKGRNGTAELIRIITGSPDSRVSLAVRGILDVLARQYGAIGAEIASIDKNIMTLHRACEASRRLAEIPGIGPIGATALVAEIGDWKTFSSGRSLAAWIGLVPKQHTTGGKDRLGSITKQGNRYLRWLLVVGAMAVIRYARKHGTERRPWLGRLMERRPTKVAAVALANKIARMAWAIMVRGERYKEPKLSLAA

SEQ ID NO: 446853 - protein, 475 aa, unidentified
MNIKGTKKKNQVVTVNIFEQQELLKKVEVIRENLTASTWRELETNGKFGKNEKLSFVSDDMLILGCDVGGDTHYVRAIDTRGRELSKSAFPFSNTLEGFQSLMDWATKIAASNDKKQIILGLEPTGHYWFCLATWLIGNGISVVQVNPYAVKQTKEVEDNSQLKDDRKDPKLIANLVKDGNFGMPYLPEKLYADIRRLSMLRDQINEDRIRDLNRLHREMKIYFPEYKDAFGKIDGTFCLEVLKVAPFPEELVTLGVEGIRQIWHEAKLRGRGYVNATSIFENAKKSIGIQDGAESGKLAVKWFVHRMMESNEQLAEIESRLHQMCMEIPYAENILEISGIGENTLSGILAEMGDISRFDDVKEIQKLSGLGLVACSSGKHKGETKISHRGRKRLRYWLFQAAKSAVAHANEFKELHAYYTTRKDNPLKKKQSLVVIACKILRVIFAILTKGTPYDPKKMLGDIVRPNEQSVQVA

SEQ ID NO: 446854 - protein, 324 aa, unidentified
MEAAVFVGVDVSMERLDVGLWPSGETFSDSNDPEGIARLGERMAELKPRLVVLESTGRLEVPMALELQERGIPYRIVNPRQVRDFARAMGRLAKTDRIDAVMLARFAESSKLEPKALPDPARRELRALVMRRAQLIEALTAEENRLRGETVPKVCKSLNASIAWLGKQIAALDKELDRTIRKNPEFTALSDRVQSVPGVGPNTARMIAASLPELGRLSRHKIAALVGVAPLNRDSGKSHGRRFCWGGRSEVRSAIYMATLVASRHNPVIRAHYARLRAKGKAAKVALVACMRKLLTILNAMVRDQTCWRQTAPAALRLSEQDSC

SEQ ID NO: 446855 - protein, 293 aa, unidentified
MLIHYIDIAKQNFVIAVSSLSKTKTETNNPKGIAHTIEYLKKHKVALVVTESTGGLEIPAAKAIRRAGIAVIIANPRQTHQFAQSQPLTKTDAKDAKMPAFFAQMTAQKEDSQTMPYQPPTEAEEVLEALVNRRNQPADMRTAEKNRLHQVHETQVGSVKQLIAHFDRLIDELDKQIDNHTHTHFDGKDQVAEQIKGIGSITTATLMAMLPELGRLSHKRIASLVGIAPHPRESEETKFKAAALAEGLRCVRHCIWLPWQRHVLNRLFGISTNARCPKVSRIRLPLRHVCANC

SEQ ID NO: 446856 - protein, 345 aa, unidentified
MKIVGCDLHTRYQQIAMLEEETGELVERRLEHESGEARAFYAGLAGPVRVGIEATGHTRWFERMLAELGHELWIGDAAEIRASMVRKQKTDARDAAHLLELLLSGRFPRLWRPTMAERDLRQLVWHRQKLVWMRNAVGNQLHALAMGEGVCRKKKLFTKKGRAELEGLKLDRWASRRRQELLRMLDHLDASLKEFDEAVREQAEESPAAVLLMTHPGVGPVTSLSFVLTLGPVERFARSKQVVSYLGLNPREHSSGGRQRLGSISKQGNPMMRSLLVEAGHTAARLDAELRQDYQRLKLRRGGGVAKVAIARKLAVRMYWMLRRQASYAQLVRMQGSPRATLVSS

SEQ ID NO: 446857 - protein, 334 aa, unidentified
MAHYCGIDLHSTNHVVVVINEEDERVFEKRIDNDLSLTLKALEPFKDDLVSTIIESTFNWYWLVDGLMENGYHVELSNPAATVQYDGLKYAGDRHDAWWLAHLRRLDILPTGYIYPPEQRAIRDMLRRRLQLVHMRAKQLISIQNQIWRSTGNKVASNQIRKKDFQLPLSGLLNQSAQSNLTLFHAIDHEIVQLEQTVLTEIELDKSFEILKTIKGIGNILGMTIMLETGTINRFESVGNYASYCRCVKSIRMSNGKKKGKGNAKAGNKYLSWAYSEAAHFAIRFQPEAKRFFERKKSKTNGIVAMRAVAHKLARASYRMLKEQTPYDATKAFG

SEQ ID NO: 446858 - protein, 346 aa, unidentified
MLYAGLDLSRKRLDFHLLDCEGATVEVGAAPPDVDGLRGLSERLARHGDAVRAAIESMNGARFVHDRLELAGWQVEIADAQKVKGLAPLACKTDRIDAWVLAELARRDLVPAIWLPDPLVRAERERARWRLHLVRHRSSLKQRVHAVLLTHGKPCPVSDLFGVRGRQLLARLALPEPWQGTLEASLRLIDELDREISDCERELRRLGADHRYVPLLCTVPGISWVLAYTIAAELGDINRFPTPRKLAGYTGLCPRVYQSGERDLRGPLSKQGPRYLRWALVEAATHACTAPVYRDRYQQTKARIGKQRGAKVAQVDLARRLTEAIWHMLTRNEPFAPKGATDPLAA

SEQ ID NO: 446859 - protein, 323 aa, unidentified
MNKDIKYFGIDISHLVFDVTDSEGNYHQFKNNVTGFRKFVKHLDISSHCVMEATGYYHYQLAYYLQEKGIKTSVENPLAVKRFIQMKLSKIKTDKSDSKLICAYATQVELKLWQGNSRHQLECLQMTRLLSVYTKQSTMLKNKLHGEAVLGNPSKAVVSSLKRNLKQVKKEVETIELKLLLLVKQVHQDVLTRIKSIPGIGNKTAVMLVVLTDGFDRFNSASELCSYAGLTPIIRQSGSSVRGRSRISKIGNQKLRNLLFMCSFNACKYNKACREIYERIVAKGKSKKLALIAVCNKLLKQAFAIAKSGLTYDDSYRSVLVKN

SEQ ID NO: 446860 - protein, 415 aa, unidentified
MNHVCDDQYTAFIGIDWADTKHDICLQAADSDQREFACIPHQVDRIEQWALSLRQRFGGPIAIALELSKGPIVYALQKYDFLVLFPINPSTLAKYREAFTPSRAKDDPTDAELALDLLLRHPDRFQPLEPQSVELRALASLVEQRRELVNDRVRITNRLRSALKQYYPQILEWFDRINTPLFCDFITRWPTLEQVKRARKSTLERFFHAHNMRFSQVFDTRLKAIKAATPLTRDAAVVIPHRLQVLVLAEQLRVTLQAIRRYDDEIKELAPTHPDYGLFSALPGAGPSLAPRLLVAFGEQRQRFTCAADMQKYSGVAPVTERSGRKHWVHWRWQCPTFLRQTFVEWAAQTINKSFWAGAYYRQQKAKGSSHQAAVRALAFKWIRILYRCWQTRTPYDELIYLEALRRRGSPLLDQ

SEQ ID NO: 446861 - protein, 420 aa, unidentified
MARRLELGKDMTDQRQWYVGVDWASESHHVFLTDADGRKIAERVFKHGGEGLAEMAAWLVAASGAEASQIQVAIEVPHGPVVETLVERAFKVHAINPKQMDRFRDRYTLAGAKDDSRDAQVMASALRTDPRCFRLLAAADPVVIELREWSRIAEDLSAERNRLTNRMREQLWRYFPAMLELDGDLGAEWLLDLWEVVPTPAKALRIRDKTIAALLKRNRIRRFDATHVLDVMRKPPVRVAAGTTEAASAHISALVARIRLVNRQLVQAHRQIDALTARLIPPEPEPGQRKQHDVEILASLPGVGRIVLATLLAEAFDALQRRDYAALRSLTGVAPVTKRSGKSCIVVRRQACHDRLANAMYHWARVAVQHDPRSRAKYAALRSRGHSHGRALRSVADRLLNVACAMLKTGTTFNPSPAAP

SEQ ID NO: 446862 - protein, 314 aa, unidentified
MSAQGVVAGIDVSKDWLDVALGSESLRIANDADGINALTGRLCDAGAQLVVMEATGGYETQAASAMAGAGLRLAVVNPRQVRDFAKATGRLAKNDRIDAHVIAAFGRAVDPQITRVPDAEARELQELLARRSQLVGMRVQESNRLTLMKGAMRKQIKAHIAWLDKAINEVNTDLTARLRTSAAWRERDELYRSMKGIGPITSGTLMASLPELGQLDRRSIAALVGVAPFNRDSGAFRGRRMIWGGRAQVRHMLFMAATAAIRCNPPIKMFYQRLIARGKPHKLAMVACMRKMLTILNAMARTQTPWTPNFQGRN

SEQ ID NO: 446863 - protein, 310 aa, unidentified
MGQVFVGIDVAKDRLDVHVLPGGEAFAVARDSEGLAALVERLGAVRPYLIALEATGGFETVVAAALAAERLPLAVVNPRLIREFARAAGQLAKTDSLDARIIALFAERMRPEPRPLPDEQTRALAELVARRRQIVEMMTAERNRRRYLTNRRLLKSIDRLLKVLQQELSDLEQDLDDTIRGTPAWRETEDLLTSVPGVGDKLARTLIADLPELGRLGRKQIASLVGVAPFNRDSGTLRGRRTIWAGRAKIRATLYMGALVAAHHNPVLATFYQRLLAAGKAKKLALVAVMRKLLIVLNAILRDRRPWQNA

SEQ ID NO: 446864 - protein, 418 aa, unidentified
MKTDCETIPCERFLALDIHKHYVLVGGMNSLKEWVLRPRKVQMSRFPEWVQKNLKPTDALVLESTSNAWEIYDLVSPLVAKALVANPLKVGQIAGAKVKTDKLDVERLLILLIADIVPEVWVPPHHVRDLRALISHRWRIHKQIAMTKNRLHSFIHRFNLIPPAGPLFSEKNLSWWQEQEFSSMVRLQIEQDLLILEHLTAHKEAVHQELACLSNRKPWSKDVVFLMQLPGLGVVLSMTVLSAIGEITRFENAKNLVGYAGLGAGIHSSGLKHQGKGITKAGRKELRWAMVEAAWGAVRSDSHWKDQYEQLKKRGKHSNAAIVAIARKLLVSIWHMLAKGESHRHSTEEDLAYKMLIWSQRMDEEALRGMTRQQFAKYGLLRLGKGIHLTRIVRNSLPRRIAPADEVLALLPELNLLE

SEQ ID NO: 446865 - protein, 362 aa, unidentified
MKEQSFVPHEFDIFGGLDVDKKSIAITFMSHQGMLQSFSMPHRAEYLLSYVDKHFRGKKVAFVYEAGPTGWGLYDKLTGEGHVCVVAAPSMIPKIPGQRVKTNRLDSRKLSEHLRGGQLKSVHVPSESYRQLRQLVQLRDTFVKDVTAMKLRIKAMLLFEGLEFPPAPAGSQWSLIVRGKLKRLSCSSAVRFKLDQLMESLEFSEKRVLQTIKEIRRFYQQDPELCQAMAHLKSISGIGEIVASHLLARIGDPQQIGNVRQLAGFIGLAPTEHSTGERVARGHITRSGDGRLRSKLIQAAWSAIRQDPELREFYRSVYQPHPRDRAARKAIVAVARKLTMRIYAVLKQQRTYVVREIVHSAP

SEQ ID NO: 446866 - protein, 416 aa, unidentified
MNAVGIDVSSRKSTVAVLRPLGEVVCLPFDVTHDIAGLASLAEKLKAIDGETRVVMEHTGRYYEAVAKALHEAGFFVCAVNPLLIKEYGANSLRRVKTDKADAIKIARYALDNWADLRDFTPMDAIRYDLKTLNRQFQLASKQRTASANNLIALLEQSFPGIRKCFDSPVRSDGTQKWVDFAHSFWHVDCVRKQPFPAFCERYRKWCKLHAYFFKLRNAEEVYALAKRAVVLTPKSKVVKVLVQEAANQLISISRSVEVYRAEMDRLAAMLPEYPVVMAMYGVGKSYGPQLMAEIGDVRRFERKQALVAFAGIDPMPNQSGDKNVRSNKSSKRGSPYLRKTLFNVIRTYLQCAPQDEPVFQFLNRKRAEGKPFYVYMLAAANKFLRRYYAKLRDYFASLDTLQPVAPIPTILKATL

SEQ ID NO: 446867 - protein, 338 aa, unidentified
MLYVGVDLHKHSISVCVVELAGRERKIVKRKRFRCEEEDLMADYFAALGEYQLVVEATASYEWFVQLVEPTADRVVLAHPGHLRVIAQSKRKTDKLDAQTLAEFLALDQIPEAWRPTLRVRQHRTLVRHRHYVQGRITSVKNKLRRVLSHYNADIKTLFSKSGQEYLATIELTAADRFTVDLLSEELDQHSERLKQVDKQLKTFAKQAPVAEQEARAVLDSMPCVGPVTIDVVLAEVGDIRRFGSQRKATAYAGLAPGIRESAGKAKQLGITKQGSRLLRTILVETAWRLVIKTRRWGALYEKLKARCGAKKAIVAVARRVWCVMVSILCSGQKYQPA

SEQ ID NO: 446868 - protein, 326 aa, unidentified
MEHELHYIGIDTAKEKLDVDVLRPDGRHRTKKFANTTKGHDELVSWLKGHKIDHAHICIEATGTYMEPVAECLYDAGYIVSVINPALGKAFAQSEGLRNKTDTVDARMLAEFCRQKRPAAWEAPHPLERALRALVVRHQALTDMHTQELNRTETAREVQRPSIDAHLLWLEAELKRLEKQIKDLTDDDPDMKHRRKLLESIPGIGEKTSAVLLAYIGLKDRFAHARQFAAFAGLTPRRYESGSSVRGTSRLSKAGHVSLRRALYMPAMVATSKTEWGRVFRDRLAANGKKGKVILGAMMRKLAQVAYGVLKSGVAFDAARHNPVAA

SEQ ID NO: 446869 - protein, 419 aa, unidentified
MNRIETKKQKIVNAKTLIVAIDISKTTDMGYCRCPSGEEMKSFEFSNNIEGFRTLWDRICWMKLSHHLEEVVVGFESTGAYGEPLVHYLRQKPVKLVQVNPMHTKRIKELEGNSPGKTDRKDPKVIADIISLGHALTVVVPEGAAAELRKLTLARERGIQRRTALYNQLQDLVFSLFPEFMQVLKDIKTKSAHYLLRNYPRPQDIRKCGVEPLGSILKRVSRGKLGSAQAQALYEAAAESVGLREGTQGIVLEIEEILSALEACNRFIEKLEEEMLPHLEQIPYRDSLLSVKGIGVITVAGLVGEVGDFRHFHTLREVMKLAGLDLFEISSGNHTGNRHISKRGRPLLRKLLYFAAINTVRKGGIMHASYQRHLDKGMPKTKALIAIARKLLRILFALVRDHSQYVQSYSKKEVLKLAA

SEQ ID NO: 446870 - protein, 370 aa, unidentified
MKKNSTVAQSPKRAAARKEAPITIGMDLGDKTSRYCVLGENGEVLSEGTVATTRKAMAQKFAGMRRCRVAMEVGTHSPWLSRWLKSLGLEVMVANARQVPLISASSRKNDRMDACLLARLARVDPQLLRPIRHRSEQAQADLMTIRIRAALVEARTSLVNAARGFAKAQGDRLPACDADAMGVEKMEGLPAEMRERLRPLLEQVESLTEKIQELETKIEQIARTSYPETALLRQVSGVGTLIALTFVLTVEDRDRFQKSRDVGCYVGLRPKQSESGQSQPQLRITKEGDRYLRQLLVQGAHVILNRRGPDTDLKRWGLKLAERGGKNAKKRAIVAVARKLAVLLHRLWVTAEVYEPLRHSRAAQASKQAA

SEQ ID NO: 446871 - protein, 416 aa, unidentified
MNAVGIDVSSRKSTVAVLRPLGEVVCLPFDVTHDIAGLASLVEKLKALDGETRVVMEHTGRYYEAVEKALHEAGLFVCAVNPLLIKEYGANSLRRVKTDKADAVKIARYALDNWADLRDFTPMDAIRYDLKTLNRQFQLASKQRTASANNLIALLEQSFPGIRKCFDSPVRSDGTQKWVDFAHSFWHVDCVRKQPFAAFCERYRKWCKRHAYLFKLSNAEEVYALAKRAVVLTPKSKVVKVLVQEAANQLSSISRSVEVYRAEMDRLAAMLPEYPVVMAMYGVGKSYGPQLMAEIGDVRRFERKQALVAFAGIDPMPNQSGDKNVRSNKSSKRGSPYLRKTLFNVIRTYLQCAPQDEPVFQFLNRKRAEGKPFYVYMLAAANKFLRRYYAKLRDYFASLDTLQPVDPIPTILKATL

SEQ ID NO: 446872 - protein, 400 aa, unidentified
MATRKYDRPRVLAHRRPSGHIEREVTYVIAGIDTHKDTLAVAVVDDSGRLVAGGDVPNTERGFAQLVDMFTAHHVQRVGIEGSGSFGRAVAVHLALCWQSGQPVAVVEVPTLMTSRERHGQLGKGKTDPVDALAIARITAREQQLPTVRLTVGAAADLRALLDYREDLVRERGALVNRAHAELGGLRPGYQQQIPILTTRARVRAAIDLLGDDTSIRATLCRRRLERVIAIDAETAELKQQISKLVAAADTTLTDLYGVGPLVAARFLAEVVDIRRYPNRNAFAAANGTAPLPASSGRTVRHRFNPGGNRQLNRSLYTIALTQIRGDTEGRAYYERKRAAGKSKREALRCLKRRLSDIVFTTMRHDAAGADAAPDQASPPAWPVLVGVGAVDANEARLTA

SEQ ID NO: 446873 - protein, 416 aa, unidentified
MDAIVERCAGLDVHLDTVVACVSYGKLDIKPKKEVKTFSTTTKGLLELLDFINQKECTHVAMESTGIYWKPVWSILESGAFDLIVANAKKIKNVPGRKTDVKDAEWIASLLRCGLIEKSFVPLERIRDLRDLTRLRKELLGEVNRNKNRIHKVLQDANIKISSVLSDVFGETGKSILNQIIGNQCITEEFIYSLYEGRGKSKLKSTPMEMYEALNGKIRGHHVILLGMHNSNIVFLEKQINELEKEIDILLQKERDSLELLETIPGISKISASSIIAEIGTSMDVFKTEKHISSWAGLCPKNNESAGKKKRSGIKSWNNWLRSMLCECAWSATKKKDSRFKNKYWSMVPRMGRKKALIAIANMMLRLIYHLLKTKSTYKELEIQYFIDKDKRREDRIIKELKSKGYLVEKDSLQMA

SEQ ID NO: 446874 - protein, 376 aa, unidentified
MKNLIFVGLDVHAETIAVAVAEADGSVRSLGVIPNRAESVGRMIRKVGKPEQLWVCYEAGPTGYVLYWQLSELGVKCEVLAPTLIPVKAGDRIKTDRRDAEKLARCYRAGDLTAVWVPDAAHEALRDLVRARLAAKRDQLRARHRLGKFLLRHGRRTPEAMSAWTDKHLAWIKTVHFEHSAQETTLLDYLHEVEHVAERLVRLERSIDTTIETLPVKLRAVIEALQSLRGIAQISAVTIMAEVGELSRFEHPRQLMGYSGALSREHSSGPRVCRGAISKAGNAHLRRIVIEAAWAYRHRPAVGTTLAARQRRSDPALIATAWKAQHRLHQRYLRLIGRGKSKQQTVTAVGRELLGFIWDIGVQVERQTQLPLKQVV

SEQ ID NO: 446875 - protein, 408 aa, unidentified
MNTLYVGIDVSSKSNVIYLMLPNGDKHSNFSVANSHEGSTQLVKRILSALTSHSLDTVLIGLEATSVYGDNLVYFLREDATLAPFNRKIHVLNPKQVKKFHDAYNDLPKNDYVDSFVIADCLRFGRINKEVYMGDYRYKALQNLTRARFFAVQNLVKEKQRFMNVLFKKYSTMTQEKVFSDTFSTTALAVYDEFESAEALANMDLHELTDFIIEKGKNRFPDPDAVAKAIQKAARSSYRLPKTVNDSVNQVLSISITSMKALESQIKEFDKAIKALMELLPNVLISIPGIGPVYSAGIMAEIGDINRFDNQASLAKYAGLAWKQHQSGGFEAEVTRLIPLGNRFLKYYLCEAAFSLVRCDKEYSDFYHLKYKEVNRCQHKRALALTARKFVRLVFRLLKDNRLYCPAK

SEQ ID NO: 446876 - protein, 366 aa, unidentified
MDEGTTVVGLDAHKVEDHVAMLLPGDNRPVQWQCANERGAVRRMVRKVMRQAPGGVRFCYEAGPCGYALQRWIQEAGAECAVIAPALVPRKPGERVKTDRRDARKLAELYRAGLLTEVHPPSLETEAVRDLCRGRDDARADLMRSRHRLGKFLLRHGWSWSGGKRAWGRGHRLWLRSLRFERPCEQVVFDDYLLAIEQLEERMRALEEKIERVSQEAPYAQAVGALRCFRGIDTIGGMGLVAELHDFLRFESARGLMAFVGLVPSEHSSGEKHKRGEITKAGNSHARRLLIEAAWHHRHRPNVANLRRRREGQPARVVALADRAMYRLNRRFNRMLERGKPRPKIAVAIARELAGFVWAALRPVGA

SEQ ID NO: 446877 - protein, 355 aa, unidentified
MDRYIGLDAHASSCTLAVIDSRGKRLGSSVVATTAPTLIEAVRAIRGRRHLALEEGTLAGWLYEVLTPEVNDLVVAAVPESRGPKSDERDAFHMADELRTGGIKRTVYKARGGYAALGYQAKVYARLVSDSVRVMLRLKSLFRSRGVFVRGDTGYSLGGRRAWIAQLPPAARPAVALCYAELDALLAVRAQAATARLAEARHHPVWRLVRTCPGLGPIRSALLIPIVVTPARFRSKRAFWSYCGLGLVTRSSADWVRTASGHWVRARVPLTRGLNPTCHRTLKYLFKSAAVTVIRRAADEPLYRHYQALLAGGTKPHLAALTIARQLATIVLALWRTGARYDPRQLERRIAMRPA

SEQ ID NO: 446878 - protein, 345 aa, unidentified
MPIVGGLDIHRKQITFDYLDTVTGEVKRGQIAPADREHVRAWLARFASRGEVAFAVEGCCGWRYVAEELAAAGIAAHLGEPADTAALRGRKRHAKTDKTDARHLRALLAEGRLPECWIPPAQILEYRALLETYHDLRREHTAWVQRIHAVFFHQGAPPLGEGALRTDQGLAGLRAAAAAHLSPAGQQQVATALDMLAATEAQLGPLRRQLRQAAAHLRGAKVLAERLYGVGPLTALALTCWLAGKDRFSSSRKAVRFTGLDITVHSSDRKGPPGKLSRQGPPVLRWAVYEAGKTHARTAAPDHGYYATVADRKNTKRAALSEARKIVRQACHILTELGDDALTAA

SEQ ID NO: 446879 - protein, 338 aa, unidentified
MNIVFPGIDLAKNVFQLCGLNQAGKPIYTKRTGRKELLQTLANIPACLIGIEASTGAFYWQREFEKLGHKVKVISPQYVKPFVRGQKNDGNDAQAIAVALMQPTMQFVPPKSPEQQDIQALHRARQRIVNHRTATVCQIRGLLLDRGIPIGSAVSRARRAIPLILEDAENGLSSRMRRTIAELYDLFNDLGRRIHFFDKEIETVFRQSEACQRIAKVKGIGPETAMAVVAAIGKGTEFKNGRHFAAWLGLVPRQHSSGDRQVLMNMTKKGDKHLRTLFIHGARAVVRVATNNNDGHMNQWVNQLKERRGFNKTTVAVANKNARIIWSMLRNDTGYQVV

SEQ ID NO: 446880 - protein, 329 aa, unidentified
MTSVCVVDANGAMILEAKVVSDPFDIYEVLTGIDGSFERVGFEAGPLSQWLYNGLIAAGLPAVCIEARHAKAAMVAMNRNKNDRNDARSLAQLVRSGWFKSVHVKSTESQEMRMLLMSREFFVNKLRDHENEIRGLLRPFGLKVGRVSAKDFDARVRELVEGNSNLELCMFALLRGRAEMQAQLAELHRALLRLTANDELCRRFMTIPGVGPVTALAFKSTIDDSGRFRPSSDVGAHLGLTPRQYQSGETDVRGRISRSGDALTRTALFTAAHVMLTRSRQWTSIRAWGLRLAKRSSLKKAKIAVARKLAVVMHRMWRDEAPFRWGAAA

SEQ ID NO: 446881 - protein, 355 aa, unidentified
MDSKKYIGMDVHKESISIAVRNGAGKIVMECVIETKASTILQFIDGLRGDLQVTFEEGTSAAWLYDLLKPHVTKLVVCDPRKNASMREGNQNDKIDARRLAELLRLNHLHPVYHGEHGLRSLKELVRSYLTITKDLGRVMSRVKAIYRSWAIPCSGKQVYAPRHRAEWLGKITEPGVRRRAEFYYQQLDALRTVRQEVRRDLLAEGKKHPAWKRLCQIPSIGPIRAAVLLGILQTPHRFRTKRQLWTYCGFGIETQSSADHRRVDGQLERAKKQISIRGLNRNCNHDLKNLFKGAAIVASSKPGPFQEFYTTLLTKGLRPEMARLTLARKIATIVLIVWKRGACFDAQHLKPQTA

SEQ ID NO: 446882 - protein, 465 aa, unidentified
MKRHRRQLPRTPRTTPSTLDRVCPDAAGIDCGSAEHFVAVPPDRDPQPVRAFAAFTGDLYQLADWLTACRVTTVAMEATGVYWIPLFDILESRGFTVRLVNARHVRNVPGRKSDVADCEWLRDLLMVGLLRGSFRPAQAIVVLRAYLRHRETLIQGASTHVQRMQKALVQMNLQLPLVVADIVGVTGLRILRDIVAGQTDPLHLAQHRDYRCQATEAEIVGALTGHYRAEHVFVLRQNLELFDYLQQQLAACDLAIEAQLHTLTADVVSPAAPLPPARSRHKPRHHEPRFDVRTSLHHLTGVDLSQLDGLGPYNALRLLSEIGTDMSRWPSDKHFTSWLTLAPRNKISGGRLLSSQTQPSANRAAGILRLAVANLGRGQTALGAFYRRLAVRVGKPKAITATARKLAILVYHTLKDGLVYADPGAVAYEAQHRTVTIRRLRQRAAHLGFQLVNASTGEVVEGTVS

SEQ ID NO: 446883 - protein, 347 aa, unidentified
MRFYTKQHQFYCGIDLHARSMYVCMVSQEGEILVHRNMKAAPEPFLKTVAPYRDGLVVAVECIFTWYWLADLCTQEGIPFVLGHALYMKAIHGGKAKNDKIDSQKIAALLRGGMLPQAYVYPAEMRATRDLLRRRTHLMRKRAELLAHVQNTNSQYNLPEIGKKIAYKANRTGVAERFDDAAVQKTIEVDLALITYYDALLKDLELSLLKTAKQHDAHTLYLLQTIPGIGKILSLVLLYEIHDIHRFPSVQDFASYARLVKCSKESGGKRLGTSGKKIGNAHLKWTFSEAATLFLRNNPQGQKLLARLEKKHDKGKALSILAHKLGRAVYFMLKRKTAFDMTLFLQS

SEQ ID NO: 446884 - protein, 348 aa, unidentified
MKYYVGLDISNDETAICVADYDGTIIKEGMVATEPAAIQKFLRSTKLSYERIGLEAGNLSIWLYWALHKSGYPVTCIDARHAHAVIGIQNVKTDKNDARAIAHLMRTNLFSSVHVKSDESQRVKMLVNNRRCLVDQRVVLENQIRGSLKVFGLKTGKVTTKQYDGRVRDLIDGDGELEAGVFPLLDARSFLMCEINTLNKMLMTLAKNDPVCRLLTTVPGVGPLTAVLYKAVIDDPSRFKKSKDVAAHAGITPRKYASGEVDYNGRITKCGDTMLRSHLFEAASIILRPTMKTNPIKQWGTRIAKRSSLKNARVAVARKLTIVMHRMWMDGTEFDWGSVSPQESKKMA

SEQ ID NO: 446885 - protein, 438 aa, unidentified
MSNKVFFNLDDLFISVGIDVGADFSWMSIALPNQQFVGKPYKILHNSIDSLTTAVSKIKEAEELYSLESRIFLESTGIYHYPLFCYLRDKGFNCSVINPIITKNSTNINIRKVHNDRFDSKKAALVGLKPDLKVSLMPSDLALNCRNLCREYYDLIDNRSAYVNKLQGELRMVFPQYLGIFSKVTINTSLTLLETYTSPSAFLKADKQEIIDIIKSTARFGLTYAQNKYNAIIQAATDANQFGYIIDSNIKRIRLYISFIRKYDEEINNILESLHELVDANEDADFVKQIHLIETFKGAGFLSSVSIMGEIGDFSAFSKPKQLFAYFGLDPAVKQSGKFEGTKVQMSKRGSAIARRVIHTLTLQSISISRNGEAKNPVLREYYLKKCDSKPKLVAMGAVSHKVCNMIFAILRDNKPFKIIAPQEHIKQYNAAKCDIAA

SEQ ID NO: 446886 - protein, 489 aa, unidentified
MIATVRIFTPMRRSKSAVRVDQEKEDVLLMSLTGLESQDIEEDVVVQGSGLSRGDKRRNARLARLRELVPAGNAILGIDLADQKQALVLADHDSQVLTRRRVRAKAWRLGPALDWARQQARRRGFADVTVGCEPTGHRWRVLDQLAVQRGMALVCVQPLLVGRARESEDYTRDKSDDKDAVLIARLVAQLRCYAPERADETWARLRHLGARRDRLITEATADVQQLRDLLECAWPAVLRASVRQFDAMSWCAALAVVLARCSGHPERLARLGARRFEAAVRRELPRWGGKRPRCPIIAAVFAALTDPAGVAAQRAGALERAGWVLADWRAAKARLVEVETRMVEILDELELTELVSSIPGVSAVGAAAILAETGDPTRFDSPRALVKHAGLCPRENSSGTSTGRCRISGRGRPRLRLAAWRAVWGAQRHNPVMAARYQHLTTRADNPLSDGQAKAALAAALLRWLHVITTQRVSWDAALAGAGELPAAA

SEQ ID NO: 446887 - protein, 349 aa, unidentified
MKQIVKQVLGIDVAQKELVVCLGRIYDDWTPEMYSHGTFVNSKKGFDALINWVKKFTVDTTPVRYVMEATGVYHESLAYYLDDKGYEVSIVLPNKISNYFRTLERKTITDKTASETIAQFGLERKLDQWKRPKQIFRSLKQLTRERNQLVDDRTATKNQLHAEQSEAFPNPSSLSRMKARIKFLDKQVAEIIKEITTAIKQDKEMSNAIETICSIPGIGRLTAATVLAETNGFELIRNKRQLTSYAGLDVREKQSGTSIKGKPRISKKGNRHLRKAMHLPALAAIRHEKRFKTIFARLVSKHGIKMKAAVAVQRKLLEMIYTVYSKNTVFDKNYLTVNDTEMGKHSALA

SEQ ID NO: 446888 - protein, 405 aa, unidentified
MDITPIHRRVIGLDVHQNKITACALIEQADGSVAVEQGEFGGFKRDRRALAAWVHGLAPDIVVMESTGIYWKSPYAALEKVGIAAWVVNARHVKNVPGRKTDISDAQWLATLARAGLVRASFIPPAEIRHLRLIARQRQKLGGMLAAEKNRLHKVLADAGIRLNVLLSDLHGQSARAMVKALLADEPIHAILERAGRLRASREDLFEALQPEELSAKHRFVLNEIMAHIQYLEATMARFEQQLLVGLAPWEPQMSLLETVPGIDRLGAAMLLVEIGTDMDSFGSAERLASWVGICPGNNESAGKRKSGRTRKGNAWVRRLLCEFAQAASRTRCALKDKFSALAIRKGHKRSIVALAHKMLRIVYAMLANTTPYQDRTVDYEALMVGRNAPRWLKMLAKHGYIATA

SEQ ID NO: 446889 - protein, 324 aa, unidentified
MNMQSSIVSVGVDIAKDKFDTALLYQDNQSLTKTFKNNAAGIKKFVRILKKQKTASAVPCVLESTGLYHLNMALTVHQAGYKVSVINPLITKKYQRSSIRNAKTDTIDALRLAEIGVKEAKLPLFTGNITYIEARKLVCYMSRLEEIKRQICASLKFVEMTQTVTGLDIDLDHTQKAIDEIDDQIKVLKEKICKLAPLEAKILADNIYGLSHEKVAAVLAMLGDKEFKNRDQLVAFVGLDIMPRESGKWRGKSRLSKRGNPYLRKILYQMAWGLKQNNPVYQAEYERLRAKGKNYTTTLIILSRKFLRFLYAYYWKKTARPEFC

SEQ ID NO: 446890 - protein, 415 aa, unidentified
MEEQTNSSAAGIDWAKDEHALCVLDAAGRVLLERRFTHEERGIEKLCRSLVEMGVEQVAIERPEGILVERLLDGGLTVLAIHPNQLKAARPRFRASGHRAKSDAFDAFCLAELARTDHHRFRKLVPDSDETKALKALTRSREDLVGTRVALANRLRAELEAFWAGAALLFSEIDSSISLAFLKRYPSPKDASKLGEKRLAGFLSGQGYPGRKSALELLERLRKAPRARAGEAEIEARRATVLALVSALQTLVGQIRLLEERIAKAVRAHPDGAVFLSLFRSPKSTITAASLVAEIGECRERYPTNEALAATAGMSPVAVESGRRKVASFRRACDKHLRRAVATLAESTRHHNRWAIDTYLRARQRGCDHAHAIRILGRAWVRVIFRMWQDGLPYDPARHGGLRRLQSAGRLPQGV

SEQ ID NO: 446891 - protein, 378 aa, unidentified
MDKDSGEVLLQPSSFSNTKDGFDSLIQKLSSYSKDSILIGMEDTGHYYFALLKYLLEKNFTVALINPKTTDYTRKMQNGITKNDKLDTLTICDVLDTPVRKKQYRITKVNSFDLYEQKQLTRHHHNLKEELNVYTNRLQKCIDIVFPEFNSLFSSKYGIIYMNVLKTFGSAENIASTDIRTIRKCFEIKGRGNRISLTAQQLKDSAKSSIGISSAAEVIKIKHLISQIELINEQLAETDKKIEEFSIQNNSPILSIPGISHFSGTSILAELGEISNYSKPSKIIKAAGVAPYHYESSQYDAQHTAITKKGSPYLRKTLYQIILPVINNNNPVFKQYYDLKISQGKGHRCACGHCVRKLLRIIYHLSSTNQQFDDALLR

SEQ ID NO: 446892 - protein, 372 aa, unidentified
MNNTTVYVGMDVHKESFTLCDYLIETEKSSHTRRTPADYKEVLKYLEFLRTIYGNDTNFICGYEAGCLGYTLYHQLTDRNVNCVILAPTTMLEPRSGKRIKTDKRDAELIGKCLAQHNYSPVYVPSASDEETKEFLRMRDDHKLALKKVKQQILSFCLRHDYRYEGKNHWTAAHVNWLKSLKLESLYKEILDEYLLTYTTLSDKLERLDKRIEELASKDEYRESVKKLCCFIGVQTHTALSVLVEVGDFKRFASANQFSAYLGLVPGEDSSGDDKARLGITKAGNRHVRQLLIESSQSYSRGQIGYKSKVLKARQTGNTPKVIAYADKANERLRRKFYKMVLGKSKKHNVAKTAVARELACFMWGMMTDNIA

SEQ ID NO: 446893 - protein, 342 aa, unidentified
MQVTTIGLDVAKRVFQIHGVDAAGAVVIRRKLRRSELLQFFAHLAPCLVGIEACATAHFWARELGAFGHQVRLVPPSYVKAYLKRGKNDAADAEAICEAVTRPNMRFVPVKTVEQQGVLVLHRARELLVRQRTMLVNGLRAYMAEFGIVVPQGIQRLPELVALLEDEKTGIPQIAHEVLAAMVVQINNLTTSIRQMEKRIVAWCRTNAAARRLSTIPGVGPITASALAATITDPTLFRSGRHLAAWLGLVPRQHSTGGKAKLGRITKMGDQYLRKLLIVGMTAVIRSARRTKAPAFAWVNALLERRPARLVSVALANKAARIAWAILIRGETYRAPAITAAA

SEQ ID NO: 446894 - protein, 342 aa, unidentified
MKIIGCDFHPSFQQIATVDLQTGEYTEHKLMPEEARQFYAELKGPVLVGMEACGNTLWLERLLAWLGIELWLGDAGKIRAMEVRKQKTDRRDAQLLLQLLLEKRFPKVWVPSVQQRDVRQLLLHRHKLVQMRRQVKNELQHLALNQGVQQKRKLWSECGRQRLEQLPLTGWTKQRREDSLELLDELNRRVAKLDQAAQQEAEKDAVARLLQTHPGVGPITALAFSLTLGTIERFGRSRQVVSYLGLNPAEHSSGGRQHLGAISKQGNPLLRSLLVEAGQSAARSVPELKRAYQRLKHRKHSGVGKVMVARKLAVRLFWMWKTQQPYTVARTQGSPSHHVVAV

SEQ ID NO: 446895 - protein, 316 aa, unidentified
MATYLGADVGKAEVVVAVHGQPGVTVVANARPALREWARRLPAGSWLGVEATGVYHRELVAAAQAAGHTVYLLNPRDVRHYARAMGRRAKTDRVDAQLIARYVAQEHTALRPYVAPTATQAAIAALLERRHAVVKDQGSLRQALCDLPAGISAGRRVQREFTTLLAQPDARLDQLAQAEPPLAALRQRLRTTPGIGPLSSLALANLLSRYNFQRSDALIAFVGYDPRADDSGQHHGRRRLSKRGPAEIRRLLYAAAMAAARTKTWRPLYQQHRQRGLSATEAIISLARRLARIAFALARTGATFDQARVSLACAKP

SEQ ID NO: 446896 - protein, 347 aa, unidentified
MGYFAGLDVSLEETAICIVDDAGRIVCEARAASEPEALVAFFGVCGMAMERVGLEACSLTAWLHQGLTEAGIPATCIEARRAKAAMGAMPNKTDRNDARGIAQIMRTGWYRAVHVKSPSCRSWRALLTARRMVLNKRRDIENGVRALLREAGLKVGAPSRKDFPARVRELAAGDAVLLGLTESLLSVIDVMTRQTEKLTKRVLDEVRVEPTCRRLMTVPGVGPLTALAFRATVDRPDRFRKSRDVGAHLGLTPRRYQSGETDVQGRISRCGDELARTALYEAAHSLLIRSTRWCALKAWGMQVAKRRGMARARVAVARKLAVILHRMWSDGSEFRWGRQVTTTTAAA

SEQ ID NO: 446897 - protein, 404 aa, unidentified
MWFAGVDWADAHHDVMVIDDAGRKVGGRRVTHTPEGLTELNAFLLSITGPERKEELACIIETTHGLLIASLLEAGYAVYPVNPKTVEHRRGAAGAKTDKIDAYLLAKHGRSEFADLRRLEPDSPIIAELKALARDQDSLIHSQTRLVNQLTAWRVTYYPVALHLFTKLQQPTTLAFLQRYPTPQVAQAASVEQVAQVLKQAGHPTPDKSAANIVETLHHPHLTADDVTTRTKSRLMLVLVRQLQPLLEEIAVYEKQITRLFLTQEDNEVFSSLPRAGKRLAPRRLSEIGDDRQRYADAASVQALAGTSPVPYESGNYSKPRRRLACMKPLRNALSQFAWQSTHTEAWAAEYSQRKRTEGKSHSVAVRALAHLWVRIIFALWRDKQWYQTATFEAARQLHARRAA

SEQ ID NO: 446898 - protein, 407 aa, unidentified
MDVLHQRCAGLDVHKEVIYVCVLIGSSRNGDRHTFKCGTFHHDLLELRAKLLEFGVTHVMMESTGVYWMPIYDVLEGHVEIVVANAQHIMNVPGRKTDEKDAEWLAKLLRFGLVNPSFVPPREIRELRQLTRYERSLVQAHASEQNRVEKHLQVSGIKLTSVASKVFTVSGEHMIEAIAEGVTNPAELADLALGKMRKKIPQLQAAFAGTISEHTQQILALHSEHLKRLDCTLAETELKIAEKVKSYQPHIELLDTCPGINRRTAIAVLAETGPDMSPWENSRKFAAMGGLCPGNYISAGKRLKNRSRRGNPYLKSTMVQAACSAINTNGSYYQAKYFHLKKRIGHKRAIVAIAHAMLVAIYHMLKTGQPHRDLGAAHVTDTAKNHKKQHAVKLLQSLGYSVAITPV

SEQ ID NO: 446899 - protein, 340 aa, unidentified
MSVVNGNAVLYIGADVHERETQLAIFDPGGTLLQEKRIPTKDLQSFVHSLPAKEKHLALESLGFIYPLYDKLKQIPRCDIAVANPKRMRQVSDSKQKHDRADAKVLGNLIRTNFLKRSHMAGQETREKRFLINDRVKYGLRRSELRGSIRWLLKRRGIEIEHPFSPEGRRKLREEIRLQEIDIRLQELELVESIIEKLDGQIIQVASGDPKAKLLDTLPGVAPYTALFLSSALDDVGRFPDSKHACAYLGLVPSVYQTGDVSVTGHITRDGNKFLRRNLVECARVAVRKDPYLKGVYVKLRRTRGERKALIAVARKMVAYAYWMLKRNQTYEELAPWIAS

SEQ ID NO: 446900 - protein, 354 aa, unidentified
MKRRTKYVGLDVHQAMTVASVREEGGRVVARTVVATEEAALVEYFSGMRGAVHVAFEEGTQAQWLHDLLMPVVDRVVVCDRRGESRRGNKGDQVDADQLSELLRRGGLRAVYHGSADRATLKEFTRTYQNVVEDTTRAMLRLKALFRARGIKTPGKGVYHPKQRAQWLAKLPERGARFRAEALYAQLDVLRELRPKAKAAMVAEARRDPAWSVLRSIPFLGPVRVALLMATMRTPWRFRSKRNLWGYCGLAVVTSSTSDFTLVEGRPVRRRRKPLTRGLNRNHNPVLKDVFKGAATAATGRSGPLQDFYQAMIARGMEPELARVTLTRKLAAVTLRLWKTGERYDPTMLTVQAR

SEQ ID NO: 446901 - protein, 341 aa, unidentified
MFKLGFDCHKAFSQVAILDEKGAVVKECRLVNQRAALARFVRELAQPVQAVIEAGYNWGLMYDLLTELGVDVRVAHPLRVKAIASAQIKTDTIDARTLGRLLHARLIPEIYVPSPDIRRQKDILRQRCWLVKMQTAVKNRIHQLHARNHIENPGFTDLFGLGGMKFLRSLALGTSDQQLLTQDLELYDLVHEQVKIITHWIGGVLQDNRYRTILLSLPGLGAVLAALAALEIAAINRFTSPGKLTAYAGLVPTTYASGGKVHHGDLLPQCNRYLRYAFVEAAWSAVKSSPYCRALFAKLRKRKGANTAIIVVARRLCGIAYLCLKENRLYEERAYDYDHRV

SEQ ID NO: 446902 - protein, 391 aa, unidentified
MFYMGIDIAKFKHDFCIINGDTGEIIVPPRTITNDKEGFQEMLEILTNLHCSQIIKIGLEATGHYGTLIKAFLTSNGYKFIELNPLQVSRFHSQTTLRRTKTDKIDCQVIARYLMAVTTKTYQPQVYHLEALKSLTRLRETLVDQRSRCLVKLTNVLDITFPEFKKFFTAKLRSETALFIIRKYKTPSRIAKWTDEDIRIVHNVSRNIPTSKLLEIKKSATDSIGIAPKYLLDELPSILNVYETVNDEVASLEEKIKSIIFELDPPSLSIPGMGPISCATILGEFGDFSRFPSAEQCIAYAGVDVGISQSGTKCHRGKMVKRGSSHLRYALMNVVRTVCIHTPTFKEYWVRKKVAGHKFLRVADSHAAKKLVRVIYYLETHNTKYDPSRCK

SEQ ID NO: 446903 - protein, 408 aa, unidentified
MTDYTTRYIGLDVHKHYLIALGVDENLEVVLPARRVELSHLEAWMKKTLTRQDAVVLEMTTNTWQLYDELSAHAGSVTVVHPPHVALITRAQVMNDKIAASILARLLAKGLLVGIWVPPQEIREMRGLVAQRQKMTQLATQAKNRLHAVIQRHHLQPPAGNPFSKSQNEWWQALQLGPLEKLNLQTDLETMQFAEKQEARATEEMDKLAAENEPISRLLHVSGFGVVTAVTVWAAIGDIRRFADAKHLVGYAGLGARVHDSGLTTRTGRITKAGRRDLRVALVEAAQIAANTHPHWKAELARLEPRLGRNKAIVAIARKLLVATWHILADKTADRFAQPEAVAQKMLRFAYAVGKEYRAGKTAAQFARERLDVLNIGQELTSIPWGAKKPIPLPPSARLKKESAVPNK

SEQ ID NO: 446904 - protein, 365 aa, unidentified
MNKCHSNTELSSHEGTRSQFNGGECAIKLGIDAHQDFYVVVEQVDGTNPKPPQRFPKQAFLRWAARLKENTGAEVHAVYEACGFGFSLQRQLSSLGVQCHVVCPQKLDEQNRRVKTDGLDAKALVLKLDRFVQGNRSALALVRVPTEEEEQKRAIHRQREQLVKARKQLEAQGRSLMVNHGLEPVQSWWKPRAFAALPVPQWMKELLANSQPILVALQQKIASLTIQLQSSATPKQPRGLGLMTSVIIDREIGDWRRFSNRRQIGSYTGLCPGEYSSGNTRLQSCVTKHGNPRLRAALVELAWRLVRFQPNYKPIVKWRQILAKGALATGAARKKAIVAVARQLAVDLWRIKTGRLRAEELGLIN

SEQ ID NO: 446905 - protein, 351 aa, unidentified
MIIIGADYHPSDQYVAFVDTETGECGERRLNHSDGEAEKFYRDLRLRAVSVRVGMEATGYSRWFERLLAELGIEVWIGDAAKIKTKRVRKQKTDRQDAQLLLKLLLENNFPRVWVPSPENRDLRQLLWHRHRLVQMRTRIMNQLQALAMNEGQRRKKKLWSEQGRAQLEKLPLALWASRRRQDLLELLDRLNPTIEELTAAAEQEAKRRPEVLRLMTHPGVGPLTALAFVLIIGTPERFRCGKQIGSYVGLIPSEDSSAGRQRLGHISKQGNSLLRFLLGEAAQIAVRCDSGWRRRYIHLAMRREKNIAKVAMARRLAVRLYWMWRNGWEHAPSVEFGSYAGQLVTGHGVN

SEQ ID NO: 446906 - protein, 365 aa, unidentified
MRTYIGVDYHRGFSYMTAMDERGKVCARGRVANDREAVTRFLKRADQGGCGAAVLEATRNWTVMYDLLEELVGEVHLAHPLKVKAIAEARIKTDKIDSEVLAHLLRCDLLPEAHVPGPAARMVRNVLRQRMFFVRVRGMIKNRVRGLLDRHPELAASQPCKDVFCREGLSWLKAAPFQKEERRLLDQELKLHDELDQRIRQSDERVEELGRADERVELLQTIPGIGKFFALLLVHEIDDVRRFSNEKKFFSYVGIVPSTYSSGGRTYHGRLTKQGNKYLRWALVEAIWPAIRSDAGLAAYYSRVKARAGPNPAKIATARRLATIVYRVLTQGRPYYVTKAAIPRLPSVQSCGLPAKSGSRTSNEE

SEQ ID NO: 446907 - protein, 425 aa, unidentified
MEVLHPRCAGLDVHATSVTACARIASGTSIAYDHLTVPTTTRGLLALDEWLTGHACTHVAMESTGVYWKPVWHVLEDHFTLVLANAMHIRNVPGRKSDVNDATWIADLLAHGLIRGSFVPPAPIQALRDLTRTRRQLVHEMSRHVLRLQKTLEDANLKLTHVISDIVGTSGRAILTALIAGETDPERLVDLTSGRLKAPRATLVDALHGRMTDHHRFMLHLHLTQVDAVQHAIDEVEARIGAALGPFQSAVTLLTTMPGISETTARVLVAEIGTDMTRFPSVGHLISWAGLCPRLDESAGKPRSTRTRQSAPWLKATLVTAAWAASRKRDSYLHAQFLRIKNRRGAKKAIIAVASSMLTAAYFMLRDGAVYEDLGPHHFAHQDKERLTKRLLQRLQQLGVVVKWRPHDFNNRGYAPSFTLECGPG

SEQ ID NO: 446908 - protein, 396 aa, unidentified
MEVYSKYVGMDVHKETIAVAVAEANGGEVRFLGEYRNTPEAVVKLVKQLRKGGAELSCCYEAGPCGYGLHRQLVGMGVANQVIAPSLTPKKPGVRIKTDRRDSLTLARMLRAGELTAVWVPEVAQEALRDLTRGREDLKHLEKQAKQRLQAFLLRHGKVYAEEKKWTRMHFRWLESLKFDLPVQQIVFQEYVDTLQSLTRRVEALDGQIHQAGSESKSAPVIVALMALRGINQLTATTLMAEIGDLRRFPTAPQMMTYLGLVPSESSSGETRSRGPITKTGNGHVRRVLVEAAWTYRFPARKTTHLQQRAKRAPEVVQDIAWKAQTRLCARYRTLEARGKLKVKVCTAIARELIGFIWAIGQTVPGPEANAPGPLVKPQCVGSRTDHGGRTLEDPM

SEQ ID NO: 446909 - protein, 358 aa, unidentified
MDNVKSSKLDCTGQPIYVGLDVHKKSWSVSVFSRYGEYKSFTQPPQVDTLVNYLKRNFPGGEYHSVYEAGYCGFWIHDQLKERGINCTVVNPADVPTKQKEEQHKRDRIDCRKLARSLCHGEMEGIYIPSPAMREDRTLVRTRQAFVKKRTRCKNQIKGMLLFYGIHLTEEQTFAPWSGRFIEWIESIRMERDSGNTALKAHLEELAYLRQLIAQVNRAILKLARSEEYAIPVNVLKSAPGVSTLSAMILLTELCDMARFASLDSLCNYVGLIPAIKSSGETEYVRGITPRRNAHLRWILIEAAWVAVRKDPALMMAFAQYCKRMRKNRAIVKIARKLLNRIRYILKHQTPYVPCVTE

SEQ ID NO: 446910 - protein, 427 aa, unidentified
MVVVMTGVDPHQASRTAVAVNAAEEPLGQLRVRASAVQAERLRGWARAWPERAGAVEGAGGIGHLLARQLLSAGERVLDVPPQLAARVRLLATGDVNKNDPNDARSVAVAALRSAQVREVRRDDHATVLKVWAKRYQDLGRARTQVACRLHQVLCELVPGGVSGEITAGQAGQVLASSTPAGAVDAARWELAAELTEDLRGVDARIRETRKKAAAAVRAAGTSLTGLFGVGPVIAATVIGDVRHVSRFPNRDHFAAYNGTAPIEVSSGGRKVYRLSRRGNRRLNHAIHMAAVTQIRYRHTKGRAYYDKKLAEGKTPKEALRALKRQISDAIFACLQEDARRAAAAAAKSPGGQPGNHSASRAAGSHPDHRLFGQATPGPATHPMTLTAPFPAPLPSRASEQPGPGPGAARPRSGARRASSTRPPASR

SEQ ID NO: 446911 - protein, 314 aa, unidentified
MNTPVCVGIDVSQSQLDVAVRPGTGFSVSNDEAGWATVVVRLQPLKLVRIVLEATGGLEVPLVGALAAARLPVIVVNPRHVRDFARATGQLAKTDALDAQILAHFAEAIRPPFRPLPDAQTQALAALAARRRHLVEMLTAEKNRLRTATPATRQSLRRHLVWLQRERTQLDVDLTQAIHASPVWRDTDTLLKSVPGVGPVLTATVLANVPELGILTQKQIAALVGVAPLNRDSGTLHGKRLVWGGRAHVRAALYMAALVATRRNPVIRTFYQRLCQAGKAKKLALTACMRKLLIILNAMVKSRTPWRVAVSQPA

SEQ ID NO: 446912 - protein, 339 aa, unidentified
MNYIGVDHHKQYSHMTVMDEEGAIVKAGRVMNLRAEVEDFLEVAKKEAEAVIEAGRSSYTMADLLEEMGVEVTIAHPQEVKSIAHAWIKTDKRDSEILAHLLRMDMVPGVYRRGKENREGQRVLRQRAWYVAALTGVKNRIRALLAQQREEVQREASRFKKLFSREGLKFLKEVVLPGTDQELLGALLKTFEHLEERIKGSDELVKKLHGELKEAQLIDTIPGFAEFLSVLVAVEIADIKRFSRVENLHAYAGVIPSTHSSGEKSYHGKIIKAGNRWLRWALVEAVWPAITVDHDVRVFYERLARRKGPNMAKVATARRLLTIIYKILKEGRCYVPYKR

SEQ ID NO: 446913 - protein, 352 aa, unidentified
MIELGVDQHKEFSQVAALDTESGVVKQTRLEHDDPDAIRAFVASLGPQVRASLETTGNWYWLADLLEEEGAEVQLANPYETRRMLKARRAKNDRLDAEALATLSHQGLLPQVYLPAREQRDERERHRFRIRLISLQTRVKNIIHSILSKLNVSTPFSDMFGKSGRACLDALDLREPYGDQLRSALRILDAIQPEINRVRKQVTERLKADPRAQLLQSAPGVGELTAYLILTEVGPVERFPSQKQFVRYCCLAPGTWQSADSRRDLPVGRRGNLYLKAALVTAAITAARTDATLAGYYRCTARRKGTSTALVATARRLAICIYHMLKNGEPYRPAAKSIRRSGKPHLRLGQQS

SEQ ID NO: 446914 - protein, 355 aa, unidentified
MNCEKYIGLDVHQATISVAVMDSTGKLIMESILETKASTILEFLGGLRGTLSVTFEEGTWAGWLYDLLKPHVAHVVACNPRKNAALQQGNRSDKIDARELANRLRLNDLKPVYHGENGIRMLRELARSYLTIVKDLSRVMNRLKALYRSWAIPCAGRDVYYTRHRSQWLEKIREAGPRRRAEQLYQQLDMLQHLRQQARRELLAEGRKHSITTKLRQIPSLGPIRSALAVALIQTPHRFRSKRQLWKYCGLALETRITGEYVYVHGERRRSKKQISIRGLNKDHNHDLKGLFKAAATRASVIPGPFREFYQRSLAKGIKPTMVRLTLARKIAAITLTLWKKGENFDVEKLKSQAA

SEQ ID NO: 446915 - protein, 394 aa, unidentified
MYSLFVGVDISKDSFSVAALDEKAKVVFSMCPLMNEEGFAEFLRVLAAHHGDLETVVVALESTGPYHLNFYSFLIAKGIMTIVVNPLIIANFNKLSLRRTKTDKKDALTIARYLLLNREVLSKISTSQATTDLRDLARERESILKMIASTKNDIRRILQATFPELEQLVDVLSATMLHFLKVFPSARLINQATAQAVAEGFNQGDRRRRISVPYTSIIDLAKKSVGTPSPSKELILPGKIDTLFHLTQRADEVMKMLVKLCKSVRQEELSILMSIHGVASKTAAPFLAELGDHRNFKSYKKMIAFSGLDPTTHQSGKYEGMSMISRRGNRHLRKIIYNMTFCVVRYKGPFRDYFFRRKEEGLPFRKALLATAHKLMRTIFAMLNSRTPYRMEVA

SEQ ID NO: 446916 - protein, 338 aa, unidentified
MALWSGIDLHSNNSQLAVIDQERRPVYKRKLPNDLSTITRALEPFRAELRSVVVESTYNWYWLVDGVMEAGYRVQLANPSAIRPYSGLKHSDDVDDARWLAELAQLGILREGYIYPKADRPVRDLLRKRGQLVQQRTTNLLSIQTQIQRSTARRMTANDVKQLNVDTLGTLVNNADVGLAITSNLRVLQCLSEQIEVLERTVVERVKLREEFRLLQTIPGVGRILALTNMLEVGDIHRFPTVGDFASYCRCVDSARLSNGKKKGAGNVKNGNPYLCWAWIEAANFALRCRAPIERFYQRKLAAGNRVLAIKATAHKLCRAGYYVMRDHVPFDLAKAFS

SEQ ID NO: 446917 - protein, 455 aa, unidentified
MPQNRVWYPGEKEVIPMGKSTYRSVEIQKVTAAQILAAVLTPLVIFALDVAKKRVLAAIADDTGKHALIVHFALPTELGRLIALAEQLVAAGRRVQIAMEPTGSYSSPILEAAHGASLETFLISPKRAHDAAEVYDGVPSKHDPKDATILARLHAQGISTRWAPMSQERRELRALMDERELYAAPLEEHFGRVEARLAHWWPALLQSTDVRQRISVLRWLTTYADPATVRAQPQQATDALRALSRGTMAPKVIEAIVASAGQPSATPMNAAERKMLTRLFEEVVRLHDKCAEVDARIEEVTRAKASWEPMRRMLGATTLAALVALVGDPSQYASASALEKACGLNLKESSSGERQGRGVHITKRGPAVVRRYLYMLALRMVGRQELVRAWYQRRRSFLAEDKLSAVVAVMRKLVRALWHVARGAPFDATKLFDVRRLGVVTALPATRPEEVSAMA

SEQ ID NO: 446918 - protein, 312 aa, unidentified
MENEVFVGIDVAKDTLDVAATSGAKGSFPNTREGYEGLERFVRPLTPVLVVFEATGGYELAAVEYLALEGLPVAVVNPRQVRDFAKALNILAKTDRIDAAVIARFAAAVKPEPRPLKDAEAQKLDAFVARRRQLVEMIAAEKNRLPLAKEWVREDIIATIAWLTHSVEKINRDIGDLIKKSPLWHARDALLRTATGVGKVTAFSLLCDLPELGTLNRQKITALVGLAPFNRDSGKVKGKREIWGGRGHLRSVLYMAALAARRSNPLIKPLYDRLIAKGKLPKVALVACMRKLLTILNAMLKTNTPFQVRTCS

SEQ ID NO: 446919 - protein, 343 aa, unidentified
MKTWNEITHYAGFDWAKDHHQIVIVDRQGQIVAECEFDHSLEGWNQWRERTASYPGLAVAIETNQGAAVDQLLQSGSTVYPVNPRSAKAYRERKVSSSNKTDRLDAWGLADALRTDGHGWRALAPLDPLLQELRLLCRDELHLIGQRTALVNQLQQALSEYYPAALEAFDDWTLAGSWKFLQRFPTPEALAKVGRRKWENFLHCHKLYRPQTHAHRLACFEKATQFCGSPGVTRAKSLLALSLVEVLIVLEKQLQEYRSQIEKLFAKHPDHDLFGSLPGAGPKLAPRLLSEIGEDRNLFPDAQSLQCYAGTAPVSYQSGQVHRSTCGVSATNTCVAQSTFGPI

SEQ ID NO: 446920 - protein, 315 aa, unidentified
MEQPPSTPSFVGMDVSKDRLDVHVRPSGEAFTVARDPIGLEKLVADLRGRDVGLVVLEATGGFETTVAAALAGAGLPLAVVNPRQIRDFARALGRLAKTDALDAEAIALFAERIRPEPRAIAGPDAQALAELVARRRQLVEMIGMEKNRRRQAHAARVQKSLAATLRTLEAQLAALDRDIDGAVRASPVWRAAEDLLTSVPGVGDVTARTLIADLPELGRLDRRRIAALVGVAPLNRDSGQWRGHRAIAGGRTAVRNTLFMATLTAIRWNPAIRAHYTRLVAAGRPKKLAIVACIRHLLTILNAILRTQTPWQNA

SEQ ID NO: 446921 - protein, 392 aa, unidentified
MKTNAIKEGTVEGAEQGRKTHQLIKLGVDVHWHEYVVVRQIDGSSPQSAQRFSPEGFVAWAARQTQLAEQVWCCYEAGPFGFVLHKQLERLGVRNVVVRPRNWDEYGAKVKTDRRDALALCSSLDRYLAGNTQALAVVRVPTDEQEHSRSQTRQREQLVSERKRLGAQGLCAARYYGYDLPDQWWRPRRFAALQSQTPDFLLELLARWQRLLLAIDEELDSLGGLIESAQQQMLPTGLGALTAQILDREIGEWHRFKNRRQIASYTGLVPSEHSSGQTQVRGSITKHGNPRVRHILIEAGWRLRKFQPEYRAVKQRQAAFDAAKQKGNSPARKRLGVALSRQFIVDWWRIKTGRTTPAQLGLQMSWPTCPHLPSKPKPSSETSAQPNTQPID

SEQ ID NO: 446922 - protein, 339 aa, unidentified
MEQYVGLDVSQKSTAICVIDGDGQKVWEGACRSTPAAIAKVLRAKAPGAKRIGLETGPLAVWHWHALKQAGFPVDCLHARHAKAALSTQLNKTDANDAHGLAQLVRSGWYRPVEVKSLDSHRLRLLLRARHQLVSARTTLYNQIRGLLKTFGVVLPAGKGSTFVQLVQQRLPEDPSVQLVIEVLLSTWLGIHEQVRQLDRELQRVAREHEICQRWMRVPGIGPITAVAYMTAIDDPTRFRHSKDVGPYLGLTPRRYQSGEVDRSGQISKCGDRLTRSLLFEAAGVILSRSKKPSALKDWGLELAKRSGYGKARVAVARKLAVILHRLWLDGTEFVPEMV

SEQ ID NO: 446923 - protein, 385 aa, unidentified
MNHIGIDISKYKHDCFIATETSTKSFSFENNQDGFSKLLKELKKLSGEIKIGFEITGHYAENLKAFLISHNLAFMEIHAYLVKKFVESQTLRKTKTDKKDAEMISNYLRSVDYKTYLQQSYHIKALKELTRLRSKLISERTKYLNLLTKTMDIVFPEYKGFWPNNTFSKTSLYILEKFTSPVRISKMNDRHFEILTKMSRSSLSYPKFMKLKGLAKNTVGVYQNYHKTSISIYLNNIKIINNQVDSIETEIDQLMTSYPTKIMTIPGIGTISAAVILAEYGSIHNFDNPAQMLSYAGLEPSITQSGTQTFSGRIVKRGSRMLRQTLVQAAFYMLRVNPKFYDYYLKKKNAGKHHQVALIHLTRKLIRIIFYLETNQQDFNYEQLK

SEQ ID NO: 446924 - protein, 309 aa, unidentified
MLTAEADKCKTKVVVNTAAGVQALLAWCAKHGAQPAQLHAILEPTGLYHEQAATALPQVRVSLVNPAQARDFAKALALRSKNDALDSYVLARYGQTLSPALWHPAPLHARQLRALLTRREALSKDLLRELNRKEKSQFSPSAPLVDGSIDKAIAFLREQIKQIERAIDQHIDNHPDLKQDCELLNSIPAIGPQAGNAILAVMHNRHIDSAQSLAAYLGVVPVQRQSGSSLNSSARLSKAGPSQVRATLYMAALVGTRHNPHIRALYQRLLKAGKSKKAALGAAMRKLVHLCFGVLKNRIPYQPNYAMNG

SEQ ID NO: 446925 - protein, 422 aa, unidentified
MNKQESLDDFEVLYERCCGLDVHKKQITACLITPGPDGRPKREVRTFGTMTEDLLSLHDWLTANQCTHVAMESTGVYWKPVYNVLEGSFNLLLVNASHIKAVPGRKKTDKLDAKWIARLLRVGLLKGSFIPAPEIRELRDLVRHRTTLIRDKARAVQRVQKILEDANIKLTSVATDVMGVSSRAILDHLLAGKTDPEFLAGLAKGRLRKKIPELQKALNGVLKPHHRILLAQLLAQIDFLDECISSLNTEIEERLRPFAKQVQDLATTPGLKEFIPQIIISEVGVDLSSFPSDKHFVSWIGVCPGKNESAGKNKSGKTTKGNRWLKDALIEAAWAASHTKDTYLSALYHKLVPRLGKKKALVAVAHSIAIATYHILTEGVPYYELGSDYFVKLNKKKLEQRLVRRLEELGYKVTLEEVRSAA

SEQ ID NO: 446926 - protein, 348 aa, unidentified
MILVGSDLHTRKQQVAILDTNTGEFLERELVHVGDAVEQFYAALPPPVTVGIESTGYSLWFHALLQQLGHTLVVGEAAKIRAMVVRKTKTDRRDARHLLDLLQHDRFPTVWIPDPHTRDLRALLKHRLRLVRIRTMIKNGLHAIALNQRLALGPSLWSRHGLAQLQALGLLPHTGRRRDDSRELLQWLNRRIDDLDLHVATAAAADPNARRLMTHPGVGPLTALATVLVLGPVARFPGSKHVVSYIGLAPAVNASADKYRLGHISKQGSAVLRWVLGQAAPLATRADVDLKRVYFTVLRRRGWPKAKVALARRLMVRLYVMLRDQIDYDEFCRRGRAHRGLAPAPSSG

SEQ ID NO: 446927 - protein, 418 aa, unidentified
MNTFSSFEFTAFIGIDWSDTKHDICIQPAGSEEREFDRIAHHPDHIERWAQEVHQRFGGPIAVMLELSKGPIVSALQKYDFFVLFPINPSMLAKYREAFKPSRAKDDPTDAELAVDLVLRHRDRFKPLQPQSIEMRTLGHLVEKRRRLVDDRRRFSNRLVSTLKAYYPQAVEWFSHKETFVFCAFITRWPTLKQVKRARRSTLERFFREHRVRRPKLIEARIQAIQAATALTDDPAVINPCTLEALALAEQLRTTLELIKQFDEAIAQLLPKLPDYPVFASLPGAGLVFIPRLLAAFGEDRDRFQSAADVQQYSGIAPVTERSGQKSWVHWRWQCPTFVRQTFVEWAAKTIHLSFWAGAYYRQQRQKGATHQMAVRALAFKWIRILYRCWKSRTPYNETAYLQALQQRGSNLVPQQNA

SEQ ID NO: 446928 - protein, 393 aa, unidentified
MFYCGIDVAKHKHAVVVLDEQGQVHKPAFTAENTHAGMQHLLDALKPFADKVCIGLEATGHYWLSLYDVLTRNNYPVVVLNPLQISAYRRSGIRKVKNDKTDSIWIADFVRISNTPASNRDIPSLLQLRELSRFRFWLTDQIGDCKRKLLTILDRVFPEYESLFSSVFVKSSKAMLQEAVTAQDFAEFDLQELTELLYKTSRGKFGAEKAEQIQEQARQSIGVGFLADAVRVEMHCLLAQIELLEEQQAEVDKAQEELMQTIPQYITSIPGIALPTGAAILAEIGDVSRFENEGKLVAYAGIDATVHQSGQFNAGKMHMSKRGSPYLRLALWQAASMAIRHNEELKIYYQKKRKEGKAHGTALGAVCRKLLIRVYVILKQNRPYEIRNSTLDS

SEQ ID NO: 446929 - protein, 439 aa, unidentified
MVVTVGIDVHKQTHCAVAVDEGGRQLGKPLTVRATDAGHRQLLRWAGREFPGETVEFAVEDCRHVSFRLERALLDAGCSVARVPPKLMALTRTSARTRGKSDPIDALAIARAAVREPTLPRAEHTHASRELKLLVDHRDDLVGTRTRLQNRLRWRLHELDPEFDLPARGLDVGKQLDRTQARLESLPASTVRRIALEELADIRTLTGRINALEKELAELVRAQAPQLLALPGCGPLTAAKLLGETANPARFRSEACFAMHAGAAPIPASSGKTNRHRLARGGNRQLNAALHRIAVTQIRLDGLGRAYYQHRRANGDTTMEALRALKRRLARVVFHLLRPTDTAAPACLPAAAPRAALLVVGPPWVDADPPGYIRADRDAVEAAARAAGATFVDPLADGWFTGWAGRFIGAGSIHPTDAGHRYLADLLLPSIEKLLPPQP

SEQ ID NO: 446930 - protein, 466 aa, unidentified
MGLKKYTNINNIQGKKGSQFSSQLRGMDLERVLIVPIDAAKYYQKALLCNYYGDVLERPFFFGVNQDGLNLLCSKIEDARKEIQAERIFIGIESTAHYYEDIVYELGRRGYGVTIINPATTYEERASALNWSKTDDLDLYAIAHALIQNKGMENKLPEGAYRKLMKLTRARRSEVQKRALVRIQIRTLMDHIWRDYQGFVEIENNKPKRRLIFSDFWGKSSLFFMEHFPHPSKLLEFGEERVWEIAKENKLRIKETHIQTLLYVAEKSINKAMEDVSAELLLLRLAIQDLRRLDENVAILEKEIEKVLLHTDGRLLLTVPGIGVVTAAEFYSELGDISQYDNAGQLIKKAGTNPIIIQSGGTQGFYGRISKQGNKHLRFMVYTVGKSLAQHNKDLRPYYEKLKARGKHARKAFIALGNKFIKIAFSMLKHKKPYESKQLDYRIYNEVKKKLLYTKMNTYLNIAFAA

SEQ ID NO: 446931 - protein, 272 aa, unidentified
MATSSETYVGIDVAKDRLDIAVLGEKQTWQVENTCKGIDELVQQMTELQPELMVVEATGGYQRAIVDALFHAGLAVAVVNPVRVRQFARASGLLAKTDKLDAQVLAEFGRKMQPKRYEGKSEAEKQLSALLVRRKQLEEMLKAEQNRLRTISPSLRGSVERIIALLKEEKKRLEEQIQEFLKEQKAWQEQAQILSSAPGVGMVTTATLLADLPELGKMDRKKIAALVGVAPMNYDSGRKRGYRKTKGGRRDVRSILYMSTLVATRYNPVIQA

SEQ ID NO: 446932 - protein, 397 aa, unidentified
MYIVGIDIAKRKHEAAVIDGEGTVIIKPFSFTNNCSGYNRLLAMLTKAKLPLDEVSFAMEATGHYWLALFTRLQKEGFRVQVINPVQTNSIRSFYIRQVKTDPRDALLIAEVIRFGHFSESTLHPENIYELRELCRGRHAIVSMQADVKRKVVALLDQVFPEYETAFTNLFGDTSMAILQTCPTPKELSETPLEELCHLIEVSSHKRFRMAKAQELQALARNSFGFAMAGDVFSTMIRLYAKHLDFLKQQVREMDRKIAEIMETLDTPITTITGIGPTLGAYILSEIGDISRFSSAAKLAAYAGIDPTMRQSGEYNGVRNRMSKRGSPYLRHAIWLAASSAVLHDPALKLYFQKKRDEGKPYMASVGHACRKMVSIIYAVMRDNKAYTPCIPNEISA

SEQ ID NO: 446933 - protein, 355 aa, unidentified
MHYAGIDYHKRYSVVHVLDESGETVGKGRINHDRPANFRDFFDSIGGSFSVVFEASMNWHWLHDILEEIDSIESIVMAHPYKTRIIAEAQVKSDKIDARLLAQLLRGDLICKAYACGREARHRKELVRQRAFWVRIRTSLRNRVHRLLGGEHDLQLPEVSDLFGRKGIGVSNKLELHEPARMQLKQNLRMLSELNQHIKTVEKSLDDEIGSDENVIRLKSIPGIGPIIAAVIVSEIDHIERFNSSNKFCSYAGLIPSSSSSGGKTHNGKLVARCNRWLRWAFVEAAWVAVGCDGYLGSLYRQHKARGKKPNTAIMIVARRMCQITYRLLTEKREYSAAPLNDKTFPGGSEVRMAV

SEQ ID NO: 446934 - protein, 345 aa, unidentified
MEPMYYIGLDVHKRKISYCVKDSGGKIYAEGSLPATRMDLDHWMKTLPHPWSGAMEATMFTGWIYDHLKPHAAALKVAHPLMLRAIAAAKKKNDRIDANKICDCLRCDFLPECYMAPTAIRERRRTLRYRNLLVRQMVQMKIKISALLMEAGVSYNKQRLHKAGYFRELLASNPDIDEGLRALLRLCRETVVRLQKTESAMVRSLERDSLLIDRVERLMTIPAVGPITALTWALEVGDVQRFSSIKKAISYCGLCGAEKSSGNTVQRTPLSKQRNKHLQTTLIEAAKMAPRNSADLAMLYDKEKQKGNANRATLAVARKLVAYLVAVDRRQKEFLTVERENRTAA

SEQ ID NO: 446935 - protein, 342 aa, unidentified
MKIHTIGIDLGKTKFHIVGLNERGEVVVRKQFSRAQLLRFTANRKVHLIGMEACGGSHFLGRALQGQGHEVRLIPAQYVKPYVKTNKSDYIDAEAIAEAVGRPTMRFVPIKSDDQLDLQSLHRVRERWVTRRTAVINQIRGLLLERGITLRKGRRYVDAALPVILENADAKLSAALRLLLVQLKLELDHLALRIEEADAVIQKTACENEACQRLVKIPGIGPVTATAIIAAIGNGAAFRKGREFAAWMGIVPREYSTGGKQKLLGISKRGNRYLRRLFVQGARAVLQQKTKQAPGLKAWLEKLTSRVHHNVAGVALANKLARMAWAVLATGEAYRTPLPAAA

SEQ ID NO: 446936 - protein, 402 aa, unidentified
MEVLYQSCAGIDVHQANIVVCILHGPLTSTRPKREMATFDTTTKGLRACHDFLSQFHVEAVGMESTGVYWRPVWHALCDDFELILAQPAHMKAIPGQKTDKKDAHWIAKLTRIGLLPRSFVPDETIQELRELTRQRKHYVESRNRETNRIHKILQSGGIKLTTYIEDIMGLSDRNLLQLLVDGTPITPRIVHQSVYTSLKKKVPQLLEALDDYFSDHHRFMLKQSLEIYDFYQKQIELLEERMNVYLSQYEKHVEILDSIPGIDVITASVIISEVGVDMSQFPTFGHLASWAGLCPGNNESAGKKRSTKIRHGNSYLKKCLCQAAFAVKRQKGSPLAERYYQIQSRRGSQKATIALAHQLLKIAYILLKEQMTYPEFLAQIMTTRQTGGLNKGYKPTSPASA

SEQ ID NO: 446937 - protein, 346 aa, unidentified
MNHIAIDLSLSKSQICVRAADGTIVDERAWPTRNLPLYLAKCAASRVIVESSCEAFAVADIAKRHGHEPVVIPSLLVRSLGVGSRGVKNDRKDAQAISSASCQIQKLPSIHIPSAAARSIKALCTSREATVATRTKLVNTVRSWLRTQLISLAKGAPETFPKRVRELLLKRRDGMPEHIERLLVIIEATNEQVKAADKELEQIANGHATIKQLMTMPGVGPVTAARFYAAVDHVQRFHHAHELESYFGLTPGENVTGFKGHRTGLTKAGQVKVRWTLVQAAWAAMRTRPNDPMIIWANQVAARRRRHIAAVALARKMAGILYAMWRDGKPYNPQRGAAVQAPTETP

SEQ ID NO: 446938 - protein, 402 aa, unidentified
MQVDDIDVFIGIDVGKSEHWATALTTAGECLHDRPLPNDEARLREVYEHLGEHGRLLVVVDQPATIGALAVAVAQDMGITVGYLPGLSMRRIADLSPGSAKTDQRDAAVIASAARTMPHTLRSITSSDEDAAALSMLTGFDLDLARQVNQVSNRIRGLYTQIHPALEGVLGPWLEHDSVLEVIATWPTPAALRKAGRARIDAKLKANGCRRHAAWAQAIVEALSKQTVTVAGTDAAGVVLPHLARQLIALHTQRADIAAQVEALVEAHPLYPVLTSIPGIGVRTAAVFLAGTLGKTFTTGAHLASYAGLAPVTRRSGSSIHGEHVSHGGNKRLKQAMFLSAFASLRTDPVSRTYYERKRAQGKRHNQAILALAHRRILTLHAMIRNGTLYNPQPAQPLTTTA

SEQ ID NO: 446939 - protein, 404 aa, unidentified
MNAIGIDVSKGKSTVAVLRPYGEVVVSLFDVAHTGSDLRALADLIKKLPGETKVVMEATGNYFESIARYLHEQNIFVSVVNPVLISDFGGNTLRKPKTDKKDSVKIASYALTYWLDLKEYTPQEDLRKSLKLLNRQYQQSIKLKTMMNNNLISLLDLTFPGINKLFTSPSRESDGHEKWVDFVLEFSHCDMISKLTIKAFAKKYKKWSDKNSYHFTESSCEKIYAFAKDCVSSVSSDKAIVFSVVQAAKMLISATENCHAIQSEMNRVASKLPEYDTVMNMYGVGKAVGPQLMAEIGDPRRFHSRKAITAYFGYDSENNDSGQKTTRSNPMTKKGSGALRRTLFIIMQVLLQTKPQDNPVYDFLIKKKSEGKHYYSYINAAANKFLRIYYARVKEVLNVSEQMT

SEQ ID NO: 446940 - protein, 392 aa, unidentified
MVVSVGIDVSKDKHDCFIVSSEDEVLADVFTIPNNMDGFRFLLQRIQDYTHAQDKIKVGLEATGHYSYNLLGFLLDNGLTTYVLNPLRTNLYRKSLSLRKTKTDRVDARTIASMLLSDVGLKPYTDTAYHNEELKSLTRYRFDKVKERAKLKSSIARLVCILFPELEKLVPTLHMVSVYALLEEFPGAKQIAAAHLTRLKALLETTSKGRYKRDMALEIRGAARNSIGFPMPAKSLELQHTIRHIRELDNEIAEIEEQIQAIMDELNSPITTIPGLGFRMAAMILAEVGDFTRFDSPDKLLAYAGMSPSTYQSGQLKNCYPHMEKRGSRYLRYAIYNATKYVCHWEPTFAAYLAKKRAEGKHYNVALSHAAKKLVRLIFAMEKSRQPYCLAA

SEQ ID NO: 446941 - protein, 354 aa, unidentified
MNEITTVGVDLAKEHIVACAADASGRPVYFKQFSFSGFAEWAANLPPCLIGLEACSSAHHWARFLSAHGHTARLIAAELVEPFRFSRAAKNDRNDAEAILRAVLQPHMRFVSVKSAAQQAMLAWHRTRSGYLEERKGLISRTRGLLAEFGVWLPRSPGKLTRALPDLSLDERLPALFRPILAHTLEHLRQIDQRVEECDRIIHVHAKEHPEARRVQAILGIGAITSSALIATISNPRDFRNGRQLSAWNGLVPSQHSTGGKSRLGTITKRGDTYLRGLLTQGARSTLQVALKREPLRRSRLEQWIVALHGRAGYHKTLVAIANKHMRIIWAILAHGEDYDPNAWRRHPRAALSA

SEQ ID NO: 446942 - protein, 340 aa, unidentified
MGEITTIGLDLAKQVFQVHGIDADGTTVLRKQLRRSQLLSFFSRLAPCLVGMEACATAHYWARELAALGHEVRLMPAQYVKAYIKRNKNDAADAEAICEAVVRPTMRFVPAKTAEQQAALLLHRGRERLVRQRTGLVNALRGHLAEFGVIAPQGLRNVGKLIAVVRDPSDARLPDLARQVLEVLAAQIEQLEGAVAAVEKQLMAWHKSNPVSQRLATIPGIGPIIASAIAASVAEPGGFRSSREFAAWLGLVPRQNSTGGKHRLGGISKRGNQYLRRLLINGASANLLRSKATKADPWVIGLRRRRPSLVVAVALANKTARIAWAVMQRNENYQRMAAAA

SEQ ID NO: 446943 - protein, 351 aa, unidentified
MSSVKYPKLLQDIQDKYSSYDYYIALDWSTTVVSIAHMRSSGRTPKVTTMPSDIPQLVKHLKSLRGRKILTFEETTGSQLLYVELRDFVDRIVICDPYRNSLLSDGPKTDEIDAQKLCLLLRAGLLHEVYHTSEEDYWMRKLVRSYLGMVKAGVRTLNQKSALYRALGMQYKKEPFTTDNPMLQFIADHLDQSIEQYRYQKAEYEKKFRQITRKNKVITELSRISGIGAITAVIVYALVLDARRFKKKYHFWGYCGLVSHEKVSGGRSYGKRRGRYVSTLKYVFRSATIAALRGNNDIKNYYDHLLSLGYSTQKAQHAVSRYIATSCYAVMKHKVPYQPYQWRKAMNKAAA

SEQ ID NO: 446944 - protein, 402 aa, unidentified
MRYIGMDVHRSFAQIAVVEDGLVRDEGKIGVKPEDLREWAETFLEPDDEIALEATTNSDAIATMLRDEVAKVVVSNPRKTRAIAEAKVKTDKVDARILAQLLAADFLPATWVADDQTRRRRRLVTRRMHLVKQRTRLQNQIHAILSRNLVPTCPHSKLFSGVGRRWLARQVVPADEQRSIDALIRQLDFHGDELAEVERDIAVDAVDDPVIARLMTVPGINVTVAMSIVAAVGDFSRFESPDRLVSYLGLNPKVNQSGNRAAKHGRITKAGRAQARGMMVEAAFSACRSPGPLRAFYRRIKDRRGFQIAVVATARKMTVLCWHLVTKEQDYAFARPSLVAHKRRSLELAAGAKSRRGPVAGPSHDYFIKELRDAEKALIEQEEKAYEVLVAHWQPQKPSVTG

SEQ ID NO: 446945 - protein, 427 aa, unidentified
MQYAPTPSASSSLPTSSLPTVPPGGVTAGIDWASTDHVACVVDDRGQVTARFTIAHTTAGLTDLVRRLRRAGAGEVAIERSDGPLVEALLAAGLTVVVISPNQLKNLRGRYGSAGNKDDRFDAYVLADTLRTDRARLRPLIPDSPATATLRATVRARRDLVTHRVALANQLRAHLQRVFPGAVGLFAALDSPISLAFLHRFDCQDRADWLSARRLAAWLTSVGYSGRTDPAVLLERLRTAPRGATGEHGAAAAHTTRALLAVLSSLVAQIQALSEQIAEQLALHADAQIFTSLPRSGTVRAARLLAEIGDCRARFPDPEALICLAGVAPSTRQSGKHEVVTFRWAVNRELRDAVCDFAADSRKSNPWAAHLYDQAIARGKDHPHAVRILARAWLYVIWHCWQDHTAYDPARHGALQRLLNQDQPAAA

SEQ ID NO: 446946 - protein, 394 aa, unidentified
MFYLGIDIGKRTHVASVMNDEGKVLLKGFSFVNSLDGTHALLERLTSFSDSTEDFLVGMEATGHYWLALFSFLDEQQFLVHVINPIQTDGWRKGTEIRKRKNDSIDSLLIADLIRYGSFNETALADETMFSLRQLTRYRSYLVGTAGDFKRKVIAILDQIFPEYEKVFSKVGIFGKASKAVLSEFSSPDEFNQVSAETLAETLRVASRSRVGQSKAEALKTAAAHSFGIRFAQDAFVFQLRSMIDQLSFLEEQIKRTEEEIAQLMASLHSVIETVPGIGTVLGATILGEIGDIQKFSTPKKLVAYAGIDASVSKSGEYEATHNVMSKRGSPYLRKALFQAALIASRCDPVFKAFYDKKRAEGKHHLTAIGAVSRKLCSIIHAILTKNEPYEIRQ

SEQ ID NO: 446947 - protein, 378 aa, unidentified
MNRIIKIGMDVHTSNYTLCIFEPSFEHDGTVHCITQVKPEIKKIIHVIETFKKKHENEELNIVCGYEAGCLGYSLYHELKEKGIECVILAPTTMKTEKGGRKLKNDYRDAKMIAECLAYGGYSAVHVPTELDNSVKEFIRMRDDIKENLKSIKQQIIAFLTRNGKQFEGKSFWTRKHIDWINTVSFSEPLLQDTLKEYMIEYNHLCNRIETLDRQIEEISLKEEYVEKVQQLQCLIGIKTHTALSLIVETSDFNRFKKGNMYSAYLGLIPGDDSSGGHENKLGITKAGNSHLRRLLVEAAQGYTRGRVGFKSKDLKSRQEKCSSEVVAYADRANERLRRKYYRMTLRGKKFNVAKTAIARELACFVWGIMTDHIDLCN

SEQ ID NO: 446948 - protein, 390 aa, unidentified
MDVLYQSCAGIDVHQATVVVCILHGPLTSTRPKREMAQFDTTTKGLKACHDFLSQFHVEAVGMESTGVYWRPVWHELCDDFELILAQPAHMKAIPGQKTDKKDAHWIAQLTRIGLLPRSFVPDETIQELRELTRQRKHYVESRNRETNRIHKILQSGGIMLTTYIEDIMGASGRNLLQLLIDETPLTPRMIHQSVYTSLKRKVPQLLEALDGYFSAHHRFMLDQSLEMYDFYQKQIDCLEERINGYLNLYERPVEILDSIPGIDLITASVIIAEIGVDMSQFPTAGHLASWAGLCPGNNESAGKKRSTKIRHGNSYLKRCLCQAVFAAKRQKGSPLAERYYQIQSRRGPQKATIALAHQLLKIVYILLKENLTYQEFVLQKKATRDEPVA

SEQ ID NO: 446949 - protein, 269 aa, unidentified
MGPILGIDIAKVTFHAALLLEDEKTLSKSFPNTIKGFARLDAWLQGRKITAARACMEATNAYWEALAHHLHERGHRVAVVNPSRPKAYGQSEMLRTKNDAVDAALIARFCRAQKPELWTPPAPEERELQGLVRRYASVVDMRQQERNRAHVPGLPKAVKSGISAHLKYLERQAKELERMIRDLFKQHADFGRKRDLLTSIPGIGEITAARLLAEIPNMLDFKSAKEIAAFAGLSPQHFLSGTSDHGLGRHDGESDPEAPKFSAHPVDTG

SEQ ID NO: 446950 - protein, 344 aa, unidentified
MYEVFIGVDSHRSTLAAAAIDPMGRVLATVEVENDPQGHRHLIDWRRQLTGSVRIGIESSGNYGNCLARTLIASGEDVYEVPPNLSHREARRRGLGKSDAMDAVAIARVLAREETLPRPRAGQVHEDLKLLVDHFDQLKRQRNQLVNRIHKALVISHPGYEKQIGELKAERHKKAVMNLVRRDRSVRADLVRRNVRELRRLEDEVKTLRLQMKDLIEDTASSLTEIAGIGTLTAARLLGEVGDVTNFRSKAAFASLTGTAPLPASSGMTVRHRLNRHGNRKLNFTLHYIALTRCRVDPATKEFMTKKMAEGKSWKEALRALKRHLSNLIYRTMIADERMLETAA

SEQ ID NO: 446951 - protein, 344 aa, unidentified
MRIVGVTGGVDTHADNHVAAAVDGNGGLLGIESFPADQVGYEGLLGWLVGFGDVEQIGVEGTGSWGVGLSRFLTDHDVTVVEVDRPNRQKRRKHGKSDPTDAVAAARAALSGEATVIPKSRNGPVEQIRVLMVARRSARQQRIQSLNQLRHLVFTAPEEIRVRFKDRPKRGLVSEAANMRPRKGSDPITYRTNLVIRNLARRIKALNTEMAEIDRMLTGLIEDTAPELFDLYGVGVDTAASLLVTAGDNPDRLSSEGSWAHLCGTTPLPASSGKVTTRYRLNRGGDRQANAALYRIVLTRMSSHEETRRYVARRRDKGLNTAEIMRCLKRYVARQTYKHLPQTT

SEQ ID NO: 446952 - protein, 385 aa, unidentified
MKGKTFKPTDYEVFGGLDVDKRSISVTFTNHQGFIRSLRMPYSVEHLVNHVRKHFGDQKVAFAYEAGPTGYGLYDGLVAKAYPCLIASPSMIPKAPGQRVKTNRLDSRGLSENLRGGQLRSIHVPSALYRELRHLTQLRDTFVSEMVGMKQRIKSLLLFEGIEFPPAPAGRQWSFMVKDKLRNLECSKTVRFKLDQLLDSLEFSEKQVLKATREIRRFCRNDAELSQCIEYLMTIPGIGWIVASQLVARIGDWRELKNIRQLGGFLGLVPTENSTGERTDRGSITHTGDGRLRSKLIQASWSAIRQDGELREFFRSVCRTHARHLASRVAIVAVARKLSVRISVVLMKQRPYEVRQKVRSTPLTQGETSPQGTTRRQAEPGEKNS

SEQ ID NO: 446953 - protein, 410 aa, unidentified
METVVERPAALDVHKERVTACVRVPGDGRSREQHVAEFQTTVAGLLTLRDWLAAFGVQQVTMEATGVFWKPVWAVLEDEFECVLVNARHVKQVPGRKTDVTDSEWICQLAEAGLLRASFVPPKPIRALRNLTRYRKTQIQERAREANRLHKALEDTGIKLDCVATDILGKSGRDMLDALVSGTTDPEILAELARGKLRKKIPALKQALQGRFDHMHAVWIGAILAHIDFLDEQIANLTEAIGEQIAPFEQAVELLCTIPGVQRRNAECIIGEIGIDMAVFPSAKHLASWGGQCPGNDQSAGKRRSGRTRKGSKWLDWALEESAMVAARSNDIYLAAQYARLRPRRGHKKALGAVKHSILIACWHMLSTGELYNDLGGDYYRKRDPERITKRLIAQLEALGHHVTLEAAAA

SEQ ID NO: 446954 - protein, 337 aa, unidentified
MNKSGQAFFPCGVEVSAQTLVVDLEGQGQREFPNLPTGHGDLVRWLRSVRGEVRVCLEATGLYGLDVALALDDAGISVMVANPRAVRHFAQASMQRSKTDQRDAVVLREFARRMEFEPWRRLSTSALHLLAVARRFRAVVEMQTAEKNRLHAAGVSRALPAMLRREVERSIARLQRDRERLLRMAGELVRQDPELARRHALLLSTCGIAETSALPLLAELHHFGPDATARQWVAYAGLDPREHTSGSSVAQKPRISRKGNSNLRRALYMPAVVASQREPHLKAFYERLLARGKTKRQAQVAVMRKLLHGIFGMFKHNRPFDGSKLFSVHHEREVVCA

SEQ ID NO: 446955 - protein, 348 aa, unidentified
MRVYNQAHRFYCGVDLHARSLYTHVLDAAGQTVLDRNLAASPATFLDAVAPFRDGLVVGAECMFAWYWLADLCESERIPFVLGHALSMKMIHGGKAKNDRIDAAKLAGMLRGGLFPMAYVYPKAKRQTRDLLRRRSFFVRQRAQLIAHIVNTNSQFNLPPLSKKLTYAANRSDGIAERFEHPSTKLAISADLALIDGYDEQIAELERHLIKNAKVDDPVTFGLLRSVPGIGPILGLVLLYEIDTITRFPEVGNFLSYARLVRCSHESAGKVKGSGGKKIGNAHLKWAFSEAACLMLRSSPKAKAWMQRQEKKRGKRKALAVLEAKLGRAVYHLWKKQVPFDAKRFLTS

SEQ ID NO: 446956 - protein, 348 aa, unidentified
MKYIGLDCHKQYDHATMIDTETGEIKAKRLPHIKEEFKEFIGDRAGTRMVIESCRDWSKTYELSEDLVEEVILAHPLKVKAIASAKIKTDAIDSRTLAQLLMADLIPQAHLRKGDNRVKQRVIRHRAFMVVMRTRVKSRIHVLVDSQLLPPDKLQTKPKNLFSKKGMEWLSSLEWAKAEDKKLVESHLRIMEAINQEISLTNDMVKEIYEKDRDAQLLATIPGIGVTLAMLISTEIDGIERFRSPSKLCSYAGLVPSTHSSGGKTYHGKITSEGNRWIRWALVEAVVPASYADDEIRERLNTLRKKKGNNVAKTAIARWLLKVVYHVLKERRPYITAYNNMAKAGAAF

SEQ ID NO: 446957 - protein, 350 aa, unidentified
MPVKGLRQQQLLLKQKKECMQSKEFFIGIDVSKLTLDVSVSGTKNHLRIQNSSEGFKQLQSWLKSVNIAVSDCWFVFEYTGGYEYRLVQFLQSKGILFTRVPGLEIKKSMGMQRGKNDKIDSKRIAEYGYEKRDKLKEHKACSTAITRLKLLLTQRSGFVDDKKAHEHRMKELEAMMDLKAGDPILKHYKQAVDFAVKMIAKTENEIMKIFSKNEAMNKNFTLITSIPGIGKVNGWMTIAYTENFERFPHGRAYGAYIGVVPYEHSSGSSIKGKSRVSHMANKTLKADLSMAAKASVKHDPEMKTYYERRTALGKRHMGIMNEVKFKLVLRMFAVVNKGEVYVKNLKSAA

SEQ ID NO: 446958 - protein, 343 aa, unidentified
MQTITTIGLDIAKSVFQVHGTDATGQVVIRRQLKRRFVLSFFEKLPPCLVGIEACASSHYWSRELQALGHTVRLMPPAYVKPYVKRQKNDTTDAEAICEAVTRPNMRFVPTKTIEQQSCLMLHRARHLFIRQQTAVINSIRAYLAEFGIVAPVGRRGVEQLLEVVADTADRRLPEVARMCLAALGSQLRALKAQILAFDRRIIAWHRSNATSKRLDAIPGVGPALATALVASIADPKAFRSGRDFSAWVGLVPKQNSSGGKDKLGSISKQGDRYLRSLFTAGALAVIRYAKIHGTQHRPWLTALLARRPTKVAAIALANKLARMAWAMMARNEGYHEPIALAA

SEQ ID NO: 446959 - protein, 404 aa, unidentified
MTAADAASTAGQGVFGGVDSHADTIHTAVVTDNGGHLTDAEFPTTAAGHAAAIAFLAAHGTVMAIGVEGTASYGTGFTRAARAAGLTVVEVNRPDRAERRRSGKSDPIDAYAAARAALSGRASSAPKDDSVTGIRALHNAARSTVKARTAAMNQIGHILISAPDAVRARYRALHGKALIDALAHLRPTGDTVHTAVLTALKSLARRVKSLAAEHDELTAVLDETVAEHNPGLRAAYGVGPDTAAQLLITAGGNRDRLRTEASFAALCGVAPVPASSGKTNRHRLSRGGDRAANAALYRIALVRMSSDRRTRDYVTRQTAAGRTKKEIIRLLKRAIAREVFRCLTTTVTVPDIADLRPARQAKNITLTAAAHHFGVWPAVISCIERGARRDDDLANAYRNWLTAA

SEQ ID NO: 446960 - protein, 345 aa, unidentified
MKIVGCDLHTRYQQIAMLDKETGELVERRLEHESGEARAFYAGLASPVRVGIEATGHTRWFERMLAELGHELWIGDAAQIRASVVRKQKTDARDAAHLLELLLRDRFPRIWRPTLAERDLRQLVWHRQKLVWMRNAVGNQLHALAMGEGVCRKKKLFTQKGRAELAGLALGPWASYRRQELLTMLDRLDASMKELDQAVAQQAGQNQAAMLLMTHPGVGPVTSLAFVLTLGPVERFARSKQVVSYLGLNPREHSSGGRQRLGAISKQGNPMMRSLLVEAGHTAARLDVELRQDYQRLKLRRGSGVAKVAMARKLAVRMYWMLRSPASYAQLVRMQGSPWGTLVGQ

SEQ ID NO: 446961 - protein, 416 aa, unidentified
MNAVRIDVSSRKSTVAVLRPLGEVVCLPFDVTHDIVGLASLAEKLKTIDGETRVVMEHTGRYYEAVAKALHEAGFFVCAVNPLLIKEYGANSLRRVKTDKADAIKIARYALDNWADLRDFTPMDAIRYDLKTLNRQFQLASKQRTASANNLIALLEQSFPGIRKCFDSPVRSDGTQKWVDFAHSFWHVDCVRKQPFAAFCERYRKWCKRHAYLFKLSNAEEVYALAKRAVVLTPKSKVVKVLVQEAANQLISISRSVEVYRAEMDRLAAMLPEYPVVMAMYGVGKSYGPQLMAEIGDVRRFERKQALVAFAGIDPMPNQSGDKNVRSNKSSKRGSPYLRKTLFNVIRTYLQCAPQDEPVFQFLNRKRAEGKPFYVYMLAAANKFLRRYYAKLRDYFASLDTLQSVDPIPATLKASL

SEQ ID NO: 446962 - protein, 410 aa, unidentified
MDCRTNQRLARKLPTLGRALRPLAHHLRRILSYRLLHDRLTEGCAIASSTIRVNGNMIFKGHKLTIGLDLGDRWSFYCVMDEAGQIILEQKLPTTPEAMKQTFGKIPRSLIALETGTHSPWISRLLSELGQEVIVAHAQKVQWITKSSRKDDRHDARTLARLARVDPELLGPVRHRSAQAQLHLTVIRARAELVGARTALVNATRGLVKSSGQRLPKCGTYQVSEKLAEALSAELREVLVPLFKEIESLNGHIKEYDERMEKIAKEVYPEVSLLKQVKGVGTQIALTYVLTIEDPYRFAKSRQVGCFLGLRPGRRNSGQSEPQKGISKEGDRYLRTMLVQGAHYILGPFGEDSDLRRWGLKLAERGGKNAKKRAVVAVARKLAVLLHRLWIGGEVYEPLRNSQKAMREVA

SEQ ID NO: 446963 - protein, 345 aa, unidentified
MEITTVGLDIAKRVFQLHGVDAAGKVVLRRKLQRSEVLAFFKALPPCLVGIEACGTGHHWAREIRELGHEVRLMPPSYVAPYVKRGKTDAADAAAICEAVTRPTMRFVPIKTAEQQAVLMLHRTRDLLVRQRTMLVNALRGHMAELGIIAPQGIARVADLMAVLLGEGTTNVPALAREALRGLAAELEALDRRVKEIEVAIVRWHKDNQASRRLATIPGVGPITASAIVATITDPFQFHSARHLAAWIGLVPRQHSSGGKQRQSGISKQGDRYLRRLLVLGATAVIRHSRSKSTAEAGWLKSLLDRRPARLVSVAQANKTARIVWALLVRGGAYRMPAALPSGVA

SEQ ID NO: 446964 - protein, 347 aa, unidentified
MRVYIGVDFHARKQTVSYLTTEDGEMRRLELDHEKDDIRAFYVQFRGQEVVVGFESSGYAAWFEELLEELGHETWIGHAGAIRQYARRRQKNDRRDADLILELMVAGDFPRLHRYSRASREVLQQLRYRQRLVKMRTMVINSLRFMVTSRGISLRSTLQSQRGQARLLRLIMPEPLAQQRDELCRLMMELQQKIVTVEEWLQQKAEADPQVQRLRSHPGIGLLTGLCLVATLESIERFANPRKVTAYVGFDPVEDSSGERKRMGSISKQGSRLLRLLLVEAGQVAARRDQELGQVYRRVTLRRGHATAKVAVGRRLLVRAFIMLRDEIDYAEFGRRGVAARSSRGSA

SEQ ID NO: 446965 - protein, 355 aa, unidentified
MDSKKYIGMDVHQATISVAVRDAAGKLVMESILETKANTILEFIRGLGGSLWVTFEEGTSAAWLYDLLKPHVAHVVVCDPRKNALLKAGNKNDRVDPRKLTDLLRAGLLSPVYHGECGVRTLQELARSYLTVTKDLTRVMNRLKALYRSWAIACAGEKVYAPRHRSAWLEKLLQAGVRRRAEQLYQQLDNLVQIRREARQELLRESRKHPASQFLSQIPRLGPVRVALLIALLQTPHRFRTKRQLWAYCGLALQTRSSGEYRFTGGQLQRSKRLPAIRGLNVNHNHDLKNLFKSAATQASGSSDPWADFYQNLLTRGMKPAMARLTLARKMAAIVLRIWKKGERFDPEPWKRKSA

SEQ ID NO: 446966 - protein, 393 aa, unidentified
MVDPMLGMSVALQLKASMKNPKADTTDIPNNEIKLFLAIELGKKQWKLCFSEGDKIRHRNVKGGDAKAVIDEIELCKNKFGMPPDTPVLSCYEAGRDGFWLHHYLEQNNVINKVFDSSSIEVNRRAKRMKTDRVDAQKLVRLLMRMMLWGESKVCAVVQVPSEEQEAQMRTGRERERLVKERTGHVVRIRSLLKLKGIEVGGLKMIDFRKLRDPMNKSLPEEMIIEMERERDRMQLVEEQIKKVEATQKQSICDDKELSDTKVKVVKLMTLRGIGTQTAWLLAHEFFWRKFKNRKEVGACAGLTGCPYDSGETRQEQGISKAGSRRVRAGCVEMAWNWVRYQPESKLTQWFKQRCGAKPTSRTKRISIVALARKLLIALWKHIELDQLPEGAI

SEQ ID NO: 446967 - protein, 372 aa, unidentified
MKTITNTTTAATASLILAIDLGKYKSVACWYEPATAEVRFTKFDTSREELVRILAQQRPTVVVIEACALSGWVYDLCGELGLACKVANTASEAWKFKHAKRKTDRDDALRLAQLEALGQLPTVTVPPKATREWRALISGRQALVCRRVAVQNRIRGILLGQGLPAPRGQRAWTKTGLEGIGQLGRPLAECGAEELWRGLLASAVTEYRQIVELIDVTEAKLDEMGQADERVQTLVSIPGVGPRTAETVAAYLHDAKRFKTGKEVSAYGGLVPRQYQSGETDRRGRITRRGPAILRKLLVECSWCLLRYNRWAQVVWLRLTKGGTTKKKQAIVALARKLLVRCWAMLRDGTKWRHEPESEAPPASAAGAAAPA

SEQ ID NO: 446968 - protein, 342 aa, unidentified
MEHIAIDLGGRESQICVMSAEGEVLLEERRPTRGLGAFLAKRAAGRVVLETCAEAFGVADAAQKAGHEVAVVPATLVRSLGVGMRGIKTDIRDARNLAEASCRMKRLPSVHVPTANSRERKTACGLREVLVGTRTKLINSVRGWCRTTGLGPLVRSTPEVFPARLRKHVAARGGVIPAAVERVLVMVEAVNVQITSADEELESMAQQDPVCVRLMTVPGVGPVTAVRYAAALDDASRFDNAHAVQSYLGLVPGENSSSDRRRITSITKAGAPRVRWTLVQAAWSARRWRKTDPMVRWALAVEERRGRHVAIVALARKMAGIMFAIWRDGSVYDAQRGATIPS

SEQ ID NO: 446969 - protein, 387 aa, unidentified
MPQPNDLSRSLAALEQDSTLVAVIEISQSSWLVAGIVPGVNRQPLKKLAADEAALLQLLHRWREEASKAGRTIDRIAVAYEAGRDGFWLARWLRGRGIEAHVIHPTSVAVSREHRRAKTDRLDTELLKRAFLGWLRGEPRHCSMAMIPTLEEEDAKRPNRERENLVSQRTRIVNRMKSTLARLGIRGFKPTLRKAPERLDRLRTAEGVALPPNTLAELRRDMARLRFVIDQIREIEAARLIRLEQNPQERNHAMVRLLARVIGVGIETADMLVHEILSRHLRDRKAVARYAGLTGSPDESGARRREKGLSRAGNARVRRGMIQLAWRFLMFQKESALAQWYRRQTADGRGTTRKTMIVALARKLLVALWQLVTTGEVPEGVVLRQAA

SEQ ID NO: 446970 - protein, 315 aa, unidentified
MEKEEPVSIGIDVSKDSLDMAAYPSQQIWKYSNNKHGIAKIVSKLNILHPKLIVMEATGGLESPLREALGKAELAVAVINPRRIRDFGRAMGLLAKTDKLDAKVMAYFASTIAPPPRPIQDTASQKLENMLVRRDQLVEMLTAEKNRMKQNQDKVIQIQLQEHIEWLEKEIDELNKKLKESIQDNPELMKKVELYKSMKGVGDILSFNLVAMLPELGALNQREIAALVGLAPMNRDSGRLRGKRTIWGGRAMVRKAFYMPVLIAIRFNSVIRELYLRLIARGKLKKVAIVACMHKMLTILNSMAKNNTPFHGMAN

SEQ ID NO: 446971 - protein, 392 aa, unidentified
MRISVGIDIAKEIHWVCAIDADGAIRIDRRLENSPAAIAALVDDLHALQGEVLIGLDVIGGIAGLAAAMLADARFALVHVPGLAVNRARQGTAGGEQKSDPRDARIIAEQVRMRPELRPIVPADEIDVDIRLLVGRRRDLVAAQTQRLNRLRDLLVGIFPGLERSFDFVTKGPLHLLTKFVTPAELRDAGRRRLLRHMQGAKGVPNVEAVVDKALAAAAEQGISIPGERMTARLVRELAAEALAARTKLAELDRELEETLARHPDAALVRSLPGMGVVLTAEFIAEAGTLSRFRSADALAAAAGVAPVLRQSGRVRFLRRPNGGNRGLKRVFYQSAFCSLAHPDSKAFYERKRREGKHHHQAVIALARRRINVLWAVLQTRQPFQTGFKTAA

SEQ ID NO: 446972 - protein, 351 aa, unidentified
MPRTSTVHAVTAIGMDMGKNTLHMVGLDSRGAIVLREKVSRGRITSRLANVPSCLIGIEAGLATHYVARELAALGHDVKQVPPTYAKPFRQGHKNDFRDAQAVAEAVQRPTTRFVPAKTDEQLDLQALHRVRSRLVSERTAVINQIRGFLLERGIIVRQGLRFLRQALPDILAKRTDVLSPRMVRIVADLASDWRQFDERIEAVTDEIETLAKSDDSCRRVMTVPGIGPIISSAMVAAIGSGAAFARGRDFSAWIGLVPKQMSTGDRTILGRITKRGNGYLRTLFMQAARVILLRPASWPKHGFGVWLARATQRLHPNVLAAALANKLARIAWTVLAQERSYEARVTTAAA

SEQ ID NO: 446973 - protein, 343 aa, unidentified
MDHFAGLDVSVKETSLCIVDDAGRIVGEVRVASEPEALLGVLRNPAWHFKRIGLEAGPLSQWLFNALAEAGLPVICVETRHMRAVLKAQINKTDRSDARGIAQMMRAGLYRPVHVKTLGSQKLRMLLTHRKLLQSKAIAIENDLRATLRNFGLKVGVVGAAKFEARIKELVENLPDLALLVEPLLVVRRVLRDQIGILHRRLLAIVRDDDVCRRLMTVPGVGPVVALTYCATVDVPSRFRNAKAVGAAFGLTPSQHQSGESNRTGGISRCGDEMIRTMLYEAAQILLMRSTKWSWLKAWAMQIARRRGMKKAIVALARRLAVIMHRIWIDGTEFRWTREAVAA

SEQ ID NO: 446974 - protein, 401 aa, unidentified
MGSLWAGVDVGKTHHHVYVIDDDGTVVMSEKIPNDQHAISGIVGRLGKRRKPIRWAVDLRGGPASLLLAVLFDRGADVRYVSGTVTSRMAEAFHGERKTDAHDAYVIAQTLRMRADLPTLTLADGVQQQLKLLVSRRLDLVADRVRLTARIQDLLTMISPALEKTLNLRNKGALRLLAQWQTPAGLRCAGEARTLAYLRQHGVRAAKALTTKVLAAARTQTVAVAGEATAAVIVAQMATDLEAVNDRITAIEETIAAVVAEHELGEIVTSLPGIGTTLAAEFLAHAGTLTTYPSAAALAAHAGLAPISRDSGRRQGHQIRPHRYHRGLRRVFSMSSFTALTHCPRSRAYYDKKRAEGKTHRQATAALSRQRLNVLWACIRDKTPYQPKQPRSAAVALCEPA

SEQ ID NO: 446975 - protein, 482 aa, unidentified
MTKRRMSTFERLNSGQMNRTQRRKLGRKVAAGDPGLTIVNPNAGGIDVGNESHFVAVPADRDENPVREFGCWTAALKDMAEWLKSCRINTVAIQATGVYWIPMYDILEQHGIRVVLVNARHTKNVPGRKTDVQECQWLMKLHTYGLMRDSFRLRQDMEYVRTIWRVRDRHVKEAAEAIQHMQKALTKMNIQLANAISDISGVSGQAIIAAILQGERDAYKLAELADYRIKASREEVARSLEGNWRPDVLFELHQAVDGHTFAHLQMQECDQKLTPYLASLPTRMLDIPDQPKGAPESAAQKRKKAKKPQGNEPRMDMKEELKRICGVDLTSIDGINVMTAFTVISEVGVDMSGFTDEDHFTSWMGLAPSRDVSGGQIVGRGKKKVKNRVAVVLRMAATSLLNSDTWLGARYRHLRRRLPTFKAAIKAMARHLAVLIYRLLTHGEAWVDRGAAQFERKRTERELASLHSRASAHGFNLVPIQV

SEQ ID NO: 446976 - protein, 393 aa, unidentified
MIFVGIDVAKDKHDCFILNSEGTVLADVFTIANNRIGFETLLSRIQSCSQGESKIKVGLEATGHYSYNILGFLINQGLPTYVINPLHTNLYRKSMSLRKTKTDRVDAKTIATMLMSNVDLKSYTDTAYHNEELKSLTRYRFDKVRERAQLKQSVSRLVTILFPELEKLVPTLHMSSIYALLIEFPGAKQITEAHLTHLKSLLKDASKGRYGRDMATEIRDAAKHSIGSVMPAKSLELRHTIRLIRELDSEIEDIEAAIEAIMEELQSPITTIPGMGFRMGAMILAEIGDFARFDSPDKILAYAGMSPSTYQSGQLSLAGTYSHMEKRGSRYLRYALYNATKYVCHWDPGFAAYLAKKRAEGKHYNVALSHAAKKLVRLIYAMEKSRQPYKRAA

SEQ ID NO: 446977 - protein, 357 aa, unidentified
MQTIACLVEEVLLGVDTHLDSHTAVVIDLLGRELETGTFPTTRRGIEALIKWARLRGTVRRAGVEGTGSYGAGLAQRLVLEGIEVFEVTRPSRRGQRHRGKTDDRDALAAARVVLSGEARAIPKTRDGIVESIRVLRNTRASAVKARTQTGQQLRGLVLTAPTELREVLRDLSTTKTVARCARWHRVDPTDAARATRLAMRVLARRHEALDNEIAELNTHIKALTKTAAPRLLAERGVGPETAARLLIVAGDNPGRLRSDSALAALCGASPVEASSGKTTRHRLNRGGDRQGNNALWTIANNRMIHDPETRAYVARRAKSGKSNKEIRRCLMRHVARGLYPLLIADLRDAHTHPHLT

SEQ ID NO: 446978 - protein, 406 aa, unidentified
MTGKAKLMARVFIGVDPHKLSATIEVVDDKETVLATGRFSTDKAGYTAMRKHVAGFTERTWAVEGSNGAGRPLAQRLLADGELVVDVPAKLSARARALDTGHNRKTDPHDAHAVAVVAVRTPALRVLAYDVQLEALRMLVDRRAELSQARIQTVNRVHRLLSELVPGQSKRDMTTGQAKKILATVRPRDVAGKTRRRLAAEQIAELVTIEKKIKALTKELKQMVLATGSTLMELPGVGPVVAARTLADTGDVARFADRNRYASWTGTAPIEASSGEVVRHRLSRAGNRRMNHMIHIAAATQIRLDTPGRAYYLRKIAAGKSRREAMRCLKRRISDAMYRRLRDDSATGVDAGPGGHSGATLQSSAAGLHPHTGTSDQPLPGPAPTTLPAPTTTRKTTVQKALQPAP

SEQ ID NO: 446979 - protein, 341 aa, unidentified
MAVIIGIDPHKLSHAACAIDNNEHELAQLHVRAGQRQLELLLGWAQPFSERRWAIESAAGLGYLLAQQLVGAGECVMDVPATLSSRVRLLGTGRSNKNDPNDARAVAIAAWRAPSLAVVRREDHLTVLRLLAKAHLDAGRARNRACCRLHALARELVAGGIRKEVVVSQAESLLAGVEPVGVAQRQRLELAHELVDEIRALDAKLRRSKARITTAVVASATTVTDLYGVGPIVAATVIGYSGDVRRFPTAGHYAAYNGTAPIELSSAGRTVHRLSRRGNRVLNHAIHMAAVTQIRNLPSEGRAYYDTKVAAGKTKREAMRALKRRLSDRVYRQLLADTRPR

SEQ ID NO: 446980 - protein, 345 aa, unidentified
MTVLNIKKNNHEAKLSLQAGIDVGSEELILVIRKNSKPFNPQKFSNTPADRARLVKKLVKLPGIIVCLEATGIYHFDLSIALHDAGVSLMVVNPKASHNFAKVLMRNSKTDTVDANTLAEYAERMDFVAWTRPSDEKIALRCFSRRINALTHQKAAAKNHLHALTATQATPKAVLRDAKLAITHLQKRIDRLKTEALVLIGKHSELERVLELLTGINGIAETSAIALMGELLLLPPDLSHREWVKFAGLDPRAFDSGKSVHKKTRIAKAGNRYIRAALYMPALSAHQHDPHVGAYFQHLVVDNGKEKMQALCAVMRKLLHAIHGMLKHDKPFDNTRFYAIPAAVG

SEQ ID NO: 446981 - protein, 315 aa, unidentified
MATSSGNYVGIDVSKDRLDVAVLGGNQEKQVDNTLQGIHELVKWMVELDPELIVVEATGGYQRSVVEALFQAGWAVAVVNPARVRQFARACGLLAKTDKLDAQVLAVFGQRVQPRRYEGKSEAGCQLSAVLVRRRQLDEMLKAEQNRLRTISPSLKSSVERIIACLKEEKKTLDIQIRDFLAEQATWQEQTEILNSAPGVGMVTTATLLAELPELGKLDRKKIAALVGVAPMNFDSGKKRGYRKTKGGRADVRSVLYMSTLVATRYNPLIQTHYQQLLKRGKLKKVALIACMRKFLTILNAMLRDRQPFRCASMA

SEQ ID NO: 446982 - protein, 482 aa, unidentified
MAQRKRSTFARLQQGQLNRAQRRELGRRLEAPEPGLAVVHPDAAGIDVGNASHFVALPPDRDPVPIREFGAWTAALQEMARWLTAHGIRTVALQSTGVYWIALQDVLEQAGLEVYLVNARGTKTLPGRKSDVQECEWLRKLHTYGLLRNSFHPPEAIRAVRTLWRQRDRWVQEAARAIQHMQKALTTMNVQLANAISDLSGVSGQAILRAIVAGTRDPAALATLRDPRLAASEAELAASLQGTWREDVLFTLRQALEAYDCSQGQLAACDQELAKAMVAVPSRALPPPPALPPGAAPLPAGQSAHRAKRRSKNQPAFDLAAELHRTLGVDLTQIDGIDVLTTQVVFSEIGPDFSAFPDENHFASWLTLAPKHDISGGKVIRHIPAAGRHRVANALRMAAQSLSRSNSYLGARYRRLRARLDGPVAIKAMARYLACLIYRLVTKGQAYVDRGAAHYEQKRQERERRALERRASTLGLKLVPAA

SEQ ID NO: 446983 - protein, 345 aa, unidentified
MPIVGGLDIHRKQLTFDYLDTVTGEVKRGQIAPADREHLRAWLARFAGRGDVAFAMEGCTGWRYLAEELAAAGIAAHLAEPADTAAARGRKRHAKTDKTDSRHLRTLLAEGRLPECWIPPAHILEYRALLELYHDLRTEHTAWVQRVHAVFFHQGAPRLGEGALRTGQGLAALRAAAAAHLSPAGQLQVATALDILAALEARMDILRKQLRAAARQLTGAKVLAARLYGAGPVTALALTCWLGGAGRFSSSRKAVRFTGLDITVWSSDRKGPPGRLSRQGPPVLRWAVYEAGKTHARASAPDHGYYAAVKDRKNSKRAALSEARKIVRQACHILTELGDDALTAA

SEQ ID NO: 446984 - protein, 346 aa, unidentified
MTVYIGVDFHPHQQTVCYCDTTNGIIQWKTMQHDKRAELREFYRQFGGEVIIGLDAGGPSQWFEELIEELSYKLLYGDSSEIRRRARSRHKNDKRDAELLLDLLVRQEFPSLWRRSAENEQVLCQIRFRDRLVRQRTRVCNQLQALGHRAGLPRQRMQTSIARKRLCEVEMYEPQSIQRKNWFEILDDLTGRIAEVERWLSRKVVECPQARLLITQPGVGVLTALSIAHTLGDVSRFSGSRKVVAYVGLDPLEDSSGDRKRFGRISKAGSRMLRFLLGQAGQASLKRDSEMKEFYQQLSQRRGKSSAKVAVARKVLVRSFIMMRDRIDYQEFLRRRRRSQFVRGAQ

SEQ ID NO: 446985 - protein, 347 aa, unidentified
MNYNQPHKFYCGVDLHARTMFTHVLDHKGKTVFEKDLPADPDEFLYAIKPYRKNIVVGCECMFAWYWLGDLCEDEKIPFALGHALAMKHIHGGKAKNDRIDAGKLAAMLRGGLFPLAYAYPRAKRQTRDLLRRRSYFVRQRASLIAHIVNTNSQFNLPVLPKKLRYAKNRSDAIAERFADPSTRLMIASDLAMIDHYDEQIRAMESYLIKSAKVDDAVTFGLLRTIPGIGPILGLILLYEIDQIGRFPEAGNFLSYSRLVRCEHSSAGKVKGSGGKKIGNAHLKWAFSEAACLMIRAVPAVKSWMQRQEKKRGKRKALSVLEAKIGRAVYHLWRKAVPFDLKRFLKG

SEQ ID NO: 446986 - protein, 344 aa, unidentified
MNAVGIDVSKGKSMVAIMRPFGEIVSTPFEIKHTSSDINSLVKLIKSIEGESRIVMEHTGRYYEVLAHQLSEANLFVSAINPKLIKDFDNDSLRKVKTDKADSVKIARYALDKWQNLKQYSVMDELRNQLKTMNRQFGFYMKHKTAMKNNLIGILDQTYPGVNTYFDSPARSDGSQKWVDFASTYWHVDCVRKMSLNAFIDHYQNWCKRKKYNFSQSKAEEIYGKAKELVPVLPKDAITKLIIKQAVDQLNSASTTVESLRTLMNETASKLPEYPVVMAMKGVGTSLGPQLMAEIGNVSRFTHKSAITAFAGVDPGVNESGTYEQKSVPTSKRGSADLRKTLFR

SEQ ID NO: 446987 - protein, 427 aa, unidentified
MSITQNSKIRRITDSTLVVGADIAKKVHVARASDARGVELGKPLSFDNSRRGLEKLLTWIRTLMADHGCDNVVFGVEPTGHYWMNLAQFLRQHGIGVVLVNPLHVKRTKELDDNNPTKNDRKDARVISQLVKDGRYSVPNIPKDVYAELRVGMSQRERLVEDLKRVQGRIHNWLDRFFPEFTEVFRDWEGKAALVCLRKCPCPQDVQAKTADEIVRMWRESGIPRGVGKKRAAALVDVASDSIGLTEGLQMARQELNILLSQYDLLQEHLGALMEQIEGLLNGVPGVSQMLSVPGVGVVTVAGFLAEVGDLSSYDHWRQIQKLAGFNLKENSSGKHKGRTRITKRGRPRLRALLYRCVLALAAKNPQFRALHQYFTTRVDNPLRPMASLIALCCKLIRVLFTLGRRQVPYDPEKALGPIHSNLLLAA

SEQ ID NO: 446988 - protein, 409 aa, unidentified
MQIIHERCVGLDVHKKTVVACALTPENEREIRSFGTMTSDLLELVDWLQQRQIRQVAMESTGVYWKPIYNLLEGGFEVLLVNAKHIKFVPGRKTDVKDAQWIAELLQHGLLKASFIPPAPQRELRELVRYRSHLIQERSREVNRVHKVLEDANLKLSSVATDVLGVSGREMLSAIIAGKDDPAALAELAKGRLRQKISDLERALTGRVKDSHRLLLKLHLEHIDDLNAKLQMLEEEIAKLLTPFDHDDLLTRLQTIPGVGQKVAQVIVAEVGTDMSRFHSAGHLAAWAGLTPGKNESAGRNRSARTNKANRYLKTALVEAANSLSRSTDNFLASRFRRLKARRGQKRAAVALARSILEIAYYLMTRGGIYVDLGPTFHDQRQKANVQHHLVKRLEALGYSVTLAPTAAA

SEQ ID NO: 446989 - protein, 415 aa, unidentified
MPNIEIGVDFMVKENFIYVGIDLHKETHTAVMIDCYNQKLGEITFPNRPAAFPKLVTKVKKCNTDGKEVVYGLENAYGYGRALAVWLIDKGYLVKDVNTAISHRQAKHRGAMYRKSDSDDAEAIALATLNMLDKLPDACPNDAYWSLGQLVHRRDNIMKQRTRLVNQLHEQLCIAYPSYKQFFNDISRPTALYFWEHYPSRKYLKGKSVEDLRAELVPVSHNKCSTKTCEKILDAVASDKVKNNAYQDARDMVTLSIVSDLQHYDSQLAEVDKMLEQMYKMLGCTLTTIPGVNVITAVKILAEIGDIKRFSNANKLAQFAGIAPLHLSSSGKGKDVATKQGNRRLQATIYFLAIQMVQVSSKGTPRNSVVRAYYEKRKAEGKTSQQALICISRRLISIIYGMLKSGTESRMPSSA

SEQ ID NO: 446990 - protein, 355 aa, unidentified
MPILEGRVDAVIGVDTHRDTHAAALLDPNGGVRATLEVPSDRAGHARLLQLAAAQAPGRRVWALEGTGCYGAGLTGFLLDHGEWVVEIDRPKRSRGRNGAKSDALDAVRAGREALAREQLATPRQRGHREAIRVLHTTRTAIVDTGANARRQLKALIITAPEPLRDILRGRTWLQQARACAALVAVPSDPVEHRATVRALRMTAQRVLAARLEAKQLEAELRQLITVMAPVLLAQRGIGPISAAQVLISWSHPGRFRSEAAFAMLGGAAPVEASSGQVVRHRLNRGGDRQLNRALHTIVMIRQTHHGPTRAYTSRRIAEARANATSAAASSAPSPASSTDSWNAPLLTKPPLDDK

SEQ ID NO: 446991 - protein, 365 aa, unidentified
MGVPTMAQAKTFVALDVHVSGTVAAIIDGVSGELWRRRLSGGAAEVAEFVAGLPGPVRATYEAGPTGFALARRLDAAGVSCLVCAPGLIPRGSSDRVKTDRRDAERLARLLIAGELHAVTVPSIEAESLRDLVRAREDLRGDLMSARHRVSKLLLRHDVRFEGAERNWTGPHLRWLAAVRFDQPGTQAAFDDYRGAIEALIVRRTELERLIAEQLPASPWAQTARRLMCLRGIDTLTAAGLCAEIGDFGRFAHPEQLMSYLGVVPSEHSSGTRRRQGSITKSGSQHARRLLVEAAWHYRQPPRVSEPLRRRQAGADPIIVALSWKTQRRLHRVWSRMQQRGKRRTIIAVAAARELAGFCWAVATA

SEQ ID NO: 446992 - protein, 347 aa, unidentified
MNKVTVIGMDLGDKNHKAVSISAGGEVIDRSEVACTPEAVRTYLKRHPGALLAVETGTHCRWVSRLGQELGHEVLVGNARKLRMIWDSSRKNDWRDAEMLAKVARTDRSLLSPVRLRCDGDHELMRLVKSRDLLVKNRTGIVNQIRGFCKSEGVRQPKCSAASFKRLEHDMPANVQPVVKPLFAVLEELGKKIGLYDTMIVEAVQRLHGDDIALLEPIGGVGPVTAAAYLAAIGDVATFGSARDAGPYFGLTPGQDQSGDTDKQLKISKEGNEVVRRLLVTAANFIMGPFGKDCDLRRHGIKIAERGGKNAKKRAKVAVARKLAVLMLAILKTRSAYRPLADVEVVA

SEQ ID NO: 446993 - protein, 409 aa, unidentified
MQVLNPRCAALDLGKDVLVTALRLQEGTNVRRECRSFGMNASKLLELSSWLVSEGVTHVVMEATGSYWKSVWHVLEGQFELMLANPVQVRNLPGRKSDVNDATWMADLLAHGLIRGSFVPPAPIMALRELTRTRKQLGREVARHMQRIQRILDVAGLKITGPISDLLGTSGRAILKGLIAGESDPQKLADLAHPRMQAKRDVLVDALQGRLTPHQRGLLRIHLHLIETVEASIAELDFEIDKAVRPFRQLVARLKQVPGLGEVNTPALLGEIGVDMTPFKTHRHLISWTRLSPRLDQSAGQTHSTRTLKGAEWVKPLLIGAAWAAVKVKDSYFKAQFLRLRARRGAKKAIVAVAASLLTTVYHMIREGTSYKDLGANHFDRHDHARAVRRLVARLEQLGYHAQITQHAA

SEQ ID NO: 446994 - protein, 288 aa, unidentified
MSRSVGRAIGLDVHRDFCEVAICEEGVVRSAGRIETSPEVLELFARSLGRGDRVALEVTGGAWEIARICEPHVRRVIVVSPDDTGIRQARAKTDRLDARTLAKLLAAGELDAVWVPDERCRVMRRRLARREQLVRSRSRSKNEIHAVLMRRLKGRPPVSDLFGVKGRKWLSELELPVEEAETIASAMRHIEFLGTEIGEVERLIARATLRSVDARRLMTVPGVNVICAASFLAAIGDVRRFRSSRQLVAYLGLDPRVRQSGSEPARGGRISKRGSASARWALVAARVL

SEQ ID NO: 446995 - protein, 323 aa, unidentified
MAKRITICAGIDTGKHRLDVALDGSSERLQVENTAEDHQALVEWLRSHKVKRVGIEASGGYEQAVVAELRRKRFVVVLFQPKQVRAYGTFHQLLAKNDKIDAKLIAMCTAAVRTIHSAPDPRLQPLAEHLTMIDQITEDIARLKNRLESCRDKRIQGIWKAQIALLAKSKRAEIKALLAAIRKHPDLAARLDLINSVAGCGLPTAVAVLIRMPEIGNITREQAAALSGLAPYDDDSGNRVGDRHIEGGRQRLRRALYTAALPASFRWNPQLMALYGRLIAAGKCHKSALIACARKLLVIINAVVARGTPWVAEVPQLAKLPAL

SEQ ID NO: 446996 - protein, 309 aa, unidentified
MSEPLFVGIDVAKDSLAIASSPPGIRLTVPNTRQGRQDLVKALKPHPVQLVVLESTGGYEKPAAGDLAQAGFTTVVANPRQVRDFARGLGELAKTDPIDALVLARFAQVVQPKPRPSVSSQESELAELVTRRRQLTATLTQETNRLELACHTKVRRSIQRHVQMLEGYISQLDEAIAALIQADDTLRHKDSILRSTPGVGPNTSAMLLSHLPELGNLNRQQVAALAGVAPWDVSSGRWKGQSSIWGGRAEVRSLLYMAALTAMRCNPAIRAFAQRLEAQGKAFKVVITACMRKLLVILNSMIRSNTKWR

SEQ ID NO: 446997 - protein, 316 aa, unidentified
MESKASYVGIDVSKAHLDVAVIPLGEVWRATNDEGGIIELTERLVVHTPALVVLEATGGYELPLAAALGAAGLPVAVVNPRQVRDFAKATGKLAKTDVLDAQLLAHFAQRVQPTPHPLPETQIQEMAALLARRRQVMEMLVAEKQRLGMAMSRVRPSLKGHIAWLEHTLEELDGELGQMVQGSPLWRAQEDLLRGVPGVGPVLSFTILAELPELGTLDRRQVAALVGVAPLNRDSGTLRGKRTVWGGRATVRATLYMATLVATRFNPIIKTFYQRLLAVGKPKKVALTACMRKLLTILNAMLKHGTPWQANHALTS

SEQ ID NO: 446998 - protein, 333 aa, unidentified
MSKTDPAGIEISAKELVVGVKRQGTLCRLRTFPNNSTGHRTIVRWLSRRGVTTRVCMESTGLYGLDLALALDQAAGLELMVANPRAVRRFAEACLQRSKNDRIDTAVLVEFAARMKFQSWQRPAPESLQLRALTRRIQASVESATAQKNQLHAAGLSRVTPKIVAREIKRLIAQIERSIERLEAAALALIRAQPALDRDFALLVSAKGIGKRSALLILAELCCMPRDLDKRQCVAHAGLDPRHVQSGSSIHYQTGISRQGNKYLRRALFMPALSAIRTEPHFRAFYDTLVDKGKAKRQAQVAVMRKILVVLWTMLQNNQPFDPDKLAQHPQTA

SEQ ID NO: 446999 - protein, 423 aa, unidentified
MYNQIKNKRSVKINEGVIGVDIGKYHHVAVGQSWDGQRMKPLVFSNTRSGFNRLRYYQETAKRYLSVDRIQMAFEPTGHYWEPLAQWLEQAGIDLEMVQSSHTHKAKELEDNSPGKTDGKDAGVIADLALQGKSRRLLAHRAEFAELRYLTHFRHELIIDKNREVNRLHRLMDLIFPELLGIFKKYLGKGLMALINKAVQPEQILSLGTEKVGQLLSQHSQGKLGLKRALLVTEAAKNSVGMKSGLFSLEMELKQVLKRFGLIKEQCQEIEKAMKQVLKEVSYSKILLSIPGMGEITSATFLGEVGDLKGYHSAQEVIKLAGLNLYEISSGEYHGQKRITKRGRPLLRLILYMASLRMIKRKGEFNKFYKRLTEHGKAKTKAIIAVMCKLIRVIFALVRDGQIFEKRQYIKESQKEGVLIGIN

SEQ ID NO: 447000 - protein, 355 aa, unidentified
MTSVKYIGLDVHKESISICVRNSVGKVVMESVIETKASTILQFIDGLRGDLRVTFEEGTWAAWLYDLLKPRVSGVEVCNPRKNALLKDGSKSDRIDANKLSEQLYMNNIKSVYHGEHGLRTLKELARSYLTISKDLTRVMNRVKAVYRSWAIPCAGKEVYAPRYRAEWLGKISESGVRRRAEFYYQQLDVLRLLRQEVRRDLLLEVKKHKAWKLLRQIPGIGPIRAAVLMAVMQTPHRFHTKRQLWNYCGLGLETHDSGEYRAVKGQLQRAKKQATVRGLNEDHNHDLKDIFKGAAMRASTAAGPLHDFYENLLAKGRKPTMARLTLARKIAAITLIVWKKEVRFDANYLKPQAA

SEQ ID NO: 447001 - protein, 417 aa, unidentified
MTVTSLIQRRSTIKSDTLVVGVDVAKFNHVARAILPGGSISQPFGFPNSREGFQSLSDVIKTWKPTPTSAVVVGVESTGVYWINLARWLTDQGYRVVQVSGLYVHRAKELTDNSRGTNDGKDAFLIADLVAQGKYLGFVQPAGVLADLRQLVGLRQRLVQERAARYNLLHQSVDLLFPEFATVFRGVTGFSARKVLWRFPTPAAVLVNPPNEMRRLLAEDGRVRASVAKLARLQNAARQSIGTDEGAAGLEYALKDTLLELDSLDARVKQVEAEIDRLLAQADETPILTSLVGRMTAAVILSETGGVRQYRCAAALLKLAGLDLYQISSGQYRGDRHISQMGRPLLRQALYLAALQHTHPGMPLYPHYTELLRRGKPKPVALIAVCCRLVRLLYALVRDGRCYSAQPPEHRLQTQTA

SEQ ID NO: 447002 - protein, 329 aa, unidentified
MKNTYTQIYGIDVSKDHLDKCLLGGPEGKGYSQIPNSSHSILEWIGGLDKGCTLCVLEYTGSYSSRLLHLLKAHGIAVSMVNPHQSSHFMKALGIINKNDRNAAETLALMGRSLDLPLYEMESAQLQRRKQVLGSLRAMKKQRQMLLNQLHALSYQAVVQPAVKQAFEQTLETVNEQIGLLEGELEGLSDDEHERQMAKITSVVGIGPKTARALLCATGGLGAFAHDRQLAKFIGIVPSSHDSGSSVRYKGPITKKGNSELRACLYMAARSARRFNLACKELYERLRSKGKCHKQAMVAVMNKLVRQVYAVLKHNTVFDNHYYLKYKNQ

SEQ ID NO: 447003 - protein, 319 aa, unidentified
MIIIGLDPHPATNTAAALQAPTGRVLATSKFPNTEEGNEQLRRWALAFPERYWAVEGAGNPFVAALVAGLLADEERLTNVPPNLTSQYRKRRAYKKNDEVDAINTAKALLANLGELPAYAPHPDQRRLQALTRTRSRLAEELKANRMAQKDLPPEGSEEESLILAELVSCLAEQIKRLEGLLSKLLERIMPEILLVRGVGVVLGATIVAEVGGIERFEKESGFASYCGAAPVERSSGKSSGRVGVDPGGNRRMNRVLHMIAQVRLRIDGGRSKALVERKQRESKTKRAALRVLKTYIARELYRTLKEIEKSRELGPVAA

SEQ ID NO: 447004 - protein, 366 aa, unidentified
MKIIHWIGIDDHADKWTIAQFTGHEEKPANEFELVPNDAGYRKLIKFVKELGGEARIVYEAGPCGYELYRRLTKAGLQCQVAAPSLTPRKPGERVKTNRRDAVKLARYLRSNMLTLIVVPDAQRESLRDLIRARHAVQKDLVSIRHQITKLLLRYGHRYREGKTAWTERFWTWVGKIKLEGEHGQFVLDEMIRTHRQRLERRSRYDEAIEAAASKPEYARYVAALSVLRGIDRLSAMTILSELGDLRRFPIAPQVMGAVGLVPSEASTGDKSTRLSITKTGNAHVRHIVVEAAWQYQRRVTNGPVIRRRRKDQPQALVDIAEKCDLRLNRKFHRMTSRGKRSTVAAVAVGRELIGFIWAIGQIVHP

SEQ ID NO: 447005 - protein, 325 aa, unidentified
MQSSINYIGVDISKSFFDVAIKNGQTYAYYKFDNNPEGFEALLKVVPAEGVVVMEASGPYYLRLANYLTKQAIGVSVVNPLVIRRFCQMRLARVKTDKKDSMMIAEYGHIEKPALWQPPQEHVIALQQMETLLHNVRKEYTTVSNQLESFRSSGMLNQGLEQLITKELEHKQELIDKLTHQMEELAQKHYASMLADLESIPGLGRKTAIMLIVLSGGFSRFSNYRKLSSYIGLCPRIFESGTSLKGKARICKMGMSRIRAMLYLCSWSAKRYNKACHQLYGRLLAKGKGKKVALIAVANKLLKQAFAIATKQTMYNENYLIKSCF

SEQ ID NO: 447006 - protein, 335 aa, unidentified
MEFEFFIGIDVSKNELDFAVRQGRQLLFHRETSNDPEAIKAFIKELCTQPGFDLNKAIFCMEHTGIYTNHLLVCLHKKKANICLEAATHIKKSLGNIRGKNDKIDAIRIAEYAYTNREKLRLWAPKRDVVQQLAHFATTRSRLIKAQMMLKTPLNEYGDFVKKNVAKQNMDVCEKTLKAIESDLKKVEKEIAAIISADPELKCLFSLVTSVCGVGKVVATQMLVTTNEFKNITDPKQFSCFAGVAPFTDESDKHKGKGRVSHMANKKMKTLLHLAALVAIQHNPELKAYYERMVNQKKKNKMSVINAVRNKIVLRVFACVKQNRNFEKNYCKLVA

SEQ ID NO: 447007 - protein, 339 aa, unidentified
MLYVGLDIHSKNIFICILDDNGKIMQRITVRQVDQMLDVLKKLPDRFAVCYEASCGYGHYHDVLTPLATRVTVAHPGLLKLIYRSKKKNDRNDAKKLAQLLYIDQVPTVHVPSADVRVWRELIGFRQKLVHKRTRAKNGVRTLLRTVAIQAPRQPGLWTCAGIAWLKQLEFSQTLHALQRDLLVEEIETLSVQLHRVEKELNRIAKENVSVWQLQSIPGVGPRTAEAVVAFLDDPHRFSHSKRVGAYFGLVPSQDQSGDRNRMGHITREGPAVVRHFLAEATWQTIRRSPTVRAYFERIARGEKDRRKTAVVATAHYLVRVMWAMLKQGTLWKETVQAA

SEQ ID NO: 447008 - protein, 416 aa, unidentified
MWIDEGGALKLFVGDDWAEDHHDVELMDERGKRLAKARLPEGVAGIDKLHRLVGEQVGERAEAEVEVVVGIETDRGPWVGALLAAGYTVLAVNPLVAARYRERRAVSGAKSDAADAHMLADMVRTDSHQLRPVAGDSDLAEAIKVVSRAHKTLIWERTRHTQRLRHALRDYFPAALAAFEDLDAGDTLELLAKAPDPVSAARLSKTQISAALKRARRRDVEGRAARIQAALRAPQLGQPPAVTAAYAASVRALTAVLAVVTAQVAALQSEVEAHFGQHPAAKIMISQPGVGPIIGARVLAEFGDDPHRYADAKARRNYAGTSPVTRASGKKKVVAARWVHNDRLVDALMFQASKAIGVSPGARAYYDKQRERGVGYNAALRQVANRLVGIMHGCLKHGTLYDEATAWANQAEPAAA

SEQ ID NO: 447009 - protein, 335 aa, unidentified
MQRQYVGIDLHRRRSVIVRMNAEGEVLGNVQIDNDPVALAMALAEAGPDPEVAIEACYGWYWAVDLLQAEGANVHLVHPSGLHWAARRVKNDVKDATEIAQRLRRNDLPEAWIAPPKTRELRELVRYRAKLTALDTGAKAQVHAVLAKQGIIPAHDLFGPTGRAFLDELAPLDRAYLIRLESLRDVIELYDREIAMVKREIHSWLRDDAGYRAVQSIYGVGPTLAAIFVAEIGDISRFGSPQQLCSWAGLTPKHIESDTKVVRGRITRMGSTIVRWAAVEAVVRYHGGAPIRPAYQRIAERRGKKIARVAAGRKLLTLVYWGMRDGRIRCLERAG

SEQ ID NO: 447010 - protein, 347 aa, unidentified
MIILKQVAGIDVAQKELVVSLGRMDQELNLEIFDYKVFPNNQRGFKALTQWAQKLSKKDLKIRYVMEATGVYHQAFAYFLADNGSEVSIVLPNKISNFFRTLDVNTITDKTASQAIARFGLERKLEVWKKPKKIFSDLKQLTRERDQLMADRTVLKNQLHAEKSEAFPNESSIKRLYKRIKLIEKQELEIKVEIATVVKQDHELLEKIKLIKTIPGVGELTAVIVIAETNGFELIKNKKQLVSYSGLDVKLKDSGTSVKGTPKISKKGNRHLRKAMHMPALTAMKHNENHKATFVRLVSKHGIKMKAVVAVQRKILELIYVIFRSDKPFNKDHIQHTSQKELDLGNN

SEQ ID NO: 447011 - protein, 361 aa, unidentified
MKPNFEPGKWFMQCVGIDIAKSTFTACLCMYEFDQGCSTPPVVFSNNKTGFNQFVKWSRKEALKGYPIRYVMEPTGVYYEQLASHLNKLGLYVCVVLPNKAREFAKYEGILTKTDDMDAYTLGMLGCLDKRLKSWTPPSPIYRELRQMTRFVADINKVRTELQNHLEALAHSEITEKSIVKHYNKLIDEIDKQLASNQKAIREKIKQEPGLSERIEHISTIKGIGIMTIITVLAETNGFALITNRKQLTKYAGLDVPAHQSGPVDPKRHISKQGNVHIRTALYFPAIVSTKCNPQMKDFYGRLCARNTQSKMIGVTATMRKLLLLIYSLWKSGEEYDPERYWPVCSKKKKEAEPMKVSLTG

SEQ ID NO: 447012 - protein, 377 aa, unidentified
MDKSSRILYVGLDVHKESIAVAYAPDDRGAEVVSLGPIGTRQSDIDTLIRKLHSKGAATLVFVYEAGPCGYGLYRYLTRKGFACHVVAPSLIPRKAGDRVKTDRRDAMMLARLMRSGDLNSIYVPGVEDEALRDLSRGRNDAMQDLKRSKRRLKSFLLRQDIRYEGRATWNAAHLRWLASVVCATPPQQIVFQEYLRAVTEQQERRKRVERELHAAVKSWRLYPVVEAIQALRGVELTGAVILLTELGDLTRFDNPRQLMGYLGLIPSEYTSGDRRRQGGITKAGNSHARRALVEGAWAYRYPAKVSRHLQLRLEKLPAEIQTISWKAQVRLCKRYRQLTARGKHVNQVVVAIAREMAAFAWAIARLVPVAPPPVAP

SEQ ID NO: 447013 - protein, 344 aa, unidentified
MTTIDYIGFDLHKKTISFCAKAQDGRILDEGTIAAQRGDLKAWAKERPRPWVGAMEATLFTGWIYDYLRPLAQELKVAHPPMLKAIAASKKKNDQVDARKIADLLRCDLLPECYMAPSPVRAMRRVLRYRNLVVRQATRMKNRIAGLLMETGTPYNKQRLHGKAYFGELLGSLRQMPDAVVELLKLSRGQLELFESIQKRLLRELRERPELSQRVERLQSIPSVGEILALTWALEIGEVRRFSSIGEAHSYCGLTSAERNSAGVEQRGPISKQRNKHLQTILIEAAKLAPRFNPQLAVVHQRELQRGNRNRATLAVARKLVAYLMAVDKSGKPFQLRASDGGHV

SEQ ID NO: 447014 - protein, 371 aa, unidentified
MSDGSEFLYVGIDAHQETLSIAVLEEQGTGPEPVVQLPNRLPVIRRWFRKLLQRGSVVATYEAGCLGFVLQRVLDDLGVQCVVAAPSHLPRIPGDQRKTDRIDARRLASFLRAGQIVAVSPPSPELESLRGLTRYRQAMREDVVRMRHRIQKFLLLRGHVHRDGQNWSPSHMRWLRQLQVQIDDDRSTLDSMLDELEHRQTSLALLDQRIEMRGRQQDIEEAVRSLMAFRGVKSLTAVSVIAELGDPRRFRSAKQVSSYCGITPSEHSSGERIKRGPITRAGNARLRRLLVEAVQHYARPYPNNSAVIARRANAPTRVQAIATRAEQRLRRRYRALAVRKHTNVAKTAVARELIGFLWAALLPEKCSTEHP

SEQ ID NO: 447015 - protein, 335 aa, unidentified
MPDPIHPTPVCLGIDIAKDSFEACVLHPGGRKSTKAFANAGEGFEAFLAWCARNDALAARFGVEATGPYALELLYFLAQHAPQMHIALLNPRHVKDYGRSLGRRVKTDRVDAEIVARFIQAVPPRRWTPPPAQSSELQSLVRRRFQLVASRQAARNRLHSLGRKVPGEGEGAADSVRREIGFLGGELDLIEKAIDSLLRRSVTLGKAEALLRTIPGVGRVVALTILAEIPFISSFGRAREVAAFAGMTPGLQESGTSVRRRGRLTKEGSSALRAQLYMAAINVVKRDNPLRRGYTQLVERGKPKMVALGATMHRILRIAYGVLKHQTPFAETFAK

SEQ ID NO: 447016 - protein, 424 aa, unidentified
MQNTLARKLKQVPEGYLIVGVDPHKKKHAAVAITQDFATQAKFKFDNTREGLEAMLYRTKVEMVKSNCRGVMFAIETGGHYWRNVAYFLEEKGIPFRFINQYTLKRRREGKDLNRRKNDFRDAEVAAQLLCTGEFTESKLPQGVYAELRTAHNAYRRLVKEGTRITNLVKCLLDALFPEFTQIFKDPGGLTSLSVLSICPIPKVIAGMTEDEFEAKIEAQHKGRRLMRKKLRALHYLARTSIGIDAGACSLSSEIAFLVDKLGLIRRQIRIMEGALIKLVDETEEGKYLLSIRGLNYIAVAGLLAELGCFKAYRSARQMIKMAGTNPTESESAGKKKSRTPMSKQGRPVLRYCAWTSVIPMLRFNPDFRAWAKERRERPVHANPLGGREVVGAALNKLLRLAFALVKNQIYYQDVKPVLTPVAV

SEQ ID NO: 447017 - protein, 343 aa, unidentified
MDHFAGLDVSVKETSLCIVDDAGRIVREVRVVSEPEALLAVLTNPACHFKRIGLEAGPLSQWLFNALAEAGLPVICVETRHMRAALKAQINKTDRNDARGIAQMMRAGLYRPVHVKTLRSQKLRMLLTHRKLLQSKAIAIENDLRATLRNFGLKVGVVGTVKFEARIKELVESTPDLVVLVEPLLIVRRVLREQIGILHRRLLAIVRNDAVCRRLMTVPGVGPVVALTYRVTVDVPARFRNSKAVGAVFGLTPSKHQSGESDRTGGISRCGDEMMRMMLYEAAHIMLVRSAKWSWLKAWAMKIARRRGLKKAIVALARRLAVIMHRIWVDGTEFRWTREVAAA

SEQ ID NO: 447018 - protein, 358 aa, unidentified
MTKPKPITPVVGGVDTHKDLHVAAVVDGNDQVLGTQSFATTRQGYKLMLAWMRSFGDLKRIGVECTGSYGAGLLRYMQAAGVDVLEVTTPDKLDRKRRGKNDDFDAQSAAHAAFAERRTVTPRSRDGMVESLRVLKVCRKTSVQARRIALQIIQTTIVCAPDRLRDLLRNMTRMQLIRTLAAWRPDLTGYRNVEEAYRIAQKSLARRYLELHDEVADLDDMIEAIVKELAPELIERNSIGMNSAAQLLLTAGDNPERLRSEASFAALCGVSPVPASSGKTIRHRLNRGGDRAANSALHIIAIGRLRLDPKTKEYVARRVAQGHSKLEAIRCLKRYIAREVFNIIARRHKQINQSQIAA

SEQ ID NO: 447019 - protein, 350 aa, unidentified
MSIVILGVDLGKNSCSVVGVDAIGAVVVRRSMRRQTLIDYVSKLSACVVAMEACCGAHHLGRLFAAHGHEIRLMSPEYVRPYVKAQKNDDRDAEGIAEAASRPTMRFVELKSQEQLDIQTLHRVRSRLVAERTSLINQLRAILLERGVIFPVGRRKLELGVDGMLAGDDAPLSPRVRHLVGELRGEWKELDAKIEALNGEFVELARNDAAARRLTSIPGVGVLNATAVIAAVGDASSFAKARDLGSWLGLVPRQHTTGGKARLLSISKRGNTYLRTLLIHGARVALPSLSQSDTPLGRWLKAMMDRGVHRNAVVVALANKLARIAWATLRKETSVPIRLTHTPTRDRLCA

SEQ ID NO: 447020 - protein, 334 aa, unidentified
MSLELLAIDLGKRSFHLYGIDTDGVILSQKVSRAKLAEVVANLAPTVIAMEACASAHHWGRCWLAAGRKVRLINPRFVKPFVKGSKNDAVDAEAIFEAAMRPTMRFVPVKSTDQQDLQSLHRARDRLICQRTALINHTRGLLAEYGIVLRQGRWHFATQASAAIADADLSDLARVIFGELLDQLDDLDRRVKRLDATMVALCRTNAICRRLAKLPGVGPVVATAFVAAVNDGRQFRSGREMAAWIGLVPRQYTTGGKPRLGGIGRRANHYLRRQLIHGARAVVSRLPKHDDPRSTWLKALLARRGFNRTIVALANQTARIAWALLSRKEEYAIA

SEQ ID NO: 447021 - protein, 419 aa, unidentified
MSFKIFKFNCCGLDVHKTWIYACIGITDSNNRTEYKQARFSSFSKGLHQLCVWLAKYNCNDVCMESTGKYWIPVFNILEQHKIRVTLSHPKYTKPMKGNKTDRKDAKWICDLYMCGMVKLSFIPPADIRELRDLVRYRFKLTCMITGEKNRAQNCLTVSNLKLDDVFSDVFGKSSRSITEQILQHPGEKFDVSPFVDSRCKTPIEEIQAAVDGNISKEQAVKLRQCLDHIDELQKHISEVEQEILRLSDKYEAALTLIRTVPGFDKNPMTAIQVLSEIGGDMSVFPTAKHLVSCAGCCPRNDKSDRKIKSTRISCAGSYFKPVLVQIANALIKSKKHFEFTTRYKRIKTRRGHKKAIIARCRMILTAIWHILTDLKPYTSDGFLESRPVKKEKVLTTSQALNLLRQRGYLIKDEPSPVS

SEQ ID NO: 447022 - protein, 356 aa, unidentified
MQAVIGVDPHKHVLSAVALDGRGGRLGEWTGGTDGPGTRALQAWAAQLAPAAVWAIEGSNFLGRRLALALVDAGADVRDVCPTRTAERRRRRPSRGKSDAVDAEAIAREFLAHPDLPHAFKTSGPGRPAPAREALAVVVRTRHQVVDHHRRLLNEADVLLAELPSRLAERLPGGSKTEPRLQAAARLRMTGDRLTDLRLRLLRAQAQQARALARERDALEREITQLLKELGTSLPALFGLGPLGAAELLVEAGDPRRFRSADAFASYTGTAPIPASSAEVRGRPVHHRLSRYGNRRLNSVLHIMAVTRLRTHAETQAFIARTTARGKTSRDALRIVKRRLARLVWTTMIHDLAAAC

SEQ ID NO: 447023 - protein, 351 aa, unidentified
MNTQITATPKLFIGIDIHKRSWKVHCATDLSSGKTFSMPPDAELLYEYVAKHYTGYEVSTAYEAGCCGYRAHRCFVGYGWRSLVVNPADIFRRGKERHTKTDRIDAQLIARELKDGRLSGICVPDKCREQLRSLFRRRNDLVKDMRQIKSYIKMQLLYYGIRIPQEFDNDHWSHKFRDWLDELDFGYDTGNEALRSRMRSFRFIDREFREVSTLLRRYTKIHFKKDYMLLRSIPGIGPIVASGILSELGDLRRFGNIKHLAGYVGLAPGIYQSGDTIRHTGVSMRAHRLIRSYFIEASWQAIRTDPVMQGYYRKHHGKNVKSVIVKVARKLLSRTLAVIKTETPYEIGVLE

SEQ ID NO: 447024 - protein, 310 aa, unidentified
MFVGIDVSKDQLELAWRTPSGLKRERLAYQEAELQALVARLQAAQRIVVEATGGYERLLVATLAAAGLPVVVVNPRQVRDFARALGRLAKTDRIDAEVLALFGERIRPPLRRPLEAERAALAALVARRRQLLEMRQAERNRLQTAYEAAVRASIAVVLQALEQELARLEQELEAQLRACGVWQEQFRLLCSVPGVGPVTAQVLLAELPELGRIGRRQVVKLVGLAPLNRDSGRWRGRRRIWGGRGSVRAALYMAALVGVRYNRRLRAFYQRLLARGKAKKVALVACMRKLLLWLHAIVKTGRPWQEALAC

SEQ ID NO: 447025 - protein, 316 aa, unidentified
MAKREVWVGIDVSKRRLDVALGVHGELLQVDNDPGGFTVLLEKLGALGPELIVLEASGGYETALVGELVDAKLPVVVVNPRQVRDFARAIGQLAKTDALDARVLALFGERVRPPLRALPDEVGRELKAVTARRRQVVEMLVAEQNRLGQAPRMLHHQLRAHLDYLRKDLTRLNRDLDQTLRRSPLWRETEELLRSVPGVGPVLARTLLAELPELGRLSRREIGKLVGLAPLNRDSGMMRGRRTIWGGRASVRAALYMPTMVATHKNPVIAAFYNRLLAAGKPGKVARAAAMRKLLTILNAMLKHHTRWSPLCLTLA

SEQ ID NO: 447026 - protein, 320 aa, unidentified
MNKYSEIYGVDISKDVFDVFGSQEGHQQFSNDPKGFAAFLGVLDKKSLVVMEATGYYHYRLAQFLFKKGVIVSVVNPLSVKRFIQMKLAKVKTDKSDAKAICEYGQVNEVPLYNALTDVQSECLQLFRLLDSYLKKRTATKNKLHGEETLGIPSKFVYNSLKRDLKHLNKEVLALEARLLELVRQDQQHQLTLLKSIPGMGAKTALFLIVVTDGFKKFERASQLCSYVGITPTIRESGSSVRGRSKISKVGNKKLRNLLFLCAFSACKHNKACREVYERIVLKGKSKKLALIAVANKLLKQAFAIVKSELPYDEKFISKF

SEQ ID NO: 447027 - protein, 396 aa, unidentified
MLPAPQFHVAVDIGCRQHRVAIASSDGRLLKEFDITHDLPGFRTFFRHIARHERRFGTPVIAMEGFNGWARPLDSQIRARGYRLYNVNNLKLARFKEIFPAPAKTDGIDTRKMLELLTARHHLPLAKAVLQEVAPTPPENDKLKRLTRRRRQLVNEKVRIVNRLHADLQAVCSGLLAITKDVDNLWFLRFLTCRDALPKLARVRPQTLLKIPSLGQKYASVIQGWQPHAHFADDVAWVGEMIIDDGQRVLALLTSIKALDAKIAEIAQRSVLARRIDSLPGFGNTCSAELAGEIGTLERFATEASLALYLGMAPLDNSSGQYQGTKTPRHINTRAKAAMMTAVARHIACVAQSKAYYDKKRAQGKKHNQAIRATGRHLVRVMWAMIKQDRDYGLRN

SEQ ID NO: 447028 - protein, 489 aa, unidentified
MGARRKTKQKPAMVEPVEIPDAEHELVIERAAAIDVAKAAGKVCVRLPGKSGRRFSRVWDLPARSGAITELAEHLVELGIEKVTVESTSDYWRIWYYLLEDQGLDVQLVNARDVKNVPGRPKTDKLDAVWLAKLTEKGLLRPSFVPPAPIRVLRDYTRLSEDLIRERTRYWQRLEKLLEDAAIKVSAVASKLDTLSTRDMVEALIVGERDPHRLADLARGRMKAKRSELITALDGRFDDHHAELARLLLGQIDALSAQIGALSARIEQLIDAMDESDHHTGDRTASGSAGPQAAGAPHTGEQATAPTHATTASGGDSDTATVIEPTRLTTVERLDEITGVGQRAAQTIIAEIGLDMTRFPTPEHLVSWAKLCPRTIQSGPVIRGGKTGKGNPYLKGALGEAAAAAARTDTFLGERYRRLVKRRGKLKALVAVARSILVIVWQLLSDPTARFHDLGPDYHTSCVVTERKIRNYIAHLTAMGFHVTLQPAA

SEQ ID NO: 447029 - protein, 353 aa, unidentified
MKRDKYMGMDVHQATTVVAVIDAEGKIVLETIVATTAAPIRRLIESISGPVHITFEETTQAEWLYELLHGWVAEVVVCDPRRNRLITEGSKGDKADARKLAELLRTGMVRSVWHGRQTTRGLKEMVRSYETFAADTRRTMLRIKALYRSRGIATTGTGVYQVKQREHWLKQLTEVGMQQRAVWLYQQLDHVRELRRQAKAAVLAEGQRHRAVELLRTIPQVGPVRAAQIVATAGTPHRFRTKRQFWSYSGLAVVTHTSAEYELRAGRVVRRNKPVATRGLNPNCNRRLKSVFISAATAGGVSHPWQPYLDNLKRKGMRADMARLTLARKIAALALAIWKKGEAFDPKKLNWTT

SEQ ID NO: 447030 - protein, 326 aa, unidentified
MENELHFIGIDVAKAKLDVDILRPDGRHRCKKFDNTLSGHEALVRWLRGHDVNRAHVCMESTSTYMEDAAAHLSDAGYTVSIINPALSKAFAQSEGLRSKTDKVDARMLAHFCREKRPSAWEAPHPTERALKALVLRHQALTEMQTQEKNRRETAPEVQLASIDILLGCLSAELARIEKQIKDLTDNDPDMKRRRKLLNSIPGIGEKTAAVLLAYTGLRLKFGTARQFAAYAGLTPVQHESGSSVMRASRMSKAGPVQLRKALYMPALSALYHTAWGKAFRKRLEESGKRAKVIIGAMMRKLAQVAYGVLKSGKAFDASQHELLIA

SEQ ID NO: 447031 - protein, 441 aa, unidentified
MAVINPNACGIDVGSKMHYVATGQGSEEVKSFGVYTKDHQAMVAYLQNKRVTTIAMESTGNYWQTLFAALEKAGFEVFLVCGNQTKNVKGRKTDVQDCQWIQWLHSVGMLSNSFIPNEFVSHLRIYSRQRLKYIQVQSRLINQIQRDLRAMNLRLEVALNDITGKSGRAIIEAILSGERDPKSLAGLADYRVKKSKEEIALSLEGNWHEGYLFVLRQHYSEYVQNLVRIQACENEIEKILKESLECSEIDPQDAPNHKKALKKNKNKPVIDFQRYSFQYFGGVDLFAVEGINQNTVLSLMAEVGTDITKFHSAKAFSNWLHVCPNQKVTGGKVISNHTKGGSNPLSQAIKSAANTIGNLKTVTHLTQFFKKIAYKKGRKEAITATAHKLAVIIYNMLTKYEPYKPFVREVNEQAERIKKLKEVEKIVKSHNFKIEDINFSY

SEQ ID NO: 447032 - protein, 364 aa, unidentified
MNECTHIGLDVHKDTIAVAVLRPGITDCDERVIHNTPEAVRRLLSRYPDPSQLSTCYEEGPTGYDTHRLITSLGIACDVIAPSLIPKRSGVRVKTDRIDARNLARLHRAGELVSVRVPTPGEEAVRDLVRAREEIKNDRRIARQRIRSFLLRYGRSYQAPSSRWSTRFEVWMRALRFDEPMSQAAFEHLVGAYFMRDSQLAAIDRQIEQIASLEPLAADVACLRAFRGIDTLTAVTLVTETCDFRRFGSAGAYMAFTGLVPSEHSSGASRHQGSITKTGNQHIRRVLVEAAWAYRYAPAVRGKLKDRLEGQPPEVVAYSWAAQCRLHSTYRKLAAKKGANKAVVAVVRELSGFVWGAMTGNMGA

SEQ ID NO: 447033 - protein, 342 aa, unidentified
MEISTIGIDLSKTTFHLIGLSPRGEIVLRKKFSRKQLLTFTATRTPLLIGMEACAGAHYLARALRDQGHDARLMPAQYVKPYVKTNKNDYLDAEAIAEAVQRPTMRFVPIKNDEQLDLQALHRVRDRWVARRTAVMNQIRGFLLERGIAIRKGPSYLTSQLQIIFSDGDSTFSGRLLHLIRELKHEWDELERKIEEASAELARIAKRDDGCHRLMQVPGFGPIVSTALVAAIGNGISFRKGRDLAAWLGLVPRQHSTGGKTRLLGISKLGNEYLRRMMLHGARSVVMQMERNPSALGEWLTNLSARRHRNVTVVALANKMARIAWAILSKGTHYSAPAFVAA

SEQ ID NO: 447034 - protein, 320 aa, unidentified
MSGMLVVVGIDVAKAHVDVAVLGRVWPAQRFANDVDGHSALAAAMQPLAASLVVMEATGGYEAPVACALQATGLPVAVVNPKQARDFAKGIGRLAKTDRIDAEVLAELAAVLVRRDDLARFLRPLPDAQQQELAALVTRRRQLLTMLGSERLRLPLAVPKVRPSIEAMITAIRNQLDDVEGQMQTQVHEHYAELDALLRSTKGIGPIASATLIAALPELGRLNRREISALVGVAPMANDSGTVRGTRRIHGGRFDVRNVLYMATLSARTCNPAIRAHYERLRAAGKLPKVALVACMRKLLTILNAMVRTRTPWTNNLHSA

SEQ ID NO: 447035 - protein, 318 aa, unidentified
MKALRTHVAGVDVHKDMLAITIMIGAGDEDPRIEHLECRTMTDDLRACGIVLREKGVKDVAMESTGVYWKPVYNVWEPLGLNVIIGNATHMKNVPGRKTDMNDSHWIAQLHRFGLIRPSFVPDGAYQRLRLLSRHRTNLVDDLSRVKNRVEKVLQDGNIKWSSIVSDTFGVAGIGILDLIADGVTNARTLAASVRTRITKKEEAEKALTNCLTTEHIFVIRELMRQYYDIQARALEVENMMTERALPYAHLLQELDKIPGIDKTLAMGIIAEATTDMTAFADERKFAAWAGVASGNNESAGKKKDQNAGTATRTSENS

SEQ ID NO: 447036 - protein, 455 aa, unidentified
MAKKHKKDGKTKGSASLPVMRPDAAGIDIGATEIYVAVPTDRADEPVRAFPTFTQDLYALAEWLKQCRIQTVAMESTGVYWIPLFQILEERGFEVCLVNARHVKNVPGRRTDVSDCQWLQFLHSVGLLRASYRPEQEVCAVRSLLRHRESLVQMAATHVNRMQKALDQMNLQLHHVISDIVGQTGLAIVDGILAGQRDPQKLAKLRNQRIHASEEVIAKSLVGDYRPEHLFTLRQSLTAYRSYQKLLEECDREISLRLQNFNSPDAPVESSVEAPKTATKKRVSADGVLRTELKRVFGSDLTKIPGIRCGIAQTLFGEIGPDFTKFPSASDFASWMALCPDNDISGGKVLWVGTRKVKCRAATALRMAAQSLHHSNSALGDFYRRMRGKLGAPKAITAAAHKLARIIFHLVTTGQEFDDAKFAADQLRFQKRQESNLRAKAKSMGFQLVPVEQAG

SEQ ID NO: 447037 - protein, 347 aa, unidentified
MLHAGLDLSRKKLDVCLLSDDGEHLDQLAVPPDVDSLRTLARRIEAVHREPVCAVIESMTGARLVHDTLEQEGWSVEIADAQKVKGLAPLACKTDKIDSMVLAVLSHRDLVPAIWLPDPRVREERELARFRLHLVKHKSALKCRIHSTLINFGRPCPVTDLFGVEGRELLARLEVPEPWRGNVSAALSLIDDLERQIDEIDKRLRAAHADHPYIPLLLSVPGIGWVLAFTIAAEIGQIERFPSPAKLTGYTGLCPRVNQWGDADRRGPLTKHGPTYLRWALLEATMHALKHPAYAERYQRNKRRLGKQRGAKVAQIDIARRLAHAIWHMLTRNQEFAPRGAAFRLAA

SEQ ID NO: 447038 - protein, 355 aa, unidentified
MDSEKYIGLDVHQATIVVAVMDSTGKLVMESILKTEAATILQFLAGLRGTLSVTFEEGTWSAWLYDLLNPHVEKLVVCNPRKNALLKDGNKSDRIDARKLAELLRGNQLQPVYHGETGVRMLRELSRSYLTIVKDLTRVMNRLKAVYRSWAIPCAGRDVYYTRNREQGLAKIREAGVRRRAERLYEQLDMLQHLRQQARRELLAESRKHAITAKLRQIPYLGPIRSALAVALIQTPHRFRTKRQLWAYSGLALETRISAEYRLVEGQVRRSKKLLSIRGLNKDHNHDLKGLFKGAATMASVRPGPFQDFYQAALAKGIKPTMARLTLARKIAAITLTLWKKGENFDAEKLKSQAA

SEQ ID NO: 447039 - protein, 452 aa, unidentified
MDQQLGKSNGLSLERIEPNAAGIDVGATEIFVAVPPDRDRQPVRSFKTFTDDLRQMAAWLVQCGITTVAMESTGVYWIPPHEVLEEAGIRVCLVNSKHVKHVPGRKSDVSDCQWLQYLHSVGLLRASFRPESEIRAIRALSRHRSSLIEIASVHVQHMHMALTQMNLQIHHVLSDITGLSGMAIIEAIVAGERSPVRLAALCNQRVRSDQETVIKSLVGNYRSEHLFTLKQSLTAYKHYQELIADCDREIERLMRLLNGKIDPPPSSPATPPDPRFQKRSKNQFRFDMGSELNRVFGVDLTTIPGISGLTAHTLLAEIGPDLSRFANVAAFASWLALCPANKKSGGKVLSSRTRQTNSRASHALRIAAQTLARSKSHLGNFYRRMRARLGGPQAITATAHKLARIIYHLITTGQHYDETVFVREDQKQAQRQEKRLRKQAKSLGFQLVPIAA

SEQ ID NO: 447040 - protein, 392 aa, unidentified
MFIVGIDIGKRNHEATIIDQKGSIIGKSFRFANSITGFNRLMETVKRITGDYDVVFGMEATGHYWLALYTHLHKKGFAIHVINAIQSDALRAMYIRQQKNDSRDSFIIADVIRFGRFCETTVSPPDLYALRELCRHRFYTVDSVSDIKRKVIALLDQIFPEYENLFTDTFGKASLELLSEYTTPEEILNVDTDKLVEIINIASHGRLGLKKASEIQDAARNSFGILLATDTIALLIRQYIEQIRFVEKQIDVLDVEIARLFSTFETQLTTITGIGPTLAAVILSEIGDVKRFNSAAKLAAFAGVDPTMKQSGDFNGSRNRMSKRGSPYLRRALWLAATVASFKDPSISTFYQRKRAEGKSHMTTIGHVVRKMVNIIFAVLRDDSPYSPAITI

SEQ ID NO: 447041 - protein, 408 aa, unidentified
MNLFVGIDVSSEKLDVCFLDSEDNRLKEETLPNDINGAGLIKTTVLEYNQTYHYEKIVIGMESTSVYSFHPGMFLTEDKDLQQLNVEVTIQNPKAIHRFKGLFEEDKTDRIDAFRIADFLRFGRYNPSLIKEEKYLALQRLTRSRYQLIHQLTECKQHFLENLYYKCNTLTKEIQTSVFGSTMMDLLSDSLSLDEIAEMSLEGLANLLQEKGKGRFSEPEKLAKSIQKAVRDSYRLGKVMQDSVDITLASYANLIRVLKKQVKELEKGIEALFAIIPEAQCLKSIPGIGTVYAAGILAEIGQIERFETQVQLAKYAGLYWKRSQSGNFESERTPMVRTGNQYLRYYLVEAANSVQLREPVYRDFYLKKYKEVPKYQHKRALVMTARKLVRLVDVLLRNRQLYTPERSV

SEQ ID NO: 447042 - protein, 342 aa, unidentified
MTLYIGVDIHARQQTLSYLETADGTTGQVVLDHEVDDVAGFYRQFQGEVIIGIEACGYTNWFKELVERLGHKLLVGDAAEIRRLARRRQKNDRRDADLLLDLLVHDEFPALYRYCQESREVLRQLRYRHKLVKLRTMVANTLHALALNAGLSLRAKLLTKGGRQQLSALPLSAISQQQRNELLSLADELTRRIQLVEQWLAVQAAGDSRVQRLQTHPGVGLLTSLCVVHTLGEVQRFSSTRKVAAYVGFDPMEDSSAERKAYGGISKAGSRLLRYLLIEAGQTAAKDDEQLKQFYRRLLPRRGKARAKVAVGRKLLIRCFIMWRAEIDYAEFLRRGQKAETE

SEQ ID NO: 447043 - protein, 408 aa, unidentified
MDKVYPRCGGLDVHKDSVWTCARVNGQQFTEKFGTSSKELLRLGDWLVEKGVTIVAMESTGVYWKPVWNLLEDRVELMLVNAQHVKQVPGRKTDVTDCQWIAQLLEHGLLKASFVPPRPQRELRDLTRQRTQLLRDRARVVNRLQKVLEDANIKLASVATDITGKSGRAILDALVDGKSTPEQMAELVDKRMEAKKPALREALRGRVTDHHRFMLRQLLGQLDSLDKVVDSFDARVEEVMSPLERESLKRLDEVPGIDTRSGQIVIAEIGTDMGRFPTGQHLASWAGLCPGNHESAGKRKSGRTRKANPWLKGALTQAAWGASRTRRSYYSAQHRRLTARRGARRATIAVAHSLLVTVHNLLSRQAAYVDLGADYFTGPRGPDQQAQKMIQKLKRLGYDVQVTRPEAA

SEQ ID NO: 447044 - protein, 311 aa, unidentified
MNIKNNSIHYVAIDVSKATLQIQDDGLSMTIANDPGGFKKLLKHLKGCVNPLVVFEASGGYERALMEALHKAAIPLAMVNPARVRDFARSEGVRSKTDPIDAKMILAFAKSKAVKPMQAPSEVCLKLAAFLDRRGHLVEQLTREKNRIQNSEALIHRSIKRMISVLEKEIAAIEKAINQLVASDPSLKARTEIIESVKGVGRVTAWTLMAYLNEIEDLSRNGAVAMAGIAPFNRDSGKFSGKRTIQGGRAKVRKCLYMAAHTAATCNPVIAPYVKGLRDRGKPYKCAIVAAMRKLLIHIQSLLKNAQLSPC

SEQ ID NO: 447045 - protein, 313 aa, unidentified
MSQNNPPILYVGLDVAKSSLQLDLAGKSHSLTNDAKGHSQLLRLLGPHPGAHVICEATGGYEQPVVRVLHAATQPVTIVEAGRVRHFAKAKGLRAKTDPIDANVLSAYGRTFEPPATLPPSATQARLSQLSHRRLQLIDTRIAETNRAAHYTDKWLLRQTRQLQQLLEKQIAACDSAIAELIAADPDLKFRAQRLDAIAGVGVVTAATVLAQVPELGKINNNAAAALAGVAPFNRDSGDQTGNRHIAGGRKALRCALYMAALSAVQFDPILKAFYLRLRTAGKKPKVALVAAMRKLIILMNRLLKNPQFQLAK

SEQ ID NO: 447046 - protein, 374 aa, unidentified
MRKVIMIGCDLHDKTMLLKIATGCEESEKRVVKNTAAGRAKMIEALQARAVAVGGARILFAYEASGQGFGLYDELTDAGIECYVLAPTRIARSPRQASHKTDERDAQQLLELLRAHVLAGNELPTVWVPDPTTRDDRELVRLRLDVSQKITMVKSQIQSLLKRCHIRRDASAGKGWTRLFRHWLQATLCESAQSPLGRGAQLALASLIRQLDGLEQEEKKLTNEVNILATAPRYAAAVEEVASLCGVGVLTALVFLTELGDLSRFANRRQLAAYLGLTPRSFESGNANDRKGHITRQGSSRVRKMLCQATWTRVRWDEQEQQAYHRIVAKNPKKKKIAVVASMRRLAVRMWHRGLAYPPGTPSRTMILAGQAAP

SEQ ID NO: 447047 - protein, 372 aa, unidentified
MSQGERKQICQLAKKQRLTVGLDLGDRSTRYCILDEAGEAASEGAVETSKQGLSSLLGKMAASRVAMEVGTHSPWASRHVAELGHEVIVANAHRVKLITESVRKNDRIDAEKLARLARMDAKLLSPIRHRGEAAQRDLGVVRARGELMEARTKLINSARGLVKPLGERLGKCDAEQVGVGLAEGLSEAARAMVEPLLRAVEGISEEIGRYDEQIDGIAARNPEVKLLEQVYGVGQLIAVTYVLTLEDAQRFRRSRDVGPYLGLTRKQRDSGESQPELGISKAGDEYLRSLLVQGAHCILRKGAPDSDLREWGLRKAGSGKRAKRRAVVAVARKLAVLLHHLWVSGEVYDPLYNRKAAEAAAAKAKAKSKAAA

SEQ ID NO: 447048 - protein, 314 aa, unidentified
MYHYIGIDVSKKVLNVFDGKKDLIFDNKENLSSLKKHLKKRYPDFSSLVILFEATGIYSYPLKAFCATHMIKAYIINPQTSHSFAKSLGTRSKTDTIDARTIWEYHKLIGDKDISIPRVEREIMTLGSYLASYRLTLKQRLALTNHLEGIKDKTLYRLLKKEQERLRILEQELLIQMDTYIKQYPKLKEDYQRLLSISGVGKKTAISLLILFHTYPNTNRNQITALIGLDPIQRQSGTSVKGRSRISKHGNQMIRKSLYMPTLSSIKHNQKISVFYERLVSKHKPKKVAVIAAMRKLLLIAHAVYKNKTVYVPG

SEQ ID NO: 447049 - protein, 422 aa, unidentified
MLEETQDEQEIIARVAALDIGKAELVCCVRIPDPGGGSRRVQEVATYSTMTRSLQVMADRLMDLGVTRIVMEATSSYWKPPFYLLEAHGFQVWLVNAKDVKHLPGRPKTDRLDAVWLCKVAERQMLRPSFVPPVPIRRLRDLTRYRIALVSDQGREKNRVEKLLEDAQIKLSVVASDIFGVSGRDMMAALIAGERNPEVLAQLARSRMRTKIPQLQEAFVGYFTEHHRFLLAKMLARIDALDADIADVETQIEAQIAPFAPAVARLDEIPGVGATAAAVIIAEVGVDMSRFPTPAHLSSWARFAPGVKESAGRKKGTGSTGHGDRYLARVLGEAAVGASRTNTFLGERYRRIARRRGKKKAVVAVGRSILVIVWYLLRDDAVEFHDLGPGYYDSRTNPERKKRNHIRELEALGYRVTLQPAA

SEQ ID NO: 447050 - protein, 393 aa, unidentified
MVCVGIDVAKDKHDCFIISSEGEILADVFTIPNNAEGFDTLLQAIRRSTRPEDKIKVGLEATGHYSYNILGFLLDKGLPTYVINPLHTNLYRKSLSLRKTKTDRVDARTIAAMLMSDVDLKSYTDTVYHNEELKSLTRYRFDKVRERAKLKQSVSRLVTILFPELEKLVSSLHSASVYALLSEFPGAKQISSTHMTHLKAVLKNASQGRYGQEMAETIRNAARSSVGSVMPAKSLELQHTIRLIRELDAEIEDIETAIQAIVDEMQSPITTIPGMGVRMGAVILAEIGDFSRFDSPDKILAYAGMSPSTYQSGQLSLSGAYSHMEKRGSRYLRYALYNATKHVCHWDPTFAAYLAKKRAEGKHHNVALSHAAKKLVRLIFAMEKSQRPYCAAA

SEQ ID NO: 447051 - protein, 350 aa, unidentified
MKTTHPVIIGIDTHKASHVAVAIDTQGTRLAMLSIPTNPKGYLELERWSQSLGKVQAFGIEGTGSYGAGLSRSLLAHGHNVIEVTRPNRQLRYTQGKTDSLDAEGAARSVLSGQATARPKTQTGSSEMIRHLKIARDTAVKSRSQAMVTLKTLIINAPADLRDALNHIRGKIALIRHIAAFRPGDIDNPLASAKAAMRALARRWLWLHEEIIAHDKELERLVTERAPELMASHGIATLTVAQMLILVGDDPTRIRSEAAFAKLCGVCPIPASSGKTHRFRLNRGGNRQANAALYRVAIVRMRSHDPTLAYVKKSTKDGKSKSEIIRCLKRYIVREIYSQLCVPKSSQIKA

SEQ ID NO: 447052 - protein, 461 aa, unidentified
MNKQKPAGKQKRSVPKRMDWKALEIVHPDAAGIDVGGSEHWVAVGPDRDPEPVRRFGCFTADLHEMGRWLVAKGVRSVAMQSTGVYWMPVFEVLEQQGLEVYLVNAQHTKNVPGRKSDIQECQWLLKLHAFGLLNNSFQPTDEIRIARTLWRQRSSLVAEAASVIQRMQKVLTEMNVQLSNVLSDVSGMSGMKIIEAILEGERDPWGLAALVEPEVKATPDEIAKSLEGNWRAELLFVLRQHIELYRIYQEKITDCDFQLRKHLGSLGSKVDLKTQPIGDRPRGKKISKNAPGFDLRTELYRITGIDWSQINGIDVLTAQTVIAEAGADLSAFPTEKQFASWLGLSPTNEQSGAKILNRRTRRVVNRATVAFRNAALTLLRSQSYLGAQYRRQRTRLGAPKAITAMARKLACLFYRLIKHGQPYVDKGTEYYEAKYREQQIQTLAKRAHKLGLQLVIPKTA

SEQ ID NO: 447053 - protein, 406 aa, unidentified
MDILYERCCGIDVHKRIIVACLKCGKQQEIREFGTTTDEIRTLTKWLQDSDCQMIAMESTGSYWKPLYNIFELSALDAMVVNARDMKNVPGRKTDVKDAEWIADLLQHGLLRASYIPSREQRELRELSRYRKSLIEERARELNRLQKMLEGGNIKLASVVSDINGRSARNLLSRMLKHDTPLTKDEVSGMIHGRLRHKVEAIMKAVDGFLTPLQKQLMLKIVDHIDDMTKRIGEMDELMNQYLTEYHEAIHKLDEMPGIGRQSAETILAEIGLDMSRFPTERHFSSWAGLAPGNNESAKKRRNGRTTKGNITLKTTLIQCAKAAVKKADSFLSAQYQRLVVRRGANRATVAVAHTMLISIYHMLKDNVPFVDLGAAYYNKFNVQSKINHYIKKLKQLGWEPNDATI

SEQ ID NO: 447054 - protein, 360 aa, unidentified
MRIIGCDLHARQQTLAMLDTVTGEVVNRTLMHEGNQVREFYAELPHPVLVGIEAIGPMRWFLSLLEELGIECQVGDATKIHAAEPRKQKHDRRDAELILKLLVENRFPAIWMPSKEQLDLRALLLHRHHWVRLRTQIQNGLQAIALANGLRRGPGLWSYDGQAKIAFLPLPPHASYRRSALQTAYRKMAEEIEGLTEQVAEQAKQRCGARLLMTHPGVGPVTALATDVFLGDPQRFADGKALASYVGMIPREYSSGERQRFGAITKQGSPLLRFLWGEAAAHAARRDPDLQRFYRRKLVQKGLGKARVAVARKLGIRLWIMLRDQIDYEEFCRRGQKQSSAACAGMPEVGYGANRHRPID

SEQ ID NO: 447055 - protein, 329 aa, unidentified
MIEEVRARVSRETGRAVEVISCYEAGYDGFWLHRQLEAHGIRNYVIDPASLQVDRRVRRVKTDRIDTERLLRSLMAYLRGEPKVWSVVRVPSVAEEDARRLHRERDRLVSERVQHVNRIKGLCALQGIYDYQPLRPQAMAGLEQLRTAQGAALPPRLKSEIKRELHRLELVVEMIASLEAERDIIAEDKASTHVNAEKIQALHKLKAIGPEFAAVLVGEIFHRDFNNRRQLASYVGYAPSPFQSGNVAHDQGISKAGNRKGRTTGIELAWLWLRYQPDSDLSVWFRARVGTVKGRIRRIAIVALARKLLVALWRYLETGLVPRGAVLKG

SEQ ID NO: 447056 - protein, 337 aa, unidentified
MIAAGVDTHKDEHVVVALDGLGQVLGELAVPANQGGYAQLTTWLVGFGEDPRVGIEGAGSYGAGLAEYLQSVGIGVFEVERPRRRDRKSGKSDSIDALLAAKKVLAGDGLSTPRGSGERKALQTLLGAHQSCVGERTRLYNQLHALHVTAPSVLRERVGAGSGAKLTRRLTRMRIQQDTSVQEATVLEVLRDLARRVHAVSERIDHYNHEIAALVRSMHPTLLDEPGVGPINAAKLLTCDPKRFKSEAAFARTNGTAPIPASSGKTNRHRLNRGGDRQVNAAIHMIALSRSIHHPETQAYLARRTSEGKTKREAMRALKRHLSRSLYKKLIETPLTS

SEQ ID NO: 447057 - protein, 412 aa, unidentified
MEVLHSHCAGLDVHKGSVVACARHMVDGAVKREVRSFKTTTKDLMALSEWLSVEGCTHIVMEATGVYWKPVWHILSDGEFKLVLANAAHVKNVPGRKTDVNDATWLADLMAHGLVRGSFVPDEPTQEMRNLLRTRKQFVRERSSHVQRIQKTLEDANIKLDSVIADIVGLSGRRMIEALIAGETDPTALAALAHRRIKATPADLEAALRGRVTDHHRFMLRLLLQHIDAIDAAIAQIDQEVDGKVEPFRTAIQIVSTIPGVRELSAEVIVAEIGIDMARFPTQAHLIAWSGLCPRNDESAGKRRSTRMRKGAPWLKTTLIQCAWAAARTKESYLQAQFHRLRARRGAKKAIGAVAASILTAAYHMLKTGTLYHDLGPNHFDKRAKEKHVHRLINRLRNLGFAVAITPVEAAA

SEQ ID NO: 447058 - protein, 584 aa, unidentified
MASTPALDRVGVGIDTARYGHRVCFLRPDRKPAAKPITVMENHTGYQSFKDALLRLREQNPGVEFHVRIDAAGQYAQNLVQFLHSLDLPMTISVGEPKRNKDYRKAHFPKRTTDDTESQAMARFAIVEQPPATPAPSAPFIALHEVAGRLQARVKQTTQATNRLHNLLARCFPELATLTDDIAGGWVLSLLEKYPTAERIAAAHLASLEKIPYLSSEKAREVQKAAKHSVASLRGSVAEALVADLVKQLRHCQNAERSMRKLLTEAFADLPSSGHIQLVTIPGIGQATAAALVAKIVDIDRFDTPDKLVGYFGIFPEENRSGVDRFGNPLPAGTMCMSRKGCDLVRGYLWNATRVAIRHNPAIRPLYRRLRAKGKRGDVAFGQCMRKLLHLVFAVWKTNRPFDANHYPWDNPNDAAVPNSAAASSVSATDSGNNKAEGHKQDTPAEKVVTSARSTIESVPPLVKPEHPSAAARPHVDFAFLRQQISLEQVLKHLDLLHHLRGSGPQRRGCCPVHSHPADQERTFSVHLGKNVFRCFQKDCGAQGNALDLWAAIHRLPLYDAALHLAETFGVPRNRGEEPVKGTG

SEQ ID NO: 447059 - protein, 347 aa, unidentified
MCAEYDGPQVVGMDLHRRRSVLVRMDPAGRWLDSVRIDNDPLVLAEQIARAGERPQVVLEATYGWYWAADVLAEAGAEVHLAHPLGVKGFCYRRVKNDVRDAADLADLLRMGRLPEGWIAPPAVRELRELVRHRAKLVAWRSGLKASVHAVLAKQGLLAPRSDLFDTGGRRWLAGAPLDAAYRLRVNALLRLIDAVNFELEVLAGPLRAALAGHAGFEAIQQIPGVGPVLAAVFVAEIGDAGRFPGPAQLCSWAGLTPRHRESDTKVHRGRLTKQGSTLVRWAAVEAAHGCRKTAGVAWLGEAHERIAQRRGPNIATVAVARKLLTHVYYGLRDGHIRALQTRPTAA

SEQ ID NO: 447060 - protein, 321 aa, unidentified
MYTFVEDKPIKKKLRRAELLAFFANYPTSLIGIEACGSAHHWARELTKLGHEVILLNTRFVKSFVIGNKNDFNDAAAIFDAVTRPNRRIAAIKTIEQQDIQLVHNIRQGLVGNRTALVNQIRGLLSERGIIIPQGINRVREQLTLILEDAENDLTVLSREVFAEQYENLRGLDDEIKEQDRRISRLCNNNELSKRFLEVPGIGPMTASIIASDIGNGKGYPSSRDYAASLGVVPRQHSSGGKFVYLGISKRGNKYIRTLLIHGARSVLKNSGKKTDKLSLWLQSLVERRGFNKAAVALANKNARILWAMATQKKEYNALLV

SEQ ID NO: 447061 - protein, 355 aa, unidentified
MKVSTLGIDLAKNVFQLHGVDHEGHTILRKKLTRAKFVQFVIQLEPCLIGMEACSSSHYFARLFTRYGHEVKLIPPQYVKPYVKTNKTDAADAEAICEAVTRPNMRFVQIKTEEQQAVLALHTERGILIRERIACANSLRATLAEFGITIAAGQSHLTRELPAILEDGENGLSPFVRTSIYRQSKHIRELEEQVKQVEEALASWYRTQEACQRMAKIPGVGMLTATYVVAAVGNARQFSTAKQFASWLGLTPKEYSSGGKQQLGGISKRGDGYFRYLLVHGARALTAWVNRNGAVEKNSWLQGLLERKHYNVAVVAMAAKTARIMWSMLSHNTEYQPRQLAWHKVSQSDEVLKKS

SEQ ID NO: 447062 - protein, 368 aa, unidentified
MNSIIYLGMDVHKETYNLCAYNNETGEICGETKCKADIKLVIKFIENLKKTYGEDLVVKAGYEAGCLGYFPYHQLTNYGIDCDILAPTTMARSSKEKLNKNDKLDARNIATNLANGTYKSVYVPNDEDLAVKEYIRMLDDTKIARKKVKQHINAFVLRQGYKYEGKSKWTLAHLEWLKTLPVTGLLREILDEYLSQYDDLCNRIDRYSDKLIELSHEESYEQPISHLRCFKGIDTTVAMTIHVEISDFTRFPKACAFASYLGLTPGESSSGSKTTYLSITKQGNTTVRNALVESAQALVKGTPGVKSKALKTRQKGQDIKVIDYADKAVERLQRKYRKLIHRGVNHNKAVVAAARECFIWGMETGRIN

SEQ ID NO: 447063 - protein, 411 aa, unidentified
MEVVHPRCAGIDISKKDAKVCVRIQGRGSRATSTTVSTWGSMTNQILALREHLLGEKVTCVVMEATSDYWKPFFYLLEDVLPVMLVNAHHAKNMPGRKSDVSDSAWLADLGAHGLLRGSLVPPPPIRRLRDLTRARTALTRDRGRQVQRIEKMILEDSGIKLSSVVADIMGASGRAMLAALIDGQDDPVVIAELAQRRMRSKIPVLTEALKGRFTTHHAFLIKMHLGLIDQYSQSLADLDAKIGEAMEPFAAARELLVSIPGISTTVAEVFLAETGGDMRVFPTAGHLASWAGTAPGSNESAGRVKSTKTRPGNPYLKAALGTAALSAKGTYLAARYRRIASRRAPIKAVVAIEHTMLTTIWHMAQTGALYDDPGGDFYTRRHPEKAKRRAIQQLRAMGYQVTLEPLQEPA

SEQ ID NO: 447064 - protein, 323 aa, unidentified
MQHHIGVDISKKDFYACFNEQDEPIKFNNDHVGIRNFIKYLNTNQYSIHDTVIGVESTGAYHLPLSLICSQNNYPIKVINPLITKKQNQTDLRRVKNDKKDSRLIRHCLTTGAGYQFCETNDSLILKNLVRQRDYLSDTKRRLNLKQQDISYKETYLKCKITTVNSEISLIIAKKIKQIEKELKQYDPATQKLLRSIPGIGPITAVSFISEVANIQRFKTSKQLTAYIGLDSRVHQSGTSIQGKGYITKRGNKILRTRLFNAASVAVLHPNMFQSFFQKKRSEGKPYRVALVATMHKMVKVVFAVWTRNTPFVDQLPPTQKEG

SEQ ID NO: 447065 - protein, 347 aa, unidentified
MRFYTKPHKFYCGIDLHARSMYVCILNQDGDIVVHRNIKTKPDALLQIMVPYREDIVVAVECIFTWYWLADLCAQEGIPFVLGHALYMKAIHGGKAKNDKIDAHKIAVLLRGGMLPQAYVYPAEMRATRDLLRRRMSLMRQRAALLTHVQQTNSQDNLPEIGKKIAYKANREGVAERFPDPAVQKSIAVDLALLGYYDRLLTELELCSVNTAKEHNAQVFYRLRSIPGVGKILALVLLYEIHDIQRFPRVQEFVSYCRLVKCAKESAGKRYGTSGTKIGNAYLKWAFSEAAVLFLRNHPAGQKYLARIEKKHGKGKALTILAHKLARAVYYMLKRDTAFNLDKFLNT

SEQ ID NO: 447066 - protein, 408 aa, unidentified
MDLTPMHKRVIALDVHQAKITACAVVEHDDGRVEITKRDFGAFKRDRRALAQWSLEIAPEVVVMESTGVYWKSPFAALEAVGIIAWVVNARHVKAVPGRKTDMADAQWLATLARAGLLRASFIPPVDFRQLRLVARQRQKLVGMCSAEKNRLHKVLVDAGIRINVLVADIHGASARAMVKALIAGQPMHEVLECKGRLRASREELFEALSTEQFSAVHRFVAEEILQHIEQIEQRIARLDQYLLEGLRAWQPQLNLLQTIPGIDIQGAAMLLVEIGADMTVFGSAERLASWVGICPGNNESAGKRKSGRIRRGNAWVRRLLCECAQAAARTRCALKAKFESLAIRKGHKKSIVALAHKMLRTIYAMLASGTHYQDRSVDYEALSVTRNAPRWIKMLRKHGFIAETSAA

SEQ ID NO: 447067 - protein, 452 aa, unidentified
MAQAKPQVIDDEEHERVYERVAAVDVAKDSGMVCTRTPHRSRPGARQSTVWTVKARMTAIRALGRQLTKDGIEMVTLESTSDYWRIWLYVLEACGLAVQLVNADQARNLPGRPKTDKLDAMWLARLTEMGLLRPSFVPPAAIRALRDYTRARTRLVQERTRCFQRLEKLLEGALVKLSSVASKLTTESAKDMIKAMIAGERDPHTLAALARTRMKAKHDQLVEALAGMFDDHHGELAQILLDQAAFCDARIAQLTARITAAVAAMPAAWGVDADGTTGPDAGTGPDAAALPAVQRLAEIPGVSPDLARSIIAEVGLDMSRFPTAAHLVSWAGLCPRARQSGPRTRAGKKNQGDSWLRNSLGQAAIGAARTTTTFLGERYGRIARRRGKAKAQVAVARSILTIIWHLLADPAVRYADLGAGYYQTRTDTDRKLRNHIRQIQALGFEVTLTKAV

SEQ ID NO: 447068 - protein, 392 aa, unidentified
MYIVGIDIGKNHHEASIVSPKGKQIGRSLRFATTHKGADSLMSFIFKNIGNSPCVFGMEATGHYWYPIYSFLKAKGYTIYVINPIQSDSLRKMYIRQTKNDSIDSFLIAEVIRFGQFTTTSMADENILAMRQLCRSRDSVISSRTEIKLRISTIMEQIFPEYEKQFSSLWLSTSMGILEKYLTPENIENAPIDELFEIIKDKSHNRLTRAKAISIKEAAADTFGIKIAQDAFSFQLKQLIDRMNFLDKQIEALDCQILEYYEKFDCYLHTIPGIGMIAAATILAEIGDINRFKSSSALVAFAGIDPTVRQSGEFSSTHNHMSKRGSPYLRHAIFLAATTCSFHNSPLNAYYKKKRDQGKHHLTATGAVARKLTSVIYAVLRDSKPYEPKSFC

SEQ ID NO: 447069 - protein, 344 aa, unidentified
MAYHTALDVSLRSVSICIIDDEGAIQFEGKAVSDVDEIIACLKGFSPDIRSVGFEAGTLSQYLSYGLQAAGYEVICMEARQVNAALSAMRNKTDKNDARGIAQILRSGWYSRVHVKSLESHLTRALLTSRKTVLKKCVDVENEIRGLIRLLGIRLPGTVKHGAFDDLVRPMMQIHTTLANALIPLLDARLALYNNYLKLDSQVTAMARKDAICQRLMTVPGVGAITALTFKAGVDDPSRFKHSRTVAAHFGLTPRRFQSGEVDNPGRISRAGDADVRSALYVAAHSLVVRSEKWSSLKVWGLRLAKTKGHRRAVIAVARKLAVILHRMWIDDSEFRYGSTEAAI

SEQ ID NO: 447070 - protein, 412 aa, unidentified
MQDILTCAMGLDIHRDVIVACLAKGELGTDPEIEIRSFSTLIPEMRKLRDWVLEAECRYVAMESTGIYWQPIYEMLEPCFDGQINILVVNARHMKNVPGRKTDMRDAQWIATLLRAGLLKGSFIPDKTFRELRHLTRYRKSIVRDITAQKNRIDKFLQSSGFRFTAFLSDAFGASGRNIIRHLMEYGNISREALDRCLKTQTRKRIDEILIALNGSLSEHQRGFLRMIFGHLEALEQHRHTVEDAITKEITKHEEALSLLCSIPGIDVTAAAAIIAEIGTDMSAFPDSQHICSWAGLSPGNNESAGKRKSAHINKGNPYLKSMLCEVGWVISGKRSLYLSGWYWRIKQRKGAKRATIALARKLLALIYTMLKTGSPYNEECFETRRKQSERKRASRMVNELQKLGYFVVAPG

SEQ ID NO: 447071 - protein, 290 aa, unidentified
MSRLAKVERFFKNVNLTSDDEVYVGVDVHKKSYHVSLFLNDTPSIDFNIIADPKQLTKKLQRIAQSIKDVSYETGPTGYGLVRYLRKNKLPANVVATSKVPRTASVDDKTDRLDSRKLAEYSAKGMLRSITVPTARQEADRQLYRMRHRQALQFAKVKVQIKSFLLMHGISEPEGLKDWNKASVSELRNIRLLDALRLSLDELLSDYDYLNGRLKELRKILADNLDKGVLGRRMDLLKTHPSVGAVVSCQFATELYHYKDFSSTRQLYKYLGLSPRISQSGEKKEHRSDQ

SEQ ID NO: 447072 - protein, 394 aa, unidentified
MKPIITCDVSKNKSHIRGYLDPETPLEKAFKIQHVKSGFKEIKSLAEKLKSLTGDYPVFVLEDTGVYSECVKRYVESIGLDLYSISPLESAKQRKAKIRVTKTDPLDCDNIAKVYYSRSLRKSNNTNQNIRNLARSKESLTRQIIAQKCIISRYLDLIRPCIEYFFGDFDKKWLYVVIKQYGHPDVLKRRTVDQIASLLIHQANKGKLNAYRIAHKLKDYALEVVSGIQNNDETITQLVNSIKRLDQLTLERDVINSKLNEKVKKYPIYEVIKHLPCVGENLLLSLSSELLNIDNYKSSKQLVAYAGLDPSILQSGKENGEHYSITKKGNGLLRSKLYLLVKLMLSNKKDNVVTRFYLKKKNSGLPSKAAVIASCRKLLTVIYGMNKNKTFILQ

SEQ ID NO: 447073 - protein, 608 aa, unidentified
MSPVSSLDRIGVGIDTARYGHRVAFLRPDRQAAAKPMTVLESRAGYQGLHQRLEQLHQQHPQAHFHVRIDAAGQYAANLEHFLRGLPLPMTLSIGEPKRNKDYQKAHFPKRTTDDTESQAMARFAVVELPAATAPTSAALTLLREVAGRLQAKVKQSTQAINRLHNLLARVFPELANLTDDLTNSWVLHLLDQYPTAQRIGLARLATLQRIPYLTEELAAQIHLVAQQSVACLSGDVAETLVRDLVAQVRHTQRAEDQLRRLLSDAYAALPASPHLQVVTVPGIGVATAAALIAQAVDINRFRTPEHFVGYFGVFPEENSSGVDKFGNPLPPGTLHMSRKGNDLVRSYLWNAARAAIRHNPAIGALYRRLKAKGKRGDVALGHCMRKLLHLVFAVWKTNRPFDAQHFAWETPGAAAPTAAAGGAPTANPDPLPPSAVTGSAPSASNASSADNAAPGSATVAANETAVGHKRDVPAEEVVTTANTTVAPQPLPVNPPPNCPPRPKVDFAFLRDQVTLEQVLRHWGLLDRLRGRGPQRRGPCPIHGQPNDTQPTFSAHLGKNIFQCFHASCHAKGNVLDLWAAVHRLPLYEAALHLAETFHLPRNREENP

SEQ ID NO: 447074 - protein, 334 aa, unidentified
MNFTNFIGIDISKNTFDLALIKEDSPDKVVTAKFSNSHKGIVALEQFIRKQKLVKQQILFCIEHTGLYCRVLSNYLVENQYAVWLEMPVQILRSLGVQRGKNDQLDAKRIATYAFTFKDKARLWQPPREEVQKIHDLMALRERLIESRKSILMPIEELEATGLDEVAATLRKHCSKSIESLDKEIKQIDKELDEIIDNDTNLKNKYKLARSVPGIGRITAMALLYYTNEFTLFRSAKKLACYCGVAPFARESGTSVRGKTRVSNFANKALKKLLHMASMAAISSDKELRAFFERKVAEGKNKMLVLNAIRNKILHRLLAVIKRNTPFQSEYELL

SEQ ID NO: 447075 - protein, 340 aa, unidentified
MGIVGGIDIHRRQLTFDVVDLATGENVRGRVSPADRVELRRFLASLDGAGGDVAMEGCTGWRYVTEELERAGFRAHVAEPADTAALRGNKRRAKTDRGDARHLRKLLMTGELPESWIPPRHVLEARGVVRLYKDLADQRVAWTQRLHATLYHHGVPELGCPVAGEQGRTLLRDVELSPAARRAVEVALAQIEVVNEMLAPIKLDLARLSRHQLGCQALTAHYGIGPVTSVAIWCEMGDTRRFSSSSDAVRHAGLDVTVYQSDSNRAKGHLTRQGPGVLRWALYEAAMSSTKKASPDHEYFCSLRERLGTQRAVLAVARKLARWCHHALRAAGDDAWAEAA

SEQ ID NO: 447076 - protein, 289 aa, unidentified
MNVIHYIGLDVHKKSISYCVKTVAGEIVKEGKVAADLAALTEWAEKHMQPWRGAMEATLFSAWIYDTLKPYAVQLEMGHPARMKAITCGKKKSDKIDARTIADLLRCNLLPVCYVMPPGLRDLRRLLRYRSLVVRESVRMQNKIAGLLMETGTPFNKEKLHGKKYFAQLIETLEQVPESVKDLLQMSRSAMEMFETTQKRLVKQLLVNPALAQRIERLAGIRGVGEITALTWALEIGDPHRFHSNADAMSYCGLTAAWRMSADKQQRGPISDRLSGCLLCPRNQKRIGG

SEQ ID NO: 447077 - protein, 336 aa, unidentified
MQVTTIGLDLGKRLFQLHGVDAAGTVMLRRQLKRRQVEPFFAKLPRCLIGIEACGTAYHWARRLGELGHEVRLIPPAYAKAYVRRNKTDPADAAAICEAVSRPSMRFVPIKSEAEQAIAAVHRVRDRLIGQRTMLLNALRGHLAEFGVVVSRGPAHVKELIEMLAEPGSVPEILRSVLLGLASVLARLERQIVLVDKQLMRWHRDNARSRRLATIPGLGPIISTAMAARVLQPQRFRRGRDFSAWLGLVPKQSSSGGQIRLGAISKQGDGYLRRLLINGAQAVLGSKRAKTDPWLKRLLDTKPRLVAAVALANKMARIIWAVMVRQTGFREAVATV

SEQ ID NO: 447078 - protein, 349 aa, unidentified
MHSCVIGGVDTDKEFHCAAALDETGRLLGTEEFPTTKQGINELQQWLEGFGDVEAVGVEGTGSYGAELTRRLHGNGTKVLEVPRPNRQGRRRLGKSDPIDAEAAARSVMSGQAVIVPKLGSSQIECIRMLRVTRQGALKAKIAATNTLKSMVITAPGELRDQLLQRNTQQLIATCRSFRVRGADPCDPLQGTKLACNYLAQRIHHLSEEIDALDAHLETLVTQVAPKTLSVFGMGVGTVAALLVTIGDNPERLMSDASFARLCGVAPIPASSGNVTRYRLHRGGVRDANSALHVAVIVRLRYCTKTKAYMERRTAEGLSKMEVIRCLKRYLIREVLRALRSDYENLQSV

SEQ ID NO: 447079 - protein, 329 aa, unidentified
MNCVGIDVSCKELVVVMSVKGKARKAITFENTPAGHQLIIRRLSKLKGEVRVCLEATGIYHFDLAVALSRADEIEVMVINPKVAHNFAKALMKRSKTDAVDAEILAIYCEKMAFEVWERPSDEFITLKAIARRIAALTKQKAQTKNQLHALISTEDTPQLVIDQTRELIQFLSEQIKAHRDAGLQLIQQHAELNEAFTLMTSIKGIAAASAIQLLAELMILPQNMSAKQWVAFAGLDPRHYESGTSVAKKPRISKAGNKYIRQALYMPALVASNHERHIRGDYTHMIDDNGLKPMQALCAIMRKLLHAIHGMFKTNKSFDGERFYTFPA

SEQ ID NO: 447080 - protein, 366 aa, unidentified
MEGRRFVGIDLGKRHYEACVLHAGEKILRWSGSTSAEGREELAKKLEAGDVVGLEAGTLSLVVARRLLQVERVRVLVLNAAKLAVIYSSMRKTDKEDALKIARVLQNTAEECLPVVRLPSEREEEARRLSNHQIFLNRQRTQVINQIHALCVENGLSEITKKDLKTESGRAEVLEQMTRIYREMAENHCCVLATIEARLSLVKERVLQALLERNDEAEILMSIPGVGPMAALAYLGFVGTEARFDNPAQVSYYVGMVPRVEMSGTSVHRMGHITKQGSPALRRALVQAAWAAVRSPLGTNFRTVYNRIAERRGKRIAIVAVARHMLELMYTLSVKHELYRFCTQEERLKKLRFYKLGSLGTVGFLT

SEQ ID NO: 447081 - protein, 345 aa, unidentified
MELHTIGIDLGKTVFHLVGLNLGGEVVVRKKFSRTQLLRFTANVHVGLIGMEACGGSHFLGRALREQRHEVRLIPAQYVKPYVKTNKSDYIDAEAIAEAVARPTMRFVPIKTDDQLDLQSLHRVRERWVMRRTAVINQIRGLLLERGITLRKGRHHVHAALPLILEDADAKLSGAVRMLLAQLKLDLDQLAARIDEADAVIRKTAHENEACRRLVAIPGIGPVTATALIAAIGNGGAFHKGREFAAWIGLVPREHSTGGQQKLLGISKRGNSYLRRLFVQGARAVLQQRTKQSCGLSAWLAQLTSRTHRNVVAVALANKLARIAWAVLAKNEPYRHPVLADAAAA

SEQ ID NO: 447082 - protein, 439 aa, unidentified
MLRIRSLPTIGSYPVAQVKNKKGDIMKTCLFVGVDTHKYSHTAAVLDGYFEVVTTISFDNSTEGFNHLFDKLKKLISGRDLVFGLEDSQGLGSFLAQYLIRNGHLALEINPVYTDRGRRRTVSREKSDKRDAIVIAKTLIRERANLHPVRMERNSVALREMVGYRQTLVNESTRIKNRLHMALFNQYKGVLGQFGSLFSKCALAFFARYPDPFLLKKVDPDTLSVFLKANSKGRYGIKKAGAILSSIDNSIVDSLTGTRAHIIESHSQRLVQIGKELKKIQNILEGLVEASSYGCLTSIPGIDTVTASKIIAGIMDIARFSSSSKLARFCGIAPAEKSSGRKEKYEKSKYGNRSLYSTIYFMALAHISRTRDGRDKNPISRAYYLKKISEGKTKKEALTCLTRRLVDLIYAVMRDRSIYNFSKSRFTKQQDIVLHTAVA

SEQ ID NO: 447083 - protein, 347 aa, unidentified
MTLYCGVDFHSRRQTVCYCNTGDGEVKIKDLHHYDDDVRSFYEQFKNERVIVGYETSGYARWFEQMLFELGIEVWVGDAAEISRLGKRRQKNDRRDAEHILDLMLKGEFPKLYRMSERSQEIMRLLRHRHKLVKHSVMIKNSLRRILIETGSIFKEGLASKKGKKKFRDLKLPSLLANERDRWLELLIEIEKQIAELERLLKTEAEADERVQRLLTHPGIGLLTALCIVHSLGEVKRFASVRKVAAYAGLEPMEHSSGEKRRYGAISKAGNRLLRFLLGEAAHMAARSDDELKQFFRRLKAKCGTAKAITATARKLLIRCFIMLRDQIDYAEFRQRGIEAGSARVYT

SEQ ID NO: 447084 - protein, 351 aa, unidentified
MQTNLKDFTGESIYVGIDSHLKSWKVTLMCDELELRNFTQEPDSKKLAAFLRKHFPGGDFHCVYEASFGGFNAQRALESEGIPCMVIHPADVPTTDKEKRQKSDRIDSRKLARGLKNGDFTPIYVPSIEQQQDRSLLRIYDKIIRDISRVKNRIKFFLMFFGIEIPSEFQGKNWTKGFNTWLKQVHPGGPGNQSFRILLEEYEMLKEKWQELNQMIEELSAEERYRENVRLLTSIPGIGRLTAMILLTEIGDINRFPTLKELSSYFGLIPNCHNSGETERVGRNTKRGNVFLKYILVEVSWMSIRYDPSLLLTYKSAVRIMNTNKAIIKVAHKLLNRIRFVLRKKEKYKIL

SEQ ID NO: 447085 - protein, 387 aa, unidentified
MQIADRSKAPTAIRTDLGAIFVSLELSRSTWLITSLSPGSGEKMSKHSVRGGDIAGLLKRFTQLQEKTQARTGKSFEIVVIQEAGLDGFWIHRVLQSKGIDSHIVDPASIATSRRRRRAKTDRIDGEALVRALLAYKRGEPRVCAMVKVPTPEEEDRRRLCRERKVLIAEQIEHINRLKGLLFSQGVSGYEPLRRNRWTRLEELRTGDGRLLPKHLKAQVRRELDRLELLLEQIKAVEVERDALLAAEETSAPAPAAILLDIKGIGPEFAAVLWSEGLFRHFDNRRQVAAYAGLAPTPWQSGAVDREQGVSKSGNPRLRTTLIQLAWLWVRHQPRSALTLWFEARVKRNGGRLKKTTIVALARKLLVALWKYVTAGVLIEGAAMKAA

SEQ ID NO: 447086 - protein, 418 aa, unidentified
MASVVEIVYPTCCGIDVHKNFLVACIAKTDERGHTTHLQRRFSTNTGDLRKLADWLISHGCKDVCMESTGKYWIPVFNILEQTCNVCLTHPKYVKAIKGKKTDKRDAKWISELFKCDLVRASFIPPFDIRQLRDLCRYHAKLTYMTTSEKNRSQNCLTTCNFKLDAVFSDVFGKSASRILDSLIALGHSNFDVAPLLDRRCKASIEDVKAALDGELSFAQSEKLKIIRKHMESLENLKNMLETLILQLSEKYQPEINLLLTVPGISSPLTAIRILAEIGADMSVFETAKKLCSWAGVTPQNNESAGKKKTTRISRAGAYLKPLLVQIALAVSKSSKHPEIKDKYQTLKKRRGHKKAVIAIARRLLTAIWHILKKQEAYNADLYRKAEKPPRNRVLTPEQAFALLRRNGYQIVEPDSVA

SEQ ID NO: 447087 - protein, 338 aa, unidentified
MHYIGIDHHRQYSHITLLDEKGERLKYGRVANLRSELDNFLSGIKEVKAVVEAGRSSYTMVDVLDDMGIDVTIAHPKEVKAIAKAKIKTDKRDSYILAHLLRTDLIPEVYKRSRENRSYQRVLRQRAFYVGSTTRVKNRIHALLSQQSEDVQEEISRVKNLFGTKGMKVIRGLSLPGNQKELLEALVKTFSHLGERRKETNGLVEKLYFEIPEARLIHTVPGFGVFLSVLTAVEIADIGRFENVRKFHSYAGVIPSTYSSGERTYHGKIIKQGNRWLRWAAVEAVWPAIRADFDLRCYYEKLKKRKGANSAKVATARRLLTIIFRMLKENRPYIPYKR

SEQ ID NO: 447088 - protein, 374 aa, unidentified
MTVLTVTNLPAAMHGETVRCLFAIELSRMSWVIAFNTPLSEKISRRTLIGCKWKRLLELIEEVRARVSRETGRAVEVISCYEAGYDGFWLHRQLSTHGIRNYVIDPASLQVDRRARRVKTDRIDTERLLRSLMAHLRGEPKVWSVVRVPSVAEEDARRLHRERDRLVCERVQHVNRIKGLCALQGIYDYNPLRPQAMAGLEQLRTTQGGALPPRLKSEIKRELQRLELVVEMIATLEAERNAIVEDEASTHINAKKIHNLHKLKAIGPEFAVVLVGEIFHRDFNNRRQLASYVGFAPSPFQSGNVAHDQGISKAGNRKGRTTGIELAWLWLSLSTRQRFERLVPDACRDHERPHPPHRHRGVGAQAAGGALALS

SEQ ID NO: 447089 - protein, 351 aa, unidentified
MLIIGVDYHPSFQQIAFFDQETGECGERRLNHSDGEAEKFYRELQQRGDSVRVGMEATGYSRWFEQLLAELGIEVWIGDAAKIKTKRVRKQKTDRQDAHLLLKLLLENNFPRVWAPSPENRDLRQLLWHRHRLVQMRTRIMNQLQALAMNEGTRWKKRLWSEQGRSQLEKIPLAPWASRRRQDLLELLDRMNPTIAELTAAVEQEAKKRPEVLRLMTHPGVGPITALAFVIIIMTPDRFPCGKQIGSYVGLISCEDSSAGRQRLGHISKQGNALLRFLLVEAAQAAVRYDPDWRRRYLHLAMRRERRIAKVAMARRLAVRLYWMWRNGWEYSQSVEFGSHAGQLVTGHGVN

SEQ ID NO: 447090 - protein, 368 aa, unidentified
MGKIRLVAGGGQSGLPAVRRPTPGSEVWIAIDISRSKLVYCVRWDGAEQYRQSTALGLEHVRALVQRYAGCRVHVAYEACGFGYEIAWWAQAQDAVTLTVIAPSRVERAPGARVKTDRVDAGQLARKLEKGDLKAIYVPSRTLHADRAVGRAYGQCVKERKRAQIRLRLLLQEHGQLGPLPGRGWTVYARWVSTLDLPTPVRACVEAHLQLRASAAVQARRLRAILGGVAASDTYHGLVGALCMQAGVGVYSAIRLVLELGDIDRFATTDSLPHYLGLTPSQYSSGETDHRGHILKSGPGALRALVVQCAWAAVRPGRDPDLRALFERLAPRIGRKRAIVAVARRLAITLRKRWMHHLHPPPATDVAA

SEQ ID NO: 447091 - protein, 426 aa, unidentified
MQYALPLVLPDVPAGGVCAGIDWATADHVVCVVDAAGRVTDRFSAAHDKAGIAALIARLRRSKVTEVAIERGDGPLVDALLAAGLTVVVITSRQVKNLRSRFGAAGAKDDRFDAFVLADTLRTDRARLRPLVPDTPATISLRMTVRARRDLVRHRVAVCNQLRAHLAVAFPAAITLFHDLDSPISLAFLARFGSQDAAAELDEQAIGAWLATIAVRGRPAPASVLHARLQAAPPGATGADGAAQAGITAALTATLAALSDQIKALATQIAGQLAAHPDAHIVTSLPRPGTVRAARLLAEIGDCRSRFPDPESLAGLAGVAPVTRRSGTRIAHGFRWSVNRQLRDALCDFAADSRHASPWAAAIYDDARARGKDHPLAVRITARAWTYVIWRCWHDGTAYDPAKHHALQAVLARQATQTAGARQQDQ

SEQ ID NO: 447092 - protein, 354 aa, unidentified
MQNDRQSSETVILGVDTHLDIHVGAVISQAGKLLGTHIIQTNQAGYLELLDWARSFGSLERAGIEGTGTYGAALTRYLIKNSIYVVEVNRPDRSKRRLEGKSDPLDAENAARTVLSGSSKAIPKMQSGACEALRIISVARRSAVKACTQAINQLRALLVSAPQDVRDKLWKSKPHECVTACINSEVSEHSPLRIALCSTLRSLAKRWMALTEELNELDESLDKLTRKYASNLRSQFGVGPQTAATLLAVAGDNPGRLKNEAALASLCGVNPLPASSGKTVRHRLNRGGSREANNALWTIALVRMRSDPRTRIYVDRRTGEGLSTKEILRCLKRYIVRELYPLILSDLAYANRRS

SEQ ID NO: 447093 - protein, 356 aa, unidentified
MSRDVKYIGMDVHKEATVIAVRNSRGELVMESMVETESSTIVQFIHGLRGELHVTWEEGTWAAWLYDLLKPHAHEVLVCNPRRNALLKEGSKTDRIDARKLSELFHAGMLGAVDHGENGVRTLRELACMYQTVSQDLTRVMNRVKALYRGWGIACAGTQVYAPRYREEWLQKIEPAGVRRRAELLYEELDGLQALRRKVRPELLTESQKHKAAKLLRQIPCIGPIRAARLIALMQTPHRFRSKRQLWTYSGLGIETRDSGQYRFVDGQLQRSKKPQQVRGLNRNHNHEMKEIFKGAATRASCGVGPLREFYGRLLDKGRKPEMARLTLARKIAAITLTLWKKEERFDAEQLKTQAA

SEQ ID NO: 447094 - protein, 349 aa, unidentified
MKKNSKRDEWKQEEGLVIGVDLGDKESQVCALGADKEIRHEDRVSTTTPRLQGFFGALKPCLVVMEAGSHSPWVSRLVEGMGHQVVVADPRRLKLISQSDSKNDRADARILAQVAAGMPELLRVVKHRSAEAQKDLTVIRSRARLVEVRTKLWCSLRGLSKSLGHRLPRRVSWEELGEWAEILKPLWNALEDVRKRIEEYDEKVKELEKKYPAAVHLQQIGGVGTLISLTFVLTLDDHLRFKKSRQIGSYLGLRPRQRDSGEQQPQLRITKAGDRYLRSLLIQGAQYILGRGPDTDLKRWGLRLAARGGKNAKKRAVVAVARKLAVLMHRMWVDQSQYEPLRQTHSAAA

SEQ ID NO: 447095 - protein, 341 aa, unidentified
MSIITIGIDLAKNVFAVHGIDDNGKAVLVKPKVARKQLLPLVAQLPACVIGMEACSGAHHWARLFRQHGHTVKLMAPKFVTPYRMSGKRGKNDAADAAAICEAVTRPTMRFVPIKEEHQQIILCLHRTRQGFVEERTAVYNRLRGLIAEFGIVLPQKVANLRREITARLEDLPGYAKLCIGDLLAHADQLDTRIGEYDRAIAQAAREDARSKRLMERPGIGPISASALLASIGGGHDFKNGRQVAAWIGLTPGQYSSGGKARLGRITKAGDPYLRSLLVMGARAVLAGLGDKQDGFSRWARSLQERRGYWRAVVAIAAKNARLAWAVLKYGEDFRLNPSAA

SEQ ID NO: 447096 - protein, 351 aa, unidentified
MRNVTIAVDTAKNVFEVAISAAAGRISERRRMTRHQFERFWSTRERCRVVMEGCSGSHYWARLLIGLGFEVKLIPPHYVTPYRRRNKTDRADCEAILEADRCAGIHGITVKSEAQQAIMALHRVRSQWMATRTARINAMRGLLRELGVACALGAERFLTDLHPVLERNRERLPERIRRMVALLWEEVRELEGRIRSVEEELERVAKEEPVIRTLLQVPGIGVLTATALYASVGDIHDFKSGRHLASWLGLTPREKSSGERRRLGRITKQGDPYLRTLLIHGARSALLAAERARRAGRKLTHLQAWALERAGEGHTNRAAVALANKLARIAWAVWRHERSFDGDHALQLAAA

SEQ ID NO: 447097 - protein, 316 aa, unidentified
MTITPVVVGIDVAQAELVVAVRPTRDAWTVPNNEGGVADVVRRLRPLHPALVVLEATGGYERLVVATLAAAEFPLVVANPRQVRDFARATGELAKTDRVDAQTLALFGERLHPEPRPLPDAATEALDAVLTRRRQLGDMLTAERNRLAHASETVRGSLREHIRWLERRLSDLDRDLDQMIHASAVWRAKDNLLQSAPGVGPVVSRTLLGALPELGQLTHKQIAALAGVAPFARDSGTWRGQRHVRGGRAPVRRALYMAALVATRHNPIIKDFYQRLLAVGKPKKVALTACMRKLLTILNAMVRSNTVWRRTTAQTA

SEQ ID NO: 447098 - protein, 341 aa, unidentified
MSVIIGIDPHKRLHAAFAIDERESELARVEVRSGPRQVAQLVAWAAPFECRSWAIESAGGLGYLLAQQLLARGEHVVDVPATLSSRVRLLGSGKSTKNDTNDARAVAVAALRAPSLAQVRVEDHISVLRLLAKAQLDASRARSRACCRLHALVAELVPGGITKEIVVAQADQLLASLTPTSATQRQRLELAVDTLGEIRMLDERAKRHRARIVEAVTASGTGLTDIFGVGPIIAATLIGYTGDITRFPTAGHYAAYNGTAPVEFSSSGRTVHRLSRRGNRTLNHALHMIAVTQIRFAHSEGRVYYDRKLADGKTTREARRALKRQISDRVYRQLRLEAGNK

SEQ ID NO: 447099 - protein, 357 aa, unidentified
MVHQHTILDWLGQHVFIALDVHKRSWVVAIVTEQTDFKTFTQPPEVRLLVSYLHRHFPGATYHCVYEAGYCGYWICEQLRAHGIDCIVINPADVPTTDKEKKHKTNKVDARKLARSLRNGELVPLYLPSRVALEDRTLVRSRQMFVSKQTRSKNQIKALLSFYGITLPEDMTDRYWSRRYIAWLESLSLQSPSGTMTLKTLLEELAHLRKSILGTTRAICLLARTETYASNVAYLTTISGISTLVAMILLTEIITLDRFHSLDHLACFVGLVPGERSSGDERTMTGMTERKNRHLRWILTECAWVAIRYDESLALDFNTLCRRMPKNQAIVRIARKILNRVRFVLKHQQPCIVLKAA

SEQ ID NO: 447100 - protein, 359 aa, unidentified
MTDGSRATPMVTAGLDLGDKYSYLCLIDTDTGEIVEESRLCTTPEALRRRFGSEQQMRVAIEAGTHSPWASRVLEECGHQVLVANPRKTRLIYGQGRKTDKLDAEKLARLARVDPKLLSPLEHRGEASQAHLALIRSREVVVRSRAQLINHVRGTVKSFGARLPKCSTASFHKKVVACIPEELQPALEPLLETIASLSTRIHHYDRELEALAQEYYPETKLLQQVQGVGTLTALTFVLTLEDPGRFEESRQVGAYLGLVPGKAQSGERDPQKRISREGDEMTRRLLVGSAHYILGPFAQDCDLRRHGLKIARHTAAKNARKRAVVAVARKLSVLLHHLWISCEVYEPLYNARQLKSRAA

SEQ ID NO: 447101 - protein, 346 aa, unidentified
MNYCGLDIAGVSSYVYLANEKGRKRTCGAVDTTKAAIERRLKPFVREGLWVAIEAGNQTAWIYEVLVGMGAKVTVVNPTKVKAIAESRRKTDKIDARILCELLRLDALPHPVHMPGRETRALRGLLVARRQLVSARTKLCNVVRGMLRQEGTRLSAGALSSFTGWRRLLAQGYEQTHLPVVLATFFDSFVSLTDSIRDLERKLNDFERKDERVARLKTMPKVGRIAALTFVAAVDDVHRFSSSRKLVGYSGLAPTVRSSGERTEYGAISREGRRELRAVWVQIAHLVAMDTSRATQPLRRWFEKVAHKRGKKTAMVALARRLLVIAYRLLKDETVYDAARLKRKAA

SEQ ID NO: 447102 - protein, 344 aa, unidentified
MLIIGCDFHSRFQQLAIFDNLTGEITEKKLLHPAEAREFYCGLPGEVRVGMESGSPSQWFRKLLQECGHQLWIGDAARIRAAETRQQKTDRRDAELILKLLLEERFPRIWVPTEAERDLRQLLMDRHHRMRMRTKVKNQLQALALNQGVQKGRRLWSVEGMQQLRELPMMEHAGRRRDQLLKLLTDLDAQILALDVVVRREAEARAEVRQLLTHPGVGPQTALGMVLTVGEVSRFAGSKQLASYLGLTPREHSSGGKQRLGHISKQGSSFMRFLLVEAGQTAARLDDELKRAYRRLAARKGRAIAKVMVARRLAVRLYWMLRNRWTYTELARHAGKPGSSRGEQ

SEQ ID NO: 447103 - protein, 337 aa, unidentified
MGQVTTIGLDLGKRVLQVHGVDDVGRVAFQRKLRREEVHAFFAKLPPCLVGMEACATAHYWARELMSLRHEVRLIPPAYVKPYVTRHKNDAVDAAAICEAVTRPSMRTTPIKTPAQQAARVVHRTHELLSRQRVTLINAIRGHMAEFGIMAPAGPQHVGRLIERLADPVTPIPEAARAALNVLADQLVALSTQIDGLETKMRERCKEDDDAARLLTIPGVGPITASAILAGVPDIRGFRAGRDFAAWLGLVPRQNSSGGKERLGRITKMGDRSIRRLLVTGALSVVRWGRQKHGFSASWLGRLVARKPLKLAAVALANKMARIVWAILTRGETYRTA

SEQ ID NO: 447104 - protein, 405 aa, unidentified
MSDQVQRFFAIDLHKSYVVVGAVNGQQQVVFHPRRVPLAKLEGWAQKQLHLTDAVVLEAGPNAWFTHDLLQPLVGEVVVVHPYHVKLISASRVKTDRIDALVLARLLAVNILPAIWVPPPHVRELRALVSHRRRLVMQRTAAKNRLHSVLHRHNLTPLTGDLFSATSRKWWTSLPISHSEKLRARQDLSVVDHLNGLIAEVEAELGQLSQSEPWADPVPFLIQLPGIGLLSAMTILGAIGDITRFPTAKKLVGYSGLGASVHASGQTHRTGGITKQGRRELRSVMVESAWIAVRTHSHWRAEFEHLEKRTGKQKAIVAIARKLLVVVWNVLSRPAVDRRADVEGVARSLMTWGARHRLATGLGLSRAQFVRHELDRLGIGYDLGAFTYCGRTYTLPTPGSAGPGT

SEQ ID NO: 447105 - protein, 344 aa, unidentified
MAIVGGLDIHRRQITYDWIDTTTGETRRGQLSPATRLELRAWLAQFDGPQADFALEATTGWRFVAEELARAGIAAHLAEPADTRALRGPKRRAKTDRTDAHHLRELLRAGTLPESWMPPAHIADARTRVRLRRALVGERTGWYQRIHAILFHHGLPDRSQLLTTEGRAWLARAELPAVARQAVDLALRMIDHLEVELDLLDTQLARIARAQPGCQALMGRYGIGWLTAVAIWAEFGDVRRFANSRQAVRFTGLDITISESDGKRARGHLARQGSPVLRWALHEAAMCAARPSSPDHAYYLQVKQRLGGKRAALSVARKLAREAYHTLRALGDQALVPAEFPIAA

SEQ ID NO: 447106 - protein, 348 aa, unidentified
MLADEVDYVVGVDPHRDSHALAVVQVISGAVLFEAAVAASSDGYAHALTLVGQHAAGRRVFAVEGTGSFGAGLTRFLDARGERVLEVGRLRRERRSGGKTDALDAIRAARSVLAQHRPSTPRAGGQREALRALMAAREGAVNAKRAGLCQLRDLLVTTPEPLRSELRPLTRARLLQRLAATRPERRTDPELRGALLALRSVARRVLQLTSEERELAREIEAITRKLAPQLLAQPGVGPLAAAQLVLSWSHRGRISSEAAFARLAGCAPIPASSGQTVRYRLDRSGDRRLNRSLHMILVTRRRSHPATIAYIERRMQEGKTRREATRCLKRYLARNLYRLLEHGPPLAT

SEQ ID NO: 447107 - protein, 346 aa, unidentified
MRKVVKQVCGIDVAQKELVVSFGRIYDDLTPEIHAHKCFPNNAKGFTALLNWVKGLMEPAIAVGYVMEATGVYHEGLAYFLHGQGHHVSIVLPNKISNYARTLKIKTVTDKTASEAITRFGLERKLDNWTPPAPVFKKLRQLTRERDQLVQSRTVAKNQLHAEQSEAEPNAGTVARVKKQIAFLDKQEQEIKAEIAVLVNENEQVKKKVKLVSSIPGVAMWTAVTVLAETNGFELTRSKKQIASYAGLDVKEKQSGTSVKAKPRISKKGNKYLRKAMHMPALSAIRHNQRFKAIFARLVAKHGIKMKAAVAVQRKLLELIYTIFKTEKPYDREYLQKTREQQNATP

SEQ ID NO: 447108 - protein, 393 aa, unidentified
MERTTIAIDLAKSVFQVAVSSRHGSIDVERRLSRDRFLTVFAQQPPATVVAEACGSAHHWARQLQRLGHTVRLLPAHDVHRYVRRNKTDRMDAKALLEADRHEDIHAVPVKTVEAQAIASLHRLRSAWVATRTARLNGLRGLLREFGIGIPLGAHHVVPRVRELLVEPTPVPDLVRAALANACDEIAGLEANMKAVEHQLLTIGSTMSAVALLQTVPGIGWLTATALVALVSDIRRCRSGRHFASFLGLTPKEHSTALHRRLGAISKQGAVYLRMLLIHGARTVLWHARAKAHPTALQRWAVHTAGHRGPNVAAVAVANKLARIVWAVWARQRPYEAEPLPVGGESTGTRFSRELHRARSANGAPVRPARGKPDKAPGLSGRCSGWDPARIVP

SEQ ID NO: 447109 - protein, 402 aa, unidentified
MLLSRDASSGAAKLEVVQFSGALGMRPRVLHRGDKAMKTSITPIGTPVGVDVHKRRCKVVELDHGEIKVRKPIANTREEWRELLSELPPDAEIGLEVSTAGYFAMSVLEEAGWRERAHRVHTAGIDSNRRQKNDRLDAERLARKLAAHHVDPLPEAWFPPPEIRALRLRARQRCWLALLRTRIKNHLQSLLGMQGLLPPGSDPFGAAGRTWLDQQKLPLPLGESIPQIQRLLKVLEEELEISEKHLQAVEGQFPQLALLRTVPGIGAILAPVIWSEIGTIERFRSAKALANDTGLVASYYDSGEVQVSGPITRQGSRWLRWALVTAANVAIQHRNPFARRYHRLRRGKKPNVAKAAIAHSLARCVYGVLKHGCPYREDRWGRKVGALEQETQRSARSTKTAV

SEQ ID NO: 447110 - protein, 371 aa, unidentified
MGDEAVDGRGRVILGRQAVAQPGPPVRSAPPESAPLPEAETSHLQGGTRAGPHAEEAMMQATYLGIDVAKGFLDLSVRPTGQALRVANEPAALVAALGRVGAPAPTVLEASGGYERPAVRALQAAGLAVARVNPRQVRDFARATGQLAKTDRIDAALLARYAEAMRPAPTPPADPATERLAALVERRRQLVTMREAERNRRREAPAAVADDLAAHLAFLGARIAALDAQIRAAIAADAALGRRAALLRSAPGVGPVLAATLLADLPELGRASGKELAALVGVAPFARDSGRWRGRRQVWGGRAPVRAVLYMGALAAARHNPALRPFYGRLLAAGKPKKLALVACMRKLLVILGALVRHDTPFREDFHAHTP

SEQ ID NO: 447111 - protein, 508 aa, unidentified
MSIVAAPHQAHEWVKGPAGVQPNSNFFKKEKEVIRSVGIDFHQGRHRARCLDDGAQSCDSFSFQTTPDGLATLEERVFQDGANPIIVLEPAGLPWLMVAVYLHSRHPDCRLVKAKTQKVAALRRYLRGPVKSDRIDALTLAKMPFIDPEQLDEIYLPPAEIHALQRLTRQRKRLEDDVTGRKVRIGAIIDGYVPGIRRAFNNIWSSQARAFLKSRLNPFAVIRDGEGTLHTFLSKATVWGKWSRADTREIFLVCQSVASVCELSQTAGTVNEDFFLDLQDEIARELKLMEMEETESESLSHRITELYKKLHPSNNLGTIPGVGEHTAPIFLAVVGDPTRFPNQSAFANWEGVVPGARQSSSMEAKGLRMTKAGPSIMRMALYQAGDIGRRWDPQLAAMYYREMVNHGKNHKQAMGAVMSHLGARVLKVLKEDRPYEIRNAEGSLISKGDARRLILSEYQVSEDIRRERRRRNPVKAPRKDREMTTYRTNEAAKAPQPVEVMAISRKQV

SEQ ID NO: 447112 - protein, 338 aa, unidentified
MYYTGIDLHKFTSYLTTVDSTGNIVKQENLKNVDHNFVQYFKSIKGKHKATVESTMTWYWLNDLLTTMKIPLVLAHAKYVKAIAYAKVKTDKVDSHILAQLLRMDYIPEAHKITGEKRVLRDALRARLKIVQRHTSITNSMHLLLAKYNYSSPEELEGIASYQYEQLAEVESLLKEQMLDLEKQLYPSLIPNEDIQRLLWIPGIGKMNAFNILLEVDDINRFADVKNFFSYCRLVPSARNSAGKSIQRSSKDGNKYLKRVFTDAAIHAIQYYPVIRKYYNSLLRKKNKFVARTIIAKELARVAFYTMKYEKDYNSKFKGKDLQHTKSVQWPRITSPDA

SEQ ID NO: 447113 - protein, 347 aa, unidentified
MKNKYDYTGKKVYVGIDVHKKNYSVVCFCEGEIVKHWSTEAKPLLLAEQLKKYFAGAYIKSAYEAGFAGFVLHRKLTEAGINNIVVNAASIEISSRDRVKTDKRDAIKIAQQLSSGRLEAIRIPSEEEELARLLSRGRSRLINERVKIGHKIKSKLYQFGLIECDDERSMSLKWINELKENNFTYELKTIILSWVNVWLEINRQVEELDKRLEKQAEQQKSMEDMYRSVAGVGAVTSRILANELGNMQHFSSEKKLYSYTGLTPQEHSSGETRRLGHITRCGRSLIRKTLVEMAWRAIKIDRSLKEVFERISKKAGKKKAIIAIARKMTGKMRACFASGELYKIQAI

SEQ ID NO: 447114 - protein, 405 aa, unidentified
MNYTCGIDWASDHHDASIVNERGMEVKKLRIDDDLDGYRKLLKVLRELGGDIPIAIECKEHLLVSFLVSEGYVLYPINPKSAERYKDRYNVGGTKTDPIDAFSLADILRTDRHKHRPLAHSSEEVRKLQLLCMEYDKLLKDKNTLEYQFQDALRRYFPLALTLFSTNNCKSIYRLLAGYPTYSRLKAAGYEELRGFLLKIGYRLTPQIKKIYQKIQSSDYHHVDVFDEVFSHTAKALAGVLLVLIEQIDGIKKKMIRITKSHELGKVFYTLPGSGDINSAKLLALMGDNKELYSDASEIQAFGGVAPVIKSSGKKFRVIFRYACNKTHRDTLTWFAFCSLSYCPWAREFYDRKKKEGKGHYEACRLLAFKWVRIIFKLWKNGESYNTQHHLRNLEKFRERRLKIA

SEQ ID NO: 447115 - protein, 315 aa, unidentified
MERLLYVGIDVAKAHLDGAVLPTGERWRTPNDEVGIADVVTRLRDPLPTLVVLEATGGLEFPVVAALAAAGVPVAVVNPRQVRDFAKATGKLAKTDSIDAQVLAHFAQAVRPEPRPLPDAQAQALEALLVRRRQVVAMLTAEKNRLSRAHAPVRQRVQAHITYLEQELGHLDADLGNALHSSPLWREQDTLLQSVPGVGPVLSLTLLAALPELGTLDRRRISSLVGVAPLNRDSGTLRGKRTVWGGRATVRAVLYMGALVASRWNPVLRTFYRRLCAAGKPKKVALTACMRKLLTILNAILKHRTPWQPNHVLNS

SEQ ID NO: 447116 - protein, 453 aa, unidentified
MRKENLEEKKAQPLHQKRFAQGLPVLNPYAAGIDIGDSKYDAAIASNDGHEVREYATFTSDLKSMVKWLKEEGITTVAMESTGIYWLNLYLMLEEEGIDPFLVNARHVKNVTGRKRDDTDAIWLQKLHSCGLLQKSFQPEGAMRILREYVRQRKRLTQDRSDTVRRMQKALEMMNIKLHIVISDILGKTGMQMVQAILQGERNPNKLLELKDPRIKASEEDIRKSLEGIWKEEYLFMLQQAYDGYCFYQKQIKQCEGKIKEILLSQVAKVKDGDITGLGDERKKKLKNDLSFDVQKLLHIIVGVDLCRIDSVSEVTALELISEIGIDMTKWKSGKHFSAWLNLTPNTKITGGKIISSKMQKKKNQAGITLRMAASNMNKCKSQLGDYARKMRSRIGKKGAVVASAHKLSRIIYVMIKEQTEFDINVYTDSQKKWKEQRIKQLENQLKYLKKVA

SEQ ID NO: 447117 - protein, 422 aa, unidentified
MKLTWFVGIDWGSQKHQACVLDAAGKVLGEREFEHGGAGLSQMADWLLSFGAADESEVGVAVETPSGPVVESLMERGFVVHSINPKQLDRFRDRMSPAGAKDDRRDARVLASALRTDPHCLRQLEPTDPAIIELREWSRLDEDLTRERVRLANRMRQQLWRYYPQFLDAVDDDVAAPWVLDLWRRLPTPRAARRVREVTLTRVLKQHRIRRISASTLRDRLRAPAVKLAPGAAEAAVAHVRLVAERLALVNRQLDHAHRELGRLVDQLTGAAPADDPSASTEDEPSSQEPRDAAILLSLPGIGTKVLAALLAEGGDAVRRRDFGALRCLCGVAPVTRRSGKSMIVTRRLAAHNRLRDAAYHWARVAAHRDPASHDKYQSLRARGHGHARALRSVADRLLSVACAMLRDRDRFDPHRVRSATT

SEQ ID NO: 447118 - protein, 346 aa, unidentified
MMLIGCDYHPSWQQISWVDTVTGETQEKKLEHASGEAERFYRQLPAPALIGMESTGNCQWFVELAATLGHDLWIGDAAKIRACEVRAQKHDRRDAALILKLLLEGRFPRIWTPSGEEKDLRQLLIHRYKLVRIRAQVKNELQHLAMNQGVTKKRKLWSKAGEKVLRELPLAPWAGRRREDLFKVREMLNGQIDLLDQAVVEVAEKSEKARLLMTQPGVGPITSMAFVLTMGDVHRFQRGKQVASYLGLIPREYSSGEHQRYGSISKQGNRFMRMLLVEAAQCAVRYDPQMRSEYLHRCHRKVKGVAKVAAARKLAIRLYWMLRTNTGYPEVVRVESSSRVPLVSAS

SEQ ID NO: 447119 - protein, 372 aa, unidentified
MGNGITFVGLDAHKKGISVAMLVPGEMIPVQWEIVNEAGAVKRMVRKIEREAAGEVRFCYEAGSLGYALQRQITEAGSERVSCMVVAPSLIPRKPGERIKTDRRDARKLAELFRAGLLTEVQPPSEEDESVRDLCRGREDGKEDLTRCRHRLGKMLLRRGLIYIEGNAWTSKHHLWLRGLCFENEPAQVVFDDYLLAIEQLEERVKGLDEKIEGVSQKAPYAEPVGYLRCFRGIDTVTAMTIVSELHGFERFRSPRGLMAFLGLVPSEHTSGYDPRRGSITKMGNGHVRRALIETAWHYRHRPALGAPLRKRRKGQPAQVIALADKAQQRLCRRYHRLTERGMPAPKAVTAVARELTGFIWAVLSRDAHASV

SEQ ID NO: 447120 - protein, 339 aa, unidentified
MARYIGVDLHRNRFTVCVLAENGREYLSEHRLEQLPQFVRKLRPTDELAVEVTGNTRLFHNAVASHVAKVVVVNPTQFKLIRQSVKKTDPHDARTLAFYLSKDMLPEVRMKDALHAQLASLTQTRDTLVKQRTALKNKVNNILSAHGINLRKESLASDVALDRVLGMTFDAIVETELRVIVGQIRALNQSIAELEKTIKAEGAKLPGHKNLKSIKGIGDLGATVLLTAIGNINDFAHPGKLAAYFGIVPRVRNSNETEHSGRITKRGTKLGRTTLVQCALIAMRYSPYLAKFYHKVARRRSAGKAIIALARKFLSVIYHTLKNNWVFEDFPNFVIAGAA

SEQ ID NO: 447121 - protein, 387 aa, unidentified
MPQVNDLSRSLAAFDPISTLVVVVEMSKTSWLVSGVVPGVERQPLKKLEPDATALLRLIERWRIEAVRAGRPIRRIALAYEAGRDGFWLARWLIARGIEAHVIHSASVAVSRERKRAKTDRLDAAMLMRVFLGWLRGERGHCGMVAIPTMEEEDARRPNRERESLVNERSRIVNRMKSALARLGIRGFKPHLRKAPERLAGLRTAEGTGLPANIIEEFRRDMARLALVREQISSIEKTRAERLERAPDTGPHAMVRLLARVIGIGIETADMLVREILSRKLRDRRALARYAGLTGSPDESGLKSREKGLAKAGNARVRRGLIQLAWRFLMFQKDSALARWYRTRTEGPSGARKTTMIVALARKLLIALWRLVTTGEVPDGVELRPAA

SEQ ID NO: 447122 - protein, 418 aa, unidentified
MATIRPAKESTKFRHRLMKKLGKAPNLPIHIGLDVHKNSIHAAIYRDGAILADWRTSANSDALAEQLSPMLPFTKGIAYEAGPTGFSLARILQQRGFNVIVCAPAHTPRAGARQNKSDRIDAAKLAQFSAYGLLKAVTIPTEQEEQERLVLRHRNALADKLRRVKQQIKAEFLFTGAGEVASWNRKEVERLASAPCSEGQRFALDSLLREMALLEDEVKKTNGHIERIMSGRHAEAKAILESHPGIGPITAAIFALELFRPKRFRNGRAVARFLGLAPGLNQTGETDRPQPLLKTGQARLRAQLIEAAWRWIRLDPAARSMHGRLLHNTGNTKKAIAGMARRLAVRLWTMWTRAEMYDPAKAKFGETQDKDRRRVAERKARRELKEVAEKALSTAKAVGKAGTAGTAHATRNAKAAGA

SEQ ID NO: 447123 - protein, 423 aa, unidentified
MDVLYERVAGLDVHKATVVGCVRRTMAGKVERECRTFETTTAGLLALLEWLRESGCTHVAMEATGVYWKPVWNILSDGAFELILANAAHIKNVPGRKTDMNDAMWIADLVACGLLKPSFVPKERLQELRSLMRTRKQLVREQARHVQRIDKTLESANIKLGSVICEIMGVSGRRMIEAMISGVRDPHKLAALAHAQIKASPKELYDALHGRLTDHHRFLLQLHIGQYDALSAAIGRIDRQVDTAIAKLDEEATKSQASFRDLISLVCTIPGVSTLAATSILAEIGRDMSRFPSAGHLVAWAGLCPGQNESAGKRKRTRLRKGAPWLKTMLVQCAWAAKRKKDSYYKAQFNRLSSRRGPQKAICAVAASLLTAIYHMLKDGTEHHDLGAAHFDHRSVAAKAKRLVAQLAKHGYAAQLHPIPEAA

SEQ ID NO: 447124 - protein, 422 aa, unidentified
MKKIETKKLKFVNDKTLIATVDIGKGLNMGYARCPDHSEVKPFEFANNRAGFDKFWDCLEKARDAKSLDSIIVGFESTGAYGEPLQHFLKNNPVRLVQVNPMHTKRVKELQGNSPNKTDRKDPKIIADIIELGHSLTVVIPEGAAAELRRLTFARERANKRCTALYNQLQDLIFISFPEFSQVIKDVKTKTARYLLQTYPDPQDIIALGLENLGTVVKRVSRGKMKPAKAKGLFEAARTSAGITEGRFSVALEIQATLAAITSSDDFVSRLEKEMSRHLEDIPYSHLLLSMKGIGRVTVAGLIGEVGDFNSFDTQRELLKYAGFDLFEISSGKLRGSRRISKRGRPLLRKLLFFAALNTVRKGGVMHGHYQRHLKKGMKKIKALVAIARKLLGIIFALVRSKQEYQEDYQKIQAAATMPMAA

SEQ ID NO: 447125 - protein, 356 aa, unidentified
MEEYIAFDSHKRYTLAEREEVESGRAWQERIEHRPGAIREYLRSCRPGGAVAVEALGSWYWIVQEIEQAGFGALLVHPRKAKLMMGMLNKTDKLDVHGFNRLQRNRTLPTVWIAPGRLRDLRELTRTRMVMARQRARLKNRLGSALAKYGLAVEDWSDPYGVGARPTLEALLGRLPEQTAWTSRMLLEQLDFVQGQIVAHEQRLAACLEQTPAMRLQRTVPGFGPILSSVVVLEMGDPGRFPDAEHFASYAGTTPRVHASGDKRRYGKLRPDVNRYLKWAFVEAGNAIVRHHRSSPDRHVSRLYARLKLRKGGAKAVGALARHLAEATYHVQNGRQPYRDPALRRVRKEGLSASMP

SEQ ID NO: 447126 - protein, 435 aa, unidentified
MSNILFENLFISVGIDVGADFSWMSIALPNQTFVGKPFKILHSNIASLELAVSKIKEAEELYSLESRIFLESTGIYHYPLFCYLRDKGFNCFVINPIITKSSTNINIRKVHNDRFDSKKAALIGLKPDLKVSLMPSELALDLRNLSRAYYDLMVNRSAYVNKLQGELRMVFPQYLKIFSKVTTNTSLTLLENYTSPDAFLTASKEKIIDSIHSTARFGLTYASNKYNAIIQAAKDAQVFGHAVSTNFKRIRLYIRFIRQYDEEINSIMADMHELVNAYEGTDFVNQIHLIESYKGAGFLSAVSLMGEIGDFSAFKTPKQLFAYFGLDPAVKQSGNFEGSKINMSKRGSRIARRVIHTMAIVSISKNKDGSAKNPVIRDYYLKKCDSKPKMVAIGAVMHKVCNIVYAILRDEKEFQIITPEEHQKNYLKAKCDIAA

SEQ ID NO: 447127 - protein, 341 aa, unidentified
METTRHIGIDLHRNCFTACIRLENGRNYVTEWKLEQLPKFVAKLRPSDEIAVEVTGNTRLFHDAVAPHVRRVVAVNPNQFQVITHSVKKTDPNDARNLALYLAKDLLPEVRMKDKARAQIASLTQTRDTMVKLRTALKNKINNIFSAHGINLSKESLASEKGLKAVLETPFDALVELELKILVDQVRALNKSIAELEEIIGRESQKLEGHKNLTSIKGIGGLSAGILLSIIGDIRDFADEGKLAAYFGIVPQISNSNETQHSGRITKRGTKLGRTTLVQCALIAQRFSPYLKQFYEKKKSRGTGKAIIALARKFLGIIYRTLKNRWVFEDFPNFVLAEDTA

SEQ ID NO: 447128 - protein, 321 aa, unidentified
MAKRITICAGIDTGKRKLDVAIDGTSSQLQVENTAEGHKMLLEWLRRHKVKRIGIEASGGYEQAVVIELRRKRFVVVVFQPAQVRAYAKFHLQRAKNDRIDAALIGACTAAVKKIHPAPDPRLQPFAEHLTLIEQVGEDIKLYKNRLETCRDPRIQKLWKEEIARLAKRARGELKALVAAIREHRDLAQRLDLIYSVSGAGMPTAVEILVRMPEIGQLSREQAAALAGLAPYDDDSGEQVGARHIDGGRKRLRRALYTAALPASFRWNPQLIAFYQRLKAAGKEHKRCLIACARKLLIFVNTIVARGTPWQDQPPPAAATG

SEQ ID NO: 447129 - protein, 363 aa, unidentified
MKQIKDIEKRVTRYIGLDVHKDSTTAVVLDAQGKVLMQVTLRTEASVLVDFLRGLSGSLHLTFEEGTYSAWLYTVLSPWVEKLIVCNPRQNALLKEGNKSDPIDARKLAELLRLGSLVAVYHGSPGMRTLKELAASYAMLVSDGTRVRNRLKSLYRSRGIRCGGTQVYSPHHRRRWLEQLEVGARQRAKLLYQELDLLLQLRRPARRALLSESRKHPAQKILRTIPGLGPVRVARLLALLQTPHRFPNKRKLWGYGGLGLLTRGSAQYELRGGELVVATKGVRVRGLNPSHNAQLKDIFKGAALAAIQRPGPLREAYQRCLREGTEEHLARLTIARKIATLVLTLWKRGERFDAQRLRREQAA

SEQ ID NO: 447130 - protein, 333 aa, unidentified
MGYETLIRRAHVMTRKNTLKSLPTDTEFRVVGLDLAKSDVSVAAIPVDDNTPSLVDRMTYADLLDWAGKISPTLFAMEPCNGYSLLCLQLENLGHEIKVISGWTVSMWINTHLSGQKTDLNDAIALARLAVSDAELTPIRHKSITEIRIQTVQAVRQQLMSQRSKSIVSFKALAQQWGIPCAAGHRNLKKLRESIEAKVDLITRPVANAMLFLLDAVKSLDRQIGQLNQTLQELVMSDERGRLLQSVLGVGTQISARVITVVGNIERFNSPRSLVAYVGVAPRNFITGHKNLTKKKHGNCPDLSHKGQGKISHSRRSLPVYAILQRPTSGVPT

SEQ ID NO: 447131 - protein, 285 aa, unidentified
MTITTVGIDLAKNVFAVHCVDQNGKTVLVKPKVSRAALPELIASLPPCVIGMEACSGAHYWARVFRQYGHEPRLMAAKFVSPYRMAGKSGKNDAADAQAICEAVRRPHMRFVPVKDESQQAMQCLHRTRQGFIEEKTATYNRLRGLISEFGVIAPQSTDALRHIVSEQKNSLPLQVQQCVDDLLEHINRIEDNIAEYDRILSRMAKTDHRSQRLMELKGIGPTTACALVASIGNAHDFKNGRQLAAWLGLTPSQYSSGGKSKLGRITKAGDSYLRTLLVQGPVRF

SEQ ID NO: 447132 - protein, 412 aa, unidentified
MTATNQFAAHVGLDWADKKHDVCVQFKNGERVFHVIEHTAEALDVWLTELHQKVKGRIAIALELKKGPVVYALQKYPFITVFPVHALSLARYRQAFSPSGAKDDPQDAELALELMLRYPQKIKAIEPDNADIRLLQQLVEQRRQLVEDKRRFVNRLINTLKQYYPQPLEWFSHRGSLLLCELIMRWPSLQQLKRARHDTIRNFLNAKGGRAMALTEQRVVSIDNSIPLTTDPSVIEANALMATALATQIKVVSEIIKTYDERIETLFDSLPDAGLFKSLPGMGPCMGPRMLAALGDNRDRFNSAEEIQNYAGIAPVTERSGQKSWVHWRWQCAKFIRQTFVEWTAKTVNSSYWARLYYQGQREKGKSHQSAIRALAFKWIRIIYRCWKTRTRYDEAKYLLALEARKSPLLKP

SEQ ID NO: 447133 - protein, 360 aa, unidentified
MAKARTLVGLDVHATKIVAAVLDAETGELARFRMGCESDAAAAFCAALPGPVRATYEAGPTGYGLARELAKRGVACVVAAPSKIPRASGDRVKTDVRDAEHLVRLLLAGKLHPVRVPGDEEEALRDLVRAREGVRVDLMRCRHRLSKLLLRHGIRFDDGRAWTDRHRQWLATVSLKWPAAQSTLRDVQGAIDVLCHRRDELEREILALLPTSPWTVQAGRLRCLRGVDTLTAVGLCAEIGDFERFAKAEQLMSYVGLTPSENTTGEKRRLGAISKTGSGHARRLLVEAAWHYRKTPTIGKTLSDRQAGQPPEAIAIAWSAQRRLHRVWARLEARSKRRTIIAVAAARELSGFCWAITQTE

SEQ ID NO: 447134 - protein, 409 aa, unidentified
MSYTIAGIDVHKKLLVVVVADVSQPELTFECRRFGTGASELYNLGLWLCDRGVAEAVMESTAQYWKPVWLELEPHLRLHLAQAQSNRAPKGRKSDFGDAKRLLRRFLAGELSLSFVPDAEQRSWRTLTRARLQLVCERVQLQGQIESLLEDGRIKLSAVISDLLGASGRRILRALADGQTDANQLAQLGDERLRCGRAVLADALTGSTSAIHRKLLGQHLDRVQLIDRQIEELSRLSAQQMQPYQEAIMRLIELPGVGVEAAHQIIAEIGPRAAAFPSGRRLASWIGVCPGSNESAAENHSGRCAKGNRFMRRLLCQAAQAGVKKKGSHLQCLFRRLIVRLGYVKAIWAIAHRLCLIIWNVLHQGARFIEYGEAVNPKAVRRAIQHHLTALRRLGYTIPQEAAPPNPGV

SEQ ID NO: 447135 - protein, 453 aa, unidentified
MSVLRKVKIKTNVQLPPIHPHAAGVDIGAKQIQVAVPCDADPKPVRTFTTFTDDLYALRDWLKACGVRTVAMESTGVYWIPLFQILEAAGLEVCLVNARHCKNLPGRKTDVSDCQWLQYLHSVGLLRASFRPPEAICAVRAFLRHRANLVRYASQQVMQLHKALTQMNVQIHNVISDVVGVTGLAILDAVLAGERDGQKLAALKDRRIKASADTIARSLRGDWRPEHLFALRQALATWRHYQQLITECDAATAQTLAGFESRVDVQANPPPPSTLRHKTPHANEPRFEARTELYRITGVELTQVPGFQVNTALTLFGELGPDFVMRFPTAKCFASWLGLCPDNRITGGRVISVKTRDVKSRAAQALRVAAQALWQSKTYLGDCFRRWKARLGTPKAITAMAHKLARILWHLLKYRKAYDPAVWTVAEEKLRRRKLKRLEQNAAAFGFKLVPTT

SEQ ID NO: 447136 - protein, 391 aa, unidentified
MSVYVGIDVAKRQHRIAVLDASGELLQKPFSITNDMAGMNQLQDTLSPWSDHVEIGLEATGHYWLALFENLTRAGYTVHVLNPLQVNAYQRSGIRKRKNDTVDAIWIADFVRIGGARHTTDPTMMPIYMQLRQLSRFRFSLVEQIGDAKRRILSLLDRAFPEYESIFSSVFLLSSRQLLTEAVTAQEFADFDLDELTQILKTASRGRLGRAKAEQLQQAAKQSIGVTFLADACRIQMGCLIAQLAFLIQQVSEIDDALTELVDTLPDQYLTTIPGIGSVTAASILGEIGDIQRFNTLKQLVAYAGIDPAVYQSGQFEAKQTRMSKRGSPYLRYSLWMAATVARMHDPELKAYYQKRRNQGKAHGTVTGALCRKLLARIFVILRDQRPYEPC

SEQ ID NO: 447137 - protein, 345 aa, unidentified
MLGQSQEKKDVWVGVDVCKGTFDAAVLLEKEGLDLRQIPVKNFSRTKQGTQEFFEWMVGLIQEDADSHVVMESTGKYSIELAAWIIEICPNIKVSIINPAQAKAFIKSLGLRNKTDKIDARALAVYARERNPREYEPLPPALAELQSLSRERDALLQILVAEKLRAKEQSASKVVSMVQKSVIRNLEKQIKKIEEAMENIVMQNEKLHDDVQILRTTPGVGKITAMVVLAELGDLRRFTRSRQLSAFAGLSPRLISSGVSVKRQTRLCKQGNKRIRSALYMSALSIINKNNHFNEWYKSLVDRGKNKRLAMGAVMRKMLVTMRAILISGQPFSNTYQHVKHNTCG

SEQ ID NO: 447138 - protein, 413 aa, unidentified
MVRRVIGLDIHRTFAEAVAWEDGRLVWLGRVDMTRTGLEGFGNGLRGDDEVVVEATGNAMAVVRVLSPFVARVIIANPLQVKAIAHAHVKTDKIDAGVLASLHAAGFLPEVWTPDADTERLRRLVARRNQVVRHRTRIKNEVHSILHAHLIPRCPHADLFNRRGRDWLARQPLPADEKAAIDRHVRELDRLAEDLAVLDREVAQGALGNPSIERLITITGVNVTVAAGLVAAIGDIRRFASPQKLVSYIGLNPRVRQSGLGLAQHGRISKVGRSHARAMLVEAAWAAAKAPGPLHAFFVRIRARRGHQVAAVAVARKLAVLCWHLLTKEADYLWARPALVAMKKRAMEIQAGQPAQKGSRRGPAYAYNVKELRNREMLVATHAERAYEHFVGQWRPRGPGKGVRERLNPARHE

SEQ ID NO: 447139 - protein, 338 aa, unidentified
MKAVCGLDVHKDSIYLCILHPDGELFEQVFGVLTFQLHEMCKLLKKHHVSEVSMESTSIYWIPIWRVLSPHFTLRLVNPYFIKQLPGHKSDVKDAQWIAECTMKELVNGSFVPPEIILQLRQYDRRIFDLNEEIVRKESKVDAVLQRCNIRLSNYVSNIECKSYRTVVRRLSEGVTDPQELIKEIHGRIINKHGRETKLASMEGVVSQAEIDVLRQLREEIDIAESHKKECQDKMSEICQKYFPEELRRLQTIPGIKERAATSLIAEIGTDMSKFETANHLAAWSGLRPRNDESNKKVKSRKTTHGNSYLRRTPSYNVHGLPVGRKTVSLVGSPITRL

SEQ ID NO: 447140 - protein, 334 aa, unidentified
MGTPVSVGIDVAKATLSVSICDHDGHEQALAIRNTDTDITTKVLPYLRHYSGKVVMESTGHYHWTPALVLREAGIDIRIVNPLLAKQYTSGTIRKVKTDPADARGLARMATVCDNLPETFTVSRARLIIRKKLATISTMGRHLQALKANLASLREGQVLLDEVDTPVVAELAESIRQLGISLKHLEVECVQLTESDEDSLEIMKRLETIPGVSLFCAALATNWFDINTATSAKSFIGYAGLDISSRESGTWKGHCRLTKRGNPFLRKRLYCAAWGAVMNYPEYRAYYDKLKAGGRGHKEAVVIIARKLVRTMYCLLRDGVSYDSAKVSFPNRII

SEQ ID NO: 447141 - protein, 337 aa, unidentified
MDITTIGIDLAKSVFQLHGIDANENVVLQKTLRRGRVLAFLTKIPPCLIGMEACATAHYWAREITSLGHKVRLIPPAYVKPYVKRQKNDAADAEAICEAVTRPNMHFVPVKTTEQQGVLVLHRSRDLLMRQRTMLLNAVRAHLSEFGYIAAQGPQKTLDLLRRLEEGDGIELPDTVITALLSLGEQLSSLQRAIRGIEKRLLIWHRQNTASQRLETIPGIGLITATALAASVPDPAVFKSARQFSAWLGLVPKQNSSGGKTRLGRVSKMGNGYLRKLLVVGATSVTRRAANNETRTGAWVRSLLERKPTRLVTVAIANKTARTAWALLTKEEVYKAS

SEQ ID NO: 447142 - protein, 351 aa, unidentified
MKILALDLGKYKTVGCEYDALSGAHRFKMSATTPTALAQLVREVKPERVVIEVCNIAGWVCDLLRGMGVAVQVANPNEDAWRWRKVKKKNDRCDALKVAQLSAVNQLRTVHIPRIEVRQWRALIAFRQQLVRRRGKVKNHIRDLLVSEGQILPRGAKCWTQVGWAHLAGLAKDFSELGPNELWRGQLAIELRQLRELQSEIAQVEEKLDAIAKAEPRVALLRTIPGVGPRLSEAIVALLDQPERFHKAGEVSAYVGMVPKELDSGETRRRGRITKHGSRLVRCLLVEVAWAGMRYNPWVRETFQRLSGGKKSRKKIAIVAVGRQLLVRCWAMLRNGTSWRQPVSTYCLAQS

SEQ ID NO: 447143 - protein, 349 aa, unidentified
MSMVCGLDLHRQQITFDAMETQSGEAWRGRVWQPDRERFRRWLRHDVARKANGQPVAMAVEGCTGWRYVVEEIMAAGFEAHLAEPADTQAARGRKRHAKTDRSDSRLLRELLQSGDLPESWIPPTAVLEWRERVRLYKSLVDQRAVWTQRIHAELFQHGVAVPETAIRSASTRAWLADGDVELSPAGRQRIRVGYAMLDGSDTEAQPLKRDLQRFGHRQPACRALVDANYGIGGLIAVAVWSELGDCRRFSRSEQVVRHTGLDVTVDASDRRRASGYLSRQGPPTLRWALFEAAMNASHRRSPDHGYYSAVKDRHDGKLAAIAVARQFARRCYHILRNLDPDVVYAMPA

SEQ ID NO: 447144 - protein, 428 aa, unidentified
MNQEDRSRLEEFRQFRKEVRGSSEYLLVGIDVAKDKHHAFFGTATGKTLFRRLVFENSLEGFRKLLAQAEAMRDQNGLKRMVFGMEPTANYHKPLGEHLIRCGHLVVLVSGVGAYENRKTLDGRWDTNDTRDAANVADLVSQGKCLFYEFPVGPLQDLRNLLSLKRRFKRVEHGYRVRIRNHLLAKYFPELDRYYEQSESTALAIVRWCLDPSEIVSLEYKQFAERVSSTRWRYSQEKRLQAIWKLAVDSVGCEAGPVVEFEAKVMVEGLKQIRESIRQIEERIQEVCSLFPEYECLLSIPGFGRDVSSKVLGAIGNPSRFQNGRQVLKLSGFDLSAKRSGKASESVIPVISRRGKADLRFALYQAALIASVRNPDFIRYYTDKLRGREREPGIKIKMRVKLAAKLLLIAWALMKKKEPFNPDYLGTE

SEQ ID NO: 447145 - protein, 319 aa, unidentified
MESPQVSFKQVVSRGCGLDVHKKVVVATIDGEGIKKQTREFGTVTSSLKELRDWLLEYGVTHVVMESTGVFWKPVYNVLEPAGLTVWIVNAAHVKYVPGHKTDKQDSAWLCKLLLAGLLKPSYIPAKEQRELRDLTRYRTTLIQSNASNKNRIIRILEDANIKLSSVLSSTSGAVGTKLIDKLCEGKEITMQDIEDVYHKKLEASKEEIYEACQGFITEHHVYMLQIIRQEIAATLQIIEKLNQRIKTVLSPYENALELLKKVPGISSKSVEDLVAEIGLDMSVFSTENHLSSWAGMAPGNNESAGKKKADEQLRETSK

SEQ ID NO: 447146 - protein, 424 aa, unidentified
MSKKKSRVAGLEALYARVCGLDVHKKVIVACVRILDAKDGTVQSTLRQFGAMTADLKELRQWLAEHKVTHVAMESTGIYWQPVFNLLEGHFKTWVVNAQHIKKVPGRKTDVKDAEWIAQLLQCGLLRPSFVPERQQRELRDLTRQQTKLVQQRNAVDNRIQKVLETANIKLGSVASDVMGVSGRKMIEALIGGEKDVTVLAELAQRKLRGKIPELQRALEGEMTEHHRFLLSRLLGQYDFLEKEIAGVSERLGAVAPPSFRAAVEQLDAIAGVGERGGRALLAETGIDMSRFPSHKHLASWAGQCPGNHESAGKRRSGKTPAANRHLDAVLTEMAHAAVRTKNSYFKAQYHHLAGRRGKKRAIGAVKHSLLVTVYFMLRDNKPYTDLGVDYFDKLNPQQRIRYHVRKLQQLGQEVELSPMAVAA

SEQ ID NO: 447147 - protein, 346 aa, unidentified
MKSTIIAVDLAKSVFQIAVSQHPGKVAESHRLPRSKFLRFFAERKPAVVLLEACGTAHYWARQLAGLGHEVLLLPPLAIRPYVSRNKTDRADAKALLEAHRNEEIHPVPVKSVAQQGLASLHRLRSAWVADRTARINLLRGLLREFGFLLPVGAARVVPQAWVLLDEAQCGLPDPLRLALAEACLEIRELEARIKTVEKQLKTLAAEIPVIERLCSIPGIGLLTATALVAFVGNVERFATSRHFASYLGLTPREHSTGLKRRLGKISKCGDVYLRSLLIHGARSVLLAAKRSKQPDGLRAWALQVEQHRGHNKATVALANKMARIAWAVWRHETSFESRPLSALAA

SEQ ID NO: 447148 - protein, 411 aa, unidentified
MGSGDRTRLLRNVPSGSREKGGSYLISVGIDVAKRTHEACFMDAEGQEMGRPLRFPNTAGGVATLSDRLRRLEQPVTIALEATGHYWLALHERLTREGFPVQVVNPIQTDAYRRTTVRKVKSDRRDSWIIADFHRIGRVRPGYVPDATTIQLRELTRFRLKLARQVGDAKRKALTILDRVFPEYERLFSDVFIVTSRQLLRTATTAEDFAGFDLEELAALLRRSSRGRFGREKAQVIQMAARNSLGLSSLGPVASLELRWLLDQVEFLVKQIAQVEAAIEELMATQEQYLTTIKGISTVLAATILAEIGDIHRFNRLESLVAYAGIDPAVYSSGEFTGSQAHISKRGSPYLRRALWLAATSARRFNPDLKEYFERKTTAGKPYGIVMSAVSRKLLGRIYVVLKENRPYEVR

SEQ ID NO: 447149 - protein, 351 aa, unidentified
MENQAYFVGIDLHKELIQLCVLDARGEKITEQRFTGGTLGQGHAVVKFLGQWKDGGRYAVEALGMNRWMVNAMREQGMDVIVVDAVKLNLRMLGKKTDRRDAYEIARRLWLGDIDRNAKTYYPREEEYGWRKLLRTRHKLVQIRQQLVNQVRGLLNAYRVASPKGELTSKRNLEQLSRIELSGKLLTDCLRGLEQTLRSVQGSIDALTLRIEEEASNEKVSSLHENLEGVGPQTALTIVCELGDVNRFTSTRAVASYVGLAPRVANSADKAHHGKITKRGNSELRWILSEWAVRLMAKNSLVQRWAEPLLRRMHKNKVRIALARRLLIGVYFMLRRGELFSLERCLATRAA

SEQ ID NO: 447150 - protein, 452 aa, unidentified
MAKRSKKRCEKLPILHPYAAGIDVGASELFVAVSADRDPQPVRSFPTFTRDLNALADWLQQCGIRSVAMESTSVYWIPVYQILESRGLEVCLVNAQHVKNVPGRKTDVSDCQWLQYLHSVGLLRASFRPPGFICAIRSLWRHRSSLIQMAAEHVLHMQKALDQMNLQIHRVLNDITGMSGLRILDAILAGERDPVTLARLCHGGVKSSEDTIAKSLEGDYRPEHLFALRQSLAAFHYYQQLVVEVDQEIQRQLGSLETAITAEPTVPKRTKASAYQRRRYEPKTFDLRGELYRIFGVDLTNVPGISAITAQTILCEIGTDVSRFRNASAFASWLGLCPENKISGGKVLYTKSRRVRSRVATALRMAANSLHHAKDYLGEFFRRITRKLGKPQAITATAHKLARIVYHLLSTREAYNESVFHRCDEEAIKRAQYRLRKQAAQLGFQVLPVENS

SEQ ID NO: 447151 - protein, 446 aa, unidentified
MQIVYARCAGLDVHKKTVVVCARLVSTDGTLTTHIRTFGSTTAELLKLVTWLLALEVTHIAMESTGEFWKPVYNLLEGSFTVLVVNAADIKYVPGRKTDVKDAEWIAELLAHGLLRPSFIPPAPLPALRDLTRQRTHLREERASVVNRMQKVLEWANIKLTSVVTDITGVSARAMLQALVDGQTDVSALAQLAKGRLRRKLAELEQALRGTLEPHHAFMISQHLALLDVFDEQISAFDTRIQTAIDGTRSDPPPADGADESAQRLSVRATDATTPSAPDGAWAAQAILDAIPGIGLRVAETILAELGTDMSRFPDAEHASSWAGLAPGQHESASKRKSTRIRDGNKYLRSALIQAAWAAVKQPDTFLAAFYRRLAARRGKKKAIVALAHKLLVIIYTLLKTGQVYHERGAAALDERQKERIVHRLERRIAQLGYNVHLEPITAAAS

SEQ ID NO: 447152 - protein, 326 aa, unidentified
MHTIGIDVSKAKLHCSLLTNPGLRRSRNKAAANNPAGFSALLDWACRHGQCEAAELHFIMEATGVYHEALAEFLVEAGCRVSVANPFQVKRFAESHGFKTKNDRHDGLILALFGHERQLAAWTPPPPEVRHLKALLNRLAALETDIRRELNRLEKAQVGRAPAQVMDSLTKSLAFLNKEKDRLLKEINTHFGNHPKLREERDLLLSIPGVGDKLATQLLALFASKNFSKAPEVAAFLGLVPVEKQSGTSVLARPRLSKAGNSKLRKALYMPAIVATKCNPDVQALYERLIRAGKTKMAAVGAAMRKLVHIAFGVYKNHTPYQPQNP

SEQ ID NO: 447153 - protein, 384 aa, unidentified
MTQETTRSGQNNISGSTLFLAFELGTSDWKLAFSIGLGQKPRKRTMDAGNLERLQSEIAAAKKRFRLAETTPVLSCYEAGRDGFWLHRYMVQSGIENLVVDSSSIEVNRKKRRAKSDGLDADSLLRLLIRYDSGERKVWSVVQAPSPEEEDRRQLHRELRTLKKEKTRTTNRIKGLLAGQGIRLKAPLDISDERLDGMRLWDGSGLRPGLKSRLKREWEQVLFLKRQIAVLQAERRCALRKSEEPDMEKIRQLSMLRGIGENGSWVFVREFFGWRKFHNRREVGSLAGLTPTPYQSGRTMREQGVSKAGNRHVRGGAIELAWCWVRWQPESKLTRWFEACFARGGSRGGGVEIVAVARRLLIDRRRFRETGVLPEGATMKADEM

SEQ ID NO: 447154 - protein, 339 aa, unidentified
MSQVSDLSRSLVPFDQNITLTVVVELSEASWLVAGLIPGVDRQPVKKQEPEPVALLRLLERWRVEAVRAGRTIGRIALAFEAGRDGFWLARWLQARDIEVHVVHSTSVAVSREHRRAKTDRLDTAMLMRVFLGWLRGERGHCRMVAIPTLEQEDAKRPSRERESLVGERTRIVNRMKAALARLGIRGFKPTLRKAPQRLDALRTPEEVSIPPNTLDEIRRDMVRLAVVREQIDVIERARLARLEQAPAAGPHAMVRLLARVIGVGLETADMLVQEVLSRNLRDRRAVARYVGLTGSPDESGRRRREKGLAKAGNARVRRGLIQLAWRFLRFQRDSTLAQ

SEQ ID NO: 447155 - protein, 337 aa, unidentified
MNYCGIDLHSNNCLIVVIDDHDKVLLEKRVPNDLAGILKLLAPYRHNLAGVVVESTYNWYWLVDGLMEAGYEVKLANPSAIKKYEGLKHSGDEADARYLAHLLRLGILPTGSILPPELRATRDLARKRMQLVRSRTLHILAAENITAREYGSRISSNQIKQLSAEDVDDMPLTDDVKYALKANVTVVKALSEQIEVIEKRIQQQVISRAEYKLLHSVPGIGKTLAPVILLETGPIERFKEVGNFVSYARCVDSEHSSNGKKKGEGNTKNGNKYLAWAFIEAANFARRYNDQARRFYERKKAKTNTAVATKALAHKLARACYHIMKDGKPFEVGRCFA

SEQ ID NO: 447156 - protein, 393 aa, unidentified
MSMAELRVALDIGSKKHRVGIGSADGRLLEEFDITHDKEGFEQFFNRVSVFEQRFALPVVVAMEGLGGWARPLDRMIQQRGYELLNVNNVKLARFKEIFAAPAKTDKIDTRKILELMHMREVLPLAKRILHPVGQTPVENEQLKRFTRRRRQLIDERTRVSNRLGSDLQAVSPGLLEITGDVDNLWFLNFLSAREDLSKLAGMKRSSLLKIAGVGKGYAARIALWQSGATFADETEWVSEMIVSDARRILELIREIQALEARIETIAATSSMATRLRTITGFGPICSATLAGEIGNMERFGGEASLALYVGMTRLDNSSGQYTGTKNTRQVNTHARAAMMTAAARHIDYTPESKIYYDRKRAEGKSYNQAVRLGPSPGSRHMVDDQVRTRLRS

SEQ ID NO: 447157 - protein, 340 aa, unidentified
MKSKFPTDKYFRQCIGIDVSKNKFTACMCMLSWGCPAQCTGAIDFSNDKTGFNQLVKWARKEAEKSHPILFLMEPTGTYYEELAYHLHKLSFTVYVIPTNRVHAFFKEEGIKTKTDSMDAYGLALMGSSKPHLKEWNPPCPTYMTIRQLTRLEVQFKDIRTKLYNQKEALSHLYSPSPEAVRQINALIRSVDLRINKTNESIESLVANTPEIKEKLGYIQSIKGLGFLGAITILAETSGFANISSRKQLASFAGLDVVAKDSGKSTPARHISKVGNTHLRRMVYMCSLSAAVYNPQMRALYSRISQHSPSKVARVAVMRKLLLLAYTLCKTKNMYDPDRK

SEQ ID NO: 447158 - protein, 356 aa, unidentified
MKQVKTLSFAGQDIYCGIDVHKKDWSVCIRDDERELRSFSQPPQPAVLTDFLGRNYPHANFHAVYEAGFCGYWIQQALSHQGIDCIVTHAADVPTSDKDRRQKTDAVDCRKLAKELSEGSLKGIYIPSQQIIEDRSLVRGREQLVQDQTRYKNRILSWLHFFGIIIPEGYKKSTHFSTRFISWLEQLQLNESTKLALQVKLGGLQCIRQQLLLANRNLRKLALSDRYQKQVELLRSIPGIGITNAMIFLTELDNITRFETFDHLCSYAGLKPDIYSSSDTIIIKGITHRCNSLVRESLVESAWKAVAKDPALLMAYKQYKKRMNYNNAIIRITKKLLSRIRYVLLHQTCYVTGVVG

SEQ ID NO: 447159 - protein, 374 aa, unidentified
MRNHSEVFVAFDTSKLRNAVAIAEAGRTGEVRFLGEIDNTPAATAKLVKKLAAKYERLTFCYEAGPTGYGLHRQITELGHECMVCAPSLIPRKPGDRVKTNRRDAVSLVKLLRAGELTAVWVPDRHHEAMRDLTRAREAAMMDLRRKRQQVSAFLLRQGLHYCGKNTWSKPHMNWLASQKLEFLEQRLAFEEMMLAVRQAQERLVRLEQAIQAAVPDWSLSKAVTALMAMRGIDLIAATTFLAEIGDLWRFQTPRELMGYLGLAPSEASTGDKIKRGPITKAGNRRARRMLVECAWSYQHPPRVGLAKQAKVAAAPSAVGEIAWKAQCRLNKRYRALTRRGKLKTVAVTAVARELAGFIWAISREIAPAFASAR

SEQ ID NO: 447160 - protein, 343 aa, unidentified
MYFIGLDVHKKTISYCVKDAAGRVHQEGKIGSTRRELDGWIRTMPQPRTIAMEATIFTGWIYDHLLPHAERLKVAHPLMLRAIAASKKKNDRIDAGKIADCVRCDFLPECHMASTEIRDRRRTLRYRNLVIKQMVQMKNRISGLLMETGVNYNKQRLHKVGYFAELMTTNKEVHESIRPLLKLSRDMISRSQKLDYALVSSLQRDPVLKERLRRLRTVPGVGPITALTWALEIGDYTRFPSIKQAISYCGLCGDEKSSAEKVMRMPISKQRNKHIQRVLIEAAKLAPSESPELALTHARELEKGNRNRATLAVARKMVCYMLAVERRQQDFVPAEEFSRSIAV

SEQ ID NO: 447161 - protein, 336 aa, unidentified
MQHYCGIDLHSNNHVVVIIDEEDKRVFEKRLSNDLSETLKVLQPYQNTLCGIAVESTFNWYWLVDGLQAHGYEVKLVNTSAVVQYDGLKYSGDHHDAYHLAHLMRLGILPTGYIYPKEQRAVRDLLRRRLSLVRMASAQLIGVQSQLWRSTGIRIPSDTLRRRDFVVPLEENHTRQAIESGLVVYQAIQREIDTLEQSAYQAVKLSKAFEILQTVRGIGKILGLTIMLEIGDIHRFASAGDFASYCRCVDSTRTSNGKKKGNGNAKAGNKYLSWAFSEAAHFAVRFEPLAQRFYERKKAKTNGIIAIRAIARKLARACWMMLKHQQPYEAKLMFPG

SEQ ID NO: 447162 - protein, 365 aa, unidentified
MDTTVSDFMKGRYNLMIYVGIDIAKLNHFAAAVSSDGEILIEPFKFTNDYDGFYLLLSKLAPLDQNSIIIGLESTAHYGDNLVRFLISKDFKVCVLNPIQTSFMRKNNVRKTKTDKVDTFVIAKTLMMQDSLRFLTLEDLDYLELKELGRFRQKLVKQRTRLKIQLTSYVDQVFPELQYFFKSGLHQHSVYALLKEAPTPNAIASMHMTHLAHILEVASHGHFGKEKARELRVLAQKSVGVNDSSLSIQITHTIEQIELLDSQLFHTELEMANLVTCLHSVIMTIPGIGFINGGMILGEIGDIHHFSEPKKLLAFAGLDPSVHQSGNFQAQRTRMSKRGSRVLRYALINAAHNVVKKQRYFQGLL

SEQ ID NO: 447163 - protein, 338 aa, unidentified
MSTIKVIGIDLGKSSFHLVAHDYSGRELFRKHLSRAKLIAFLAQTPATIIAMESCGGSHWLARKCRSFGHEVKLIPPQYVKPYVKTNKNDYIDADAIAEASTRPSMRFVGVKTETAQVISVIQRIRSSYVKERTACMSRIGAILLEFGMSFPKGHSKMKVLFQWLADNKEPIPPMLMQELIEHHEYYLQLNERIAGQDKKLKQLVEQSEDAQLLKSIPGVGDLTASQCLADISDAAYFKNGRQLAAWIGLVPHQYSTGGKTTLLGISKRGNKALRTLFIHGARSILSRPEVAVAVFGNWILELRARKPFNVAVVALASKLVRIAWSVLSTKQAFEVRV

SEQ ID NO: 447164 - protein, 334 aa, unidentified
MENIALIGIDLGKNSFHIHCQDRRGKAVYRKKFTRSKLIEFLATCPATTIAMEACGGSHFMARKLEELGHFPKLISPQFVRPFVKSNKNDFVDAEAICEAASRPSMRFVQPRTESQQAMRALHRVRESLVQDKVKTTNQMHAFLLEFGISVPRGSAVISRLSTILEDNNLPLYLSQLLLKLQQHYHYLVEQIKELEFQLKRKLDEDEVGQRLLSIPCVGTLTASTISTEIGDGKQYASSRDFAAATGLVPRQYSTGGRTTLLGISKRGNKKIRTLLVQCARVFIQKLEHQSGRLANWVRELLCRKSNFVVTCALANKLARIAWALTTRQQTYEA

SEQ ID NO: 447165 - protein, 360 aa, unidentified
MKVLKVNLGIDAAKDNCECNLSKLTDELLVKIIAAKIFLNSEHGLEELVKWLIKNCPAECKKVHVVIEASGVYHERFALGLQQAGYCVSVVLPNKAKKYMESLGLKSKNDRIDAKGLAQMGCEQNLEEWTPLSPFYHELRTYTRLHEDIQQKKTDTTNQLHALKHSAVQMKDAIKVMERLVKLFDKELDNTKKLIDHHIAGNAEVKERMDKVCDIKGVGTLSAATVVAEMNGFDLIENIPQLISVNGYDVVQDQSGKRVGRTKISKKGNAHVRRILHMPALNMKTYEVGTMPALFDRTFDRHGIKMKSYVALQRKLLILIYTLWKKNKAFDKDYEKNKSARVKEAEASSRLRLEETGKAA

SEQ ID NO: 447166 - protein, 455 aa, unidentified
MPKRTTGDQPEFRAVNISAAAIDIGSKMHMAAVNPDCADMPVRAFGTFTKDLHDLADWFKACGVTSVAMESTGVYWIPAYEILEQRGFEVFLVNARYAKNVPGRKTDVSDAAWLRQLHSYGLLRGSFRPDAEIATLRAYLRHRERLVEYAAAHIQHMQKALMEMNLQLHHVVSDITGATGMRIIRAIVAGERNPDNLATYRDVRCHSSLETIRAALVGNDRQEHVFALSQSLELYDVYQEKMLDCDRKLEALIAALGNKGAKPVGKLSKPRIKTKQVNTPAFDVRTALYGVLGVDLTEIHGLGPSLALKLIGECGTDLRAWPSAKHFTSWLCLAPGNKISGGKVLSSRPRRSSSRVAALLRLAATTVGRSETALGAFYRRLSLRAGKSKAVTATARKIAVLFYNTLRHGMSYRDPGADQYEQQYRIRVLANLQRRAKSLGFVLQAIPGDPNPAVS

SEQ ID NO: 447167 - protein, 393 aa, unidentified
MYLVGIDIGKLKHSFCLLEKETGEILVEPVFFKNNRDGFNALLSSFKHLPQKDILIGMEDTGHYNLALLKFLLDRNYQVALINPVATNLTRKMQGGISKNDKLDTLTICDVLSSSQRVKSYRISKYSSFDLYEQKLLTREHHNLKEEENQLSNRLQKCIDVVFPEFNSLFKSKYGIVYMNVLKEFGSADAIAHADIRTLRKCFDTGRGKHISLTAEELKEAARNSIGFPSSSEATQIKHLVARIELIKEQIAEIDKKIEEFSIQNNSPILSIPGISHFSGTSILAELGDIHNYSKPSQIIKFAGVAPLTYESSQFTAQHTAITKKGCKYLRKTLYQIITPVIQYNPVFRKFYLLKIAQGKGHRCAQGHCVRKLMRVIYHLLSTGTQFDPALLR

SEQ ID NO: 447168 - protein, 325 aa, unidentified
MEFHCGIDVGKHKLQACLIWIKGKRRNKSVANTPAGRRTLYQWLERQLQGRLDTLQAILEPTAHYHEALAEELVELGVRVATPNPKQVKKFAEGLGFESKADRQDAFVLARMGESRELAAYTPPAPEVKALRALLARLEAVEKDAQRESNRLEHALTAQAPQDVIDSIRNSLAFLEAERRRLERMIDEHIDRHPPLKGDRELLESIRGISAKSSREMLSIIHRHPFDRAKQVASYVGVHPKVFESGTSKELPPCMSKMGSGRVRAKLYMAAVSAIQHNPDVRAFYQRLRSRGKAKMAALGAAMRKLVHICFGVIKNQTPYTPQIA

SEQ ID NO: 447169 - protein, 364 aa, unidentified
MNSVLYVGMDVDSEKIAIAVLRGTDPDVTEELVIRNEASSIRKRFAKLKGHGEVIACYEAGCFGFGLYRQLTDMGVTCQVIAPGLIPHRPADRVKTDRRDARTLVRALRNGDLTEVYVPTKKDESVRDYLRMYEDSKTDLKRVKQRLLHFLLRRRLRYTESKNWTEKHKAWIRSLVMEYPIDQETLSEYLSQIADLEERCQRIACRIEEIAEGEEYRNRVAALKAFKGIETLIALSLIVEICDFRRFAAASQFMAFLGLVPSERSSGNKRRLGGITKAGNSHLRKLLVQAAWHYQSYQATSARLMKRRKGLESSLVSYVNRAGRRLNRKYLKLVFKGKRSQVAVTAVARELSGFIWGAMVGKVA

SEQ ID NO: 447170 - protein, 408 aa, unidentified
MVSTGLIKKHDICELSVGSKDYHFSIISSSPDSIHDWANSLKKRYPKGKIAVACELKKGPLIYALNKYKHIILFPVNPSTVAKYRKAFTHSGAKDDPSDALIQTELLEHHMSKLTPIEPESAEIRILTQHVENRRKLVQERIRFSNKITSTLKNYYPQVLDWFNEKDTIIFCDFISKWPSLTDSKKAQKRTLLNFFNQHSSRYPEINEQRIKDIKSATALTDDRGVIEPNKIMVEILILQLKLVIESIHRLDIIIRQAYKKQSDAKIYDSFPGAGPKLAPRLMVAFGTNRERYQKASQLQMYAGISPVIERSGQKSWTHWRYSCPKFLRQTFVEWAGQSVRFSFWANAYYQQQIEKGKPHNTAIRSLAFKWIRIAFKCWKTKTLYDETKYLEALKTKGSPLLEYAVKV

SEQ ID NO: 447171 - protein, 342 aa, unidentified
MSIVYVGLDLGSSNFHQVAVNQAGVSKVNREFATSEANLIKAFADQRGEIHVHLEAGELAPWATSIIRPLVSRVVCSHPQSNAWIAKDADKSDRIDAFKLADLLRLNRFKEVHYPQQQSRRDFKTLVQHYDELTQQQARLKTKIKARLRMQGVIVRGEGLFSTKGRKAVLAAVKSVAVRTAIKQLYAVLDQSIESQTEARLLMRRAAQAFPEIRIFETAPGIGPIGACRFSAYIHTPNRFSSTRKLWKYCRLSVSHRSSNGKPLRRPRLDRNGCGRLKDVTRKAFEAALRTQYDNGFKRAYLRALETTHDRTHARLTVQRKIASTLRAMWINQTPYDDQLMR

SEQ ID NO: 447172 - protein, 420 aa, unidentified
MLRRRHSADQTLRDRTIVRLTASQKDSEEAPFSICECVDLRVAPSARAANSLLLLPPYGWPAPPAELGGGDSVTGRDSSMDIAVLGIDLGKNSCSLVGLDGSGKVILRRRMQRKTILTLAAKLSPCIVAMEACCGAHHLGRLLAAQGHTIRLMSPEYVRPYVKAQKNDDRDAEAIAEAATRPTMRFVVLKSEEQLDMQTLHRVRDRTVCERTSLMNQLRAMLLERGVIVRQGRAKLRLRVTELLQQGAGELSSRIQLLIEDMLTRWMALDERIAAFDAEFAAEVKRDEAARRLTSIPGIGALNATALVAAVGNAETFARGRNLAAWLGLVPRQATTGGKPRLLGITKRGSKYLRKMLIQGARSALPTLSRSNTRLGRWLRSLLARTHSNTVVVALAAKMARIVWALLRYGTTFEPRAIAI

SEQ ID NO: 447173 - protein, 371 aa, unidentified
MNSILYVGMDVHKENYTLCCYGFEKDELQYRQTISSDYKMILKYLEEVRKRYTEEIDFICGYEAGCLGYTLYHQLTNHGVKCVILAPTTMAVAKNSRIRTDKRDAGNIAKCLAFRTYSEVHVPTAEDESVKEYIRMRDDQKKSLKIIKQQILAMVLRHGYRFVEGRNYWTIKHVAWLKSLDLGGVLQESLTEYLITYDYLTNKLERLDKRIEELADGENYREKVKKLSCLIGVKTHTALSAIVEIGDFKRFAKAERLAAFLGLVPSEDSSGEKQSRGSITKAGNCHVRRLLVESAQCYTRGKVGHKSVELKRRQSGNTPEVITYADKANERLRRKFYRMTLNNHANRNVAATAIARELACFMWGLMTDNIA

SEQ ID NO: 447174 - protein, 319 aa, unidentified
MFNLGIDVAKAKLDCALRLPNGKHRNKVVDNNDKGYAELHAWLLKHEAGSPRVCMEATGTYWERVAEYLAGRGMLVSVINPAQIKAFGASRLVRTKTDKVDAQLIADFAHERQPEPWLAPSPAEQALRAMVLRLEALQAMRQQESNRLDVARAAVRQGIVDHITWLDGQIKELIRAIRRHIDDDPDLRGKRELLDTIPGLGERTIPVLLSYYANPERFDSAKQAVAFAGLDPRQHESGSSVRGKPRMSKVGHSFLRKALYMPAMVTVYRTAWGKRFGQRLRAAGKAKKLIIGAMMRKLVHVAFGVLRSGKIFDPTLHAA

SEQ ID NO: 447175 - protein, 342 aa, unidentified
MNHLYLGIDWGKKFSQVFGFDDNGVVMVEKRLPTLDIDMWRQLLGLYGSYSIHAAFEIGAHYDWLYDLLKEFCCEVAVIDPAQFAIIAKSQRKTDKIDAQKIAEGLRRGDLPVVHVPDKQTRADRRLVAFTHWHSQQMSAPKIKIRSLLLAHRLECPHTNIMGKGAIKWLKEQATPKLDAQAQILLRMLMAQVELLQQQRKELDLKIAERARSYKQAEILDTVPGLGNLGILAILSAIAGIARFDRPERLSSYFGTCGSVFQSGQTLRLGPLTRRGNVHVRWLLSQALQHLHHKDPRARQRYLKLKRKKPSGVARAAQVRWLTEIIWHMLAKNIPYRMKQAA

SEQ ID NO: 447176 - protein, 355 aa, unidentified
MKQNIIRRSQGAITIGMDLGDKVSCYCLLNAAGEIVKEGKLATTRQAMAQTFGPMKRCRIAIEVGAHSPWLSRCLRQLGHEPIVANARQVRLISQSSRKDDKLDARTLARLARVDPELLRPIRHRSEEAQLDLMSIRVRAALVEHRTALINSARGLAKSVGERMASCASNQVCVERMRDLPARLAETLRPLLEQIESLSAQIEKCDAGIEQIARERYPETTLLRQVGGVGLLIALTFVLTLEDRSRFQKSRDVGCYLGLRPKRSESGQRQPQLRITKEGDPYLRKLLVQGAHHVLGWRGPDTDLKRWGQKLAARGGKNAKKRAIVAVARKLGILLHRLWVTGEVYEPLRHHPLAA

SEQ ID NO: 447177 - protein, 346 aa, unidentified
MLYAGLDLSRKRVDVCLLDEAGAKVAVTAAPPDADGLRGLAARLAEHGEPIYAALESMNGARFVHDTLERSGWRVELADAQKVKGLAPLAAKTDRIDAYVLAELARRDLVPAIWLPGPGVRAERELARFRLHLVRHRAALKARIHASLIAHGHPCPVSDLFGTRGRALLEGFALPAAWRASTEASLRVIAHLDEEICTCERELRRQGAEHPYVPLLMTAPGIAWVLAYTIAAEIGEIERFSGPKKLCGYTGLCPRVYQSGASDRRGPLAKNGPTYLRWALIEAATHAARHPAYAAHYEATKKRLGRQRGAKVARVEVARKLAEAIWYMLTRSQRFAPQGPASALVA

SEQ ID NO: 447178 - protein, 470 aa, unidentified
MADWVHAHYARVRSPYAAQDKPFASGFTNPHRNGGDIMLKINYMSTLFVGIDVSSKTNSVYAMDFEENKYLSTSFGNNQPGADELVNRIVACMQKHKHLDTLLIVLESTSVYSVHISNFLASSEVLMPYKPYVFCVNPKATANYRKSYIGMEKTDPTDAYLIADFGRVGRTKKLEPWRGGLFIALKRLTRHRMHLSECITREKTYMVSNLYLKFSELQLLEGDDKPFGNLYGATSSAILTEFLSPQEIINMPEEDLLAFLAQKSRNRISDLSKTSELLRKAARDSYRLDKCMYEPLSISLASSFNCIQAYQKEIRLIEQAIDKCIKGMNTNALLILQSIPGIGPVWASGILSEIGDITAFHSSDALAKYAGLYWPKGDSGDFISEDNQMSKAGNPYLRYYLGEAANSVRKHIPEYADFYARKYAEVCKHQHKRALALTSRKFVRLVFGLLAKNQLYTGEKLDTEYNTWSN

SEQ ID NO: 447179 - protein, 409 aa, unidentified
MTVMIGVDPHKGSHTAVAVDHGERSLAELRVRSGPKQLERLLKWAERFPERSWAIENATGLGYLLAQQLVVAGERVLDVQPKLAARVRLLATESTNKNDPHDALSVAIAALRSPTPKEVGVEDHAAVMKLWARRHRNLSSSRTQIACRLHAVLCDLVAGGVPDEIYAEKAALLLADVEPDTAVAAARVELAHELLEDLRRVDHQLARSKKRLEQVVAASGTTVIGIFGVGPVVAAMVVGVTGDIARFPTRDRFAAFNGTAPIEVSSGGRRVWRLSRRGNRTLNHAIHMAGVTQLRFAHSPGRSYYDRKIVEGKTPKEALRALKRRISDAVWAAMVADARRAAAATTTASKAGPGGQPGNDSVASAAGSHPETPALRPSHSRTRPKATTTTSRPSHTSSRSATTTARRTA

SEQ ID NO: 447180 - protein, 326 aa, unidentified
MFYLGIDVAKAKIDCCLILENSVSKKKTKTFSNTPKGFEQLQTWLKQHAVTSTQTITLMEATSIYHELLAKYLFDAGYQVCVTNPARARYFAQSMSKLNKTDKVDSEVLARFAMTADLHFWQPLPQHIQLLNALLDRRAALCEDLQREENRLEKAESTFTMEPVLQSIHKSIEQLNKHIQGIDQQVDDHIDQNPDLKNDKELLSSIPAIADRTSLLMLSFLRSHTFERASQAAAFVGLVPIQKQSGSSIHGRSRLSKAGSSKIRAGLYMAAIVATRHNPHIKGMNKRLLANGKTKMIAIGAAMRKLVHLCYGVLKHQQPYQADYSA

SEQ ID NO: 447181 - protein, 370 aa, unidentified
MSIYPEYPTRRQNEERFSLFIFKQSIGMKGILKQVLGIDVAQKELVVSLGRLDSHLSIECYASKVFSNSRKGFAELVKWVNKLTEPSIAVRYVMEATGVYHEALAYFLADQGFEVSVVLPNKISNYFRTLEVKTITDKTASEAILRFGLERKLDLWKRPNPTFKKLRQITRERDQLIGERTLVKNQLHAEMAEAEPNTTSLNRIRKRIEFLDIQEKEINKEISVLSKKDEHAKKSMKTIMSIPGVGLITAATVLAETNGFELIRNKRQLVSYAGLDVIEKQSGTSVRGKTRISKKGNRYLRKAMHLPALAAIRHEKRFKDIFTNLVSKHGIKMKAVVAVQRKILELTYSLHKNNQVYDRDHMGQKAKSSH

SEQ ID NO: 447182 - protein, 407 aa, unidentified
MIFVGDDWAEDHHDVHLMDESGARLASRRLPEGLTGIGEFHQLLARHVEEPDQVVIGIETDRGLWVEALVAAGYQVYAINPLAAARYRERHCVSGAKSDAGDAKLLADLVRTDRHNHRPVAGDRPAAEAVKVLARAHQNLIWTRNRHTNALRSALREYYPGALEAFTDLHDRDALAVLGRAPTPLQAANLSLSKIRSALKAAGRQRNLDTRALAIQTALRTEQLAAPASVTAAFGATTRATVGIIAELNRQIADLEAELATHFETHPDADIYLSLPGLGVILGARVLGEFGDDPNRYTTAKSRKNYAGTSPLTVASGRKRAVLARHVRNRRLYDAIDQWAFCASNTSPGARAFYDQRRAAGDLHHQALRALGNRLVGILHGCLRHHIHYSEHQAWAHRQINPDTQAA

SEQ ID NO: 447183 - protein, 367 aa, unidentified
MKKVSTRTAKQSRNISQQKLTIGLDLGDRNSWYCVLDETGRIQLEQRVRTTAKALQEVFGAMPRSRIALEIGTHSPWISRLLSDLGHEVIVANARKVRLIGESRKKDDRLDAQTLARLARIDPELLYPVRHRSAQAQADLMTIRARASLVRARTGLVNAARGLAKSYGERLRGCNVRNMDPEKAEGLSPELQRALEPLLATIEELSERIVEYNDRIEALAQTSYPQVELLKQIKGVGTLIALTFLLTLEDPHRFRKSRDVGGYLGLQPGRRKSGESEPQLHISKEGDPYLRTLLVQGAQHILGPFGIDCDLRRWGLKLAERGGRNGKKRAIVATARKLAVLLHHLWVSGEVYEPLHNSSRMTVAAAA

SEQ ID NO: 447184 - protein, 354 aa, unidentified
MKRTTKYVGLDVHQATTAASVRDDSGRMIAESILETHGPSLVEYLRGMRGALHVAFEEGTQSQWLYDLLVPIADRVVVCDGRRARREGNKGDRVDAKRLSELLRLGGLHPVYHGSTHRADLKELTRAYRSLVEDSVRVMARIKALFRARAIPTAGAAVYRAAERERWLAELDGGGVRFRAEVLYAELEVLRDLRPKAKAAMVAEAGRDPAWSVLRSIPFFGPVRVALLLATLGTPWRYRTKRQLWAYSGLAVVTWSSADHMFVSGQPVRRDRAPLTRGLNRNHNRVAKEVFKGAATAASSRPGPFRDIYDGLIARGLREELARVTLARKFAAVFLHLWKKGERFDPAKLTTQAH

SEQ ID NO: 447185 - protein, 342 aa, unidentified
MEYYAGIDVSLESSSICVVDATGRIVREAKVASEPEALTAWCRDLGFDIARIGLEAGPLSQWLFAGMKQAGLAIELLETRHVRNAFKLMPVKTDRKDARGIAQLIRMGWFRPVHCKSVAAQETRSLLGARKLLQSKLHDIELGLRGTLRGFGLKLGKTTPKTFENRVRILVADHPTLLAVADALLRARAMLAEQFIKLDKQLHSVARGDNRARLLTTIPGVGSIVALTFASAIDDPGRFKSSKTVGALFGLTPKKYQSGETDVTGRISKIGDAGVRTALYEAANVILTRTRKGSSLKKWAMGVAKRAGMRKAKVALARKLAVVMHRMLADGTPFVAQKAVAA

SEQ ID NO: 447186 - protein, 331 aa, unidentified
MNYSHFVGLDVGKKTFDASLMSAAEKELSHKSFDNTPTGIQSLLDWIAGYHLSLSKLLFCAENMGSYVTELSVSSVSMGFSLALVCPLTIKKSIGLQRGKNDRIDAKRIANYAVLHYRKLELYKLPDKDLVRLRGWIIIRDNLVKQKVSSIKLLETFSWMAKLADVTESISFLEEQLKSIKEKILEVEEDMEQLIAASTSLYTNYLLLRSIKGIGIINAIVLLCVTDNFQRFDNPRKFACYCGVAPFEHTSGISIRGKTQTSSLANKEVKVYLTRAAITAISWDPQMKAYYKRKIAEGKHKASVINAVRAKIIARSFAVIRRQTPFVTLAV

SEQ ID NO: 447187 - protein, 484 aa, unidentified
MAKRKMSTFERLKAGLMNRAQRRELGRRVAASDPGLTVVHPNAGGIDVGNESHFVGVPPDRDENPVREFGCWTRALNEMAEWLKSCRIDTVAVQATGVYWIALYDVLEQHGIRVVLVNAQHTKNVPGRKTDVQECQWLMKLHTYGLLRDSFRLQQDMEYVRTIWRLRDRHVKDAGRAVQHMQKALTKMNVQLANVISDISGLSGQAIIHAILQGERDPSQLADLVDYRVKASREEVVRSLEGNWRADVLFELRQAVDSQHFAHRQMQECDDKLAHYLASLPTRTLENPAQSQAAPESVVQKRKKARKPRDNEPRMDLKAELKRICGVDLTSIDGINVMTAFTVISEVGTDLSGFEDEDHFASWMGLVPSKDISSGKVVGPGRKKVKNRLAVVLRTAATSLLESDTYLGARYRHLRRQLPTFKAAVKAMARYLAVLIYRLLTYGQAWVDRGAAQFEQKRLEREVAHLHSKAKAKGFVLVPITQPC

SEQ ID NO: 447188 - protein, 354 aa, unidentified
MIIIGVDFHPEFQQMASVDTETGEFQEKRLGHREEAEKFYRDLAAAGQKVRVGMEASGHARWFERLVAELQFELWIGNAAEIRTKRVRKQKTDRQDAQLILRLLLEDRFPQIWVPSWENRDLRQLLWHRHRMVQARTRIMNQLQAVALNEGLRSKKSLWRERGRQQLESFRLAPWASRRRRDLLELLDRLNPTITELSQAIEGEVENCPAAKRLMTHPGVGPLTALAFVLIIGKAERFRSGKQVASYLGLVPLEESSGNRRRLGHITKQGSSMLRFLLVEAAQVTVRSLPEWRSKYVHLMMRRGRKTAKVAMARRLAVRLYWMMRQAWDYPQWNKFGSHAGQPGNRDGVHSSTE

SEQ ID NO: 447189 - protein, 411 aa, unidentified
MHERQKHFYVGVDLHKQHHVAVIINCWQEKLDEIKFENKPSAFSTFLLDIYKHMDDGLTPIFGLEDVGGYGRALAKYLADHEQIVKEVNPALSYAERKSHMTTQKSDSWDAECVARILVNKLDQLPDAKPHDLYWSIQQLVTRRNALVKAQGALKNQLHIQLSHHYPSYKKFFSEVDGKTALAFWERYPSPPCLEGVTVKQLTIFLLEASSNTCSVKKASEILKMVKEDGNTIREHQETRDFLVKSIVRDISFKKQEMRYVERELKGLMSLLDFQLDTMPGIDLVTASALIAEIGDVRRFPNANKLARFAGIAPVYFGSGGKGREQKSKQGNRALHALFYNLAVQQVQVAKGSKLPRNPVFHAYYQRKLKEGKTKGQALVCIMRTLVNIIYGMMKHKTAYKLPIIKEEEVV

SEQ ID NO: 447190 - protein, 401 aa, unidentified
MHGLPERAYAVYLGLDVGKGEHYACALNTDGKKLHDKPLPQDEQRLRDLFTQLSVHGPVLAVVDQPASIGALPVAVARDCGVDVAYLPGLAMRRIADLHPGNAKTDARDAFVIADAARTMPHTLRRVDMNDDALADLEVIVGFDDDLASEVTRVTNRIHGLLTQIHPALERGIGPRLHHKAVLELLARFGGPTGLRAAGRRRLLAVARPRAPRSYQKIVDAIMAALDQQTVTVPGTKAAELVLPKLAEQLAELLKQREEAAAQVEEMLDAHPLSRVLTSMPGVGVRTAARILLEVGDGTAFPTAAHLAAYAGLAPVTRRSGSSIRGEHPSRGGNKNLKRAFFLSAFAALHDPASRAYYDRKRAQGKKHNAALICLARRRCDVLYAMLRDGTLYQTPATAAA

SEQ ID NO: 447191 - protein, 367 aa, unidentified
MKKVSTGTAKASKKISQQKLTVGLDLGDRNDWYCVVDEAGQIQLEQRVRTNAKALQEVFGAMPRSRIALEIGTHSPWISRLLSELGHEVIVANARKVRLIGESRKKDDRLDAQTLARLARIDPELLYPVKHRSAQAQADLMMIRARAGLVRARTGLVNAARGLAKSYGERLRGCNVRDMDPEKAEGLSPELQRALEPLLATIEELSERIVEYNDRIEALAEASYPQVKLLKQIKGVGTLIALTFLLTLEDPHRFGKSRDVGGYLGLQPGRRQSGQSEPQLHISKEGDPYLRTLLVQGAQHVLGPFGVDCDLRRWGLKLAERGGRNGKKRAIVATARKLAVLLHHLWVSGEVYQPLHNSKRTAVAAAA

SEQ ID NO: 447192 - protein, 329 aa, unidentified
MKDSNAIGWPSKGVFWGVDVASTKLDLARYDEARHDQAQVVSFENSDDGIGQLVEHVRHEPLRLLVVEATGGYEVPLVAALEEAGLPVVRINPRQLRAFATAVGELAKTDTIDARLIARFAHDVRPALRPLATKEQRFFASLAARRRQLVALRTAERNRRKKTPEPELRASIDAVLAVIEEQVAHLERQLDELIAADPKRRERDRILQSVTGVARVTSHVLLADLPELGQLQHKQIAKLVGLAPLNRDSGKFRGRRTIVAGRRNVRTALYMATITATRFNPQIRHFYERLRQAGKPFKVAITACMRKLLTILNALIRDNTPWRKNVMTT

SEQ ID NO: 447193 - protein, 351 aa, unidentified
MAMLADLVELVIGVDTHKHTHTAAVVAATTGAVLAQATVAATPAGYRQLLALADQQPGQRVWAIEGTGGYGAGLTRFLHAHAEQVVELDRPKRAARRHGAKSDPLDATRAAREALGRDQLAQPKAAGHRAALQARLTTRRSAVQATTDAQRQLHALVVAAPDPLRGRLGGLTTRQLVTACGRLRQQAAWDAEAAATAASLRALARRIQVLDAEIAEHTRAITTLVRAWRPELLTPCGVGPIVAAIVLCAWSHPGRCGSDAAFAMLGGAAPIPASSGQTVRVRLNRSGDRHLNQALHLIVLTRLRYDPATRAYAQRRRAEGKTNREIRRCLVRYVARQLYRLLEANPRFDPT

SEQ ID NO: 447194 - protein, 343 aa, unidentified
MQMITTIGLDIAKSVFQVHGVDAAGQVVVRRQLKRRYVLAFFQRLPPCLIGIEACASSHYWSRELRALGHTVRLMPPAYVKPYVKRQKNDATDAEAICEAVTRANMRFVPTKTPEQQSCLMLHRTRHLFIRQQTAVINAIRAHLAEFGIVAPVGRKGVTELLHVVADPSDGRVPEVARACLAALGTQLLGLKEQIVEFDRLIMAWYRSNETSKRLHYIPGVGPLLATALAASVADPQTFRSGRNFSAWIGLVPKQHSSGGKDRLGSISKQGDRYLRSLFVAGALSVIRYAKIHGTKHRPWLTALLARRPTKVAAIALANKLARMAWAMMARGERYRNPVALAA

SEQ ID NO: 447195 - protein, 343 aa, unidentified
MQTITTVGLDIAKSVFQVHGVDAQGEVLIRRQLKRRYVLAFFQKLPPCLVGIEACASSHHWSRELKALGHTVRLMPPAYVKPYVKRQKNDAADAEAICEAVTRANMRFVETKTPEQQSGLVLHRTRHLFIRQQTAVINAIRSHLGEFGIVAPIGRNGVEDLLDVVADPSDKRVPEIARACLAALGAQLRKLKEQILQFDRMIRAWHRSNEMSLRLDDCPGVGPVLATALAATVADPKAFRSARNFSAWIGLVPKQHSSGGKNRLGSISKQGDRYLRSLFVAGALAVIRYAKIHGTKHRPWLTALLARRPTKIVAIALANKIARMAWAMMAKGECYKQPVALAV

SEQ ID NO: 447196 - protein, 416 aa, unidentified
MNAVGIDISSKKSTVAVLRPFGEVVRVPFEVSHSAEGLASLVQQLKALDGATRVAMEHTGRYYEAVANALYEAGFFVSTVNPLLIKEYGGNSLRKVKTDKADAVKIARYALDNWAELRDYTPMDRIRYDLKTLNRQFHLASKQKTATSNNLIALLEQSFPCVRKCFDSPVRRDGTQKWVDFSHDFWHADCVRKHSLAAFTERYHKWCKRHGYNFKQSTAQKVYDLAKSAVVLVSKGNLTKVLVQEAANQLTTISKSVETYRAEMDRLASHLPEYPVVMGMYGVGDSLGPQLMAEIGDVRRFERKQSLVAFAGVDPIPNQSGEKNVRSNKSSKRGSPHLRKTLFNVMTCCLRKAPADEPIFQFLDRKRVEGKPYYVYMTAGANKFLRRYYGKVTEYFSNLEDLPPVDMDSTGLLKRQ

SEQ ID NO: 447197 - protein, 435 aa, unidentified
MEEVTDEPLYRDRVCGIDIGKAGLVATIRVPSDRDRARRMQETRSFGTTKREVLALADWLRCWQVPAVVMEATGDYWKGPFYRLEAEGFDCVLADAKQVKNLPGRPKRDPADSRWLAACFERGAITSCFVATPEFRIIRLHTRYRRDLTEERTREKQRAEKLLESAAIKISAVLTDLHGVTGRDIMDHLIAGERNPKVLAQLARAAARRKISQLEEAVEGAEFFTGEHAALLAKVLARIDRLSADIDDLSQVIERLLAPYEEQLQQAESMPGWGRRAAQDAVAETGVDMTRFRTGPHLVSWAGRAPQDHQSGKRKGRAKTKKGNRYLGAITGETAVAAGRTQTREGARHRRLARRRGTAKACVATGNTQLKVYHKLLSNPGMRYADLGPDYYERQRDTRRQIAHHVGKLGSLGFEVTLCRIPEPDPDGTDPAQAA

SEQ ID NO: 447198 - protein, 370 aa, unidentified
MKNGSTLRVGLDVHKESIAVAYAGKEGTEPAYVGEIGTRQGDIDAMIRKLQSKGAELVFVYEAGPCGYWLYRYLTRKGLTCFVVAPSLIPRKAGDRVKTDRRDAVMLARLARSGDLTPVYVPAVGDEAIRDLSRAREDALHDVNAARFRLKAFLLRNDLRYSGRANWSAEHVRWLARLVLPTPAQQIVFQEYVRTVSERTELLRRLEAELLDQAKTWRLYPVIEALQSLRGVQFTVAVTTVAELGDLTRFDSPRQLMNYLGLTPSEYSSGERRRQGGITKMGNGHARRVLVEAAKAYRHRAKVSEQIQARQQQLPKEICDIAWRAQVRLCGRYKKLALRGKHANTIAAAIARELAGFMWAIAKAQATAAA

SEQ ID NO: 447199 - protein, 346 aa, unidentified
MAYYVGLDVSVKETSICIMDDKGVVAARTDISTDPDLIAQFISKHAPEVERVVHESGILAIWLTRELEKRGVPIICIDARLAHKALSGRINKFDQGDAEGLAQLARTGWFTQVHIRSEASERVRVLIGARERLIRMRKDLEGHVRGVLKVFGVCMTSVGTGKLRRGFRDQLAAAADTDPAIAMLSETFIPLHKTLCIARDALDEEVRIMARGSDLARRLMTVPGVGPIVALAYIATVDDEKRFRKSIDVGAFLGLTPKRHQSGAVDWSGKISKCGDCDMRRLLYSAASTLISCTRKSSRLKEWATKLAERKGHKKAAVAASRKIAVLLHCLWRNETVFEPGMEGAS

SEQ ID NO: 447200 - protein, 372 aa, unidentified
MIVVGVDPHKKTHTAVAVSSQLGELKGEVTVKARPEGHAKVIQWARALDKERVFALEDCRHVSGALERFLIARGERVVRVPPKLMGEARRSARSFGKSDPIDALAVARAALRETDLPAAHLDGPARDIQLLVDHRDDLVAERTRIQNRLRWHLHDLDPALDEQAQRLQRSHKRLAQIGRRLAQKEQTAQVRVCRDLLRRLKALSRDIKALEAELAELVGRHAGPLLELPGCGTLTAAKLIAEIAGVERFSSDAKLAKLAGVAPLDASSGKQQRHRLNRKGNRQLNCALHRLAVTQGRAHGPARAFLAAKQAEGKSRREALRCLKRHLARVVFRLLKAIASRSHPESENLFPSERERQLPSPARAGGRLVAAT

SEQ ID NO: 447201 - protein, 349 aa, unidentified
MSQNLNSAVAVIGIDIGKNSFHVVGLDYRGAIVLRQKWSRGQIEARLANMPPCLIGMEACVGAHHLSRKLKAFGHDARLMPAKYVRPYSKGQKNDFRDAEAIAEAVQRPTMKFVATKTAEQLDLQALHRVRERLVSQRTGIINQIRAFLLERGVAVRQGLRFLRAELPRILAAPPDVLSPRMVRVIKDLAEDWRRLDERIDQLSNEIAVLARQDTGCERLMSVPGIGPIISSAMVAAIGTGDAFSKGRDFAAWLGLVPKQISTGDRTILGKISKRGNRYLRVLFVQAAWVVLIKPMSWERHGLKHWIEAARKRLHRNVLAIALANKLARIAWGVLVGGRTFEASKLQAA

SEQ ID NO: 447202 - protein, 324 aa, unidentified
MENTLFAYAGVDVSKKTLDMTLLKENGGKRRKRFANTTAGIKVLLNWLQQQTNGQVHICMESTSVYWEELAESLYKAGYKVSVVNPVRIKGYAMSQLRRNKTDPIDGDVIADFCRTQELPLWVPPSDEQKKLRALVRHLEALKKSRTQQYNRLTTCKDEEVKASLEVLLATIDAETQQVKKRIDELIEQYPDLKQKKELLESIKGIGEKTAIHILAEMFDIERYKNAKAVAADAGVTASHYESGTSVRRRPKISRMGKAAIRSALYYPAITAIEHNPIVRKLAKRLEARGKKKAVIRVAAMRKLMHLAYGVIKTKKPFDPFYAA

SEQ ID NO: 447203 - protein, 381 aa, unidentified
MKKDIRHVGLDVHAETISAAVAEADGEVRWLGTISNRPEAVSRFVRKLGARENLKICYEAGPTGYVLYWQLTRMGVACTVVAPSLIPTRPGDRVKTDRRDAEKLARAFRSGDLTAVWVPDEAHEALRDLVRAREDATQDRLRARHRLQKFLLRQGRRAPEGMKSSSQKQLEWVKAHVHFDQPAQEATLVDYLHEVEHGDERIARLERAIEDAVGKAPERMRAVIQALQSLRGVASITATTIVSEVGDLRRFLRPRQLMGYCGLVPSECSTGSRTRRGSITKTGNAHLRRVIVETAWCYRHRPALGVPLKRRQQGQSEEVKQIAWKAQHRLHSRFWRLQARGKPSQQVATAIARELLGFVWAIGVKVESAPVASGTPRRKAA

SEQ ID NO: 447204 - protein, 399 aa, unidentified
MERTYSVCCGVDVGKSSHHFAAIIPATGELVFDGKVEQSESGIRDALLSVSLFGSPVVVVDQPGNMAALLFAVCDDMGIAKGFITPRAMSKAIEMYGGDIKTDAHDALVIAEVSSSLPKLVKPVSEKSALYLRLSALMSYDRELTLESTRATNRLHDLLLSVSPALEAHLEGKRVQSNFSLMVLSRYGGPAGLKKAGRGNVRRWLRSRKGMGEAALRRLDDLFEAIGRQSVTIAGSEYVEELIKQEASFLLTVLASRKKVAESRDELLSQMPEARLLMSLPGLGAVTCATFLAEVGDISRFPNASKLASYAGLAPKVRQSGKTIHSVTKPRGGNRRLKRVLVLSAGKSVQFCEESRAYYERKRSEGHSYGSCMMALARRRLNVMYAMLRDGTAYEKQNG

SEQ ID NO: 447205 - protein, 384 aa, unidentified
MNTVSVVGMDLHRDFSKVAMMSEDGKVLETRNIRHDSRKEMAEFFDGLEDGTDVVMEAGFNWPWVADLAEAAGMKPHLGHAIRCRELAKGMAKNDRKDAIFLGKLWLAGGDVFPEAYLAPQEVRVMRAKFRTRSLLVKIRSQMRNSIHGILHKYGVKCDEATDLYGKKGRKILEGLELPAVAKDEMERKLAFLDDLGRHIESIERQLRAELPLDKRAVLLQTMPGIGQIIAYGMLAEIGEIGRFPDKRALASYAGVLPLDNESAGDDHGKHTNRRCNKALRWMALEAVRGAVRHSRRMRSLFERVKAKHPSTPGMAVVAVARELLEVAHLMLTRGVPYMENPPPRPGSVQTVASCHPELLGTRGSRRASQMGRCAASERIQADH

SEQ ID NO: 447206 - protein, 435 aa, unidentified
MDRVIIGVDPHKLSVTIEARDKREILRATGRFGTDARSYHQLLRVARQWPERVWAVEGANGIGRPLAQRLLADGERVLDVPAKLAARARVFDTGQGRKTDAADAHAIVMVALRDKGLRELSADPELMVLRMLCDRRDEISRARAQALNRLHRLFLELLAGGAPVKKSTAQYKALLATVRPRDPAGKIRRRMAAEELADLARCDAKLKAMKAELKTAVEATGSHLMDICGIGPAGAARILADVGDIARFPDRNHFASWTGTAPIDASSGEHTRHRLSRAGNRRHGHVLYMAGIVQLRNDTPGRAYYRRKLTAGKTAMEAMRCLRRRLSDVVYRQLTADAAACAPPRQAGPGGHSGATLSSSAAGLPPGTGTSDQPLPGPAPQTLPPPRVLKTTPAAPAAATSRRRAGGVNVERPTGRTTLTPTSAGAHSTASGPHT

SEQ ID NO: 447207 - protein, 386 aa, unidentified
MQRNDLSQSLTTFDQNSTIVAVVELSLESWLMSGLVPGVKRQPLKKQPADPERLLALLERWRQEAIKAGHAVKRIVVAFEAGRDGFWLARWLRSHDIEAYVIHASSIAMPREHRRAKTDRLDTEVLMRAFLGWLRGEARHCRMAAIPTLAQEDAKRPSREHQSLVTERTRLVNRMKATLVWLGLPRVNIKLRKAAEHLAALRTPEGEPLPPNTLAELHRDLERFAMIRAQIKAIEQARLQRLKAAPAQGTHPMILMLAKILGVGIETADMLVHEVLARRLRDHRAVARYAGLTGAPDESGSKRREQGLAKAGNGRVRRGMLQLAWRWLMHQKDSAALTQWYRSRTADGRKDTRKTMIVALARKLLIALWRYVTAGEVPRGVVLKAA

SEQ ID NO: 447208 - protein, 349 aa, unidentified
MKDTITIGMDLGDKFHIAVVFNGEGTEVEAAKVSNNKAGIIKYFDKYKGATVAIEAGTHSPWISRCLEDLDCHVYVGNPRKLRFIWDSMDKSDERDARMLGMVCRIEPRLLSPLRHRGQKAQSDLALVKSRDMLVTTRTRLINHVRSVVKTNGERLPSCSTDYFVKRCAAHVPEDLQASLACILESITQVSDKIHELDAEIDRMCREEYPETQLLQQIPGVGPITALAYVLTIEDPAHFKKSRQVGAFLGLTPRRDQSGETDKQLRITKAGNNYMRKLLITSAHYIIGRFGPDSHLRRHGLSIAERGGKNAKKRAVCAVARKLGVLLHRLWSSEQPYEPFYGIEHKKAA

SEQ ID NO: 447209 - protein, 342 aa, unidentified
MNREIYIGVDVSKNWLDIAYYDGVVVDWKSGHIRVDNNKSSYKKILLWLKNHQIAKESTIFCMEYTGLYCHNFRLWLEKEGIVYGMINPRKMHRFEPDLGEEGPALDRIKTDEMDSFRIAMYCEKHSRKIKSSPSKLPSHAFFKLKRLLAERRQYVKHSVLYKQQLNDISAYDTEDSRKRKQLGLKSISVLQHQTDMEIKKIIKDDESIYKNFKLLCSVIGVGLVIASETIVLTENFTAITNPRKYACYIGIAPERKESGISIRGGDHVSKKGFTNAKANLSLVALQAIRNDSNIRAYWLRKKAEGKHSGVVLNAIKFKMLLRMFAVIKRQKPYIEMDTFKK

SEQ ID NO: 447210 - protein, 340 aa, unidentified
MTNRTFLGTDVSKDTLDFFLLDQNNPDKGTSVKLSNSRKGYSELLTFLARHKVELDSLLVIMEHTGVYTLEFMCFLDEQGIEFSIFPGLEIKRSLGITRGKNDKVDAIRIAQYGFMIRHKIKPTELPSVDIMKLKQLITTRALLVRQRAACKSATRTQKKFNQYTQLHIVEDLLKEQINSLTARIQEIEKAMEDVIEQSSEIKKNFELLCSITGIGKMIAYALIAYTNNFNAFPSARHFMSYVGVAPFESESGQYKGKKKVCSLANKRMKALLHSGVSSMKTHDPESKEFYERKLAAGKHKRQVANALAGKLVQRAFAVIKRGTPFVQLYSQKIIQKNVA

SEQ ID NO: 447211 - protein, 352 aa, unidentified
MKIIGCDFHPGFQQISMLDVETKQRVKKKLHPASGAAEQFYRSLQGQRVRVGIEACGNTRWFERLLQRWGHELVVGDAARIRAAAVRKQKNDERDADHLLELLATGRFPAIWVPSPEERDLRQLLLHRHKLVQMRTRIKNQLQHVALDQGLQKKRQLWTERGRQWLLEVSLPPWTERRRSDLLVLLDGLEPAIAELSQAVEMAAQQDPRVQLLRTHPGVGPITALAFVLVIGDVQRFAHSNQLASYLGLIPSEDSSAGRRRLGAISKQGNTLLRTLLVEAGQSAARCDPQLKRAYQRCCHRKSLTGIGKVMVARKLAVRLYWMLKSNQPYTPARMQGSPSHPVSTREGSSIV

SEQ ID NO: 447212 - protein, 319 aa, unidentified
MVKMKHYTPTVAGIDISKATLDVYLHPEGGYRRFNNDKTGWRALRGWVAKAEPEHVVYEATGRYHKGLERYLGGHGLPIARLDPRRARRFAEALGVNAKTDPVDACVLAQFGAFLKPATAALSSPALEQLKELVAARRGLVQQGVRIANRSKTAAAALIKRQLRQSREQTKRQIKQIDKECHRVATSDPALAQRLGILMSIPSIGPVTAMAVLAEMPELGELNDKQVASLLGVAPIARDSGAFHGKRHIRGGRAQLRQALYMAALVATRFNADMKQKYQALIKNGKPPKVALTAIMRKLIILANALIKDNRTWTEIRPC

SEQ ID NO: 447213 - protein, 372 aa, unidentified
MRDYSAYIGLDVHKDTVAVAVALQKGGEPLYRGDIAHTTKALTKLLHRLTASYGEKIAFCYEAGPTGYGLYRWLIKKGFYCEVIAPSLIPRRPGDRIKTDRRDAISLSRLFRVGDQTAVWVPDHEQEAMRDLTRVREDMKGMETQAKHRLNSFLLRHSRRFSGRSKNTPAYFSWLEGLKFENPTSQIVFQEYVNAVLTAQARVTGIVGEMENALSSWALAPVVEALRALRGVDLVAAMTVMAELGDITRFTSPRQLMAFLGLVPSEDSSGLKQRRGGITKTGNGHVRRVLIESAWSYRYPARMTRHLRKKAENASPEVKTIAWRAQKRMCGRYWYLMGKGKCQQQVVTAIARELIGFIWAIAKEMQPKAVTA

SEQ ID NO: 447214 - protein, 428 aa, unidentified
MNYNTQNAKIASITEKTLIVGIDVGSETHYARAFDWRNYEYTKKPLEFSNTEAGFQTFKAWMGDIAEKYGKTAVIPGMEPTGHYWFALGKFLQDSGMRPVHVNPHHVKKPKELDDNNPNKNDRKDPKTIAALVNEGRFSYPYIPTGIYAEIRSLSNLRFQTQEELTRIRNRLARWFAIYFPEYKGVYGDLKAVSGRMVLKEAPLPEDIRKLGVEGVDRIWRDAKLRGAGMKRAKTLVTAAGHSVGSTEAPEAARMELKNLLADMDVYTSRLEGLPLKIEEKLKETPYVDKLIGIKGIGLATVSGFIAEVGDIGRFDNPKQLQKLAGYAVVANDSGKHNGESRISYRGRKRLRYVLYEAAIPLIGKNAEFRAIHGYYRTRKENPLKKMQSVVAVACKVLGIFYTILTKGVDYDAGKLMGDIRRPQIQAA

SEQ ID NO: 447215 - protein, 367 aa, unidentified
MKKVSTAVSKGTKNFPEQKLTIGLDLGDRSSWYCVLDEAGDVLLEQRVSTTPKAMKQVFERMPRSRIALETGMHSPWVSRVLSGLGHEVIVAHARNVRLIGESRRKDDRLDARTLARLARIDPQLLCPVKHRSAKAQADLTVIRARAGLVRARTSLINTARGLTKSYGERLRGCNPRNMKPEKASGLSPELQAVLEPLLAGIESLSEQIREYNEQIEHLAQESYPQVALLKQVKGVGTLIALTYLLTLEDAHRFRKSRDVGCYLGLQPGRRNSGQSEPQLHISKEGDPYLRTLLVQGAHHILGPFGADSDLRRWGLKLAERGGKNGKKRAIVATARKLAVLLHRLWVSGEVYEPLRNSSQAMLPAAA

SEQ ID NO: 447216 - protein, 408 aa, unidentified
MQAVHERCAGLDIHKKTVVACVLTGSGKQIRTYGTMTRQLEALADWLAAEQVSHVAMESTGVYWKPVYNLLENRGLELLVVNARHIKNVPGRKTDVKDAEWIADLLRHGLLRASFIPGRDERELRELVRYRRTVIEQRAHDVQRIQKVLEGANIKLSDVASDIMGASGRAMLERLIEGEDDPVALSQLAQKGLRKKQDQLQQALAGSIGAHQRAMLRHLLDHVKFLERQIEELDGQIQERTRPFEQVIDHLDAIWGLGRRSVEEILAEIGVDMSRWPTHRHIASWAKISPGNHESAGKRYSGRTGMGNRWLRAILVEAARNVSRNPHSYYAALYHRLSQRRGKKRAMVAVAHSLLVAIYHMIKDGTLHHDLGSDHFERLDREQIARRAVRRLERLGYQVTIQEAAPAA

SEQ ID NO: 447217 - protein, 373 aa, unidentified
MNTSITYVAMDTHKKQHQVAWVHPDTGEIQEFSVPNTAREIERMVKRLRKQAPGAIHVCYEAGLCGFVLKRRLEKLGCVAKVIAPSLVWRKPGDRVKTDRRDAKKLLSQLVAGQLTEVYAPDPAQEADRELPRCRESAERDLKRARQRLNSFLVRHGYVYQDGNLWTGKHAQWLKGLVFDQPGLRTVLEEYSSEIAHAAQRVQSLDQQVAALAQSERYRVAVGVLRCFRGIDTLTAITVLTEIFEFGRFDSPRALMAYLGVTPSEDSSGESRRPGAITKTGNRRVRRILTEAGWHYRHPYAVGKALKARRKDQPAWPVDLADRAAKRLYRRYRHLIERGRSAPVAIIAVVRELAGFIWAMLRQLQSPAADAGS

SEQ ID NO: 447218 - protein, 359 aa, unidentified
MITIGVDAHKQVHAAIALDERGREIGHWRGANSVDGWRALADWATGLGAPCRWGIEGAWGNGRGLAQHLVATDAEVYEVNPRWTAAGRRSARRPGKTDRLDARAVALLVWRESTTLPVVGPDDETAVLDLLVAERDALVAESTRTRNQVHQLLQQIDPEYAARLPRLRSQAGVRALEAYATDDARPLQQHRAAAVRRLAQRLRLLADQIKELVEQIRALAAPRFAPLTAICGIDLLTAAALAGILGPGRRFATDAQLAAYAGAAPLEASSAERTRHRLNRGGNRQLNAILYRIAVTQARCSPQARAYLARRTGEGKTKREARRALKRFLARAIWRKWEECQATAAAVPAAPDPTSALAA

SEQ ID NO: 447219 - protein, 382 aa, unidentified
MVPNAADLVRFSDEMDSSCDSVGIDVPESLLGKQKEEPIMGHDTRIAVDVAKAVFEVAISDRPGHVVRRERLTRDQFLPFIAQQPVATVVMEACGSSHHWARKIEGLGHPVVLLPPHQDRPYSRGNKTDRTDAKGILEASRNEEIHPVPIKSVAQQVLTSLHRLRSGWVAERTARLNAMRGLLRELGFFIPMGAEKVVPTLHALIEDAESELPDGLRNILYEACHEIRDIEARIKQTEAQLDATAHQIPAVALLRTVPGIGPLTSTALVAFLGNIQRFPSGRHLASYLGLTPREFSSGLKRRLGRISKRGDGYLRTLLIHGARSVLLHARKTQPDRLRLWAHKLEKTHVHNKAAVAVANKMARILWAVWSRQTPYGSLTMAA

SEQ ID NO: 447220 - protein, 308 aa, unidentified
MKKISSAAAQKIEKVEGQKLTIGLDVGDRSSWYCVLDEAGDVLLEQKVATTPKAMKEVFGGMPHSRIALETGMHSPWVSRLLSEVGHEVIVAHARTVRLIGESRRKDDRFDARTLARLARIDPDLLGPVQHRSRKAQVDLMVIRARAGLVRARTALINTARGLTKSYGERLRGCSPRKMNRELAEGLSPELQSALQPLLDEIESLSERIREYNERVQQIAEESYPEVARLEQVKGVGTLIALTYVLTLEDSRRFRKSRDVGCYLGLRPGRRNSGQSEPQLHISKEGDPYLRTMMGQSAARSGAFWSRQ

SEQ ID NO: 447221 - protein, 317 aa, unidentified
MSKHTMICAGIDTGKRKLDVAIEGRAKRLQVDNTPDGHRALSAWLRQHRAKRVGIEASGGYEQAVVSQLRRDGLVVIVFQPAQVRAYAKFHLQRAKNDKIDAALIAACTAAAKKIHAPPDPRLAPFAEHLTMIEQITEDIAHLKTRRESCRDPRIRCFWKEEIGRLKGFLRSELKELVAAIRQHHDLAERLDLIASVDGVGLRTAVAILVRMPEIGRITREQVAALAGLAPYDDDSGDQVGLRHIEGGRERLRKSLYTAALAAAFHWNAQLIALYKRLTAGGKLHKVALVACARKLLIFVNTVVARGTPWTTKPAAS

SEQ ID NO: 447222 - protein, 386 aa, unidentified
MQKLNDLSRSLTPLKPDGTLIAVIEMSLSSWLVAGIVPGIERQPLKKLAVDESTLLKLLIRWREEAKKSGHRIERIAVAFEAGRDGFWLARWLGARDIEAHIIHASSVAVSREHRRAKTDRLDTELLKRAFLGWLRGERDHCKMVAIPTIKDEDAKRPTRERESLVGEQSRIVNRMKAALVRLGIRGFNPKLKKAVERLDGLRTPEGEPIPPNTLAELRRDMARRRLVSDQIRQIEDARLERLEQAPSDGPHAMVRLLARVIGVGIETADMLVQEVLSRNMRDRRAIARYAGLTGSPDESGRKRREKGLARSGNARVRRGMIQLAWRFLMFQKDSTLAQWFRARTENARGTRKTMIVALARKLLIGLWRLVREGVVPDGVVLRPVS

SEQ ID NO: 447223 - protein, 343 aa, unidentified
MDHFAGLDVSVKDTSVCIVDETGRIVREVKVASEPDALLAVLTNPAYHFKRIGLEAGPLSQWLFSVLAAAGLPVICVETRHMRAVLKAQINKTDRNDARGIAQMMRVGLYRPVHVKTLRSQKLRMLLTHRKLLQSKAIAIENDLRGTLRNFGLKVGMVGTVKFEARIKELIANLPDLAELIEPLLIARQVIRDQFTILHRRLLAIVRDDEVCRRLMTVPGVGPVVALTYRATVDVPARFRNSKAVGAVLGLTPAKHQSGERDQTGGISRCGDEMMRMMLYEAAQVMLMRSVKWSWLKAWAMKIAKHRGLKKAIVALARRLAVIMHRIWVDGTEFRWTREVTAT

SEQ ID NO: 447224 - protein, 454 aa, unidentified
MWTMSFELGLTRWPPLRLARMCREHASVVVVRPLVLHSFNEQKGDVVRSLGRAIGLDVHLDFCEVAIVEAGVVRSSGRIETTPEQLELFAQSLARTDRVALEVTGSAWEIARILKPHVARVVVVSPADTGIRQARAKTDRLDARTLAKLLWAGELDPVWMPDEQTRVLRRRLGRREQLVRARSRAKNEIHAVLVRRLVGRPPVSDLFGVKGRRWLAGLELPVDEVETIESALRHVEFLDSEIAAVERQIARQALDSPEARRLLTVPGVNVICAQTFLAAVGDIRRFPTSRKLVGYLGLDPRVYQSGSTPAKGGRISKQGSPQARWALVEAAWSVVQQPGPLHAFYQRIRARRGSKIAVVACARKLAVLFWSMLTRDEDYAHGQPSLTAKKLRLLEIRAGAPTLKGTNTGTWATRQRMRGAERELAKQAEASYRRMVSDWQAARRTGASVTPGRA

SEQ ID NO: 447225 - protein, 318 aa, unidentified
MTKKQAKTFIGIDVSKQLLEVAAHEHDYEFRCANKTSAFAALLAELIALRPALIVLEATGGLERAVVAALHGAGLPVVVVNPRQVRDFARALGQLAKTDRLDARVLAAFAAAIKPPLRPLKSNDELELDALSGRREQLVGILADEKNRRASAASDSVRDEIQQHIDWLTDRIAALDQQLKKLLQGSACWQAKAQILQSTPGIGPVVSCSLLAQLPELGTLNRQQISKLVGVAPLNRDSGQQRGSRHIFGGRANVRKMLYMAALTASRCNPVIKTFYERLRARQKPFKVAITACMRKLLTIINFMVRNDSLWKSAVIST

SEQ ID NO: 447226 - protein, 314 aa, unidentified
MQATVVVGIDVSKRTLEVALSSGGGFSVTNDEDGIGELLARLRPSGVALVVLEASGGYESPAYLALWEAGVPTALINPRDAYHFAQANRQLAKTDQLDARGLCEFGLRMQPEPLPPPEAADEELKALAVRRRQVIKMLAAERTRVQQAPRSVRSSVKRIVRALERELGAVDHQIEQRLRDNPRLAHRCAQLEQVPGLGPVTSAILVSRLPELGLLGPKQVAALVGVAPYDHQSGEWRGRSSIFGGRAEVRSALYMATLSAIRCNPVLRTFYRRLRAAGKPAKVAIIAAMRKLLVILNAMLKTNSPWSPPCTVTV

SEQ ID NO: 447227 - protein, 351 aa, unidentified
MDRYIGLDVHSQSCTLAVVGPAGKRIGLQVVETNGAALKQAMRAVAGAKHVCLEEGTQSAWVYELLEDEVDELVVTIPERHSGPKDDARDAWQLADGLRTGAIKRRVYKTMGPYSELRAAVRSYGQLRTDVCRAKSRLKAIYRSRGFLPGDEVFRQENEWERQLPPAQRRSAEMLRAQVESLADLWAAAEERLLEASKPHHIIRTMATAPAIGPIRAAQIVALVVTPHRFRTKRQFWAYCGLAIVTRSSADWVRDRHGKWSRAQTLQTRGLNRNRQPLLKEVFKGAAHQLTTQMTSHPLHQNYRRLVDAGVKPNLAQLTVARQLAAAVLAMWKHQEVYDPEKHRPHMTTEA

SEQ ID NO: 447228 - protein, 345 aa, unidentified
MSMVSGVFGGVDTHAEVHVAAAIDTNGGMLGIESFPTNEAGYRSLKDWLCGFGPVVKVGVEGTGSYGVGLARHLHCEGIVVVEVDRQNRQTRRKLGKSDPIDAEAAARAALSGSAKTTPKRRDGAVEQIRVLMVARRSARRQRNQTLNQLRQVVICGPDEVRARFKDRYKTGLVTEAAAMRPHKGSDPVTYTTYVVIRGLARRIRDLNDEMHTIDDALVGLVNQTAPSLLDCYGIGAVTAATLLVTAGDNPDRLHTERSWAHLCGVSPVPAGTGRTSGRVRLNHGGDRQANAALYQIVLTRMSSDDETRNYVRRRRAEGLSTREIMRCLKRYVARQTFKHLPRAA

SEQ ID NO: 447229 - protein, 364 aa, unidentified
MKKIRTAKIKSQAVNKKVTIGMDLGDRTSRYCLLDEEGVVIAEASTPTTKAGIAKVFGAMARCRVALEVGGHSPWVSRQLETFGHEVIVANPRNVRLIGESTRKDDRLDARTLARLARIDPMLLSPVRHRGAEAQADLAVIRARRVLVRARTMLINAARGLTKSFGERLRKCGAGQVAPTLAAELSAEVRAAVVPLLAEVEALNQRIAAYDRQLEQLVKEHYPEVERLTQVKGVGTQIALTFVLTVDDPNRFQRSREVGCYMGLRPGRRNSGKSEPQLHISKEGDCYMRSLLVQGAYYILGPFGIDCDLRRWGLKMSERGGKNAKKRAVVAVARKLAVLLHKLWVSGEAYDPLRNSRPLVARAA

SEQ ID NO: 447230 - protein, 412 aa, unidentified
MELLHRRCCGLDVHKETVVACLRLVSDGKVTTEVRTFQTTTADLLRLSEWLAANECTHVAMEATGVYWKPVWRILDDGEFALVLANAAHVKNVPGRKTDINDAMWLAELLAHGLIRASFVPDAQTQEMRNLLRTRKQLVREQSSHVLRVQKTLEDANIKLDSVLTDLMGKSGRAIIEALIAGETNPVKLAGLADRRVKASFEEFREALRGRVTRHHRFLLRLHLNQIDALDAAMATLDAQVEANLGPFRTAVELIGSIPGIKNLGAHVIVSEIGIDMSRFPSAAHLISWACICPRNDESAGKRRSNRVRKGGTWLKTTLVQCAWAAVKKKDSYLQAQFYRIKARRGPKKAIMAVVASILTAIYHMLKDGTMYKDLGRNHFDRRSSDQQKNRLVKRLVDLGYVVEIKALAATA

SEQ ID NO: 447231 - protein, 338 aa, unidentified
MQEARIGEYPVCIGLDVHKKYSYAAVVDDLGEIVEEVRIENTKQSLEQFASKYKGAKAVIEATGNYRFIYDVLENYMEVKLAHPYKTRIIAEAKIKNDSLDAKMLAHLLRANLIAESYVPPRDVRELRDLTRLRKALIEDRNRLKNRVHAILAKNGIIDYPNPFTKKGKEFLGNLDLSEIDRELLEINLSIIDKINEKIKRIDEIIQEKAKEDDDAILLTTIPGISYYSALLIKAEIGDINRFPNKFKLVSYAGLCPSIKQSGNKEIKGHITKQGSRMLRWILIQCANVAIRHDEYLRSFYLRIKRRRGHNIAIVATARKMLVCIYFMLKRKEVYNPR

SEQ ID NO: 447232 - protein, 366 aa, unidentified
MHVQGREPVNSLLSLIPFLQTNMTTIQLKQIDPESKPVLFAGIDVGAEELILVIRMNGKPFDPQKFANTPADRIRLVKKLVKLPGIIVCLEATGVYHFDLSLALHDAGVLLMVVNPKAAHNFAKVLMKNSKTDAVDANTLAEYAARMDFVAWTRPSGATIALRSFARRIDALTSQKAAAKNHLHALTATSETPKAVLKDVKLAIAQLEKRIDSLTAGALILIGKHPELERILALLIGIKGIGNTSAIALMGELLLLPPDLSHREWVKFAGLDPRAFDSGKSVHKKTRISKAGNRHIRSALYMPALSAKQHDPHVKAYFQHLVANGKKPLQAVCAIMRKLLHAIHGMLKHHEPFDNTRFYAIPTSVG

SEQ ID NO: 447233 - protein, 409 aa, unidentified
MDVVISRCAGLDVHQATVVATVRVPSPTGGRDVVTATFGTMTPDLIALREWLQAYGVTQVALESTGVYWKPVYYVLEDGFTLLLINMQELKRVPGRKTDVKDSEWLAQLLECGLLRASFVPPPPIRELRDLTRYRVQQVRDRAQEVNRLCKVLEDAGVKLSTVATNVIGVSGRAMLQALVEGTTDPAVLADLARGKLRKKLPDLRRALTGRCRPHHAFLLEQVLAKIDFLDEALDRLMAEIESRLGPFASMLTALDTIPGINRVGAISLLAETGGDMTRFATAGHLCSWGAMCPGQNESAGKRHSGKTRKGNRYLRAALIQAALAASRAKGTALQAQYLRIRRHRGHKKAVVAVGHQILEIAYYLMRDGGSYHELGPSYFDQRNKQRTIRRHLKQLEALGVHVTIQEAA

SEQ ID NO: 447234 - protein, 341 aa, unidentified
MQIHSVGIDLGKTTFHLVALGAAGKVLVKKKFTQMQLLTFTANMQTSLIGLEACSGAHFLGRALRAQGHDVKLIPAQFVKPFVKSNKNDFIDAEAIAEAVERKNMRFVPIKTDDQLDLQAIHRVRDRLISRRTAVINQLRAFLLERGMVFAKTPAKLRAAMADVLENGDADLTPQMRNLISMLWDEWKLVEQQITALTDDLEKIADADAGCARIRQIPGIGPVVATAIVAAIGNGAAFRKGREFAAWLGIVPRQYSTGGKARLLGISKRGNVYLRKILIHGARAAVLRIKRDRAPIGAWLDALDSRAPKNVVVVAMANKLARIAWAVLSSGNDYRPAAVPA

SEQ ID NO: 447235 - protein, 338 aa, unidentified
MGEQYVGIDLHRRRSVIVRLTGEGEVLETVRVDNDPVALSLELAKAGPNPEVVLEATYGWYWAADLLQACGARVHLAHPLGVKMFGYQRVKTDARDSRNLAELLRMGRLPEAWLAPPQVRELRELVRYRAKLVALRSGLKAQVHAVLAKEGVRVPMSDLFGVGGSRLLDELRLGRAYGLRVASLRRLLVAYDREITMFGREIASALAGDVGYLAIQAIPGVGPVLAAVFVAEIGDVHRFAGAPQLCSWAGLTPRHRESDTTVRRGPITKQGPRLVRWAAVEATQRLPGGSKQAVDFHRIADRRGTGIGRVAAARRLLTLVFYGLRDGQVRCLAPRKAM

SEQ ID NO: 447236 - protein, 411 aa, unidentified
MNPVIGLDVSKGGSQVQAFLGKGKPYRKSFKVSHTLEGLGLLVEFLEEVKRETGQKPPIVLEATGHYHSPVVQYLEDRGYLLIIINPLISYKAKSSSLRKVKTDAADAYHLCELFYKEELEPYKKRGVQLLNLRNLTRQHENITGVLIQTKLQFQANLDQVFPEYRGVFGDLYSVISLLTLSEFPSSEDILEVSVETLADKISSLCKSRSSRWAKEKVVQLKAAAIRNPFEKTVYQSHILSLRMYINIILQYKEHLSTLESEIDALAKEIEEYNIIKSIPGIGEKIAATIISEIGEIDRFTNPKKLVAFAGVDPSVFESGKFTATINRITKRGSSRLRHALYMAVRCAIRDCRKSKTSDEIIPRNRKLREFYDKKREEGKPFKVAVIACVNKLLHWIFALLKSKSTFQDIA

SEQ ID NO: 447237 - protein, 387 aa, unidentified
MPQPNDLSRSLVALDQDSTIIAVVEMSQSSWLVAGMLPGIERQPRKKLEPSAERLLGLLHRWRDEAVKAGRKITRIALAFEAGRDGFWLARWLRAHGVEAHVIHPSSVAVSREHRRAKTDRLDTELLKRGFLGWLRGERGHCTMARIPTIAEEDAKRPNRERECLVRERTRIVNRMKGTLARLGIRNFKPTLRKAAERVTTLHTPEGSALPPNVSAELQRNMARLGFVVSQIKEIEAARQKRLEQEPETEPHAMVRHLARVVGLGVETADILVNEVLSRPMRDRKAVARYAGLTGSPDESGAKRREQGLARAGNARVRCGMIQLAWRFLRFQKESALARWYQARTADSRAGTRKTMIVALARKLLIALWRFVTTGETLEGVILRPAG

SEQ ID NO: 447238 - protein, 492 aa, unidentified
MKTSRQSPSVYRNQNAHVRAVFERAGEARKVLCVALDFAKRKHVALICDGTGEILKSAFPVENSVAGVAFLIEQISATARRRKIPKNQIFLGGEDEAAYVANFTAALREKGYLVVRVNAYEAKESRENLLASTDNLDLLGIAKTLLARRSRLTGDPDQQNPVYHHLREITRCRRILTCQQTAAANRIHALVDQLFPGFLDSSKSALTPFCAASLELMKERFSAAEIARRKPAALAKFLRRHHVRQPDETATKIITLAREALPPAAHRVVTLQRVLCATTDLYGCLERNADELRADAALTLATTPYAMLTSIPGIGFVLAAGVAGELGSPKHLATLDSLCAYAGIVPRTFQSGGPDSPAAQGRSSARCNHILKDWVIQSAQKIQLYGPPELKERITRWNANGQHGFFAAARRYLRLLRTLTQNEIPYLTPEGRTRNTTPECLATAAQVAWQTLQRKWRLIPGGLDTLIDEAHPIGFWRRVIMETHGIILPARL

SEQ ID NO: 447239 - protein, 415 aa, unidentified
MSEYAALVSIDWADQKHAVCLMDQRTAKREHTIVQHSPAALQEWAQSLRRRFAGQPIAVCLEQSRGPLIYFLLQYEFFVLYPINPATLAKYRQAFSTAGGKDDPSDADYLLDLLQHHRDRLRVWRPDDQKTRTLSLLMEQRRRLVNDRTRLSNRLTAALKGYFPQILGWFEDIRTQLVCDFLTRWPQLPLLQKARPATINQFLRSHHSTSKVTNARRLAEIKSAVPLTSDPAVITASVLNVKVLVAQMKTVIAAISEYDRNIEALCLTHDDYQLFVALPGAGLIHAARLTAAFGSDRSRWHSADQLLRFSGIAPVIERSGKQFRIRWRYFCPKFFRQTFHEYAAQSIQDSFWARAYYHSQRAKGKDKQAAIRALAFKWIRIIWKCWQTRTPYNEVVYLESLRKKGSSLLTFAADY

SEQ ID NO: 447240 - protein, 410 aa, unidentified
MDKIEKRYIGLDVHKHYLIALGVDENLEVVLPARRVELEHLEGWMKKTLTRQDEVVLEMTTNTWQLYDELSANAGSVTVVHPPHVALITRSQVMNDKIAASILARLLAKGLLVGIWVPPQEVRELRGLVAQRQKMTRLATQAKNRLHAVIQRHHLKVPEGNPFAKTNNGWWQALSLGRLEKMNLQSDLETLQFAEKQQARLKEEMTGIVAENEEMGRLLHLAGFGVITAMTVYAAIGDIRRFAEAKKLVGYAGLGARVHDSGMTTRTGHITKAGRRDLRVALVEAAHVAANTHPHWKAELARLQPRLGYNKAIVAIARKLLISVWHVLSHKVTERFAEPEAVAQKLLRFAYEVGKENRPGRQTAASFARDRLDVLGLGQELTSLSWGAKKPIPLPPSALPKKKESDVPNR

SEQ ID NO: 447241 - protein, 421 aa, unidentified
MKFKSQDKQNQLIENITFHHIVVGVDIAQETHVARAVNFRGVALGNPLVFSNDEDGFKSLDRWIRDLLASFKLSQVIVGMEPTGHYWLSLAGWLKNKAIEAVLVNPHLVKKNKENRDNTRSKSDKKDALVIADMVKNGYYSPVRFHSSEYEELRVLMANRETVVKRLVSAVNQIHRWVDIVFPELRQVFKILTCKGALLTLRLFPLPTELCKLSPDDVIKGWQKSMKRHSGVRRAHLLIDLAKKTVGSKQATHAYKLHLEQLLEEHDLASKQLQRIEEEAKDVVERIPYSGKILAITGISAIALAGILGEAGDLRGYAHGNALLRHAGLNITEASSGKWKGQLKLSKRGRPRLRHFLYLITMCMVMSNQEFKALHHYNVQVKKLKKMKSIMKLCGKLARLLVGMARSDEAYNPDKIFALAA

SEQ ID NO: 447242 - protein, 318 aa, unidentified
MNSTCSSLAILGLDVAKASVQAELQSASGSKVRFAFANNPTGFKKLARVLEQHPPAMLHAGLEATGPYSQALARWLQEQGYRVSLLNPRRVKDYARSAGLRNKTDALDAGVIADFVRAHRERLPGWRPAVAEVQQLQELVRRRHQIEVMLLAEKNRLEATPDTVRCSIERLISMLRAEKASLERALAQQIDSHAQLARNHQLLRTIKGIGPLSATVLLAEMAGPDQVQRARQAAARAGLSPRRQQSGTSVRRNKGIGKEGSRYLRKALYMPALVAIKHNAPLRHFARKLQAAGKPKMAIVCAVMRKLIHISFGVLKHQ

SEQ ID NO: 447243 - protein, 373 aa, unidentified
MLYCSTGIRKIQPQEYDVFFGLDVDKRSIVGLQVDHLGVEQSVRMPYDAAKMLHYLGHRLNDQRVALVYEAGPTGFGLADTLLAAGYPCMVVNAAQVPTERGKRVRTNRLDARKLAYQLRGGNLHGILVPSEIYRHLREYVTLRKMHMTDSTKCKQRIKALFLRYGFAWPDPRESGTWSKALIRQLTDYECAPALHFKLQSLIASLAFSRSQALTAQQDMRRFVEATPELAESVRYAMSIPGIGWIVSTYAIARIGDWRELKTSDQTASFMGLVQSEDSTGDTNSRGSITKAGDPVLRSLMIEASWTAIRKDPELAAFYERIKQTHAKDKASQIAIVAVARKVATRLHCVLKERRVYQVKIVSDAPERRFGVS

SEQ ID NO: 447244 - protein, 415 aa, unidentified
MVQPRNKVCGVDIHKKFLVATILARDGTRMQKRFGADIDDLLNFRDWVLEENCDCVAIESTGVYWYPVNAVLENKVELILANAHQIKHTPGRKTDALDSEWIAEVALNNLIDPSRILPKEDRDLRRLTRTRESLVKIRSQMKNQVHQGLESCSIKLSSVLSDSFGKSGRHILDGLINGKSIDEIIDGIPAKRVRKNGDQIRTAIKTGIDQTQVFLIESHLDTIDGLTQKLDKIDLEIKQRISGRKDDLKIAMSVPGIGFTAATTILAEIGNFKDFSTPDRLAAWCGLVPSVYQSADKLLTGSITKQGSKHIRWIMVQVAQAAAKKRGSKLRKFFLRVKARKGHNVAVVALARKILCILHHLLMNQEMYQEDGVEKSRPSKIDWSSAATDRMSLQVMIETIAKAGYEVKKIKRDGG

SEQ ID NO: 447245 - protein, 323 aa, unidentified
MTDSPSIVVAGIDVGKSKLDVHILGVGLDRQFDNTKTGRRALRNWLLKLGVYRTVFEPTGRYHRNLHQCLFDSGLQTVLVNPLRSRRFAEAIGQLAKNDRVDASMLARFGLLDDLESTPPQPDILYRLSDLLALRRKLVEHLGALRKLCAELDPEAAACPSATLDALQADIADCDRRMRDCIAADTVLSRRDAIIQSIPGFGPVNAACLCAGMPELGSLGRRQAASLLGLAPFDRDSGQHRGARSIRGGRAQPRHLLYMAALSAIRCEPSSQLCYQRLTANGKPHKVALVAVMRRLVGLLDTLLREDRLWQPRPPARLLEAAA

SEQ ID NO: 447246 - protein, 389 aa, unidentified
MKIFVGIDIAKLNHFAAAISSDGEILLEPFKFTNDADGFQLLVSKLESFDKNSIIIGLESTAHYGDNLVRYLVAEFYQVCVLNPIKTCQMRKNNVRKTKTDKVDTFVIAKTLMMQDDLRFITFFDLDMMDLKALGRFRQKTIKQRTRLKIQLTTYVDQVFPEIQYFFKSGLHQHAVYALLKEAPSPKEIASMHMTHLANLLKVNSHGHFTKELAKELRVLAQKSVGANDSAISIQITQTIQQIELLDSQLEKTEAEMTDIMKFNDSVIMTIPGIGYINGGMILGEIGDIHRFSNPNKLLAFAGLDPSVYQSGNFQAKTTRMSKRGSRVLRYALVNAAWNVVRNNATFKAYYDAKRAEGRSHYNALGHCAGKLVRVIWKMLTDEVEFNLE

SEQ ID NO: 447247 - protein, 345 aa, unidentified
MLYVGLDLSRKRLDWQALDQAGEQVAVGAAPPDRDGLAQLARRLGDCEIVAVIESMSGARFVHDELERWGWDVRVADASKARGIAPLACKTDRIDCWVLAELARRDLVPEVWLPDAAVRAERERARFRLYLVRHRVSLKNRVHAILFQHGIPVAHSDLFGAAGRRTLERLRLPEPWQSTVCCSLELIDTLNTEIRDCERELKRLGADHPYVSRLVTCPGIGPVLAYTIASEIGDIARFQSPRKLVGYTGLCPRVDQSGERDRRGALRKNGPTYLRWALIEAAHVAVRCYPPYRELAETMRDRHGRARGGNIAAVETGRRLSEAIWHMLTNDQPFAPAGARYRSAA

SEQ ID NO: 447248 - protein, 351 aa, unidentified
MRRPKDKLIAGIDLHSNNLMIGLINQDGTRVAHRKLACDLKAVEEFLRPYKSQLQSMAVESTFNWYWLVDGLRQLDYSIDLANPAKIEQYHGMKHVDDKDDAYHLAELQRLKILPKAHVYDPKLRPVRDLLRRRTMLVHQRTALLLSFKSLYARTTGQALDLSDVKKMEPEQAPKLYEHPANQLIARVQAEHIQSLEKSIRLIEKAVLDCAHELPLYERLLTIPGIGRVLGMTITMEVGDIKRFKTDGDFASYCRTVDAKRLSNGKAKADNNQKCGNAYLAWALVEGANFARRFDEPCRRWYDRKAAKTSKIIATKALACKLAKAAWHVMAGPASYDEKRMFPELAVKKKD

SEQ ID NO: 447249 - protein, 336 aa, unidentified
MKEVTTIGIDLAKNVFQLHGVDRHGKPSLRKMVSRAKLLETLANLPPCLIGIEACGGAHHWARKITELGHTVRMIAPQFVVPYRKSGKNDANDAEAICEAVTRPNMRFVPIKTPEQQAALTLHRVRESIKVDRTALINRIRGLLQEFGIVLPQGAAKFSLRLLEAITDADIPLDAIGIFAALRGDLLRLDERLAECDQRIARLAQEETAQRLAEIPGIGPVTATAVVATVGDAKLFHNGRELAAWVGLVPRQSSSGGKTRLGRITKHGDSYLRTLFVQGAMAVIRHVGEKSDPRSQWIRDLVNRRGVQKTAVALAAKMARTAWALMARGESYRVAA

SEQ ID NO: 447250 - protein, 320 aa, unidentified
MSAISVVAGIDVAKAHVDMDVAGAEFTPQRFANDAEGHSAVASALKALDVGLVVMEATGGYEASLACALQGAGLAVAVVNPKQPRKFAESQGYLAKTDRIDARVLAEFGLTLARRRDLQRFLKPMVEVDQQWLAALVTRRRQLVAMMVSERQRLQITPVKLHPSLEAIIKALKAQLDDVDAQMAGHVKEHFGELDALLQSVSGIGPVASATLIAELPELGKLNRRQIASLVGVAPFARESGRNKGRRQIYAGRFDVRRVLYMATLTAAFRNPVFKAFYQRLIAAGKLPKVALVACMRKLLATLNAMVKTSSKWQPDYRRA

SEQ ID NO: 447251 - protein, 330 aa, unidentified
MFLGIDLHDHEAQVAVVDDDGNLQEEIRLPTNRLDELAEEYAGGEAAIEASSHYRAAYEMLDEHLDVTVANPSENRVIADATVKTDRLDAKRLAHLLHTGWIAESYVPEDEIRELRDLARARRSLVKERTAEKNRVRAVLKRTNNTYDSELFGPTGREFLAELSLSSPDRTIIEAHLAVIDELDEQMEMLEEKIERRVLESPAAQLLLTIPGVGQTTAAVIVAELGEIDRFDTDKEVVNYAGLDPMVHQSGETEIHGSISKKGPGALRWALVESARIAVRCEEYFGNFYTRLKQKKNDQIAIVATARKLLVSVFYMLKRNEPFDPPEAAT

SEQ ID NO: 447252 - protein, 459 aa, unidentified
MSKKSSKKAKSQRSRERALLNKVHLNAAGIDVGADTHWVAVPEDRDQRPVRNFGVFTSDLIALCQWLKACQIQSVAMESTGVYWIPLFQMLEREGFEVQLVNAKHVKNVPGRKTDVKDCQWLQQLHTFGMLGGSFRPQAQMCVVRSYLRLRDTLSKDCNSLVQRMQKALTEMNIQVHRVISDITGLTGMSILRAILAGERDCIKLAQLKHPQIKSSTQQIAKALEGDYCQEHLFALQTALELYDNYQLKIMECDKRVEEAMGVFEAKVQVAAPDLSRLRSAQKRQEALRRHHLEQMTGADLTKLPGLDLLAVQRILSEVGLDMSRWPSEKHFCAWLNVAPNNRISGGKILSSKPRKNANRAAAALRLAAQSAMQSKTAIGAFIRRMKVRLGAPTAINAGAHKLARLLYRMLKFGKAYVETGQEAYERLFKERTIRNLQRKARELGFHLTPATPGALAPS

SEQ ID NO: 447253 - protein, 406 aa, unidentified
MISVGIDVSKGKSTVCAIKPYGEVLMTPRDFKHTKDDLDSLVKQLSRFKEEIHIIMEATGNYHLPVYQYLKSKDYQISIINPLEMKRYRCQGIRNPKTDKIDSMIIAQYGIDYWYRFKPNDDMDEKRQELRLLGKQYTSYMRIRTIRCQDLCHILDRTMPGVYGLLDDFNRNNGQDKLCDFAEKYYHSDNITKYSEKVFTERYSSWLKKKGYRPNEKEAHQLYSIAKNAIPTLDSKLPSTKLLVQEAVNVLREVDSSLYDILNQLKDLSKEMPEYETVLSMKGIGTTLAPRFIAEIGDPRRFHSAKALIAYAGIDAPPYQSGQFTGTKRHISKRGSSNLRKLGFELMDSVNKHKSSYTGDPVCEYFMKKRNEGKPYRVAMIATFNKFLRIYHSRVSEVLNEYDNSH

SEQ ID NO: 447254 - protein, 424 aa, unidentified
MKANDTTNTNPSPESPRAWIGLDWGDQQHSFALQECGGQIQTGTLEHSSENLHRWLKELEHRFGGRLVQMGIETSRGAVIAALLHYPWLEIYPINPVTSARYRRAFTPSGAKDDLPDALVCLELVRDHTAKLRPLQPQDPQTLKLSGLVQARRDLVDRRTALLNQLTSLLKSYYPQALTLLENLNTPMAVGFLRRWPEVISLKTARPATIKKFFYQHNVRSQELVKKRLALIERAVALTTEEARVSVAVLQLRALVDQLEVFQKHVARLDVEIKNAFTEHPEAYLFRDLPGAGQQLAPRLCAAFGTDRAAYAEPGSLQKYAGLAPVREKSGGQLWTHWRWNAPAFLRQSFVEWAGQTVRYSQWARVYYQRMAKQGKTHAVIIRALAFKWIRILWKCWQERTAYDEARYLKQLIHRKSPNAVTTA

SEQ ID NO: 447255 - protein, 433 aa, unidentified
MKAKIIPQNIPVAGIDVSKDKSDFCILDTANKIFRRGIVQHTLDSMTAFLKIISDAADKLGAKPIFVMEATAYYHLMLHKLLTENGYAVIVINPIQSGSIRNVDIRNIKNDKVDAYRLAYLYRLGKLKASNIPAGDISRLRSLCRYHMSVTDDITEHTLRLRSYVDQSFPGFENVFSKLKGKTPLAVLEKYPSPKAILNADEKELAELLSSVSRKGMQYAEPRVRKLKAAAETALKIGLDRPEDEILIPAEIAVIHQHQMNLNKVDEEIKAVIKNCGTLKEQAELLKTIPGVGDHSAAALIAEIGDISLFSNAKCLTAYFGLEPAQRQSGKFTGTRTKLSKRDSSYLRRVINMVAVKSSFKQKNGTYANPVLAEYYEHKCEQKEKKTALCAVMRKLVHIIYAVLRDRKPFELRTPKQHEQLIFEKNRMLRLTA

SEQ ID NO: 447256 - protein, 346 aa, unidentified
MKNIKVLGIDLAKNVFQLHGTDTNGKCVIRKRLSRSALIEFLVNLPSCLIGIEACTGAHYWARNFEQMGHKVKMMAPQFVKPYVRSNKNDRNDARAIAEAVTRPEMKFVPIKKIEQQDTLLLHRARSLVIKQRTAQANQIRGLLAEYGIIIPKGITHLKKLAEILDYNKEKLTEKSYAVFTKLNEQFKVYNTEVSAYDKQIEMMANANVMCREIMKIEGIGPLTASATVATIGDAKVFKNGREVSAWLGLVPKQHSSGNTIRLSGISKRGDNYVRMLLIHGARSVVKTCEQKTDRKNTWVSNKKNNCGFNKAAVALANKNARVIWAILATGESYRNPGNFRELSDK

SEQ ID NO: 447257 - protein, 356 aa, unidentified
MTSIPHSAVPQLTFGVDTHLEVHVAHANDQLGRPVATLQIPTTPAGYQQLLRWAHELGEPVAWGVEGTGSYGAALARFLTVNGQVVVEVNRPDRQARRRQGKSDPLDARAAAKAVQAGEVTVLPKAGTGQVEMIRCLRVARATAMRARTQTINALKGLLVTAPTELREQLRGQSSIRLVQAAAALEPGPLTSPLAAASFALGSLARRHQALSAEIDSLTSQLERLVATAAPELVARFGIGHDSAGALLVAAGDNPDRLRSEAAFSMLCGASPIPASSGKTIRHRLNRGGDRQANAALHRIVVVRLRYHQPTRDYMTTRMAQGKTKKEIIRCLKRYVAREVFAVLHQLHHNNFTPAT

SEQ ID NO: 447258 - protein, 334 aa, unidentified
MENIALIGIDLGKNSFHIHCQDRRGKAVYRKKFTRPKLIEFLATCPATTIAMEACGGSHFMARKLEELGHSPKLISPQFVRPFVKSNKNDFVDAEAICEAASRPSMRFVQPRTESQQAMRALHRVRESLVQDKVKTTNQMHAFLLEFGISVPRGAAVISRLSTILEDNSLPLYLSQLLLKLQQHYHYLVEQIKDLESQLKRKLDEDEVGQRLLSIPCVGTLTASTISTEIGDGKQYASSRDFAAATGLVPRQYSTGGRTTLLGISKRGNKKIRTLLVQCARVFIQKLEHQSGKLADWVRDLLCRKSNFVVTCALANKLARIAWALTAQQQTYVA

SEQ ID NO: 447259 - protein, 350 aa, unidentified
MWYVGLDIGLKWHYVVVMDADGHITQQQRLPNEACLIQRFFETLEGPCRVVLEATSNWHAVFDRVEPYVAEVVLAHPLKVKAIASARIKTDKIDATTLAHLLRANLIPQAYIPPRAVRDWREVVRHRAFLVRLQTRVKNRVHTLLAKRGVTLPGHSDLFGAAGRQWLTTLALPEPYGAMRTRYLTVLDQLRNQIRDVERTIDQTVQTTLEAQLLETIPGIGRSLALLILAEIGTIQRFPDPKHLVAYAGLCPSTYASGQTVRHGHLTHQGSPWLRWALVEAACHVWQAPQSRLCQVYHRLCQRRDAKTARVAVARKLCTILFAMLHKSEPYRDVPVSPLDPPRRLDAACR

SEQ ID NO: 447260 - protein, 401 aa, unidentified
MDNIKMFYVGIDVSKDKSDICIKDEKGNDLIHRFEITNKKADLEMLYETVESIKRNIPGNSDVVFGMEATGIYSLPLYSALKRDGYKVKLYNPIQTNGYRKINIRKTKTDPIDSAIIAEMLRHSEAPQVSEIQDMHLFQLRELVRVRHRLIEKQALCKVQMVRNIDTIWPGYGGVIKRVFGAASLAILKKYSVPSKLRSESFEHFYELVKKKSRSKISRSKAEEIYANAGNVLTIPELDSVIAIEIKTLITQLELYDEQIQSVEGKIDQMMKLTDTKIMSIPGIADILGPTILGEIGNVERFSNVKKLVAFAGLDPVVNQSGRFENKSGKISKRGSPLLRHALFLAANSAIQNDENLKRFYTKKRSEGKHHFSALNAVAAKLLRIVYWVLKNNKEYQIQLN

SEQ ID NO: 447261 - protein, 417 aa, unidentified
MSQKLNAAIAVIGIDIGKNSFHIVGHDHRGAIVLRQKWSRGQVEARLANLPPCLIGMEACVGAHHLSRKLQMLGHDARLMPAKYVRPYSKGQKNDFRDAEAIAEAVQRPTMKFVATKTADQLDLQALHRVRDRLVGQRTGVINQIRAFLLERGIAVRQGLRSLRSELPGILATRTDVLSPRMLRIIEGLAGDWRRLDERIEGLSSEIETLARQDKACERLMTVPGIGPIISSAMVAAIGTGDVFSKGRDFGAWLGLVPKQISTGDRTILGKISRRGNRYLRSLFVQAAWVVLVKIGPKHWDRYGSSRGSRPPGSASTTTCWRLRSPTSSPGSPGRFSTRDAPSSASRRRRRRPDLPDPRAVLGAVKAQPGSGRARRQDSTTAGLDGPCARRVCTRRPGRRNDRQARTKEQREVRSYR

SEQ ID NO: 447262 - protein, 376 aa, unidentified
MSKVRFVGLDVHADTIAVAVAETGGEVRSLGVIPNRLESVRKLVHKLGPVQHLRACYEAGPTGYVLYWQLTQLGVLCEVIAPSLIPTRPGDRVKTDRRDAEKLARCYRAGELTAVWVPDAAHEALRDLVRAREAAKKDQLKARHRLGKFLLRHGRRPEGLKAWTHQYMEWIKSHVRFEQAALEATLADYVEEVDHVAARILKLEKAIDEAVRQASPEIRTVIEALQALRGVAQTTAATIVSELGSLARFQSPRQLMGYSGLVAREHSSGNRVQRGGITKTGNSHVRRVLVEAAWAYQHRPNVTGFLLRRQKNLALSEEAKKVAWKAQQRLHKRYKALAACGKNKNQIVTAVGRELLGFIWAIAVEAEKQQRHANAA

SEQ ID NO: 447263 - protein, 369 aa, unidentified
MPLVRGERAARFSFGTPSPRGSIWRAFATVLWKPEQLIDFNSHLQGWETENMPELIHVGIDVSKDALEVACGPESPTQCFTNDDAGHEALVNVLHVHRVDLIVMEATGGYEAPCACALQAAGLAVAVVNARQARDFAKAMGYLAKTDRIDAQVLAALAAVLANRADRQKLIKALPSDEQQRLHALVLRRRQLVQMLVAERNRLPMSHQAARVSIEALIKAIRKQIVDIEADLSSHIAHHHADLAGLLRSAKGIGPHTSMALIADLPELGKLSNREISALVGLAPFNRDSGKMRGKRMIFGGRTQVRCALYMATIVAMRHNRVIQRFYQRLLAAGKPKKVAIVACMRKLLTILNAMVRTGKQWDETFHFA

SEQ ID NO: 447264 - protein, 337 aa, unidentified
MGLYCGIDLHSNNHVVTVIDEGDRRLYERRLPNDLAITRAALEPFRAQLVAVAVESTFNWYWLVDGLMDAGYEVRLVHTGAVVQYDGLKHTDDEHDAFWLAHLMRLGILPTGYIYPKSERGLRDLARQRMRLVQHRTSHITSVQNQVWRSTAVRLSSHTIKGEGKQPWPELRDADLALSVATGRAAIDALTAQIERLEELLLKRVGLSPQFQVLKTVTGIGPILALTIALEVGDIKRFPGVGEFASYCRCVDSQRLSNAKKKGEANRKNGNPYLAWAFMEAAHFAIRYLPAARRFYERKCRQRNALLAVKALAHKLARACFYMLRDQVPFAPERLFV

SEQ ID NO: 447265 - protein, 334 aa, unidentified
MENIALIGIDLGKNSFHIHCQDHRGKAVYRKKFTRPKLIEFLATCPATTIAMEACGGSHFMARKLAELGHFPKLISPQFVRPFVKSNKNDFVDAEAICEAASRPSMRFVQPRTESQQAMRALHRVRESLVQDKVKTTNQMHAFLLEFGISVPRGAAVISRLSTLLEDSSLPLYLSQLLLKLQQHYHYLVEQIKDLESQLKRKLDEDEVGQRLLSIPCVGRLTASTISTEIGDGKQYASSRDFAAATGLVPRQYSTGGRTTLLGISKRGNKKIRTLLVQCARVFIQKLEHQSGKLADWVRELLCRKSNFVVTCALANKLARIAWALTARQQTYEA

SEQ ID NO: 447266 - protein, 396 aa, unidentified
MSKPCQGKRFFGLDLHKKYATICAVSQQGEVVLREEHLPLDQLPTWAAGTLTPDDAVALEATANSWWAYDCLSAHAGRVLVVNPIKTRLIAEARINTDELSAEALARLLHSNFICEVWVPDERTRRYRQLISHRIRLVQEGTRLKNRIHAILHRRQIRPPYRNLFSRAGRAWLEKLDLPEVEKLLLRQNLQLLKSTEEAVAEIEPLLARLAQEDERVPILMQIPGINIFGALAILAEIGEITRFASAKKLSSYAGLVPSLHRSGQKNSSGPITKAGRSRLRWVMVEAAHVAVRYDPQLGRFFYRLRARKGTNVAIVATARKMLVIIWHLLSGDGVYRGRRVQMVARKFLEWGWAVGEKYRCGSNKDFVLEHLRQMQINDLTHIKLGSRVYSLTGVK

SEQ ID NO: 447267 - protein, 322 aa, unidentified
MSGSSVMIGIDVASAHVDVAAIGGELPVALGRVANDAEGHSALADGLARLTPALVLMEATGGYEAALACALQVAGLRVAVINPRMARDFARAMQRLAKTDRIDAATLAEFAGVLARRPDCERFIRPLSEPEQQDLAALVTRRRQLVSMQLAERQRLRLARLVARPSIEALLAAIARQLDEVEAQLARHVEQHHAAMAKLLQSVAGIGKVAAATLLAELPELGRLNRRQICALVGVAPYANDSGASRGRRHIAGGRFELRRALYMATLTATRHNAAIRAFYERLVAAGKLKKVALVACMRKLITHLNALTRDHLHDQDRFAIA

SEQ ID NO: 447268 - protein, 342 aa, unidentified
MQITTIGLDIAKNVFQVHGIDAAEKVIVRKQLRRGQMLAFFKALPPCLVGMEACATSHYWARELTKLGHQVRLMPAKDVKAYVKRNKNDAADAQAICEAVRRPTMRFVQIKSVEQQGQLMLHRARDLLMRQRTQLINALRAHMAELGIVAAQGREGVKELLKIIATEQDARLPVDAHTSLVVLAGGLQALQTMIRSIERRIIAQHRSDEASKRLRSIPGIGIVGATAIAATVPDPKVFRSGRDFAAWIGIVPRQDSTGGKQKLGPISKQGDQYLRRILVVGAHAVLKRARHQPEKYPWVTRLLERRPFRVVAVAVANKMARVAWALLARGGSYRAPALAAAA

SEQ ID NO: 447269 - protein, 405 aa, unidentified
MKLYIGIDWSQGKHDICFVNTKGVIQSQLVIPHSQTGFWEFEQRRKKLGVPAENCLVGLETSYSILVDFLWDRGYANIFVLPPTLVKGSRTRMRSSAAKDDPGDAYLIADILRTDHGRLQTWQPDSGLTRQIRTKVRFISFLTRNIVRMTNRQRAVLLRYYPVAAELFSSLSTLISQHFILAYPTPQAAAALDLDSFRKFAKQHRYTHKSKLASILAKLDQDDPLADMDIIVACQDEAQGLAHVLLDMIRLKRDNLKQLQQLLDLHPDQNIFASLPGTGVYLQAALISKFGDDRGRFSTPGRVQAIAGTSPVTIRSGKSKYVRFRKSCDYEFRHIVQQWAKQSLRSSVWANAYYARVRPNCDSESHAFRCVANRWLAILWRLWQDHTLYDETYHLKQRALRSQPR

SEQ ID NO: 447270 - protein, 329 aa, unidentified
MTTPNATDCTFAGIDVSKHKLDLAQTGIQQVATFTNDPAGITQLVELLLKAPPKLIVVEATGGLERPLLQALLDASLPVHLANPRQVRYYALSLGILAKTDPIDAHVIERYAAQLSPHLLQKRSENQTELEALVTCRRQLLHVRTEQTNRLGQTTSKSARKSIQAVLKTVQKQLKLLDSQIRQLIESDNDLDDLDKLLRSVPGIGDVASATLLCEMSELGKMDRGQAAALLGVAPFNRDSGKYRGKRVIRGGRASVRSVLYMSAVCAIRFNPIVKAFAQRLQKAGKLPKVIIVAAMRKLVCIINAMVREGLRWDELDIVKKLNSAESVA

SEQ ID NO: 447271 - protein, 352 aa, unidentified
MRKKCSTVSFKSQVIYCGIDVHKKSWKVCTRHCGMQLDNFSMDPDPQKLAEYLKRNYPEAEYRSVYEAGFSGFEAHRTLCKLGVLNIVINPADVPTSGKERNYKNDSIDSRKLARELENGSLEGIYIPEPENLVLRNLTRRKEQLTGNITRTKNRIRSHLFFLGLKFRSWSGSSLKIMESDAEKRFDHALSSDLRELRFLREERLRVIRCEHACLKHLKREEIQKNLESIPGIGFDTAVVLQAELWDMKRFKGKDQLNSYVGLAPHLVGSGEHEEVKSSGNRKKKQLHYRLIESAWRAVRFNREYGAKYGAMIGKGICPQKAISIIAKKLLLSIRAVWLQNREYQVLLPKTK

SEQ ID NO: 447272 - protein, 405 aa, unidentified
MFEIEDVGVFLGLDVGKSAHHGHGLTPAGKKVFDKPLPNSEPRLRAVFDKLREKFGTVLVIVDQPASIGALPLTVARDAGCQVAYLPGLAMRRIADLYPGEAKTDAKDAAVIADAARTMPHTLRSLELTDEITAELTVLVGFDQDLAAEATRTSNRIRGLLTQFHPSLERVLSPRLDHQAVTWLLERYGSPSALRKAGRRRLVELIRPKAPRMAQRLIDDVFDALDEQTVVVPGTGTLDIVIPSLAASLAAVHTQRRAMEAQINALLEAHPLSPVLTSMPGVGVRTAAVLLVTVGDGTSFPTAAHLASYAGLAPTTKSSGTSIHGEHAPRGGNRQLKRAMFLSAFACMNADPASRTYYDRQRARGKTHTQALLRLARQRISVLFAMLRDGTFYESRTPKDVELAA

SEQ ID NO: 447273 - protein, 451 aa, unidentified
MTKSKRRHPERDFTPTHPNAAAIDIGSRMHVAAVPPDRDPEPVRAFGTRTGDLQQLADWFERCGVRTVAMESTGVYWIPAYELLEQRGFEVVLVNARDAKHVPGRKTDVSDAQWLRRLHEYGLLRASFRPKGELAALRAYLRQRERLLDYSASHIQHMQKALMQMNVQLHHVVTDVTGETGMRIIRAVVAGERDPAVLATHRDRRCHASEEEIAAALAGNWREEHVFALGQALELYDAYHAKVVECDLRIEIVLRRLRDAAAKPAGRLPPARHRDKTANAPAFDARAALHAVLGVDLTQIHGLGPSLALKLIGECGTDLSAWPNAKHFTSWLCLAPANKISGGKVLSTRTRRSGSRAAALLRLAAVTVGRTQTALGAFYRRLSARVGKAKAVTATARKIATLFYNTLRHGIDYADPGASYYEDRYRARVLANLRRRAKSLGYMLHEMSAPG

SEQ ID NO: 447274 - protein, 369 aa, unidentified
MEEIPFVINHVLTIKKTAMEKPIKQCVGIDVSKDELVVSYGVMDGNFDIRILSNASFPNKQSGFTRLLKWSETLNASQGDIVYLLESTGVYHQQFALYLHDNGCKVVVVLPNKAKAFMKTLPVKTVNDKVSAQMLAQLGLEKKLDQWQPPAPVYRELNQLTRERDQLMDEQTQIKNQLHAEQSGAWPNKQSIKRMKSRLGLLAKQIDQIENEIAELVKAQPLLQQKIDTVCTIPGVGLITAVTVIAETNGFNLIRNKKQLVSYAGLDIITKDSGTSVRSKPRISHRGNKYLRKCLHFPALTAIRHTHSMKTLFTRLVDKHGIKMKGAVAVQRKLLILIYVLWKKNEPFDNNYHLKIKEPRVIGALHELA

SEQ ID NO: 447275 - protein, 421 aa, unidentified
MKFKAQDKQNQLIENITVHHLVVGVDIAQDTHVARAVSFRGIALGTPLAFNSHLEGFEQFGRWIQDLFKTYTLNKVIVGMEPTGHYWLSLARWLASQGIEVVLVNPHLVKKNKENRDNTPSKSDRKDALVIADMVKNGYYSPVRFPSETYEGLRILMANRETVTKRLNSAVNQIHRWVDIVFPELRQVFKILTCTSAIATLRLFPLPKEISRLSTDQVLAGWKQFVKRHAGVKRAEQLIALAKCSVGTTQALHAYKLHLGQLLEEYDLALRQLAQIERELHLILERIPYAKKLLEIRGVNVTGLAGVLGEAGDLSGFAHGNALLRHAGLNLAEASSGKWQGKMVLSKRGRPRLRHFLYLMTMCMVMTNPEIRALHRYNVEEKKLKRMKSIMKLCGKVARMLIGLAKSSEAYDPTRVFPQAA

SEQ ID NO: 447276 - protein, 476 aa, unidentified
MAVNEDAQGPDDVRSEGWIRYGGGAMSHLEENKAIVRRFVEAVNARDYDALEAITAPDIVRHCPATPRQYGWVMPSGRIRDLPHVVDRGFRDADEGAAQSHIQRRQVMAKRSMFVGMDVHKESIDVSLAEEGRDGEVRRYGVIPGDLEAVAKVVRALRAPNRRLRFVYEAGPCGFGIHRYLTGQGEDCVVVNPSSMPKRSGDRIKTDRRDGDALARLHRAGELTAIYIPTPDDEALRDLVRAREDAVGLSTQAKHRLKAFLLRQGRRYPGRAGWTRPYRRWLADLSFPLAPQHIALQEYRDTIDETERRVERLTDQLRQLTPAWRWAPVVDALQALRGVSFVTAVGLVVEMGDIRRFDHPRQLMAFLGLVPSEYSSGPSVRRGGITKAGNPHARRLLAEAAWAYQGVPRIGRQMLYRQETLPKPIRDIAWKAQLRLTSRFRKLVARGKAKPKVATAIARELTGFIWAIAREVPPPA

SEQ ID NO: 447277 - protein, 360 aa, unidentified
MRRPKEKLIAGIDLHSNNLMIGVINQEGKRVAYRKLECDLEKVVDFLKPFKPQLQSMAVESTFNWYWLVDGLRARAYPIDLANPARIEQYRGIKHADDQDDAFHLAELQRLNILPKAHVYDPHLRPVRDLLRRRTNLVHQRTALLLSFKSLYARTTGQRLDLGDAKKMEPKEAPKLYAHPANQLIAQVQAEHMQALAKSIARIEKVVLACAREIPLYEKLLTIPGIGRVLGMTITMEVGDVKRFKTDGDFASYCRLVDARHLSNGKRKAENNAKCGNKYLSWAFVEASHFARRYDESCRRWYDRKAAKTSSILATKALGCKLAKAAWHVMTQQTDYDAQRLFPEPAAPKTTERKKMMNQN

SEQ ID NO: 447278 - protein, 346 aa, unidentified
MKHVGLDVHQLRTQVCIMDDETGEILDNQSVLTAQVCDFLRDQGPEPLQVVLESGGLSWFVALQLQSLGVPVVVVDAHKAHPYLEREATAKTDSHDARGLARLSYEGRCQRMQVWLPDEATLVLRHCTRLREDLVRDRTRAINQLRCELRSLGLVCEASDMSGLKARRWWEQTRPLLLPALAELLDQRWERLRSLDGELRQAERQLAELTKDDPVCQQLDSIPGCGLVLIATIRAEVGDVQRFDEPKQLRSYAGLTPQVRQSGEKRWTGPLEKRHDPHLRRALLLLAQQVARSQAWKGTRLVQQYWQHYRRLGPNVARVALARRLCDLIHVLLTRGEDLDLKRWAA

SEQ ID NO: 447279 - protein, 369 aa, unidentified
MIHVGIDHHKRSSHIIAMHDSGEILWDRDMPSCRESFEAVRMSLPPGEPVQSALEAGPNWGIPFDMLEELGLGPKLSNPLKTKLIGESFIKTDKIDATAIATMLRAGILPLVHVPSKEVRAQKNLLRQRFWLVKLQTMLKNRIHALVDRNHVRPPEKTDLFGSHGRAWLNALTLPDPDGKMLKSDLELLDTVRSHIRQTEKWIDEELKANRGISILESLPGIGKLLAALAALEIDTIERFPTPEKLCSYSGLVPSTFQTGGYSGKTFHGGLIPTCNHHLRYVFIEAAWTAARVSPHFSAYYRRMRFAKSAQDVIAAVARKLCVVAWHCLKKRRNYVEKPYRLNGRRARTPLAAETRVGVVGKTAIKTGF

SEQ ID NO: 447280 - protein, 360 aa, unidentified
MTESTPIVAFDQHAASVMAAVLLPGERTPALHPLPPDCPSIRRFLERLALPGVRCCYEAGPCGFDLQRTLQTAGIACDVIAPALIPRRAGDRVKTDRRDAAQLAVLYRAGALTAIHIPTEQEEAVRDLLRCREDICTDLLRAKHRLSKFLLRHGRRCPDGRAWSKRYIAWLTGQRWPLSALEQTFTSYRRAIDDTVARLRSVDADLQAALTVAPLAPRVARLRCFRGIDDLTALTIAVELGDATRFPAARQVMGFTGLVPSEYSSGATQKRGGITKTGNTHLRRVLVEAAWHYRHRPAVSHRLRIRQQGAPPAAIRVAWSAQHRLHARYRRLLARGKSPQLAVTAVARELSAFVWAALAP

SEQ ID NO: 447281 - protein, 361 aa, unidentified
MATITLGIDLSKQVFSTCMLDGSGRVMQRREMRRDAFAAWLAQCPAGAIVAMEACSGAHHWARRCSEHGLNPRLIAAQFVKPFRKSQSAKNDRNDAEAIATAARQGNMRFVPVKTVEQQARLSWHRVREGYKVEALATANRLRGLLAEFGIAISRSDVALRRTLGDDRIRAALPPGLLPLIDGLQSHWRQLHERIAACDATITGQARTDERCLRLQRITGVGPLTADALVATVGTAADYKNGRQLAAWLGLVPTQYSSGGRSRLGSISCRGDSYLRTLLIQGARSSLQRAKAVDRGRATPEQLWIQSLASRLPFGKVLVAIANKHARQMWAILARGEDYDPHAWMRHPMTQRGKSKRSLAA

SEQ ID NO: 447282 - protein, 398 aa, unidentified
MTESSDYESVQVFIGVDVGKDTHHAVAINRSGKRLFDKALPNDENKLRSLISGLKQHGQILLVVDQPATIGALPVAVARSEGVLVGYLPGLAMRRIADLHAGEAKTDARDAAIIAEAARTLPHALRTLKLADEQIAELSMLCGFDDDLAAQTTQASNRIRGLLTQIHPALERVLGPRLDHPAVLDLLQRYPSPEKLASLGEKKLAAQLCKLAPRLGKRLAADIAQALAEQTVVVPGTNAAAVVLPRLALQLITLRKQRDEVALEVEQRVLAHPLYPVLTSMPGVGVRPAARLLTEVACRAFASAAHLAAYAGLAPVTRRSGSSIRGEHPSRRGNKALKRALFLSAFAALRDPLSRAYYTRKMSQGKRHNQALIALARRRCDVLFAMMRDGTFYTPQAS

SEQ ID NO: 447283 - protein, 440 aa, unidentified
MAVRKREDEVFPNAAGIDVGGSSHWVAVPARSSDEPVREFGAMTDDLNAMATWLLACGVDTVALESTGVYWIPVFEVLEQRGLKVWLVDARQMKYVPGRKSDVQDCQWLQKLMSLGFLRAAFRPDAQVCELRAVARQRDILVAEQASWVQRMQKSLVQMNIQLTEVLSDVMGLTGELIIRDIVAGERDPKALARHRHSRVKASLEDIIKALTGNWREEHLFVLKQSLGMYDDIARHLAECDTRLNAGLKDLGQKSVDLGKTPRAGSKQRKEYDMRQVLADWAGVDLTRINGLGLAAVTKILTEIGPDLSRFPTVKHFCSWLGLCPGTKISGGKVLSAKTKRSVNRVRQALKMAAMSLSHSGSALGAFYRRLCTRMDKPSANTAVAHKLARMVYFMLTRGEAFVDQGQQRYDEQQLERSVAALKRRATALGFAITPVAAQA

SEQ ID NO: 447284 - protein, 410 aa, unidentified
MEPKLVVASIDVHKKMLAVVVVDEDHPHQALEQRKFGTNGGELKHLAAWLASHGVNLVVMESTALYWRPVWLALEGQYILHLAQAQSNAAPRGRKSDYADALRLARRFLAAELRLSFVPDAEQRTWRCLSRGKHQKRRRRVQIQNQIEALLEESQIKLSSVITDLLGVTGYRILKALSEGETDPAKLAAMAAHNLRASQEQLAEAVSGPMQSRHRTVLAMQLEELDLLDKHIAELSRQLGDALRLHQDAVLRLCEMPGLREDAAWQIIAELGPAATAFETAEQMASWIGVCPGRKESAGASKSNRSPKGNRTMRRVLNQVAWSAVRTKDSFFRELYHRLIPRLGVHKAIWAIAHRMAKVAWKILHDKVRYIERGPLALDPAAMKRRVTRLARQMRRLGYTIEVKPVVATT

SEQ ID NO: 447285 - protein, 422 aa, unidentified
MNSQPQSLSSVEPSFGAFVAIDWADQQHVWSLQAADSDQREHGEIQHTPEAIEAWVGGLFSRFPAQPIALAVEQSRGALVFMLSKYEHLHIYPIHPRAAAQFRGALYPSGAKDDPVDANLLLDLLVHHRGHLRRLSPDTEQTRLVQQLVEARRKLVNEKTRQGNRLTSKLKLYFPQILTWFDELDSALVGALLKRWPTLEALQKARQATLRSFFTQHNCRRAELIEQRLEQIRQAIPAIRDAAVIQSAVAMVSVLVSLIATLRQGIAALDRQIEQAAAAHPDFAIFDSFPGAGPVLAPRLLAAFGSQRDRYQSAAEIQQFSGIAPVLVRSGKTAWVHYRWACPKFLRQTFHEWAGHSIGFCDWARAYYEQQLNRGAGHHAAVRALAFKWIRIAFRCWKDRVPYDDSRYLQSLRQRGSPLAVR

SEQ ID NO: 447286 - protein, 368 aa, unidentified
MKKRITFVGLDVHKNSIDVALADADRNGEVRHYGTIGGGLDDLDRLVKKLLSPDKELHFVYEAGPCGYEIFRSLTEKGFDCAVCSPAHIPKSPAGRVKTDRRDALMLARLHRAGELTYVFVPRADDEAMRDLTRAREDAKKAQRVAQQQLSGMLLRLGFRYPRDHWTKAHFGWLADQKMPTPSQQVVFQEYIHAIKETTDRVARLTKQIEALVPSWRMAPAVNALQALRGVSLLVAATTIAELGDLTRFENPKKLMAFLGLIPSEHSSGERKKRGGITKTGNGHVRKVLVEAAQAYSHPARITRLLLKRHEGVSQDVLEIAWKCQVRLCARFRRLMARGKSRNAVVAAIARELAAFMWAIATRTPIAV

SEQ ID NO: 447287 - protein, 431 aa, unidentified
MSKFFHRPTVGIDVSADFSVVAILAPDGEIYRKPFKIMHNRNGFDYLVDQIKKVEEEFSMKTAIFMESTGVYHLTLFHFIKDTFETYILNPLITNCNKNVDIRKVKNDKKDALTIATIGKFQNVKYSSNFDVEIYTLKSLCRDYYKFTDSKSTFKKKLSTDLRVIFPSYSTVFSDIAGKTSIAILKKYSSPEAILSADRNEVINIISNNSRKGSAHSEKTYSKLYNAAEEAAYIGLKSPSLFVKIINTIAIIESLGIQIQNLLNEIHLLMNSNRISDEFKKNVQLLYSIPGVGELTAITIMSEIGNIKGFVKPKHLVAYFGLDPSVSQSGKFNSDKNVMSKRGTRIGRRALYAVALASIRKSRKGEPINRVLLNFYNENMKGKSKKVGLVAVMHKLINYIFSVLKNQKEYELREPKIHVKMYLNKQSNPAA

SEQ ID NO: 447288 - protein, 298 aa, unidentified
MNILALDIGKYKTVFCDYVCENGEHGFGKVKTTPQAIHDLIVSKQPEKVVMEVCNIAGWIVDIARVLGKETEVANTSHDAWRWKNVKKKTDKEDALKLAKLSAMNQIPTVHMPAKKVREHRSLIKYRQRLVKNKTSIQNSIRAIFSGQGIAGVPKGKSAWTKEGLAWFRSYAKPLGKIRDIEQLWRGRLYIELQTFKAISKALKKVENKLDKLGSVDSRIRRLQTIPGFGPRLSETVVAFLDDLNRFKNSKHVGSYAGLTPKQYQSGQMEHQGGISGQGNKLLRNLLIEISWSSVRHN

SEQ ID NO: 447289 - protein, 427 aa, unidentified
MNPRGESGHEPDGPGCLLVRHSSEPGPAFCPRTTIERNLYMKNPKGRVVGLDIHPDSFAGGILQGQDPITAKVVHSSTRVPLPELESWAQRHTTPDDVLVMEASGNAFAVAARLKSVRHHAIVLESKMAGKIGKTYCANDRVDAIKIARIYLSGLSPIVWQPDGKTRERRELFSAYQGVVKESTRLQQHIKSMLNEHCLRLPPGFRLTAPRSIDRLRTLKAWSPVQLLLLEQMHAGLVCARARRQKLRHQMALEMAADPELLRLARLTGLNLISIYGLASAIGDIHRFANPKKLVAYLGLNPSVSQSGNWEGGGSLKRHGRGPIRALLIQASQRLLQVENPLRKWGLSLALRSGRNKAAVAIARKLAVATWHILMGHPIGSVDNEARLETKVFKLATDLGVATVRSLGFHSKNDFVQKKLYVLKSYP

SEQ ID NO: 447290 - protein, 370 aa, unidentified
MKEFNKYIGLDVHKETIAVSVADTQDSEVRYLGEITNTPQAINKLVKQIKKGDASLSFCYEAGPCGYGIHRQLTNLGWDCQVVAPSLIPKKAGDRVKTDRRDSLMLARLHRVGELTAVWVPDSAQEALRDLTRAREDMKHLQRQSKQRLLAFLLRYGKSNWTQTHYRWMEGVKFDHPVQQIVFQEYIDMVKAMSKRVEALDTQIASTTAESVFWPVIEGLMALRGVNLLTATTIVAEIGDLRRFASAPQLMAYLGVVPSEHSSVDRTLQRRYQVARWHHQDRQRTCAPGAGGGIKFLKCFCITTFRQRTCAPGAGGGGLDLSPSGAENRRITTACRAYRVFIAVVCGGGFVFLTVPPVPHGIKKHLGKMR

SEQ ID NO: 447291 - protein, 386 aa, unidentified
MPQLNDLSRSLVILEQDATLIAVIEMGQSNWLVAGIVPGVERSPLKKLAVDESALLKLLNRWREEAEKAGHRIERIAIAFEAGRDGFWLARWLRARGIEAHVIHASSVAVSREHRRAKTDRLDTELLKRAFLGWLRGERDHCKMVAIPTLAQEDAKRPNRERESLVGEQSRIVNRMKAALARLGIRGFNPKLKKAAERLDGLRTPEGEPIPPNTLAELKHDMERRRLVRSQIRDIEGTRLERLKQAPGDGPHVMVRLLARVIGVGVETADMLVQEVLSRNLRDRRAVARYGGLTGSPDESGKKRREKGLARSGNARVRRGMIQLAWRFLMFQKDSALAHWFYARTKNAPQTRKTMIVALARKLLIALWRLAREGAIPEGIVLRPAL

SEQ ID NO: 447292 - protein, 346 aa, unidentified
MEHYAAIDVSLEWSSVCIVDANGRIVREAKVRSEREALVGLLQDSGLRFARIGLEAGPLSQWLHAGLVEAGWPAVCIETRHVKAALKAMTVKTDKNDARGMAQLMRMGWFRPVHVKAPMVQEIRALLTARKLLVAKLRDVESSIRGILRGFGLKVGAVSKGKLEARINELVAGQARLERVVGPLLRARAALRAEYATLHGELLKVVREDEVCRRLMTIPGVGAVVAMTFRSAIDQPERFAHSRSVGAHFGLVPRKYQSGEIDRTGRISKVGDAMVRTALFEAANVMLTRAVRFSALKAWAMRVASRQGAKKAKVALARKLAVVMHRMWLEGTEFRWGRQATPAAAA

SEQ ID NO: 447293 - protein, 367 aa, unidentified
MDHFAGLDVSVKETSVCIVDATGKIVREVRVASEPEALLAVLASPAYHFKRIGLEAGPLSQWLFSALAEENLPVICVETRHMRAVLKAQVNKTDRNDARGIAQMMRVGLYRPVHVKTLRSQKLRMLLTHRKLLQSKAIAVDNDLRGTLRNFGLKVGMVGAARFEARIKELIENFPDLAVLVEPLLVVRRVLREQLGILHGRLLAVVRDDDVCRRLMTVPGVGPVVALTYRATIDVPARFRKSKSVGAVFGLTSAKYQSGEIDRSGAISRCGDELMRTMLYEAAQSMLFRSTRWSWLKAWAMQIARHRGMKKAIVALARRLAVIMHRIYGPAARCKGIRTEWSFWSALIYPASRGSSCSGPSWLSAHT

SEQ ID NO: 447294 - protein, 343 aa, unidentified
MKITTVGVDIAKTVFQIHGVNEQGAPVLKKQLKRGQVLSLFATLTPCVIGMEACRGAHHWARQLQKLGHTVRLMAPQFVKPYVKTNKNDMADAEAICEAVSRPTMRFVPMKNGEQQAVLALHRARQGFVRARTAQANQIRGLLEEYGIVIPQGICQIGKRLPSILEDGENDLPGLFRQLLQRLGEHLKQLDLQVKELDSQILLWHRQHEGSCRLARIPGIGPLTASALVASIGDAKSFENSRQLAAWMGLVPRQHSSGGKTLLLGISKRGDGYLRMLLVHGARSVLRVAERKPDYGTSWIAGLVKRRHLNIAAVALANKNARVVWALLRHERNYDARYQAAAA

SEQ ID NO: 447295 - protein, 282 aa, unidentified
MDAQYVGIDVSKDRLDVHVRPGGEAFVVARDDKGLAELVERLRAVAPRLIAVEATGGYENVVAAAIGGAGLSLAVVNPAQVRHYAQALGKRAKTDPIDAEMIARFAEATRPEPRALPDEATQVLAELVTRRRQIIGMMVAERQRATRLPKRLRRSCERVVRMLEKELAALDADIDTTVRGSPAWRATEDLLASVPGIGSITARALIAELPELGRLDRRSVASLVGVAPFTRQSGQWRGKSFIGGALSEPLSSSQPWRPFVTTPPFGRSGSDCSPPASPKWSP

SEQ ID NO: 447296 - protein, 392 aa, unidentified
MYIVGIDIGKNHHEASIVSPEGKQIGRSLRFATTHKGADSLMSFIFKNIGNSPCVFGMEATGHYWYPIYSFLKAKGYTIYVINPIQSDSLRKMYIRQTKNDSIDSFLIAEVIRFGQFGTTSMADENILAMRQLCRYRDSVISSRTEIKLRIGTIMEQIFPEYEKQFSSLWVSTSIGILEKYLTPENIENAPIDELFEIIKDKSHNRLTKAKAISIKEAAADTFGIKIAQDAFSFQLKQLIDRMNFLDKQIEALDCQILEYYEKFDCYLHTIPGIGMIAAATILAEIGDINRFKSSSALVAFAGIDPTVRQSGEFSSTHNHMSKRGSPYLRHAIFLAATTCSFHNSPLNAYYKKKRDQGKHHLTATGAVARKLTTVIYAVLRDSKPYEPKKFC

SEQ ID NO: 447297 - protein, 327 aa, unidentified
MDAYLGIDVAKDTLAVALVGPAKPRQTSLANTPAGHRELLAWLAKQHLTIVGVCLEATGIYGDEVAQTLSDAGYRVSVVNPARIAAYAESRLARNKTDQADALLIARFASSEQPEPWLPLSQEVRELRALIRHREALISQQQAERNRQQLAAHPAHVAQALAEHLSLLTKQLAACEQQIRAHIEQHPELQREIELLDSIKGIGLTTAASIVAETGGLKRYRDSGAVTAYAGLSPRQYRSGSSVQRKTRLSKLGNANLRKALYMPALVARHHNPLLKAFADRLAARGMAAKAVIGAVMRKLLVLAYGVVKSGQPFDANYGRAIGAAAD

SEQ ID NO: 447298 - protein, 460 aa, unidentified
MNPKRSKSRNGGKMPMVHPNAAAIDVGATMHMAAVRADRAPEPVRSFGTFTTDLHRLVDWFTECGVETVVMESTSVYWIPIFELLDARGFTVFLVNARDAKHVPGRKTDVSDAQWLQRLHSFGLLRASFRPKGQIAELRAYVRQRERLLEYAASHIQHMQKALTEMNLQLHHVVADITGATGLRIIRAILAGERDPEALACLRHYSCHSSAETIAKALTGSYRAEHLFALEQALALYDAYHEKASACDARIEAVLKDLIVHRGHGHGSAPRASRRRNRTNQANALAFDVREALFALLGKDITTIGGLGPYLSLKLIAECGDDLSSWPSAKHFTSWLGLAPSNKVSGGKMLSSRTRRSGGRAAALLRLAAVTVGGTDTALGAFYRRLSARIGKAKAVTATARKIAVLFYNAVRYGMDYVDPGASSYETRYRTRVINNLHRRAKAFGFVLQPLEPKVGAAVS

SEQ ID NO: 447299 - protein, 468 aa, unidentified
MNSSIGIDPDSTGFVCALVKDSKAQVITKRFSVSQNGLSEFLRWVKAEGKPIVGIEGTHGQSRPIEKALREGGVIFHSFKPADTDKFRKAVLGQNKNNERDAESVARYALALEAQGKLDQYRRVWIADMELQALTRRWESLSDQLTGEMNRLWKLLRYACPDLYLLLGGKNGENEQRGKVLKNQGILTLFISKPDIGEWKRLSQTDMREAMGGGNYKGRGELIAELREAAESFPSISAGIALVIRNSAQQIERFKGEQSELLGMLDSLTQGNLAVQCLKSRRGIATLTAAKMIAEIIDIRRFAREDSLACYSGLGMREHTTGNTTMMIPTRLFNHRLKDAFMTAARNVVFYDPGSHLAGYYRNLVKAGMRPLEATKRVARALVRVIFRELSALNESKANDLGQKILKEGEGDMASGVSRGDQSRKSNISPSSPRLNKSKSAKKVKNCKAQGTRTKGGRKKQAVTKKTA

SEQ ID NO: 447300 - protein, 350 aa, unidentified
MFIIGCDFHSRFQQIAMLDPTTGEIIERRLEHENGEAKMFYATLSSPARVGMEATCNAPWFEKVLQEHHHELWIGDAAEIRAAMVRKQKTDSRDALHILDLLLTNRFPRIWIPSPAERDLRQMLRHRHKLLRFRTSVKNQLHALAMGQGLCRRKKLWAKVGRKELEGLVLDPWASLRREALLQLLDQLDPWIDKLDEAVIQAAESRPSAVILMQQAGVGPVTALAFVLIIGPVSRFANSKKVVSYLGLNPSEESSGGRQRLGAISKQGNPLMRYLLVEAAQTASRLHPELRRDYQRLKFRRGGAVAKVAIARKLAVRLYWKLREAAQPVPSARMQGSPASPVVGESLSAN

SEQ ID NO: 447301 - protein, 405 aa, unidentified
MRFIGLDVHLDFCEIAICENGRVRSAGRVPSSPAGIDLLVRSLAADDQVALEATGNALKIARLLEPHVARVVVAPTKELSAITTAKVKTDRLDARKLARLLAAGLLTGCWLPDEATRSLRRWLSRRAQLVRQRTRSKNEIHAVLMRNLKGRPPMSDVFGKGGRKWLAALKLPRDERHTVDGCLRHIDFVNGEIAILEREIAQHAIGSPEIRRLMTVPGVSLMTAATFMAAVGDIHRFRSPRRLVSYLGLDPKVRQSGSGHAKIGRISKQGAAPVRGMLVEAAFVAVGTPGPMRAFYRRVSARRGKAIAIVAVARKLAVLFWHLLIAEKDYAFARPSLTAHKLRELELRAGAERRMGSRSLEHKSGYHQQHNRDRERETAAQAELAYQRLVADWKRANPEKVAAVT

SEQ ID NO: 447302 - protein, 360 aa, unidentified
MTIVVCVLPFQGQPGQPLRKTYRSFRDDLIRMRTWLKLLKVTEIAMESTGVYWRTVWNVLEDQGFRLLLVNPAQVKALAGRKSDGRDCRRIAEYLQDGRLDASFVPPAEIRELRMMLRHRISLLEQRNEVHNQIRDLLETASIKFSSVASNLMGVSGRRIIEALIAGEDSPAILSWKLRGRLREKEKLVKESLKGYFNEFHRTMLESYYKHYQFLTAQIEMFEARIAERMKDHQERIELLTTIPGVDRIVAWHLIAELGTDMSVFPDADHCASWAGLVPGENKSAGKKKSSRCRKGNKVLRRVLSQAAWACSHTKHGYLRAFFYRVKARGGWESNYGSGSQNSPFRLSNAQDQYSLSGTR

SEQ ID NO: 447303 - protein, 350 aa, unidentified
MLIIGCDYHPGFQQIALVDSETGELSERRLIHREEAERFYGELKRQSLKVRVGMEASGHSRWFERLLRDLEFELWIGDAAEIRTKRVRKQKTDRQDAQLLLRLMMEERFPQVWVPDAANRDLRQLLWHRHRLVQMRTRVMNQLHVVALNEGLRRKKALWRPAGRKELESIALAPWASRRRQDLLDLLDQLTPKIQELTRALEEEVEKRPVARRLRTHPGVGPLTALAFELVIGTPERFHCGKQIASYVGLVPSEESSGDRRRLGHISKQGSALLRFLLVEAAQVTVRSQPEWRSKFFHLAMRRGRKIAKVTTARKLAVHLYWMWRQGLDYGQLHKLGSHAGEPGHLDGGK

SEQ ID NO: 447304 - protein, 324 aa, unidentified
MKNYVLNVGIDVSKSTLDICVLSSSSRESYNINNDRRSIQTFFKGYKGLDIRVCCENTGKYNWVLLEVLTDYNITCYQVNPLHLKRSIGLVRGKDDLIDAYRIGLFISKNYQDLTVYQPMDQDIMKIKVLLSKRDLLVKQRSQHKANSKEDKLFKEINLKFLEDYTTPLIEFLDVKIKELEGMIRKIIKENVLLKKQHNIIASIPGVGSIVSWNVLVKTNAFQNITNAKKFACYSGVAPFQFQSGSSVYSRPKVSHYADKSMKKLLHMAAMSAIQTNNDLRFYYQRKVAEGKNKMLVLNAVRNKIIQRIFAMIKSEKKYQFNLD

SEQ ID NO: 447305 - protein, 426 aa, unidentified
MKQKSLNEKILRITPETLIVGIDVAKRIHWVRIINYRGIDLIKPFKINNTITGIKNLEEAIKKVKEKNDMKKVIVGMEPSGHYWKAIAWQMKLNEGVDYLVGVNPYHVKKSKELDDNSPEKSDRKDAGIIARLIRDGRYYDIYLPEGVYSELRIMATTRDRIVTKRKNAKNIVIAVMDEYFPEYEKVYKNIFVEGSIGLLKKYPFPEDIIKAGIEEIEKVLKESTQGKDWKKRAKKIYELAKKSIGVKEGQKSAKIKLGLLLKEIEFYTTQIEEIEKEIEKLIETTEIGENIKSVPGIGTVITATILGEIGEINRFNNWKEIRKLAGLNLYEISSGEHKGKTKITKRGRPLLRKIIYLMAKSLLKHNKEMKEKYKKLTKREKNPLKRDQALIAIGLKMIRIIFKLAKSKTRYEPSICMGGNAVSHH

SEQ ID NO: 447306 - protein, 441 aa, unidentified
MQILFSRCCGLDVHKDSVTACVLIYSSSPEPEVRKKQYETHAKALESMRLWLFSQKVTHVAMESTGVYWKPVWQVLEGHFHLTLANPFQVKNIPGRKTDRRDSQWIAELLAHGLIRPSFVPPLATRQLRDWTRYRVKLSEEKNRIHNRIHKALEDACLKLDTVASDILGVSGRAIIQGIIDGVESPNFLAERAKGRMTKKIPQLRLALRGRVSEHHRQLLRELMEDLKYVEDKITKLNKTIRDSVDQKAVDRLCSIPGVDEITAWTILAELGTDMTVFEDAKHAASWAGLCPGNHESAGKRLSNRTRKGNRWLRRGLCQSAWAASHKKNCYLSAFFYRKAAKRGERKAIIATAHHILVIAYCLLRDQTNYREVGGDYFDRMHPERTRNRLVRRLERMGLQVTVQTDPTDPTPSAAPSKRRRGRPCKCVERNIPCTHNQLTP

SEQ ID NO: 447307 - protein, 409 aa, unidentified
MKRIKTKKHQTVNEKTLVVAVDIGKTVHYGYFRGPQGHDIKPFRFCNTQRHFKDFWNKIVRYKRENKLEDIVIGFESTGSYAEPLAHYLAQKPARLVQINPMHTKRIKELTGNSPNKTDRKDPRVIADVIALGHALTVVIPEGSAAELRRLIQARERTIKIRTSMINQLHHLIYLIFPEFTPVIKNIKTKSALYLLKNYPTPESIVSLGLESLSLLLKKVSHGKMQSERAVRLFEAAQHSVGIHEGRQGMLLEIEHLVSNIENKKLFIDQLEEKLTYHLDCIPYSRSMLSVKGVGPVTIAGLIGEVGDFGKFRTVSKIMKLAGFNLYEVSSGKHSGQRHISKRGRSLMRKLLFFAAIGTVRSNGIMHKKYHDMLDRGMPGVKALVAIARKLLCILFALARDNMAYCDNL

SEQ ID NO: 447308 - protein, 332 aa, unidentified
MLYENYVGIDVSKLSIDAFIRESRIHRQFRNEESGFKQLIQWIKKHIGETWESLLICFEHTGLYSLSLALFLEREHIAYAMVPALDIKRSLGITRGKNDQIDAKRIAEFAYRFNDRVIPTSLPAKDIRKLHSLLAMRDKMMRNMGGYITSRNELFRVIPDRELPVLTSVYENIISTLKNEVHELEREIRSIIMANKELKTTFELITTVKGIGFIVASFLIVYTCNFTRFENWRKFACYSGIAPFEYQSGTSVHARTQVSSIANQQMKRLLHLAAMTAIHFDAELHNYYVRRQAEGKSKMATINIVRNKLIARVFAIVKRGTPFVDIQKYVYL

SEQ ID NO: 447309 - protein, 343 aa, unidentified
MKQYVGLDVSLEQTAVCIVDEQGKALGRGKCASTPEAIAAVVKARAPRVERIGLESGPLSTWHWHELKKRGLPVICLDARHAKTALSLQVNKTDPNDALGLPQIVRTGWYREVTVKSLDSQVIRSFLSSRARLVEVRVDLINQIRGMLKPFGLVAGKGGRQPFINRVRELVADGPLKDAVEALLTALQEVSRQIGILSRRLMGLARQDQAARRLMTAPGVGSLVALAYISVIDTPDRFSSSSSVGAYLGLTPRRYQSGEIDRSGRISKCGDPLLRTYLFEAAGILLNRVSRWSALKAWGTRLAKKVGGKKATVAVARKLAVILHRMWRDNTDFRWARQEGQPA

SEQ ID NO: 447310 - protein, 430 aa, unidentified
MKYNTQNAKIASITEETLVLGIDVGSATHYVRAFDWRNYEFSDKPLAFSNDEAGFLTFMAWVEDIKEKAGKTAVIPGMEPTGHYWFNLGKFLQDSGMRPVHVNPHHVKKSKEMDDNNPDKNDRKDPKTIAALVNEGRFSYPYIPTGVYAEIRSLSNLRFQTQEEITRIRNRIARWISIYFPEYKDVYGKLDAVSGMMVLKETPLPVQIKELGAEGINQIWRDAKLRGAGMKRAKTLLSAAEHSVGSQEAPEAASMEIWNLLEDYEKYSSRMDDLMARIEEKIKEVPYVDKLLEIKGIGLKTVCGFIAEVGDLSRFDDPKQLQKLSGYAIVKNSSGKHAGESHISYRGRKRLRYVLYEAAISVIGKNGEFREIHRYYQTREKNPLKKMQSVVAIACKVLRVFYAILTKGVDYDGEKMLGDIRRPAMSVQAA

SEQ ID NO: 447311 - protein, 341 aa, unidentified
MLYSGIDLHKRSLVIHTLDADGTTTREAQLKSDRGAVLAYFGTLSGPHRAVVECVQSWYWLRDLLGPTGIDLRLAHAKYVKAISYAKVKTDRVDARMLAQLLRTGLVPEAHMIGAEHRETRDLLRSRLQLVTRAVRCRHAVGSLLEKYNVPTPEELPELARMQAALQEEQRTLIRTHVRRVEAVLKTRLLPTPDVQRLVWIPGIGKLSAYALVLEIDTISRFPTVRHFHSYCRLVPGADNSAGKVRHKRSRDGNRYLKQVFHTAAIRAAQYHPEIRQEYRRLSRRKGKIVARALIAKELASIVYWVLRKQEAFNGKFRGHVLTAKPAVWPRLASPESLTDV

SEQ ID NO: 447312 - protein, 337 aa, unidentified
MGLYCGIDLHSNNHVLTVIDEADRRVYERRLPNELAITKAALEPYRAELVAVAVESTFNWYWLVDGLMEAGYAVRLVNTAAVRQYEGLKHTDDEHDAFWLAHLMRLGILPTGYIYPKSERGLRDLARQRMRLVQHRSSLITSVQTQVWRSTAVRLRSDTIKGRGKQPWPELSDPDLALSVKVGRAAIDTLTVQIERLEKLILKRVDLSPQFRMLKTVTGIGPILAMTIALEVGDIGRFAGVGEFASYCRCVDSQRLSNGKKKGEANRKCGNRYLAWAFMEAAHFAIRSLPAAKRFYERKRRQRHALLGVKALAHKLARACFYVLRDQVPFAPERLFV

SEQ ID NO: 447313 - protein, 368 aa, unidentified
MKQGTTYVGIDAHQKDLFVAMLIGTQTVPVTWTVPNEPKAVRRLVRKLERETPGAVRVFYEAGPCGYALQRQVTTSRVRCDVIAPALIPRKPGDRVKTNRRDARKLAELGRAGLLTAVQPPTPEDEAVRDLARARDDAREDLQRCRHRLAKLLLRRGLHFSGRNWTRAHRQWIDGLTWTQAAERAVVEDYRLAIDHTEARLLALDARLAEIAAHEPYCEPVGWLRCFRGIDTLTAMLILAELHDFRRFASAPALMAYLGLVPGEDSSGEKHRRGRITRAGNALVRRVLVETAWHYQHRPGIGVALRQRRNGQPARVIAIAEKAQQRLCRRFRKLAAEHKPAPKIAVAIARELAGFIWAALQPVATPMR

SEQ ID NO: 447314 - protein, 351 aa, unidentified
MSLAELVDHVIGVDPDRDRITAAVVCSRTQGEIASKVFATTARGYGQALRWAKGYTTDERRAWSIESTGSYGAGLAAALAAKGEFVIEFDHPSTRPSKDGAKSDSLDAVRAAREILGRKTWATPRSRGAREGLRTLITARDSAKLARVAAINVLKALVVTAPTDLREELRGRPLMELVGRCQRLRPETATDPEYAATKLSLRSTANRVRQLTDECRELELAMIPLVRAMAPALLDEPGVGVLMAAQILVSWSHPGRCRDEAAFARLGGVAPLEATSGQTQTRHRLSRGGDRQLNRALHTVILARAKHHQPTKDYIARRISEGKTKREAMRCLKRFYARHLFRVLEAAPMTA

SEQ ID NO: 447315 - protein, 393 aa, unidentified
MFYIGIDIAKNSHEVCFLDESGNVLDGNSFKIANTASGVDKLQKMFGKHALSPDNSIVGMEATGHYWLVLYSWLVEKGFDVKVINPIITDAYRNMLIRKTKNDRIDAQVVAKVLMLGEYQESPVSDKDTLALRQFCRFRLWQVQSCADLKKKVIALLDQIFPEYEKLFSDVFGLTSKEILKNYTSPEEIASINTRKLTHLLEKASKGRFGKEKALEIKAVANHSLGIQLAIDAFSFQLRQLIEQIEFVEQQIALLDQQIENYMEKLQSPVTTIPGVGPVYGAIILAELGNIKRFPGGKQVVSYAGLDASVHESGDFVGTRSHISKRGSPYLRRALWGAAFVASWADPELSAYYHRLRARGKHHNVAVGAVARKLCYILYAVLSENRPFDKRPI

SEQ ID NO: 447316 - protein, 376 aa, unidentified
MGKPSAIADITWVGMDAHKSTIEVARMVGGSAQVDAWQLEYTPQAVRRLARRLRRDAGSGEVRCCYEAGPIGFTLKRLIESSGQGIVCEVVAPSLIPVKPGERVKTDRRDARKLALLFRACTLTEVHPPSPDQEAIRDLCRCREAAKQDLLRARHRLSKFLLRRGFIWRDGQAWTVRHWAWIRGLDIGHWADRQTLESYQQFIEQIVARVRDLERAIEEAGQCEPYRTAVNALRCYRGINTITAVTLAAELHDIGRFRTPRELMAYLGLTPSVHSSGGRTHRGRITKAGNAHARRVLVEAAWSQRHKPGIGLALRKRRHGQPAWAITHADRAMKRLHQRYARMLHRGKTQGTIMVAIARELTGFVWATLRTSTTAA

SEQ ID NO: 447317 - protein, 350 aa, unidentified
MIIIGCDYHPSFQQIAFVDTDTGEFQERKLQHREEAEKFYRDLAAQGMKVRVGMESSGQARWFERLLSELQFELWIGDAAEISAKRVRKQKTDRQDAQLILRLLLKDDFPRIWVPSWENRDLRQLLWHRHRMVQARTRMMNQLQAVALNEGVRAKKRLWREAGREQLEAFKLAPWASQRRQDLLELLDRMNPTIAKLTKAIEGEVEKCPAARRLETHPGVGPLTALAFVLIIGKADRFQCGKQIAAYLGLVPLEKSSGNQRRLGHITKQGNSLLRFLLVEAAQVTVRSLPEWRSKYVHLTMRRGRKIAKVAMARKLAVRLYWMLRREWDYEQLRKFGSQAGKPGYRDGVK

SEQ ID NO: 447318 - protein, 349 aa, unidentified
MRRLYVGIDLGCKTCAGAVRDSKGKLLETCGFPTSAKNLIDFVGKQKGEVRVLVEECELAGWVYRALLPHVTSVEVSDPRHNAWIAKGKRKSDPIDAAKLAELLRGGFYRAVYHPGDEEMANFKIAVQHYDQMTRTTTRLQNQIKARFRQQGIMTAGKGVYGLAGRREAISMLKSEAMAEILRQDFRLLDGAQKERTAASRLVTKLSRDLPVIRRLKKIPGVGTVSASRFVAYVQSPYRFNTKGLVNFSRLAVVKKESGDSIVCGEHLSREGNGAMKALSRTVFNGAMKTTSTNGIRDYYLRSLSRTKNETHARLNTQRKILAVMNAVWRDETEYSDHLVTGNGARRTL

SEQ ID NO: 447319 - protein, 482 aa, unidentified
MKKKNIFQNRSQQLLRLFEKAGNRLKMMCVPIDYAKKDHMVMFCNGYGDIVRKPFSVKNSLEGVKYLIDQVMRSCRQRHIKKEYVFFGGEDVNSYAENFANALRAEGWLVANVNAHDAKKQRENLQASTDRIDLMGIATMLLNLRAKCSPAQDGIYRNLRTLVRHRKKLVVMKTEVKNRVHALVDRLFPGFLNEKNTGINPFSKSSLVLMEDRFSAQQIRRRQKSTLMKTLKRCATPDAENIAAKLHSYAAQVIMTPDEYAATLQLSLQHHINHFRCLQENIDQLLSEIALLLAQTQAAFLTSIKGVGIVLAAGVSSEIGNPFEQKPLNNLTSYSGIIPRVKQTGGVEGHTRTGRVSKRSNHLLKDYVVQSAFQMGLRGPEPLLQDYKRREAAGQHADFGIGRRFLRMAMCLMRSSQVYLPPTLCSPKAQMQERAGYYLTMWPLLRDKWKKAHAHQIAFAKDQPLGQWRQMVQELYDIKLKL

SEQ ID NO: 447320 - protein, 338 aa, unidentified
MKLSRIGIDLAKQAFQVHGVDSHEQVKCRKQLKRHQMLDFFRQLEPCRVVMEACGSAHYWARELRMLGHEVRLIAPQFVKPYVKSGKNDANDAEAICEAGSRPNMRYVEVKSAEQQAGQSVHRIRSRVVRSRTALVNEVRGLLAEFGLVESRTGVAAGRELLRQAIDTPDNGLPGPMRELLRGLNEEWQGHDERLASLEKLIQRQAREDERVKRLMAIEGLGPISATAVVSAVGDARQFRSGRQFAAWLGLVPSQHSSGGKERLGAISKRGDSYLRTLLVHGARSVLKHCQEKTDKRSGWLNTLVCRRNKNIATVALANKNARIIWAILSKGETYQPG

SEQ ID NO: 447321 - protein, 461 aa, unidentified
MKEYSMGIDVSKGYADIILLNFKKELVEKSFQLDDTSAGHRVLKTKLEIFFTNNPEAIIYAALESTGGYENNWYRLLRNLGEEMAIQVARLNPIGVKHYWKAKMEKNITDKISAKNIAEYQIVHKEKIGYSKEPCFSSLRKQWKFVRMITKQKTQFYNQLESELYLANPEMLIHCRNGVPKWVLQVLKKYPTAEKLSKAKVNILSKIPYVTAMKAEVLISNAKRSVASAGDEMAANLIVCLVEQIQSQEALIKSQMDYIEAKCELPREIEILKSFIGISTYTAIGLMLEIGTVDRFEDAKHLASYFGLHPVYKESGDGRKGVHMSKQGRSEPRALLYMAAKTAAARNPQIKEIFTKQIKQGKCYNSAIGVCMHKILRIVYGMLKNKEMYNPEKEKEYQEKITTEKGPKIDTGLRRFQPPDQSAPISRKQNKKRKEREKAQNEINSLIAGSDPRSLETKLRL

SEQ ID NO: 447322 - protein, 385 aa, unidentified
MAPPARPRVVIGLDVGKSAHWACVVTREGELLASRPIPNRENAIDGLYAQYPGALVVVDQVRNIGSLALSRAKLAGMPRAYLPGLAAHGASRLFAGDAKTDERDAMVIAKTALGIPDALLAVADRPPEVEAARSLAAQRDFLTCENTRSKNRLRSILLESCPEFEAQADLSDPATLKLMAAVGGPWSISEASPQSVGALTRGCRRAKVAALAGSVESSSRPHPAAVACEDRAVRLLARRISENDAEIGSLTSEISALLSADETYRCLLTVPGIGPRTASELVISIDIADFPSHDRLASYCGLAPRNRRSGTSISSVSASRQGNKRLKNLLIFSCNCLARSRNRWGEYYARCRDRGMPHGKALKAVARKRLKVIYAVMRDKVPYAA

SEQ ID NO: 447323 - protein, 355 aa, unidentified
MDSEKYIGLDVHQATVVVAVMDSTGRLVMESILETEAATILQFFAGLRGTLSVTFEEGTWSVWLYDLLNPHVDKLVVCNPRKNALLKDGNKSDRIDARKLAELLRGNQLKPVYHGETGVRMLRELSRSYLTIVKDLSRVMNRLKAVYRSWAIPCAGRDVYYTRHRAQWLAKIREAGVRRRAERLYEQLDMLQHLRQQARRELLAESRKHAITAKLRQIPYLGPIRSALAVALIQTPHRFRTKRQLWAYSGLALETRISAEYRLVEGQVRRSKKLLSIRGLNKDHNHDLKGLFKGAATMASVRPGPFQDFYQAALAKGIKPTMARLTLARKMAAITLTLWKKGENFDAEKLKSQAA

SEQ ID NO: 447324 - protein, 337 aa, unidentified
MNEIIRIGLDTSKHVFQVHGVDTAERTVLRKQLRRDEVERFFAKLAPTRIGLEACGAAHHWARVLQRLGHAVRLIPPQYVKPYVKRGKNDAADAEAICEAMSRPGMRVVPVRTAENQAELMLHGARDLLVKQRTMLVNAIRGHAAEFGLAGAKGVGRVTGLLERIALEASVPAPAREIFARLAEQIEALDKQLSALDARLRAWHRANERSRRLATIPGIGPIGATALAMKVPDPGVFRSGRHFAAWLGLTPKDHSTAGRQRLGGITRKGDETLRRLLVSGAMAVIQRAKPGRAAPWLLALLARKPKKLAAVALANKTARIAWALMMRGETYRRPAMA

SEQ ID NO: 447325 - protein, 316 aa, unidentified
MSCASYWIGIDVSKGCLDVALRPQGEVFQVANSEEGITHLIQRLQAGPPALMVMEATGGMEVLAAAMLSASGLAVAVVNPRQVRDFAKATGQLAKSDKIDALVLAHFAEAIRPQVRAMADEQTRELNGLVTRRQQLVEMLTAERNRLGSMKGKAHQDVQVHIEWLGKRLQELDGDLEQRIRKTPVWQERMNLLRSVPGIGNAISRVLLVGLPELGQLSARAISALVGLAPLNRDSGKMRGKRSILGGRARVRAALYMAALVANRYNPVIKAFYERLVSKGKAKKVALTACMHKLVVILNAMVKTGTAWQAPLGAEA

SEQ ID NO: 447326 - protein, 363 aa, unidentified
MKCVIENTELSSHEGTRRQFNGSRAVIKLGIDVHQDFYVLVKQEGGTNPKPAQRFRKETFLHWAAKLTSQGTEVHAVYEACGFGFGLQRQLSALGIHCYVVCPQKLDERNRRVKTDGLDAKALCLRLDRFVQGNGDALALVRVPTEAEEQQRAIHRQREQLVKTRKRLEAQGRSLLLNHGMEPLSNWWKTRTFAQLQVPEWMKELLSNSQPILLALQEKIRALTAQLQAAAIPKQPRGLGLLSSVIIDREIGNWTRFKNRRQVGSYTGLCPGEYSSGNTRLQSCVTKHGNPRLRAALVETAWRLVRFQPNYRPVLKWRRTLCKGALATKAARKKAIVAVARQLAVDLWRIRTGRVQAEALGLF

SEQ ID NO: 447327 - protein, 345 aa, unidentified
MTIVEDRRAITGGVDTHADSHVAAALDPIGGLLGVGEFPVTPAGYARLLGWLGGFGAVALVGIEGTGSYGAGLARHVTAAGIRVVEVDRSDRQDRRRQGKSDPLDAVSAARAAQSGRARGAPKGRDGAVEAIRALMVAKRSARSERTQTINQARSLLVTGPDDLRARFAGHTVAALVSELAALRPRPGDAVGYATRIALRELGRRAEFLDGQLGRLDELIVPLVTARAPSLLALHGIGPDTAALLLIAAGDHPERLRSEAAWAHLCAAAPIPASSGKVTRHRLNPGGNREANHALWRIVITRMSSHAPTRAYVERRSEQGLSKKEIIRCLKRYVAREVYRHLRVG

SEQ ID NO: 447328 - protein, 381 aa, unidentified
MLRCERIGVCRRFRPTDKEMNEPMNYVGIDVHKQSFQAAVVDQTGSCLEEFRLRNNREGIEQLIERAGCYGSFQAVVESSANYWTKLFDVLEENGIPIRLSNPYKTKAIAEAKVKTDRVDARTLAQLLRADLVAECYVPSKENREKRALIRERSSLTKIRTELRNKIHDLLAKYEYSHGFSDLFGKEGMAWLKTLKLSQYDQTILDTNLRLLESFDAEIEKLSVEVAKLAIDPTDKNRQDQVRLLLGLKGIDYYGAMILLSEIGDIKRFPSPEKLVSWAGLAPRTHQSGETSYNGHITKKGSSRVRWILGQAAQTARLHDPKFKTFYDRIAARKGHSKALVATMRKMLVVIWTILTRNEPYSGEDQELTERKIKRLIRISS

SEQ ID NO: 447329 - protein, 331 aa, unidentified
MEKIVIGIDISSKTLDICIKKSGHYAYEIIENEVKAIRKFLGKFEDQFDEVIISMENTGRYNWYLYEVLETLSLKTYVLNPLHLKKSLGLTRGKDDRIDAKRICDFTEKNERDLVEWKPCSQTMKKIKVLFSERNSKVKLKASLLKQRALYSQLKELKLDNKLMRINKKEVKLLEEHIDFLENEIERLIEADKDLAARKTNIQSIPGVGKVLSWIIIAKTEDFTKVTDPRKMACYAGVVPFGYQSGTSVRHRPKVSHYADKSLKSILHMAAMRAVRMDNDLKEYYERKIKEGKNKMAILNAVRNKIIHRIFALAKNGKSYEKNYKNHLILS

SEQ ID NO: 447330 - protein, 374 aa, unidentified
MSHHSEAYVAFDTSKLRNAVAIADAGREGEIRFLGEIDTTPAATAKLVKKLAAKYERLTFCYEAGPTGYGLFRQIQGLGHACIVVAPSLTPQKPGDRVKTNRRDALGLARQLRAGELTAVWVPDARHEAIRDLTRAREAAVEDLRAKRQQVSSFLLRLGRHYLGKKTWTKAHMNWLTSQKLEHTEQRIAFEEMLLAVRQAQERIGRLEDAIRAAVPDWSLAEVVTALMAMRGIDLVAATAFLAEIGDLSRFRTPRELMAYLGLVPSEHSTGDSVQRGPITKAGNRRARRILTECSWSYRHPPRVGKKKQEKVAAAPRPVREIAWKAQHRLAGRYRALIRKGKKPVVAITAIARELAGFIWAVNREVAINRAPVM

SEQ ID NO: 447331 - protein, 341 aa, unidentified
MSVIAPVFSFGLNGYAGSGLALQDKAEKRLMQITIGIDISKETLDAYRFPDNHHIQVANGRAGHKSLVRWIGKQNESLVVFEATGAYHRNLEAALAANGTAFAKVNPRQARRFAEATGRLAKTDRVDAIMLAKMGAILGLKAHEPRTEALHILRELITARRALMKDKVAAKTRLQTTRQTLLKNQINARLKQIKIQIQQVDAAITEKVAQDEALSNKLDILTSIPGIAETTAFSMLIEMPELGTLEGKQAASLAGLAPMSRQSGKWQGKERIKGGRAFLRRAIYMPALVATRYNPGLKAKYDQLIRAGKSGKVALTAIMRKLVVMANALLRDGRTWSELRP

SEQ ID NO: 447332 - protein, 315 aa, unidentified
MDALVKVIGIDVSKAKLDCWALPAQEAWGIDNDDGGIAALLTQLRTRAPELVVLEATGGYETQAATALAAAGWRVAVVNTRQVRRFAQALNRLAKTDRIDAQVLAEFGRAVNPQVRPLPDAQTQELAALVARRNQLVQMRTQEKNRLPMTLPPLRPRVKEHVAFLDAAIARLEIDLTAKLRSSEVWCERRDLLLDVPGVGPILTCTLLAQLPELGQLNRQRIAALVGIAPFHDDSGKHQVRRTTWGGRREVRTVLYMATLAARIHNPVIRAFYQRLRGNGKTYKVAMVACMRKLLTILNSMIKHGHAWHYEIKIA

SEQ ID NO: 447333 - protein, 332 aa, unidentified
MITPILGLDIGKDQLDAVLLRADHQPEHAQFDNSPKGFNQLWRFLNKRTARHVHVCLEATGLYYEQVADFLHEKGAMVSVVNPARIKAYAASQLARNKTDKLDAHTIADFCRTQQPPAWTPPSAEWRHLRALARHLDDLQTDLQRQQNRLHARQQAAESVPTVEDNLKQQMNLLQQQIAQVKQAMNDHIDQHPDLKRDRDLMTSIPGIGDLTANKLLAELADITVFDNVRQLVAFAGLNPRHHQSGSSIRGQTKISKMGRASIRAALYMPAIVAKTHNPSLRVFADRLEQAGHCEMEIIVAVMRKLLHLVFGILKSGQPFDPHYLEKTAASA

SEQ ID NO: 447334 - protein, 348 aa, unidentified
MDKIIRIGIDTSKSVFVLHGVNAADEPVLRKKLRRRQVLDFFRIMEPTRIGLEACGAAHYWARELMALGHAVVLLPPQYVKPYVQRGKNDAADASAICEAMSRPRMRFVPGKTAEQQAALMLMGVREQFIARRTQLANMIRGYAAEFGITAARGLDKIEPLLARIATAPEVPELAKELFATLAEQYGELKPKLRRIDAQLLAWHRHNELSRRLVQVPAIGPIGAALLAMKVPDPRAFRTGRDFAAWLGLTPKDHSTAGKQRLGVITRAGDEALRSTLVSGATAVIQQVSKARGNPSPWLIALIKRKPPKLAAVALANKTARIAWKLMVSGEPYDRNHGAAAHTVGIAA

SEQ ID NO: 447335 - protein, 294 aa, unidentified
MFFFWGRPSCKTLRLLVSTSASILSTFTVSDKSGKALLCTKFTRTKLIEFLAGCTPATVVMEACGGARFMARRIADLGHEPKLIYPQFVRPFVKSNKNDFVDAEAICEAASRPSMRFVQPRTEVQQAMRALHRVRESLVRDKVKTTNQMHAFLLEFGISMPIGVTVIKRLSTVLAENELPPYLAQLLMRLHAHYLYLVEQITELETALEQELSRDETGQRLQTIPGVGPITANVLSSQLGDGKQYSCSRDFAASTGLVPRQYSMGGKNTLLGISKRGDKNLRRRLLTNLDDSIL

SEQ ID NO: 447336 - protein, 321 aa, unidentified
MSQVLVGVDVCKDFLDAHARPIGVQKRFENNPAGIEQLVAWVQSLAPERVIFESTGPYQKAAVGALLAAELPAVVVNARQVRDFAKGTGQLAKTDVIDASILAHFGEVVATVVRPLPPREILEFRELCDRRGQLVRMLAAEKNHRHAAHGASPKVIKNIDKHIVFLKRQIDDLDERMDRIVADSETFKAKDEILQSIVGIGPQISRTLLVHLPELGKGTRRSIAALVGLAPFADDSGTSTRVRHIRGGRGKVRIALYQAAVAAVRYCPTMKRFYASLKARGKATKVALIAVARKLLVLANALLRDGIPYQPPTNSVCLKNA

SEQ ID NO: 447337 - protein, 404 aa, unidentified
MYNAVGIDVSKGKSTVAVLQPGGTVIRKPFDVSHTSQRLNELAAYLVSLDGDTRIVMECTGRYHEPILKALSEAGLFVSAENPHLVKNFGNNSLRKVKSDPSDARKIARYTLDNWAELRQYSSMDNTRTQLKTLNSQFSFFMKQKVAAKANLIALLDNTYPSVNKLFDSPAREDGSEKWVDYAYSFWHVDCVRGIGLKAFTERYQSFCKRHHYNFQADKPEKLFNASKELVAVFPKEKTYKLLVQQSIQQLNLISEHVEQLRRKMNELASTLPEYNTVMGIYGVGKTYGPQLIAEIGDVSRFTHREALTAFAGVDPGVDESGQHKSKSNRASKVGSARLRKTLFQIMTTLLQNAPEDDPVYRFLDKKRSQGKPYYVYMTAGANKFLRIYYGKVKECLRNIEQES

SEQ ID NO: 447338 - protein, 377 aa, unidentified
MGNKQREEKIEQLSVGVDLHKSQLTICVMGEDGELLQEGMYRTTTEGYQAFVQRMHEWEDERGCSVAMAVETTGNARYFKNRMEGEGFSVVVVNTNKFKVISQSTKKNDRGDAATLAYYLGKDMLPESHLADQSSEELRRMIKCRSLLVSSTVKMKNQIHGMLLGYGITTKAAQLQSNKKRQALVKDLADQGFTEAAASLEVILGIIEGVQEQIKVLEKRLREMTRDDEDVQLLMTIPGVGFLTASAIAAYTKDLDKRFCGDFKRFASYVGIVPSVHNSNETVHMGRITKHGPQELRTALVQATMGMIRLSKITGEWRLMTDYRAMKTGKGSGKSIIATTRKLARIIFAMLHNREPFNPALMVRDKCLFTVEEVIGA

SEQ ID NO: 447339 - protein, 406 aa, unidentified
MRVLYERCCGLDVHKQSITACALTPEGKEIRTFGTLTDDLEELVDWLKEKKVTHVAMESTGVYWKPVYNLLEAEPIEVLVVNAQHIKAVPGRKTDVKDAEWIADLLRHGLLKGSYIPHRAQRELRELVRYRRSLIEERARELNRIQKVLEGANIKLSSVVSDINGMSARLIIRALIEGKNDPAALAQLAKGRLKQKTEELRRALKGVMGPHQRMMLAEQWRHVEYLDEAIARLDREIEERTSPFHEALELIDTIPGVGRQSAEQIVAEIGTDMSRFPTAAHLASWAGMAPGNHESAGKRLSGRTRKGNKKLRSCLVECARAAARTKNTYLSAKYHRIAKRRGANRASVAVGRTILEMIYYILTRKEPYRELGADYWDRQREARIVRQTVKRLEGLGYEVKLEKTSA

SEQ ID NO: 447340 - protein, 348 aa, unidentified
MQISTIGIDIAKNVFQVHGVDAAGKPVLKKQLRRGQILEFFGKLAPCLIGMEACATSHHWARELRKLGHDVRLMPPSYVKAYVKRGKNDAADAEAICEAVTRPSMRFVPIKSAEQQGALMLHRTRDLLIRQRTQLINAMRAHLAELGLVAQKGREGVQQLMRTVADADDEQLPSDARVACQAIIAQLQAVQMQITGLEKRIHQAHRANPASKRLDAIPGFGVIVSTAVVATMTDPKAFKTGREFAAWIGLVPRQNSTGGKERLGSISKQGDRYLRRLLIVGALAVIRSARARPDKYPWVMKLLGRRPAKVVAVALANKMARMAWAILAKGEAYRAPVRSSSGAIAASA

SEQ ID NO: 447341 - protein, 383 aa, unidentified
MTNQHVIIGMDPHKSSNTIVVMTRDETMLTRRRFVNSDDGFIEMLDAVTDYPERVWAVEGANGVGRSVAQRLVGFDETVVDVPAKLATRVRVYSTGHGTKTDNADAVAIARAAIHSKHLRRVLADDATVAMKLLSDRRHELVGLRTQAMCRLHRLLRELIAGGAPRQLSAEKAFDLLNDLKADDPANVMRLEIAFDHIEDVMRLDRKIDDYNRRIVTDIKTCGTTLIRLYGVGPINAALILGEVGDVSRFPNRDHFASYTGTSPISASSGDHQRHRLNRAGNRRLNHALHIAAITQIRQDTPGREYYRRKMVEGKTHKEALRCVKRRISDAVWRQLQTDRSDEQTQDTKWPRKPAKDTFLVAYRSPDTPRANGRPKQFKPAVV

SEQ ID NO: 447342 - protein, 353 aa, unidentified
MKRPKDKLHAGIDLHSNNLTIGLVNQEGKRVAHRTLECKLDDVVGFLKPHRAQLESMAVESTFNWYWLVDGLRQLDYPIDLANPAKIEQYNGLKHAGDKDDAFHLGELQRLKILPKAYVYAPELRPVRDLLRRRTSLVHQRTALFLSFKSLYTRTTGQRLDLKEVKKMEPKQAPKLYEHPANQLIAQIQAEHIQGLDRSIGRIEKAVLGCAREIPLYEKLLRLPGVGKILGMTITMEVGEISRFKTDGDFASYCRLVDAKRVSNDKRKADNNQKCGNKHLAWAFVEAANFARRHDLNCRQWYDRKAAKTSKVIATKALACKLAKAAWHVMAKQCDYDERRVFPELAGKPRKQQ

SEQ ID NO: 447343 - protein, 421 aa, unidentified
MAQPVWAGVDAGKADHYCMVINDDAQRLLSQRVANDEAALLELIAAVTTLADGGEVTWAIDLNAGGAALLIALLIAAGQRLLYIPGRTVHHAAGSYRGEGKTDAKDAAIIADQARMRHDLQPLRAGDDIAVELRILTSRRSDLVADRTRAINRMRAQLLEYFPALERAFDYNKSRAALILLTGYQTPDALRSAGGARVAAFLRKRKARNADTVAATALQAANAQHSIVPGQQLAATVVARLAKEVMALDTEIGDTDAMIEERFRRHRHAEIILSMPGFGVILGAEFLAATGGDMAAFASADRLAGVAGLAPVPRDSGRISGNLKRPPTLRPAPAARLLPVGLGQHPHRPLLAHLLRPKTHRRKTPHPSRPRPGPPPPQRPVGHAARPRCLPPRNHYRGGLTTSLRISFGGYGAPREHPPRR

SEQ ID NO: 447344 - protein, 369 aa, unidentified
MKTFAHSRGPIHLGLDVHKLSITAGVLDAAATVPVLQQIGSDDAAVRGLIAKCGDPSRLRVCYEAGPTGFALARTLQGWGVACDVVAPSRIPKQSGDRIKTDKRDAAQLALLHRAGLLTAIHIPGAEIEAVRDLARARHDLDDDLKRVRRRLLAFVLRHGHVYRGGTTWTQAHHQWLDALRFDEPAARQTFEYYRSVMAIREHELAAISNDLRSWLDKPPVGQAAHRLAAYHAVGYLGGLTIAAEVANEWDRFPQARSFMAFTGLVPSEHSSGGSRHQYGITKTGNVVIRTQLIESAWHFRGRPVAGKTLQERQSHVGPATVARASVAHKRLAGRYRRLAARGLAPNVINVAVARELAGFMWAEMTSSA

SEQ ID NO: 447345 - protein, 347 aa, unidentified
MEYFAGLDVSLETVNVCIVNAAGDILLEKKIAAEPAAIVHLLKIFGSPIKRIGLEAGPTSSWLYGELRAAGYGAICLECRHVKAGLSAMRNKTDRNDARGIAQLVRLGWFRQVHVKSEEAQRTRMLLVNRQQLLTKALDIENSVRGSLKVFGLRVGVVTRRGFEARVLELVADDPILLAVTEPMLRVRQALFEEFERLDRLCRQLARRDPVCRRLMTVPGVGVVVALTYRTGVDAPERFSRSRDVGAHFGLTPKRYSSGQTDYDGRISRCGDEMVRTALYQAANVLLHHGRWSSLRSWAMRIAKRGSVKGAKVALARRLAVVMHRMWTDGTDFRWSDTSRMTAPTAA

SEQ ID NO: 447346 - protein, 389 aa, unidentified
MSLDHPCEGPTAIRTNLGAIFVSLELSRSTWLVTSLSPGGGEKMSKHSVSAGDIAALLARFSELMKKAFARTGRTFPIIVIQEAGLDGFWVHRLLHNEGIESYVVDPASIATSRRRRRAKTDKIDGEALVRALLAYKRGEPRVCAMARAPTPEQEDSRRLCRERKTLTVERVQHVSRIKGLLFSQGVSDYEPLRCNRRQRLDELKTGDGRCLPQHLKAQISRELDRLELLLEQIKAVETERDALISPKAKTEQSRAPQAMLISLKGIGPEFAAVLWSEGLYRSFSNRKQVAAYAGLAPTPWQSGSVDREQGVSKAGNPRLRTTLIQLAWLWLRHQPQSALALWFKERVRRNGGRLKKTTIVALARKLLVALWKYVTAGVVIDGAVMKGA

SEQ ID NO: 447347 - protein, 304 aa, unidentified
MNGIGIDVSKRQLDVGTTDGETLQVWNNRSGFSELDVWLKKRPVSQIVLEATGGYERPVLDFLHAAGHPVVRANALQARRLAQGMGQMAKTDRLDAYALAQMAALVKLPAYQPLEPWQQKMREFVRARRQAMHALTIARQQQETVGDRELRRLLQANITRLQTLVERLGKQIAEQVAQQPQLAVLKSMKGVGLGLQAVLASYLPELGRISGKAIASLVGVAPMSHDSGTMRGKRSIHGGRAEIRQVLYMASMSAMRHEPRLRNFYQSLRARGKEGKVAIVAVMRKMLVILNARVRDAENGLVPA

SEQ ID NO: 447348 - protein, 330 aa, unidentified
MIFLSPSSEVTRMYSILVGIDIAKKTFDVSRLENGKYQPNSFANTPEGFLAFLDWLTAYGLASTLCVLEATGLYGLPLMTFLYDQGVPVSQVNPAAIKAFAQSELSRTKSDKADARLIARFGRERQPRQWVPPAQAVHELQTRLRRIEQLIEMLQMEKNRLEGTQGTVRTSITQSIETLEKQIDTLRQEVNKLINDHPDLKKDRELLESIPGIGEVASANLLLLFAAHPDFDDPKQAVAFVGLSPNPHQSGASGKTRLSRIGDARLRKALYMPALVAQQHNPVLKAFSERLKANGKKGKVILCAIMRKLIHIAFGVLKSGRPFDPNFALA

SEQ ID NO: 447349 - protein, 381 aa, unidentified
MEYSTTIGVDVSDKTSKICVMAKDGGERRILVETTCATTKDGFSECFAKFDRSWPVVFETGTHCRWMKRHFEGMGFRAIVANPAEVKLITDSNAKSDRGDARKLARIALADAEMLRPVRLRGERHQQMLRFHEARRLLIEFRGSMICQMRSFAKSSGFRLPDCSAEWFHEIDKSGWPEEYEQTVWPMMQAIEAVNQKIAAYDAMIERLADTPDFKEQVERAKEVYGVGTVGATVVVAAIDGDPGRFEHARDVGPYFGQVPKTFQSGQSDPQLGMTKAGNDLVRKVLTECAHVVMKSNAKDTDLKLKGLRIASRGGKIARKKAVGAVARGLAVRIVALLKDPEREYVPLSEEGRRGFERYRAEQEHLAMRRDRRQTTGTAKD

SEQ ID NO: 447350 - protein, 339 aa, unidentified
MFYSGIDQHKRDCFITTYGPDGEVVNQKRVPNSPMLIQRYFSGLPGPHKAVVESTGSWYWLADLLEDLGVELTLAHATKLKAISEAKVKTNKIDSAVLAMLLYADIIPEAHMIRPEMRGPRDLMRTRLRLVEKSVSCKNSIERLLEKFNVHNVTELDELYRLQAACHEAQIELLQDQIKTLEAALHPFLIPNADIQRLLSIPGIGKVNAFTLYTEIDGIERFPSDQQFFSYCRLVPGAANTGTRTRHRSGSKQGNRYLKLAFGHAAVRAIQYYPEIRAFYRTKRRKKPERIARTLVALEIARIVYHVLSKQEEFNGLFKGQRLSRTKQSRWPRLASPSA

SEQ ID NO: 447351 - protein, 356 aa, unidentified
MRGEYQKGKVLARGKDVYIGIDVHKEKWHVTVRVEGEEVFNGSMLSEYQSLRKFLQRFKVCKIKIAYEAGPCGFGLYDKLSADEIETIVVPPSLIPVESGNKVKTDKRDSRKLAKLLESNMLKKVYVLTEEDRANRELVRTRRQLTEHRSDVMRQIKSKLLFHGIKSPFPSKQRWTKQYVKWLRELHLEHEVVKVSFNTLIDLYEYLGSQLMRISKKIVALSQSDKYSHKVKLLRSVPGIGILIAMELLVELADIERFKTADEIASYMGLTPSEYSTGQYVRQGSITRCGNTRARVCLVESSWHLIVKDLFWRGKYMKLKYRRGAKRAIIAIARNLIIRIRRILLNNEPYRIGLAA

SEQ ID NO: 447352 - protein, 344 aa, unidentified
MTDIDYIGFDIHKKTISFCAKAQDGTILDEATIPARRDMLLAWAKARPRPWIGAMEATLFTGWIYDLLKPLAQELKVAHPAMLKAIAASKKKNDKVDARTIADLLRCNLLPECYMAPCAIRDLRRVLRYRNLVVRQATRMKNRIAGLLMETGTPYNKQRLHGKAYFSELLGSLQEVPRSVVELLKLSRGQLEFFATIQRRLLKGLCEHPDLSERVARLQTIPGVGEIMALSWALEVGEVDRLPSISQAASYCGLTSAQHNSAGKEHRGPISKQRNKHLQTILIEAAKLAPRHNAQLAAVHERELQRGDRNQATLAVARKLVAYLMAVDKSGKPFAMRASGEEAA

SEQ ID NO: 447353 - protein, 385 aa, unidentified
MTTATPIRMPEETTDRPALFLAFELGANQWKLGFTTGAAQRPRERNVPARNIEAVREEIRKAKERFGLPADAPVISCYEAGRDGFWLHHWRVPQGVANCVVDSSSIAVNRRHRRAKTDRLDVQKLLTMLLRHAAGERKVWRIVRVPSVEEEDRRQLHRALTTAKRDRTRVINRIKGLLASHGLVMPPGGDFAQQLEHLRLWDGTPLPAGLHHRLGQEWEQVVALTQRIAQLEAERRAVLQTAEDAVTQKVQQLLMLKGIGINSAWLFVMEFFGWRAFRNRKEVGALSGLTPTPYASGNTAYEQGIAKAGNAHIRAMAIEIAWGWLRFQPQSALTQWYQQRFGHGSSRLRRIGIVALARKLLIALWRFVETGVVPDGAALKAVGRR

SEQ ID NO: 447354 - protein, 384 aa, unidentified
MEKFSTLYVGLDVHKESIDIAVAEAPRDAEVRHLGSVAGGLDAVSKSMRKLVSASHRLHIVYEAGPCGFVLQRHFSSLGWHCDVVAPSSIPRPSGERIKTDRRDAMKLARLARSNDLAVVRVPGPADEAVRDLVRARDDAVREQRNGRHRLKALLLRNGITYAGKSAWTAAHLRWLATLKMEHSAQQIGFQEYLHSITESGARIVRLEQAMRDTLPEWSLAPLVQALQAMRGVQLIAAMTLVAELQDFMRFESPRQLMAFVGLVPGEHSTGPKRRQGSITKAGNSAARRMLVEIAWHYQHGPRVSPIIATRHDQLPKAVTDIAWAAQLRLSAKFKRLMARRLMKNKAVVAVARELAGFVWAIGCEVQTSGWQGIAVEPTTAAAS

SEQ ID NO: 447355 - protein, 360 aa, unidentified
MQEITRVGVDLAKRVIQVLAVNAAGSRVTGRALAREKFLSWCAQLPAGCLVAMEASSSAHHWARKLISMGLDARIIAAHLVTPYRIQGRSGKNDANDAAAICEAASRPRMHFVPVKSVEQQSMLCIHRLREGFKTERIACINRIRGLLAEFGLVFPQRPEVLRQALPDVTEDATNELGGLARLALQRAWAQWQELDEHMDWCDQRIAAHLKTNEQVRQAQQLMGVGPVTASAVVATVGEFRQFKNGAQFGAWLGLTPRQNSSGGKNNLGRITKRGDMYLRTLLIQGAKSIVLTAQKRDDPISKWALQIREKSGWQKAVVALANKNARILWAVFVRGKAFNANHVSVKPPAAMPQIGAVPA

SEQ ID NO: 447356 - protein, 311 aa, unidentified
MQSISTIGLDIAKSVFQVHGVDAAGQVVIRRQLKRRFVLSFFEKLPPCLVGIEACASSHYWSRELRALGHTVQLMPPAYVKPYVKRQKNDSTDAEAICEAVTRPNMRFVPIKTIEQQSCLMLHRVRHLFIRQQTAVINSIRAYLAEFGVVAPVGRRGVEQLLEVVADPAECRLPEVARACLAALGSQLRALKAQILDFDRRIIAWHRSNATSKRLDAIPGVGPALATALVASVADANAFRSGRDFSAWVGLVPKQNSSGGKDRLGSISKQGDRYLRSLFAAGHPGKFTGGLLPDLDQAITGWRRTFRHGQT

SEQ ID NO: 447357 - protein, 384 aa, unidentified
MNKHSMIFIGLDTHKEFHEVAYCEEQRGATPVHYGRIPSSKVSVKKLIRQFESKYPGATIHVVYEAGPCGYWIYRLITSLGHCCYVVAPSLIPKKPGERIKTDRRDALKLVRSLKSEDLTPIYVPEPEDEAVRDLSRAREAAMKDLKEAKYQLKALLLRNNIRYEGTANWSKKHLRWLTELILPHPAQQIVLQEQLQTIEERIRRLERLDNELAHHVHQWRYYPVVKAVQAMRGVRLLVAVGVVAELGDLHRFDHPRKLMAYLGLVPSEQSSGGKRHLGAITKAGNGRARRLLIEGAHSYRYPANISTELQLRQEGLPKDIVDIAWKAQLRLCKRYQRMSKKGKHYNLIITAIAREMAAYIWAIAKEVVLTPVNPKLRLSRVPA

SEQ ID NO: 447358 - protein, 384 aa, unidentified
MLNCRNPSRDGMKRPLLVADAYASVAHSKCRQGAAMAKVITEMTVGVDVSDKHTYFCCVDQAGEVVRQAKVPTTDAGIRKALSKVKAPARVVLEAGTHSPWMSRLIESLGHETIVADPRRLKIISQSATKNDWNDAELLARLGRADLKLLKPIFHRTERAAADLRVLKVRGALVKSRTLLINSVRGLTKSHGARLKACAPERFHVIARESLPKELATGVEPLLKAIEDLTAQIAEQDRSLEAMVAAFPDAQRLDAVYGVGPVTALTFILTLDDKERFKSSRSVGQFVGLCPRQDQSGDSDKQLHISKAGDTQLRSLLVSSAQTILRKNAPDSDLKRWGTSLASRGGKNAKKRAAVAVARKLAVLLHRLWVTGEAYEPLHAGKAA

SEQ ID NO: 447359 - protein, 320 aa, unidentified
MSALSVTVGIDVAKAHVDVCVLGTHSDVQRFANDVDGHSALAAALQSLDVGLVVMEATGGYEAALACALQAVGLHVAVVNPRHARDFARSMGRLAKTDAVDARMLAELAAVLMRRDDLARFLRPVADERQQWLAALVTRRRQLLTMLNSERQRLQITPRKLHPSIEAIVAAIKAQLDDLERQMVGHVREHFGELDGLLQSTNGIGPVASATLIAQLPELGRLNRREIAALVGVAPMSNDSGNRKGRRRVQGGRFEIRRVLYMATLTAARYNPVIRAFYERLKAAGKLPKVALVACMRKLLTMLNAMVRTGKPWDASLHSA

SEQ ID NO: 447360 - protein, 345 aa, unidentified
MQTMYYIGLDVHKKTISYCVKDGSGQIHAEGTIPATHCDLDRWMKTLPQPWTAAMEATVFTGWIYDHLQPHAAALKVAHPLMLRAIAAAKKKNDRIDASKICDCLRCDFLPECYMASTAIRERRRTLRYRNLLVRQMVQMKNKISMLLMEAGVSYNKQRLHRAGYFRELLATNPNINEGLRSLLRLCRETVVRLQKTESALVRSLEHDSLLMDRVERLMSIPAVGPITALTWALEVGDVQRFSSIKKAISYCGLCGAEKSSGNTVQRTPLSKQRNKHLQTILIEAAKMAPRYSPDLAMHYDKERQKGNANRATLAVARKLVAYLVAVDRRQKEFLVVEKENCVAA

SEQ ID NO: 447361 - protein, 370 aa, unidentified
MEFIGIDLHTNRFTCSYRDEHTPPNAKKGKRTETFELTDHGLAAFYQTLTPDTYVLIEATITTFSFVRLIQHMVKEVIVANTYELKQVSLARVNTDKIDANILSRLLKMQIMSGERAIAPVVVPPVPIQELRGLFSTYRLYRKQTTQLKNRIHSLLKEKLYGFTQEQIFSQTSRNMIRAIEKDTVMSFQIQELFELLETMEGRIELLKDKIMEEGQPYMREITILTSMKGISVFIAIAIIADIITVERFKDSKSFTSYLRSAPKVSSSNTTVKQRGTNKMGRKVAATLLSQSLNHVLTASPKLNRWYLRLTEYKKPGSVRTALRRRVFAELYQMLKKGEYHYGREAEKHEAKLVQYRKFLEKREIFLKSA

SEQ ID NO: 447362 - protein, 352 aa, unidentified
MQVQSNKLDFSGQIFYCGIDIHKKSWAVTIETEEISLKTFTQDADPGALVKFLRKNYPSGTYLAGYESGYFGFNLQRYLKESKIDCKVIHSADIPTTHKEKDQKRDPLDSKKIARALRTGEVKSIWVPPINLEQDRQLLRIRRTLSKDQTRVKNRIKAFLQMHGIIYPDSFSGIQSHWSRRFITWLEGIELNETTGTEALQVLVRNLVYIRGELLIISRQIRALSESDQYRHACSRLKGLPGIGLLTAMIIITEIGDISRFKNADSFRSYIGFIPRSSSSGEKEYNGRITSRGNSQLRSLLTESAWIAIRKDPYYLQIYNKYRQNMKPNKAIVRTARKLTNHIYYTLKSSNV

SEQ ID NO: 447363 - protein, 355 aa, unidentified
MTISTKYIGLDVHRDTISIAVADEARNREIRFFGTVANDGEALHKALTSIGKDGATLKVCYESGPCGFVIHRFLTKLGIDCVVISPSSMPRRPNDRVKTDRRDAQTLARLLRAGELTAVWVPDEAHEAIRDVVRARRQAKQELVSAKNTLKSFLLRHDRRFPGKAIWGRMHWRWLSDQRFAFPHQQFVYEEYKRASRNWRSAATAWSRCWPLAPIVTALQALRGIKFIAAVTLVAAIGDLHRFDSPKQLMAWLGLVPAEHSSGTRTRRGELTRTGNAAARAILIESAWQYRYPAREGRALRERNARLPDHIRAIAWKAQTRLCAKFLLRPSALQATKMGQESNASMSGMTRDVFG

SEQ ID NO: 447364 - protein, 349 aa, unidentified
MTTQRLSYVGQSVYVGVDVHKDTYAVTCVCNKQIVKTATVKADPAGLTASLSQWFPGARLYTAYEAGFSAFVLHRALTKAGIMNIVVNPASIAVAANDKVKTDRRDSKKLAIDLSDGRLQGIYVPTEDEELARLLPRTRAQIVEHRATIARQIKAKLHQFGLIAPASRRLISNRYLREIDAWPLPPDLRVSLTFLAEQWRFATRQLIEMRRLLREQAKAHPAIEQVYRSVPGIGEVVARTLATELGDMTRFANERALFSYTGLTPSEYSSGPSVRRGHMSRQGSSRVRHLLLETAWRALPRDAVLKEIFDRIAATRGKKRAIVAIARRLTGRIRACFRQGTTYAVGTYA

SEQ ID NO: 447365 - protein, 341 aa, unidentified
MKHYAGLDVSVKETTVCIVDEGGRICREMKVASHPDDLAEALKNPAWNLARIGLEAGPLSQWLFSGLAGAGLPAICIETRHAKAFLKAQVNKTDRNDARGIAQMMRVNLFRPMHVKTLMSQKRRALLTARKLLQEKAIAIENDIRGLLRNFGLKVGIVGVGIRDLSGDIPELRDIMEALLTARQRLREQFTVLHERLLSIVKGDTVCRRLMTVPGVGPIVALAFNATVDIPARFRNSKAVGPSLGLTPRLHQSGEDNRVGRVSLCGDAMMRTLLYEAAQVLLTVVKKWSWFKAWAMNVAKRRGRQRATVALARRLAVIMHRIWSDGSEFRWARENTAAVKL

SEQ ID NO: 447366 - protein, 394 aa, unidentified
MSILYIGIDVSKDVSTVQGIDKDGNKQFYVEVPMDSKGFSILLRKIKAQRKDLSEVAVAMESTGCYHINLLCFLLSQGILCFIVNPLLIANYAKLSLRKTKTDKKDSMTIARFLFANKHTLTSTLFCQDIQDLRDLSRERESLTNHISRMKNDIKRLLHITFPELQFLCKTIFTETMLNFLRQFPSARIIRNTDLHDIENALIHKKRVLYNAKDIVNLAKVSVAASSRAKELILSEKASTVLYLQEKMQKITELLIESCESMRVDDLNIIRSINGVSDITGSTFLAELGDIRNFSSHKHVIAFAGLDPAVYQSGQYEGKGKISKRGNKHLRRVIFLMTMCVVRTNSVFKNYFQRRKQEGLAPIKALFATSHKLIRVIFAMLSKKTFFRKEVVVV

SEQ ID NO: 447367 - protein, 368 aa, unidentified
MKKNNTVVGAWRAKARAQKRRLTIGMDLGDRSSRYCMLDEQGEVIREGSVATTKKGLNQVFGAMPQCRVALEVGTHSPWVSRQLADMGHEVIVANARRVRLIAESSRKDDRLDARALARLARIDPQLLSPIRHRGAQAQVDLMRVRARAALVEARTALINSARGLTKSSGERLRKCSAERVSEELGLELSTELRAALGPLLAAVEALTERIKEYDRQIEVVARERYAEVELLKQVSGVGTLIALTYVLTLEDPHRFRRSREVGCYLGLRPKRRDSGDSNPQLRITKEGDRYLRKLLVQSAHYILGPFGPDCDLRRWGRKLAARGGQRARKRAWVAVARKLAVLLHKLWVSGEVYEPLRQSQRQCPAAA

SEQ ID NO: 447368 - protein, 347 aa, unidentified
MRFYTKQHKFYCGIDLHTNKMYLCILDETGGVRLHRNIITDREVFLKAIHPYREDIVVAVECMFTWYWIADLCVQEGIPFVLGHALYMKAIHGGKAKNDKIDSRKIAVLLRGGMIPQSYVYPAKMRATRDLLRRRNHLMRKRAELYAHIQNTRSQYNLGDPFGTIAKPQNRQGVAERFDDPSVQKMIASDFAVIEAYDPIIAKMERDIIQSAKHHDPVSHALLNTIPGVGRILSLVILYEIENIKRFPSVQDFASYCRLVKCAKESNGKKYGSGGKKIGNAHLKWAFSEAAALFLKGNEQGKRYLSRLTAKHGKGKALSILAHKMGRAVYFMLKNKKPFDQNKFLGL

SEQ ID NO: 447369 - protein, 435 aa, unidentified
MPSAPNLPSVPAAFIGIDWADQSHAVCLCPADSRQPEFFQLAHTATAITKFVATLRTRFGGQLVAIALEQSRGALLYALMSYEFLQLYPVNPATAKRYRDAFTPSGAKNDPADAQLLCELLLKHRDQLRPWRADTAVTRQLALLCEHRRDLVNQRTRHVQQLGAALKAYFPQALDWTGEDLATTMAIDFLLKWPTLPELQRAQPKTLRAFYYAHRCRRPDLVNKRLQQIHEAKALTTDAAVIAAHALRVQVLARQLRPLIASLQEYDRQIAALYARHSDAPIFDSFPGAGACLRPRLAAAFGTDRTRFPDAGAIQRLSGIAPVTRRSGKSHVVQRRYACAKFLLQTFHEFAGCSLQSCPWARAYYQAQRAKGKGHHAAVRTLAFKWLRILWRCWHDHIAYNDDLYNTALCKAGSPLATTLLAACSSVNNIEKNPC

SEQ ID NO: 447370 - protein, 358 aa, unidentified
MPAHSKTAKPGTQIAVIGIDIGKNVFHLIGLDQRGAIVLKAKLSRSQLESRLANMPPCLIGMEACAGSHHLSRRLIALGHDARLMPAKYVKAFLKGHKNDYRDAEATAEAVQRPTMRFVATKTEEQLDLQALHRVRARLVGERTATVNEIRAFLLERGIAVAQGIQRLRRALPDVLAKSADGTLLPRMIRIVEALAADWRRLDERVEEVSTEIETLARKEAPCQRLMTVPGIGPVISSATVATIGTGDMFAKGRDFGAWLGIVPKQLSTGGRTILGKISKRGNTYLRTLFVQAARVVLIRRESWERYGLKSWIEAAARRLHPNKLAIALANKLARIAWAVLHYGRNFEVSHDYAPQPA

SEQ ID NO: 447371 - protein, 336 aa, unidentified
MIIIGCDFHTRFQQIAMLETETGEIVERRVEHEGGEAQAFYAALPAPARVGMEATGYARWFERMLREQGHELWIGDASAIRAARVRQQKTDARDALHLLHLLLEDRFPKIWVSSPAERDVWQLLRHRDKLVRFRTSVRNQLHALAMGEGVCRKKKLWTQRGRQELEGLALGEWAGRRRQELLEMLDRLDASIQELDQAVAQQAESHPAAVRLMQHPGVGPVTGLAMALAVGPVERFRNSRKLVSYLGLNPREDSSGGKQRLGSISKQGNTLVRFLLGEAAQTAARTDPQLRRVYQRLGFRRGKAVAKVALARKLAVRLYWLLREATPPARTQGSPG

SEQ ID NO: 447372 - protein, 360 aa, unidentified
MNNDKYVGMDVHQATTVAALEDGRGNFLMESILPTRANELREFFKGLNGTIHVAFEEGTQATWFYDLIEPLVKEVVVCDPRRNKLIQTGNKGDRVDARKLAKLLRLGELHGVYHGERGTRGLKELVHGYDQLVRDTARTKNRLKGAFRSRAISCKGKKVYGESERNEWLTKVDMPALRTRVSSLYEQLDCQKRLREQAQREMIKEAKKHPAYKLITKVPGLGSVRVSQIIATVGSPHRFRTKRQFWPYCGLAVVTHMTSEYEIVDGQQRRKNKPLQTRGLNKNFNRTMKAVFKGASETAIKKSPFKEYYQRLIDNKMRPEMARLTIARKLSAITLAIWKKGEAFDPERVNQAPARDSGDQ

SEQ ID NO: 447373 - protein, 400 aa, unidentified
MSLAVGIDVGAYKCAAAVCRQGEREAERKVLNITTKRGGFAELDAWMVQQGAPIDVVVMESSGHYWFNLASHLRRQGYPVAVVNPLQAKYFGKSRLQRSKSDPADARTLAALGTCDQPRISEPLVGAELKEAARFAMRLVREQAQACQRIQRLVDIGFPELRDVWDDPTCVSALAVLRHAPTAAAVARMHLDRLARLKRPGSGGRVVGPLKAAQLKQLAQTSVAAPELEQQVGFEMRLLIAQHDLLDQQIAGADARVASLLDGEVAQRLLSIPGVGPSTAATLMAEIGDIWRFSDVDQLLAYTGVHPKEQSSGKKGANPETSWAMAKTGNAYLRAAAYRMAVVGVQHNPILRAHYARKRAAGKSAMNSLGHCMSKALAIVWGVWRGGKDFDPAHGSAGLA

SEQ ID NO: 447374 - protein, 336 aa, unidentified
MTLYCGIDLHSNNNYICVIDGKDKRLFERKLDNDPERVIQALQKYKRRLKAVAVESTFNWYFLVDALIEAGFEVMLVNTAKVVQYNGLKRTDDRYDAYHLAHLMRLGILPTGYIYPKQTRGLRDLLRKRMQLVQNRTQHISSFKTQYQRQTGRDICTNDIKRVRFTCPVIGDSYVQLALASNLTMSRALREQIKRLEKAIMAQVLPVAEFELLKTTPGIGDILAETILLETGDINRFKAPGNYASYCRCVDSRKESNGKKKGEGNRKNGNRYLAWAFIEAANFAIRHNAKAKRFYDKKKARTNNIVALKALAHKLARACYFIMREGVPFDENKIFA

SEQ ID NO: 447375 - protein, 332 aa, unidentified
MRYVGIDLHKLDLVVAVEDENGPVGKPRRIRCEDEGVIVELFEKLRPFKAVIEASASYRWLYELLSPLGTVVLAHPLRLRAIVTSRAKTDKLDARVLAKLLRLDEIPTAYVPPKAYQELRDLTRARARLTQAATAAKCQLRALLGAANVRPPYRAPFGKRGRRWLASLDLGLAANMQRDELLLRLEHYERETAKLDAGLGRMAEAFPQAEALTELHGIGVYSALLIIAELGEVDRFQTDRQVGAYAGLTARVHQSGGHDYHGHITRQGSRWLRWILVQAAMKIVSRDKKLRNFYTRIRKRSSKHIARVAVARKLAGICWVRLRRWHREHAAA

SEQ ID NO: 447376 - protein, 427 aa, unidentified
MPYRIAGIDVHQRMLAVVVSQVEVDGEYQFERRQFGSNPAQLRWLAGWLVEQQVQEVVMESTAQYWKPVWGALEEHGKPIGQKREGAHPKSGALHLAQAQSNRARRGRKDDFADAERLVKRLVANELTLSFVPDAEQRLWRTVMRTKYQLRCNQVQVHNRLEALLEEAHIKLSSLVSDLLGVSGRRILRALAEGETDPTALAALAHSRLQATPEQLSDALGACRELHPVYRRRLKMALEEWQRIETQIGELGQEMAVLLSPHQDQVQRLTEVPGVGVDSAQQIIAEVGATAATFSSEGNLSSWVGACPGKEETAGVNHSHRSPKGNRHMRRILNQAANAAVKLQGGLFAILYRRYAPRLGHQQTIGVIAHRLCRLIWKILHQGVRYQEYGPAVSKRSKHQRARRMIRELRALGYRVELPGSRSEALA

SEQ ID NO: 447377 - protein, 423 aa, unidentified
MTYRIAGIDVHKKMLAVVVSDVEVDGEYQFERMRYGSSPEQLRLLAEWLIAQQVEEVVMESTAQYWKPVWGTLERYWKPICREREGAGPMSGTLHLAQAQSNRGRRGRKKDFPDAERLVKRLVANELILSFVPDTEQRLWRTVTRRKYQLTRNHVRLQNQLEGLLEECHIKLSSLVSDLLGASARRMLTALAAGETNPAALAAVADKNLRATQAQLCDALGACTELKPIYRRLLKMFLEELQLIDQQISQLDQELASLLNPHNDAVVHLAEIPGLGVDSAQQIIAEVGAGAATFPSAKHLSSWVGACPGDEESAEVSKSHRSPKGNRHMRRILNQAANAAAKSKGTIFEIVYRRLISRLGHNQTIGAIAHRLCRLIWIVLHRGVRYEERGPSVSAKSRRHRTNRMIRELRNLGYRVEPLVCTA

SEQ ID NO: 447378 - protein, 402 aa, unidentified
MNCVGIDISKGKSMIAVMRPFGEVVVSPFEVLHTDSELSKLARLLKSLDGETRVVMESTGNYHAPVAWLLHDAGLYVSVVNAMLVHDYGNNSLRRAKTDKKDAVKLANYGLDHWITLPRYVPEEDTRLMLKSCYRQYQQYSKVRTMLKNNLISLLDTAFPDANRLFTSPPRADGSEKWVDFVAAFWHCECVCGLSEKAFTAKYQKWCKKHGYNFSEDKALDIYASACGHFGVMPKTDTTKLLVEQAISQLRATSAALAALKQEMQSLAASLPEYPVVMEMFGVGPALGPQLIAEIGDVRRFHSKKALVAFAGIDAPPYQSGQMDVRSRSISKRGSASLRRTLFLVMGVLLQCAPMDEPVYQFMNKKRSEGKPYRVYMMASANKFLRIYYASVKAYLDSLEHD

SEQ ID NO: 447379 - protein, 359 aa, unidentified
MKFIRIGVDLAKNYFQINALSSEDAPAVKRKLTRRTMREFFSRIEPCRVGMEACGSAHYRARELKAMGHDVSLMPPAYTKPYVKRGKNDAVDAEAICEAVSRPAMRFVPIKSADQQATLMWHKTRELLVKQRTMSVNALRGHLAEFGLVVAKGTGRVDEPLGLAEGDATLPDAAVLAARVLGQQIDALGGALDDLEREIAKAHALSETSRSLGEISGVGKLVASVITASVPDPSVFNSGRDFAAWLGLTPRQISSGGKPTLGTITKAGNRYIRKLLVLGATSLLNVVEKRRGGLRDWIVGLLAKKAGAACDRRPRQQACSDHLGNDENRRMLPHRDVRQTLSVGQPHRRVISLVSARKA

SEQ ID NO: 447380 - protein, 329 aa, unidentified
MGQAIGIDIGKEQFDVCVLDEQRQKHQQAFPNTKKGIKALQQWLKQQGVRQAAEAHIALEATGIYGELVAETLYQRGYRVSVINPARIKAYAQSQMQRNKTDKLDAALIADYCRTQEPALWSPPSPEMRELRALTRHLDDLKDEKQRTRNRLEAQRHSQAVARQLQAQIRFLERQIAETEQMIADHLDQHPDLKEQADLLDSIPGVGLTTAAHFLAEVGDVRRFKDVRELVAFVGLNPMQHQSGKRSATHGISRMGGSRLRAALFMPAMAAKRCNPRLKAWAEALLQRGLTKLQVVVAVMRKLVHLAYGILKSGTRFDPHHGTSLAFPA

SEQ ID NO: 447381 - protein, 345 aa, unidentified
MVSKQMQSYVGLDVHKKFIQGCILDNEGKVLLEQKFKSEPHSMDMFLLNVSKDSKIVLESCSCWQYVYDYLDDAEYKDLHLANPSRVRLIAESRKKTDKVDAKALANLLRVNLLPESYAPPLSVRYERQITRHRLSLVRLRADVKRKIHAILLRHGIEHEFSDVFGKAGTKYLYSLDLPMCDRFELDNYIQTIDFFGQKIKDTQERVEEFAEHSPQSRLLMTIPGIDYYSALMISAEIGDIRRFNTAKKLISYAGLNPSISQSGEKCYTGHIAKQGNNNLRWILGQCANIAVMNDSRLALFYHRIKKCKNHNIAITATARKLLCIIFAMLKDNSKYIHLKKCKAS

SEQ ID NO: 447382 - protein, 346 aa, unidentified
MVHYVGLDVSLKQTSICVVDQAGSVVREGVVDSDPEAIAAFVRSKAPGALRIGVETGPTTTWLWTELKRLGLPVICIDARHAKAVLKMQINKSDRNDAAGIARIMQTGWFKEVRVKDIDSHLVKALLVSRALLVKIKRDLENQIRGLLKNLGLVIGRAKFNVFTVRTEELIEDRPELLAVIRPLLAARKAIEEQVGALDRKVVKLARHDEQVRRFMTVPGVGPITALCFKATIDDPTRFKRSRSVGAYVGLTTRRHASGEVDWSGRISKCGDAMLRMYLFEAAGVLLTRVPKWSALKAWGMRLAKRNGLRKAKVAVARKLAVILHRMWIDETEFNWSKKEATAPQG

SEQ ID NO: 447383 - protein, 410 aa, unidentified
MEVLHAHCAGLDVHKDTVVACARHMVDGKVTTAVKTFKTTTQELMALSEWLSTEAATHIAMEATGVYWKPVWHILSDGEFELILANAAHVKNVPGRKTDVNDATWLADLMAHGLIRASFVPDEPTQQMRDLLRTRKQIVRERSSHIQRIQKTLEDANIKLDSVVTNILGLSGRRIIEALIAGRTMPQALATLAHRRIHASADELEAALRGRVTRHHRFLLKLHLDQIDAFDATIAAIDKEVDGNVEPFRVAIEMLSAIPGVGNLSATVIVSEIGIDMSRFETAGHLISWAGLCPNNDQSAGKRRSTRMKKGAPWLKSTLIQCAWCASRTKDSYLQAQYLRLRSRRGAKKAVCAVAASILTAAYHMLKNGTVYQDLGASYFDNRAKDKQALRLISRLKNLGFEVQIKPLAA

SEQ ID NO: 447384 - protein, 344 aa, unidentified
MKTYVGIDLHARTLHLCVVDAEKGERILERARVPNRLPVILDLLAPYKGETSIAVESTFNWYWLVDGLQDAGCEVHLGHTLGNSRISKAKVKTDRRDAFRLARLLRSGDLKEGYIYPRETRPVRDLIRARGKAVSIRSAEYGRIRMRLYREGILEHTKTSVRSMPDDELAGLFGHPAVSAVVRHELARIALVDAQVRALEEQIQDLSSAHPEVDLLRTLPGIDRALGPVIFFETGEITRFSTAKRYSSYCRLVPGCANSGSTSKPGRARKEGNPYLKSAFTQAATHAARTNDRIRRFAERHRRRRAGRGGKAVVRNIVAHKLCVAVWLMLTHGVAYEEEMLFGN

SEQ ID NO: 447385 - protein, 364 aa, unidentified
MTRVAQNVKEGKNIFCAIDLHQEKMLAGIAVDQGLPEFRELDTREESGVKGLQSLLQSCGRRFPGARVRVCYEASGSGFGLADRLEEAGYWVAVLAPTHLPSSPKQRSNKTDKRDAVRLLEALRGHVLAGNSLPVVWKPPAELREDREVVRRRLGLGEKIAGVKNEIHGLLRRYGRRAPVGIKNPWTKKHVRWLETVAAELPAGGGTVLRGLLRELRFYQEELIRGGKAVAALAGEERYRKQVEALVAIPGVAVLTAMVFLTELGDLSRFPNRRALGSYLGLVPRAWESGEQSDRKGHISKMGSARVRKVLNQASWALVRLAPGWRVWFQKRMRGQKQERKKALIVGVMRQLGIRMWHLAQEAA

SEQ ID NO: 447386 - protein, 328 aa, unidentified
MKVLGLDLRGEIVLRRKLSRRQLLLFTANRSSMLIGIEACGGAHFLGRALREQGHEVRLMPAQYVKPHLKTNKNDYLDAEAIAEAVQRPTMRFVPIKTDEQLDLQALHRVRDRWVARRTAVMNQMRGFLLERGMTVRKGPSHLMAQLQEVLCEGGAFFSARLRGLLHELKQEWDELDRRIEQANDELQHIARENDACHRLMEVPGFGPLVSTALVAAIGDGVTFRKGRDLSAWIGLVPRQHSTGGKTNLLGISKRGNPYLRRMFLHGARSVVAQAERNPPALSTWLANLAGRTHRNVVVVALANKMARIAWAILSKGIRYRVSELVVA

SEQ ID NO: 447387 - protein, 361 aa, unidentified
MQLQDALRKPKIFIGLDIHKKSWTVSIQTDLFFHRTYSMPSVAEDLFQYVEQTFPNHEVDLVYEAGCCGFSAARYFLNLGWNVLVVNPSDVKTGDKERYQKTDALDSRNLSNQLKSGSLKGVYIPTEEHEQFTTLARHRTQVTKKLRQSKLHIKSMLLFHGIKIPDEFDNPNWSQDFIVWLEKIKFSSTCGELALQGKIRMYKFIRSEYLEIANQMRAHCRKTHRKDYNLLRSIPGIGGYLASVILAECGDLRRFNNEGQFSSYIGLVPGIYNTGTSEKCLGITPRSRSQLRSYLVEAAWVAIRKDTEMQNYYRKHQGKNVKSVIIKIAHKLSRRILSVIKTETPYQININLVLEKQKQPS

SEQ ID NO: 447388 - protein, 390 aa, unidentified
MTSYLFNAVLAKKILECLKEHPDLNTIVAALESTSVYSIHIANFLSSCEELMHFKPYVFVLNPKCTANYKKSYIGLGKSDPIDAFVIADYARAGNIETEPWRGSQFLALKRLTRHRLHLVECMTREKTYLVSNLYLKFSELQMLEGDDQPFCDIYGATSSSVLTEYLSPEEIIDSSEEDLISFLAEKSRNRIKDISKTAELLKKAARDSYRLDKALYEPLNVSIASSFNCIETFKKEIKLIDTAIEREIRGLNPNAFIILQSIDGIGPVFAGGIVAEIGDISAFHSSDALAKYAGLMWKSNQSGDFDGEDTPMSKAGNRYLRYYLGEAANSMRKHNVEYGAYYRKKYNEVPKHQHKRALALTSRKFVRLVYGLLARNQLYSGVSLDTSNE

SEQ ID NO: 447389 - protein, 325 aa, unidentified
MDVIGIDISKLSFDVVLIIGERSKHAVFSNTEAGFQQLLAWLGKQRPDPDCSLHACMEATGNWGLDLADFLHGQGVQVSIVNPLRIKAFGQSELARNKNDKLDAGVIARFCRSQNPPLWVPPAPHLRELRELVRRCNALKDARVQETNRQKSGFASPAVAKSIEAHLSWLDRQIDEVSAAVLRLVQSDPTLRKNLSLLCSITGFGEVSAAILLAELPNIADFTPKALAAFVGLSPKEHSSGSSVRRPGRMSKVGAERLRGTLFMCAFSAKRFNPRLADFVQRMKDAGKAPKVILVAVARKLLVYAHAVIRTQKPFQPLPNAPSSI

SEQ ID NO: 447390 - protein, 415 aa, unidentified
MESVICVVGVDWSDQKHSYAVRTASGQEEEEEGEFGSDPEAVHEWVRRLRPCYGQGKIVIALEQSRGALMYALSAYDFIDLVPINPRAAKAYRDSLHLSGAKDDPVDAALIRDFVWNHRGQLRVWHGDDPITRKLRLLVEGRRDLVDQRTATSHALNAALKQYFPHILEWFGDGGSALGRAFLGRWPTLEQARHAPADAVRGLVRAHSRKSAAEIDMLLLKIRSAVPLTTDPAIIEPLALRVVTLVAILDPIDEHLKQYETAIAQVWQSDADRELFESFPGAGPVMAPRLAVALGSDRSRFNDPSELQTYSGIAPVVERSGKQCWTHARWQCPKFLRQSFHEFAECSIPHCAWARAFYHQQRERGAGHHEAIRALAFRWIRILYRCWKSNTLYQQERYLESLKRRGSPLMMRLAA

SEQ ID NO: 447391 - protein, 364 aa, unidentified
MQKISTMRTNGKNIFQGQLTVGLDLGDRSSAYCILNEAGEIVFEHKLATTPEAMKQVFGSLPRCRIAMETGTHSPWVSRLLSALGHEVIVGHAQKVRLITKSRRKDDRLDARTLARLARIDAELLSPVKHRSAQAQLHLTEIRARAVLVSARTALVNAARGLAKSSGERLRKCHTQQVRREMTGALSAGLREALEPLLREVESLNERIQEYDRRIERMAKERYPETALLKQVKGVGDLIATTYVLTIEDPHRFPKSRDAGCFVGLQPGRRNSGESEPQMRISKEGDEYLRTLLVQGAHYILGPFGEDSDLRRWGLKLAMRGGKNAKKRAVVAVARKLAVLLHRLWVSGEVYEPLRNSQAMNAAA

SEQ ID NO: 447392 - protein, 256 aa, unidentified
MFQLGIDVSKKTLDLCLLREGVKGKVKTRKLKNDFNAADAVIGWLSKQHCEPANVHIIMEATGVYHESLAYGLYKAGAKVSLANPHRSREFARGMDILTKNDQVDAYMLACYGALKVPEPWVPPSENVRHLSALLRRRDAPVTDSTREKNRLEKCRATDTPLAVTESIENVLRNLSAEPEHLDALILTHLDQHPELKKDFDLLTSIKSVGYQLGLNMLVILRGHHFDTAEQVAAFLGVVRVEKYSGTSVRGIMLVT

SEQ ID NO: 447393 - protein, 418 aa, unidentified
MADPANATAPINWVAIDIARYWNAVLVETAAGKRQRFKMANSAADFDRLVGFLRALPGRVRVALEPTGDYHRPLALRLLTEGFEVVGIGSVAQARYREAMFNSWDKNDPKDALVILEMLKRGAVQRYIDPMIAGHHDLQELAKTYYQVSKARTRVQHSLINRCLPLYFPEMHRYWATTRNGWFVRFLLAFPTARHIRALDREAFVQAAWELVGRKVSKRAKLEEIWEMAAQSAALPHAPESLAVEMFRLQLRRYQELNTLRAELEARAEQALAGNADFEHLKTLPGIGSIIALTVLAEAGDLRRFAHHRQFLKYCGFDLAKSQSGTHRGREQLSKRGNARLRLAFWLAGVAAVRMRENAFRDKYERYIRAAPDDADLHRKALTAVAAKMARVAHSLIKSNQPYRRFFEQGLPSGSIPL

SEQ ID NO: 447394 - protein, 390 aa, unidentified
MSQPFDASRSLTAFEQDSTLVAVIEMSQSNWLVAAVVPGVERQPLKKLDAEADALLKLLQRWRDEARKAGRVVRRIVCAYEAGRDGFWLARWLQAHAIEAYVIHAASIAVSREHRRAKSDRIDTELLMRSFLGWLRGEKRHCSMVAIPTMAQEDARRPSRERESLVGEQTRIGNRVKAVLALFGIGGFNPKLRKAAEKLETLGTVEGTSLPENTRAELRRDLERLRLVRDQIRAIEGERLRRLAAAPRTATGPHAMVRLLARVFGIGIETADMLVNEVLSRNLRDRRAVARYAGLTGAPDESGKRRREKGLARAGNGRVRRGMIQLAWRFLTWQKHSRLAHWFRERTADGRSTTRKTMIVALARKLLIALWRLVTTGELTEGIKLRPAGA

SEQ ID NO: 447395 - protein, 412 aa, unidentified
MNQKVYVGIDLAKDSSRVAVVDKDGSKLTSPFSIKNTRDGMEKLLSKLNSYKNDQILCGMEASSNYWENVYSYLKEKKVSCLLINPYQVRRYRQALGLKIKTDSVDAEAVAQLIRAKKYDNLYISDEVAVELKELVRIKFSFARRAKDLKKGVMSLLCLVFPEYTRIIPHPFSKVSTEILSKYPTSCHMAKASVSKLVKIFRRYQGCRFGADTAKELISAAKESFYSGRASRSRGMSISMQIEEISSLSKRMEEIEEEIKSILDPADPKGGPPSFGILNSIKGVGIGTISAFLGTVGDMSRFLNSDKLVSYIGFYPRIFESGKYKKKNPGIQKAGPRELRYMLYLSSVAAIKHNIYLKKYYNDLVSAGMPAKKALIKVAVKIVRMMYSMLKYKTHYDPSRVFLQYRPEKIAA

SEQ ID NO: 447396 - protein, 360 aa, unidentified
MRIIGCDLHARQQTLAMLDTITGEMVNRMLMHEGQQVREFYSQLPHPVLVGIEAIGPMQWFLNLLEELGIECQVGDATKIRAAEPRKQKHDRRDAELILKLLVEKRFPAIWMPSKEQLDLRALLLHRHHWVRLRTQIQNALQAMALANGLRRGPGLWSYDGQAKIAFLPLPPHASYRRYALQTMYRKMEEEIENLTEQVAEQARQRSGARLLTTHPGVGPVTALATDVFLGDPQRFADSKALASYVGLIPREYSSGAHQRLGALTKQGSPFLRFLWGKAAAHAARRDPELQRFYRRKLVQKGLGKARVAVARKLGIRLWIMLRDQIDYNEFCRRGQIQSGAACAGMPEVGFGAHSHRPVD

SEQ ID NO: 447397 - protein, 351 aa, unidentified
MPRKSSVCTVTAIGIDMGKTTLHMVGLDSYGAIVLREKVSRGRIASRFANLPPCLIGIEAGMATHYVARELAALGHDVKQVPPAYAKPFRQGHKNDFRDALAVAEAVQRPTTRFVPPKSNEQLDLQALHRVRSRLVSQRTAVINQIRGFLLERGIIVRQGLRFLRQLLPDILAKRTDVLSPRMVRIVSDLAGDWRQLDDRIETVTDEIETLAKADDSCRRVMTVPGIGPIISSAMVAAIGNGSAFSRGRDYSAWLGLVPKQMSTGDRTILGRISKRGNSYLRMLFIQAARVILLRPANWPKHGFGAWLVRAIQRLHPNVLAAALANKLARIAWTVLAQERSYEARVTKAEA

SEQ ID NO: 447398 - protein, 347 aa, unidentified
MNLYKLPHKYYCGVDLHSRTLYLCVVGQEGGVLLHRSLPCDPTRFLLAIAPFREDLVVAVECVYSWYWLADLCAKEGISFVLGHALYMRIIHGAKAKSDRIDSEKIAVLLRGGLMPNAYAYPADMRATRDLMRRRLLFVRQRGSLLAHIQITHHQYNVDPPGKRITYRSNREGLGEAFEDPSVRQNIASDLTVADHLEVVIGELELAVLRQARVHDPNAFALLTSVPGIGKVLALTILYEIHDISRFPSVRDFASYCRLVKCERRSAGKSLGSGGNKIGNAYLKWAFSEAAVLFVAKSELGRTVLSRLERKYGKPKALSVLAHKLGRAVYYMLARKQAFDPQRFATS

SEQ ID NO: 447399 - protein, 319 aa, unidentified
MSAQTVIGIDVSRDWLDGFCLPEKQRFRFQNSPDGHARLLETLQNMPDGLKIGFEATGGQEWALWRLLISMGLNAVQLPPAQIKAFALSMGKRAKTDQIDAELIARFMAFRPEAGRTLPDVKLQFLRALTVRRAQMVEARKRLSAQISARRKQGVSAELEDMDSSLKAFLESQISELEQRIESVIAEAEELSAKAELLRSIPGIGPVSVSMLLAEMPELGRMTATEAAAMAGLAPVAHDSGAMRGKRVISGGRRSLRHVLFQAGLAAACHNPVLKAVAKRMKQRGKPHKLVIVAIARRLITIANAVLKTGLPWRISSAA

SEQ ID NO: 447400 - protein, 369 aa, unidentified
MQRTRYVGLDVHKESISVAAAEDGRNGEVRFIGPIPNTSSEILKMAHRLAKDGHRLEFCYEAGCCGYVIYRQLVELGHGCTVAAPSKIPVNKSDKVKTDRRDAQKLAVMHRSGDLIAVWVPDAVHEAMRDLVRARMDALIQQTRARQQLLAFLLRHGRIYNDGKNWTGKHRRWLAGQVFEQPAHQMVFQDYIEAILTASDRQEKLVDRIESLLPEWSMGPFVEALRGLRGVDLICAVTVVSVVGDMGRFKTPRQLMAYLGLVPSEHSSGSSTRRGGITKNGNNEARRVLVEAAWSYRYPARVARDKAETLDRLPKAIRDIAWKAQSRLCDRYRRLSAKDKKPTVVATAIARELCGFMWAIGQEVRPAMP

SEQ ID NO: 447401 - protein, 393 aa, unidentified
MRCIGIDLHKRFMQVTELNSDGSQEKNHRVPLNEERLAPFLARFDRDTKVVFEATSNAYYLYDLLQPRAGEVLLANPLKLKAIASGKIKTDKIDSRTLARLLAADFIPEVWVPDKLTRDLRSLLHYRVRLNKIRTSLKNGVWAILTKNGLQFKKSDLFGKGGRSFLESLKHLPRLDQIILSSSLRLLDEVEKQIQALEGEIASLASKGPYKEQVEKLMGFSGIDFYMALLVLCEIGDISRFPHSKNLASYAGLVPSVHSSGETHRTGRITKQGRKYLRWAAIQIANGAARSEGTLKKFYLRIKKKRGHNVAIVALARKILTLIWKILTYQENYGEMKEESLRRKISRMRSLASPYVLEGDYPREPVEEIVREYILKDVREYTLKDGLAACIFS

SEQ ID NO: 447402 - protein, 343 aa, unidentified
MEHYAGIDVSLERSSVCVVDATGRIVREAKVASEPEALVALLRQLGLPLARVGLEAGPLSQWLHAGLAEAGFEAVLLETRHVKAALSAMVVKTDRKDARGIAQLLRMGWYRPVHRKSLSAQEVRALLVGRKLLQAKLRDVELSIRGILRGFGLKVGEVSRGRFAARVEELAAGHEMLGTVIGAMLQARDGLRAEFVRLHRRMLAIVRDDAVCRRLMTAPGVGALVAVTFKTAVDDPGRFRTAKAVGAHFGLTPKRYQSGETDVTGGISKVGDAMVRTALYEAANVMLTRTSRVSALKRWAMEVAKRRGAKRAKVALARKLAGVLHRMWANAADFRWGKEEAAA

SEQ ID NO: 447403 - protein, 347 aa, unidentified
MDHYAGIDVSLECSSVCVVDASGKIVREGKVATEPEALIAWLGSLGFGLLRVGLEAGPFSQWLYAAMQKTGLAVELLETRHVRAAFEAMPVKTDRNDARGIAQLMRLGWFRPVHCKSLPAQEVRALLTARKLVQSKLFDVEMSLRGILRGFGLKVGRTTPKRFAGRIRELVAGHATLEVVAASLLAVHEVMRREFGSLEKRVRSMAREDARARLLMSAPGVGAIVALTYVSAVDNPRRFTSSKGIGAHFGLTPKRYQSGERDVTGRISKIGDASVRAALYEAAHVILTRPVRGSALKSWAAKLVKRAGMKKAKVALARKLAVILHRMWVDGREFIFTTPRNAAAAAA

SEQ ID NO: 447404 - protein, 382 aa, unidentified
MHASNICTPIADHNGTIFVAIELSQKTWLAVVRSPERDRISRHKLEGGNDAGLLALIASVRARAARALGTVPAVVSCYEAGYDGFWLHRRLVAAGITNFVFDPSSIAVEQRRRRAKTDRIDGELLLRSLMAHCRGEPRVVRIVRVPSPEQEDVRRGSRERERLIKEQTAHTNRIKALLRTLGLAAGNPRRRDWLRWLAEQRDWEGRAVPPHYLAELAREHARLLLVVAQLGDLSQAPEATDGPAAARMAKQKTQLRQLKSLGLASAGTLVDEALYKDFDNRRQVGSYIGLAPSPWASGATSREQGISKAGNPRARHQAIELAWLWLRHQPDSALSRWFRQRTAGASARTKRIAIVALARKLMVALWRYLTTGLIPDGAVVKA

SEQ ID NO: 447405 - protein, 403 aa, unidentified
MQYTAGLDWGSVGHAACVIDEQGTVTARLDIQHTAEGLKKLLADLARIAPPQELPIAIERPSVLVVDTLVEAGHPVVPIHPNVLKACRPRYHAARCKSDPGDAYILADVLRTDGHRFRALRPASDEIKALRTMTRTRDDLVAERVVVANQLRSLLDAFWPGAVAIFADIDSPIALDFLDRYPTPASTRHLGPKRLAAFMARNAYCGRRSPEELLARLQSAPNGLAGEAEEKAKSYMVKALVAAWRTLVEQIRRVTATVEHAVAQLPAGQGVMAWPRAGKVNAAQILAELGDDPERFQTEDQLAAEAGVAPVTHESGKHRAVVFRFACNKRLRQALVTWADNSRHASPWANHVYALARAKGFRHPHAIRVLARAWVRVLWRCWRNNKPYEAALHGAAKPFLETA

SEQ ID NO: 447406 - protein, 387 aa, unidentified
MQKPHDNSKASPAAFMQDNTLIAVIELGLSNWLVAGLIPGVSREPLKKLEPNPEDLLKLLHGWRDEAIKAGRLITRIAVAYETGRDSFWLARWLQERGIDAHVIHANSVTVSREHRRAKTDRLDTAMLKRGFLGWLRGERGHCTVAIVPTMEEEDAKRPHREREGLVHEQTRVVNRMKSALIQFGVRNFNPKLRKASVKLETVRTPEGKSLPPNTIAALRRDMERLRIIKEQIKAIEQARLQQFAQKPEALANRMIYLLVRIYGLGLETADLLVHELLSRTLRDRKAVARYAGLTGSPDESGSKRREKGLSRSGNARVRKIMIQLAWRMVKFQPDSALVQWFKQRTENAKGSRKPMIVALARKLIIALWRYANDGVIPEGFRLHSAA

SEQ ID NO: 447407 - protein, 314 aa, unidentified
MECVRIVNDVDRLAAVMARAGVALEVVLEATYGWYWAADALAEQGAVVHLAHPLGVKAFEYRRVKNDERDAADLADLLRMGRLPEAWIAPSATRELRELVRHRAKLVGLRSHCKAEVHAVLAKCGIQVVMVDLFGVAGTELLDGLDLPAPYAARISSLRRLLDGIDFEIEVFAGLIRGRLDHDRGYAAVQTIPGIGPTLGAVLVAEIGDITRFARAEQLTCWTGLTPKPHESDTHVHRGSITKQGSRLVRWAVIESVQIQPKTTHVGGIRDRIGAKRGRNIGAVAAARRQLEYVFYAPRDGHVRALGTKTPEAA

SEQ ID NO: 447408 - protein, 418 aa, unidentified
MDHRPPFLYQATVGIDWADQKHDVFVRFTNGDSYRRKIGSRPEAIQEWLLELRSACAEGKIAIAVEQRRGALFYQLCTHLHWIDLYPINPHSLSSFRLTFFSSRAKDDPVDSRLLEELVRTHCDRLRLYQPVTTTERKLDLYCRQRRSLLDLATKTELKLVSTLKQYFPLVVNLFAAVGMKSDIALDFLSRWQTLQELRSAKTHTVRSFFYAHNSRSQSLIKKRLQQIAEAHEVTDDHALTEPMILTTKCLVGQLRQFKQSINEFDRKIKELFKSHPDHFLFETLPGAGEKLAPRLLSLFGSDRSRWTDATDLQKYSGIAPVVERSGKSLWVHRRLSRPIFVCQTFHEFAQQSTRFSSWADQFYRRQREKGKSHHSAIRSLAFKWIRIVFACWKANKPYDESLYINALAKRNSSPSST

SEQ ID NO: 447409 - protein, 344 aa, unidentified
MTYYAGLDVSLRTVNICVINDQGEFVTETKLNSEVTDIVAYLDGLDLDVSSVGLEAGTLTQYLTYGLQSADFEVVCMEARQVKAALSAMRNKTDKNDARGIAQLLRSGWYSPVHVKSMASHRIRMLLSSRKAVLSKCIDLENEIRGLFKVFGIKLPPKLGHGSFDAAVRDIIETDATLSESLLPLLNARLVLYHCFRELDNRTRKQAHNDPVCQRLMSAPGVGFVTALTYKAGVDDPTRFKRSRTVAAHFGLTPRRFQSGEIDIDGHISRCGDRDVRSTLYTAANALMTRSSKWSSLKAWGMQLAKTRGHRRAVIAVARKLAVILHRMWMDDTQFQWGSEGARS

SEQ ID NO: 447410 - protein, 400 aa, unidentified
MRVVFGIDVSKASSEVAILVNGEKVHGYTISNDAIGFARLLGDLRTVHKPEIIFEATGVYSRRLQTFLDDNGYAYTRLNPLEAKKQLDSLRVRKTDQIDAEKLAQSQFVLNRKPTYVQEEVYQNLRDLSRFYQNLTEDIVRAKNRLHKVLQVTFPELENILSTPSGEQYWNLVIAFPCKDCVLELSNDELSKSIRLSTSKRISDKRVAYLAEKLIALANQSYCAVKKTSPILEEVRYYAKELLRLYEQRQAVLDEMVELAQPLPEYDILLSIPGIAETTATSIIGELGDIRRFQSANQINAFIGIDLRHYESGNFLAKEHIPKRGNPYARKILFKCIHNIASASHTNPCHIADFYEKRKRQSQTTSTKPHTIASIHRLIRTMYYLIMHNKLYDYASTQNR

SEQ ID NO: 447411 - protein, 417 aa, unidentified
MIRKVMEAIYPSVGGLDVHEATLVTCRRRLIEGGMVELEVKTFGSTTAELRALAGWLHEWKVTHVAMESTGIYWVAVWNVLEDQFKLLLANAQHLKKVPGRKDDVPDAEWIAQCMQCGLLRPSFVPSAEVRGWRQLTRQRVKLSDQRTMVINRLHSVLEQGNIKLAQVASNIVGVSGRAIIAALSRGEKDTTKLAALARGRLTAKYWALVESLDGNLNDNQRWLLKRLLEQLRLLEQEITVYDDKIKEQLLTYKKQVQRLDTIGGIARKSAEDILAEIGPNMDQFPTAENLVSWAALCPGKNRSAGKERSSKTPKGNRWLKRVLTEAAWAAVHQKGSYLAGLYRRLAPRRGKKRAIIAVARTILQAAWHILKQEVDYRDLGDTYFERLNKQKTASYLTKRLEKLGYQVKLKPVQRLA

SEQ ID NO: 447412 - protein, 428 aa, unidentified
MTTDRVPCRKFILGGAIMDKIYDNCCGIDVHKKLIVACLRKGNRQEVREFGATTRELLELADWLKTSDCKMVAMESTASYWKPLYNILESSDLNAMVVNARHMKAVPGRKTDVKDAEWIADLLQHGLLQPSYIPDKDQRELRELVRYRKSLVGERTRELNRLQKMLEGANIKLSGTVSDINGKSARSILEYLLTGECIDGAKYDEMYEQKIIAHNLKATKEQIIDDLNGVMTPLQRRMMKELLSHLDELNTHIKNLDDEIDNFMKPEEKQASQAIQDVTGIGNTSAQAIISVIGTDMERFSTDRHISSWAGLCPGDNESAQKRKSGKTRKGNSLLRTTLITCAHAAVKNKKSYFYAQFMRISAHRGKKRAYVAVAHSMLIAIYHILKDGVIFKDLGADYYNQFNKERKINAYLKKLKALGWEAPVVAA

SEQ ID NO: 447413 - protein, 416 aa, unidentified
MNAVGIDVSSRKSTVAVLRPLGEVVCLPFDVTHDIAGLASLVEKLKALDGETRVVMEHTGRYYEAVEKALHEAGFFVCAVNPLLIKEYGANSLRRVKTDKADAVKIARYALDNWADLRDFTPMDAIRYDLKTLNRQFQLASKQRTASANNLIALLEQSFPGIRKCFDSPVRSDGTQKWVDFAHSFWHVDCVRKQPFAAFCERYRKWCKRHAYFFKLSNAEEVYALAKRAVVLTPKSKVVKVLVQEAANQLSSISRSVEVYRAEMDRLAAMLPEYPVVMAMYGVGKSYGPQLMAEIGDVRRFERKQALVAFAGIDPMPNQSGDKNVRSNKSSKRGSPYLRKTLFNVIRTYLQCAPQDEPVFQFLNRKRAEGKPFYVYMLAAANKFLRRYYAKLRDYFASLDTLQPVAPIPTILKATL

SEQ ID NO: 447414 - protein, 367 aa, unidentified
MNKCHSNTELSSHEGTRRQFNGGKADIKLGIDVHQDFYVVVMQEGGSNPKPPQRFQKEAFLYWAAKLAGSGAQVHAVYEACGFGFGLQRNLTALGIDCYVVCPQKLDEQNRRVKTDGLDAKALCLKLDRFVQGNRDAMALVRVPTEQEEQQRAIHRQREQLVKARKQLEAQGRSLMVNHGLEPVQNWWKPRTFAALPVPQWIRELLLNSQPILLALQEKIAALTVQLQSAAAPNQPRGLGKMTSVVIDREIGDWYRFNNRRQVGSYTGLCPGEYSSGNTRLQSCVTKHGNPRLRAALVELAWRLVRLQPNYKPVVKWRQILAPQPRGALATGAARKKAIVAVARQLAVDLWRVRTGRCKPEVLGLEI

SEQ ID NO: 447415 - protein, 418 aa, unidentified
MVMDLVHPRCAGIDVSKRDAKVCVRIAGVGRRGATSTVTTWGAVTNQVLALRDHLIGEQVTLVVLEATGDYWKPFYYLLEDGPFEVMLVNARHVKNLPGRKSDVSDAAWLAQLGAHGLVRASFVPPEPIRQLRDLTRTRTAVVRERGREIQRLEKLLEDAGIKLSSVASDITGVSGRAMLAALIAGQRDPAVLAELARRRLRSKIPELTEALTGRFTDHHAFLTQLHLDLIDHHTRAVDDLTARIEVVIEPFQAVRELLVSIPGVSTTVADVIIAETGADMTRFPTAAHLASWAGTCPGSNESAGRVKSTHTRPGNPYLKGALGIAAMSAARSKGTYLSAKYRRIASRRGPLKALVAVEHAILTATWHMIMTGAFYSDPGNDFYARRNPDKARQRAVDQLNKIGYAVTLAPLQTAGHG

SEQ ID NO: 447416 - protein, 411 aa, unidentified
MEVVHARCAGLDVSKKDAKVCVRVAGAGRRKTVESVTTWGSMTGQILALRDHLVEQRISCVVMEATGDYWKPFYYLLEDAGFELMLVNARHVKNLPGRKTDVADATWLAQLGAHGLVRGSFVPPEPIRQLRDLTRARTAITRERGREVQRLEKLLEDAGIKLSAVASDIMGVSGRAMLEALIAGDRDPARMAELAKRRLRSKIPELTEALTGQFNAHHAFLARVHLDLIDRHTEAIVQLAERIEVVIEPFQGFRQLICSIPGISTLTADIIIAETGADMTRFPTAKHLASWAGTTPGNNESAGKVKSSKTRPGNPYLQGALGAAAMACSQNPRTYYGARYRRIATRRGPQKANVAIQHSMLVAIWHMGTTGELYDDPGAEFFTRLNPDRARKRAVHQLEAMGYHVTLDHAS

SEQ ID NO: 447417 - protein, 356 aa, unidentified
MNVYTRQHSNYCGIDLHARTMFICILDADGKIVFHKNRPCNPESFLEAVAPFRQGLVVGVECIFCWYWLADLCEQEGIDFILGHALYMRAIHGVKTKNDKLDSLKIARLMRGGNFPLAYVYPPAMRSTRDLMRRRNLFVRKRAELLSHIQNTTSQYNLEPLGTISRPHHRRDKAIDSWFPDPVLQLMIDTDLKLIDHYDPIIKELDRRILALAKGHDSQSLALLCSIHGVGQVLALTMLYEIHDIDRFASKQDFCSYARLVKAQKSSNGKTFTGSGSRIGNAHLRWAFSEAAVMFIRKNEEANRYYQRLIARHGKSKALTILAKRLGIAVYYMLKQKKPFNTERFLNHMMSKKATS

SEQ ID NO: 447418 - protein, 387 aa, unidentified
MSRNARVPIPVTTLDQDSTLVVVLELSARSWLVGARVPGIGRMSRYALAPSAEALAAWLGTAKARAGAAGRTVVRVVLAYEAGRDGFWLARYLEARGVEVYVIQPSSVLVDRRARRAKTDALDVEMLMRTLLAWLRGEPGVCSMVPIPDVAEEDGRRPVRERQGLIGERLALLNEIDGLLATFGITGYRPLRQDRRAQLAALRTPEGNPLATNAAARIGRILARLELVMQQIAELEQARDAVLAKEAASGAAETMIRGLARLKGIGAELATVLVWEAYVRSFPNRKALGAYAGLTGTPFASGSTTREQGISKAGNRRLRSSLVELAWLWLRYQPDSKLAAWFRSRTGSAGSRMRKVMIVALARKLLVALWRFCRDGVLPEGAALKAM

SEQ ID NO: 447419 - protein, 387 aa, unidentified
MSQPFDASRSLTSLERDSTIIAVIEMSQAKWLVAAVVPGVERQPLKRLDADEAALLKLLHRWRNEAGQAGREIKRIVVAYEAGRDGFWLARWLRVRGVEAYVIHPASIAVSREHRRAKTDRLDTELLLRAFLGWLRGEKRHCSMVAIPTVEEEDARRPNRERGNLVTEQTRIVNQIKAILTRFGIRTFRPTLRKAEEHLEGLRTAEGLPLLENTRAELRRHLARLHVVREQIRAIEQSRLGKLAMTSEKGRHAMVRLIARVVGVGVETADMLVNEVFSRHLRDRKAVARYAGLTGSPDESGKRRRERGLARAGNARVRCGMIQLAWRFLRFQKDSALTQWFQARTADGRGSTRKTMIVALARKLLIALWRLVTMGELSDGIVLRPAS

SEQ ID NO: 447420 - protein, 412 aa, unidentified
MSVLQVALEPSTLVVAVDPGKVTNRVWVSDGSGLLTGPVSLPVSREGIACVEGLVTVHGRDSAARVFAIETTGSLHRAWAHELERRHPGEVRLFAPSETKAARVQLGSGRFKTDDRDCAALTYLVRQGAGRLVVDELEVETLRAVVRHRRGLVADRKVAQQRLHDQLNVLVPGLSAPAGHGRSLAVERTSGQAVLACAAAFAGRPPTVRSLLARAPGRWTKADAQYWADRWRGCLAPPHDAEQRAQRLNRDLQRYRVLCTDIAALEGDIEQVLAGTDGQVLTTLPGVAAIRGAAFAAHSLPIDRFPDAEHLYSATGLVPALYQSATLRRRGRISRQGLAEHRDALMGIAWGLSVFSPSFAERDREYRARGMAPIQARVALARHACRLAYRLLKTQQPFDEEAYRQGRHSRGR

SEQ ID NO: 447421 - protein, 345 aa, unidentified
MKIVGCDLHTRYQQVAMLEQETGELIERRLEHENGEARAFYAALSSPVRVGIEATGHTRWFERMLAELGHELWIGDAAQIRASMVRKQKTDARDAAHLLDLLLSDRFPRIWRPTLAERDLRQLVWHRQKLVWMRNAVGNQLHALAMGEGVCRKKKLFTKKGRTELESLALGPWASHRRQELLKMLDQLDASLHELDQAVAQQAEQNADAVRLMTHPGVGPVTSLAFVLTIGPVGRFQRSKQVVSYLGLNPREHSSGGRQRLGAISKQGNPMMRSLLGEAGHTAARLDAELRQDYQRLKLRRGSGVAKVAMARKLAVRMYWMLRSPANYAQLVRMQGSPRGTLVGQ

SEQ ID NO: 447422 - protein, 346 aa, unidentified
MNKVIGLDLGDKRHVAVIFDADGTEHAADGMVNTMQQVKNYFEPHAGAVVVMEAGTHSGWISRLLERMGFEVWVGNPRKLRAIWDSTDKSDARDARVLGLMFRLEPRLLHRVTHRGEQAQCDLALIKSRGILVETRTKLINHVRGVVKGVGARVGACSGESFHKKASEQVPVALKDALDVVIEQVKQLTAAIKELDQRIEKMCGEKYPETQRLTQVSGVGHLTALAFVLTIEDSKRFAKSRSVGPFLGLTPRRDQSGVTDKQLPITKAGNTYLRQLLVGCAHYILGPFGRPCDLRACGERIAAQGGKNGKRRAVVAVARKLAVLLHRLWVDGREYVPVRKEARKAA

SEQ ID NO: 447423 - protein, 388 aa, unidentified
MYYVGIDIAKYKHDCFIFTSEGEIVLESFTFENTREGFSKLKLILDALDHSQKIKTGLEATGIYGKNLKLFLSSIGYDFDELNPLQVKRFTNALSNRKTKTDKIDASQIARFVSTGASRTYVYSSYHTEALKQLTRARNSLIDERSKHQTVLTGILDVEFPEFKGFFNNKFTDTALYLLNKYKTVKRISKLSHNDCVLLHNKSRVISTSRFEELRESAKNTCGHHFDYNDSLISANLQIIKCLNNEIDKIEKEINSIMSTINSPVVSIPGISAISATSIIGEFGDFSRFDNAKQLCAFCGVEPSIYQSGTSYHEGKMVKHGSSNLRRTLFNVVPYIIMHNETCKTFYEKKSSEGKAYRVAQSHVVKKLLRVIFTIEMTGSTFTPSKLY

SEQ ID NO: 447424 - protein, 341 aa, unidentified
MLIIGCDYHPSVQQIAWADTATGECGERRLTHGAEAEQFYRDLKQKAVRVQVGIEATGHSRWFERLLAELNFEVWIGDPAQIRAKQVRKQKNDRRDAEHLLKLMLENHFPQLWVPTPEDRDVRQLVLHRHRLVQMRTRVMNQLQAIAMNEGVRRKRGLWTRRGRAQLEGLQLPPWSSRRRQELLELLDRFNPSIDELTKAIEQQAQRRPEVERLQTHPGVGPITALAYVLVVGTPERFACGKQVASYLGLIPCEDSSADHWRLGHISKQGNALLRYLLVQSALSAAHAEEEWQRKYVHLAMRRNHAIAKIAIARKLAVRLFWMWRRGWDYEQLKKFGSHAG

SEQ ID NO: 447425 - protein, 340 aa, unidentified
MTMVTLGLDLGKNWIHMVGLDEDGRIVLRRRVGRDRLLAQTGNMASCLIGVEACCGAHHLGRSLEAQGHTVRLMPPHYVKPYVKSNKNDYRDAEATAEAVQRPTMRFVPLKTEAQLDLQTIHRVRQRLVGRRTALINQLRAILLERGITVAQRRRVLETRLPAILADERSGLSPRIRYLIEDLRAEWRDLDGRIDAFDAEFTATARREDACRRLCEIPGIGALNATALVAAIGNGAAFDKGRDLAAWLGLVPREHSTGGKQRLLGISKRGNKYLRTLLIHGARAALPHVAARDDALGVWLRSLPARVHRNVAVVVLANKLARFAWAVLTGERRYTETVGA

SEQ ID NO: 447426 - protein, 345 aa, unidentified
MELHTIGIDLGKTVFHLVGLNLLGEVVVRKKFSRTQLLRFTANIHVELIGMEACGGAHFLGRALREQGHEVRLIPAQYVRPYVKTNKSDYIDAEAIAEAVARPTMRFVPIKTDDQLDMQSLHRVRERWVMRRTAVINQIRGLLLERGITLRKGRHHVDAALPLILEDADVRLSGAVRMLLAQLKLDLDQLAVRIDEADAVIQKTAHENEACRRLVAIPGIGPVTASALIAAIGNGGAFHKGREFAAWMGLVPREHSTGGQQKLLGISKRGNSYLRKLFVQGARAVLQQRTKQSSGLSAWLAQLTSRTHRNVAAVALANKLARIAWAVLAKNEQYRPPVLADVATA

SEQ ID NO: 447427 - protein, 417 aa, unidentified
MDVLVDRCAGLDVHKDTVMAVVRRPTKDGSGREQEVRQYRTFTAALRELRAWLVAERVSQVAMEATGSYWKPVWHVLEAETGYELLLCNPRHVKNLPGRKTDVADAAWLAQLLECGLLRGSFVPSPVMARLRDLTRYAKKLTEERTREVQRLQRVLEDAGIKLDSVASDVMGKSARAMLEALIAGERDPAVLANFAQTRMRVKIPDLRLALEGGFSEHHALLLRMLLDHIDHLSAAVGRLDAQVEAEVAPFTRAVELLGTIPGVGPRTAWVLLAEAGPDMTRFPSAAHLASWTGLCPGNHESAGKRPSGRARKGDTALRTAMVEAAWAATRTRSTYLGAQYQRFRRRFGSRGETKAIFAVAHTMLVIAWHVLAEQKPYAELGVDYFTRRTDPEAHARRLAREIEKLGFDVTIQPHTA

SEQ ID NO: 447428 - protein, 421 aa, unidentified
MTQPYGNTGGVVLVAIDVAKKQNAVLIRLPDGTRKKLTVTNNLADYRELSNYLKKLEVPCKIGFEATGNYHRALAYYLQQRGFDLELISSVAASRTREAMFNSWDKNDPKDAQVILHMLQTGLTQTYHDPLVHRINDIQELSKTYCQVSLRKTRVQHSIMTHYLPLYFPEASKYFHTSRAEWFTSLLMTFPNPASVLKYSREGFIKAAQTVSGRKVNKAAWLKDFYETARESIGLPVPEDSEAVRMFRLVLQEHQDLCRMRRAIEARAELYLKDNADYLRLRTIPGIGAVIALIILAEAGDLRRFSHYKKFLKYCGLNLSTQQSGGFRGMSKLSKHGNSRLSYAFWIAGTSAIRMRENTFRKKFENYIKTDPQNLDLKRKAYTAVAAKIARVAYGLIKSGRDYRCYHESSIPSGIILSVGR

SEQ ID NO: 447429 - protein, 415 aa, unidentified
MLKIVYPICCGMDVHKSFVVACIATTNDHGVTNYKSKRFSTFTGDLRRCADWLSENNCKDVCMESTGKYWIPIYNILEHTCNIVLAHPKYVKAIRGKKTDKRDAKWIADIFKHDLVSGSFIPPADIRQLRDLVRYHWKLTNFNVGEKNRAQNCLTVSNIKLDDVFSDVFGKAASAITTRLLESNEPFDVKPYLTKNIKKPIEQIQAAVDGEMCAEQAEKLRIIRSHMDSLELCKLNLESLILSTAEKYIPQLNLVMTAPGIQSFAAIGIISEIGVDMSVFPTSKHLCSWAGLTPQNNESAGKKKTTRISRAGAYIKPLLVQCALCAIRTKQFPEVRNRYLALKKRRGHKKAIIAIARMLLTAIYNILKWNEVYNSELYRKADRPPAHREVSVEEAVFILQRQGYLVTAPLPLRRI

SEQ ID NO: 447430 - protein, 474 aa, unidentified
MKNKQSAKPARDQRYREQRHRWTPLLQRIQPDAAGIDCGAEHHYVAVPPDRDERPVRAFRTFTADLNQLAGWLIQCRIKTVAMESTGVYWIPVFEILETRGIEVVLVNAHHLHNVRGRKSDVTDCEWLRELHSVGLLNASFRPAAEIVVLRTYLRQRASLVEQASSHIHRMQKSLTQMNLMLHLVLSDITGATGLKIVRRILDGERDPAALAAHRDPRCKASTQEIIAALTGNYRVEHLFTLKQNFDAYEFECQQIGECDSAIQKLIDTLASQQPPPTTELPSVRHPLRPKRHDPSFDIRTPLHRLTGGADLSQIDGIGPHAALQLVAEIGTDMSRWLSAAHFTSWLSLAPNNKISGGRLLSSRTPPSANRAAAILRRCAMSLMRTSTALGAFYRRLAARTGKPTAITATARKLALLLYRVLRGDITYCDPGANAYAQLHRTRLLKSLSKRAHQLGHALVDLSTGEILHPHKVS

SEQ ID NO: 447431 - protein, 407 aa, unidentified
MQEATQHDAVDVFVGVDVDVDVDVGKGRHHAVALRRNGKRLYNKALPNDEVKLRALIAELKTHRRLLFVVDQPSTISALPVAVARAEGVLVAYLPGLAMRRIADLHAGEAKTDARDAAIIAEAARSMPHTLRSLRLADEQLAELTMLRGFDDDLAAQVTQTSNRIRGLLTQIHPALERVLGPRLDHPAVLDLLERYPSPSALAAANEKTLANRLTKLAPRMGKNWAAEIVQVLNEQAVIVPGTQAAAIVMPRLAQQLAALRKQRDEIAAEVERLVLAHPFWPVLTSMPGVGVRTAARRLTEAAPKALATAAHLAAYAGLAPVTRRSGSSIRGEHPSRRGNKVLKRALFLSAFAALRDPVSRAYSSCKIQQGKRHNQALIALARRRCDVLFAMLRDGTIYPPKSAPDA

SEQ ID NO: 447432 - protein, 343 aa, unidentified
MYYIGLDVHKKTISYCVKDAAGCVQQEGRIGSTRRELDAWIRTLPQPRMIAMEATIFTGWIYDHLLPHAEQVKVAHPLMLRAIAAAKRKNDRIDAGKIADCLRCDFLPECHIAPTPIRDRRRVLRYRNLVQRQSVQMKNRISGLLMETGVSYNKLRLHRMGYFAQLLSTNEEIPDSIRPLLQLCREHVDRSIRLDRTLLRSLQQDPMLSQRLERLRTVPGVGPITALTWALEVGDTSRFRSIKQAISYCGLCGAEKSSADKVLRTPISKQRNKHIQRMLVEAARLAPRYSDELALLYERERQRGNANRATLAVARKMVAHMLAVDRCKTDFIPEGKFRSAAAA

SEQ ID NO: 447433 - protein, 350 aa, unidentified
MKIVGCDFHPSYQQVAIFNTETGEVEDKKLMHATGEAEKFYRELETPALVGMEATGNSRWFELMVEKLGHQLWIGDAAKIRASYVRKQKTDKRDAGHILKLLVEKRFPRLWVPDVRQRDMRQLLTHRHKLVRVRTRLKTELQHLALNQGIQKKRQLWNEKGRALLASLPLQGWAQQRRKDLLQLLELVEPQIEQLDKAVEQAAKADPQAVLMMSQPGVGPITALAFSVTIGDVSRFERSKQVSSYLGLIPTEHSSGSKRRLGSISKQGNVFLRALLVEAAQSVVRHDPGFRKEYQHRCHHKEKGIAKVAAARKLAVRLYWMLKSNKSYTELVLNGGSPRHPVAAKAKPLS

SEQ ID NO: 447434 - protein, 346 aa, unidentified
MPIVGGLDIHRKQITFDYPGTGTGQVRRGQISPADRVHLRAWLARFAGLEDVAFALEACTGWRYIAEELAAAGIAVHLAEPADTAFARGRKRHAKTGKTDSRHLRMLLAGGRLPECWIPPGHILECRALLELYNDLRAEHTAWVQRIHAVLFHQGAPALGEGTLRTEQGLAALRVAAAAHLSPAGQLQVATALEVLEALETRQHAVRHQLLAAARHLTGAKVLAARLYGAGPVTALAMTCWLGGAGRFSSSRQAVRFAGLDVTVWSSDRKGPPGRLSRQGPPVLRWAVYEAGKTHARSPAPDHRYYAQVKDRCNGKRAALSEARKILRQACHILAELGDDALAPAA

SEQ ID NO: 447435 - protein, 384 aa, unidentified
MEKSSTLYVGLDVHKESIEIATADAGRDGEVRHVSSIGGDLVALDKALRKLISKGHRLHVVYEAGPCGFVIWRHLIAQGLSCEVVAPSSIPKRPGDHVKTDRRDAMMLARLTRSGDLTAVRVPGAADEAVRDRVRAREDAVREQRNARHRLKALLLRNGIPYAGKTSWTAAHLRWLAALKMGHAAQQIGFQEYLHATTESGARIARLEQAMRDTLPEWSLKPLVQALQAMRGVQLVASMTLVAELQDFLRFENPRQLMAYVGLVPGEHSSGPKRRQGSITKAGNSVARRMLVEVAWHYQHSPRVSPIIATRQDQLPKEVTDIAWKAQLRLNAKFKRLVARRVMKTKAVVAVARELAGFVWAIGQEVQTSGWQGIEIEPASSTTS

SEQ ID NO: 447436 - protein, 325 aa, unidentified
MFYLGIDVAKAKLDCMLFDSSTKKQKSKVIPNTGAGFKQLLEWLHKNHAASPHVIMEPTGVYHEPAALALSDAGLTLSLVNPAQLRNFAHGLGIKTKTDKADSAVLARYGATQNPAPWTPPTPSARTLKALLSRRDAVADDIQRELNRQEKATATETPDTVLRSIQDSIDYLQAELKRLQAMIDDHIDSDPDLREKKYLLETIPGVGPRVSDHITALFAGRTFERAEQLAAYLGLVPVQWESGSSVKGRPRMSKAGPAHLRKLLYMPAVVAVRWNPHVKSHYERMLEKGKSKMAAIGAAMRKLAHICFGVVKSGKPYDSNLAVSA

SEQ ID NO: 447437 - protein, 391 aa, unidentified
MYYIGFDIAKENHYASIANSNGEIIEEAFLVKNSINGFNFFMDKVKAKHINISDCLVGMESTGHYGENLIQFLHNNGFNIGIINPIQTDALRNSNIRKTKTDKIDTYLIIQSLMLKHYTPFVAKDIKILELRSLCRHRDDVLKYRTKLKVRLVGFVDQLFPELNLIFNSIHLKSCYALLSKYPSPKDIASTRVNALSSLLSKASKGHFSLEKAQKLKELAKSSIGVNNSSLSIQIKHSLKQIELLDSQIKEIDLKIKEIMDELNSVILTVPGISYTLGAIILSEIGNIDKFASPTKLLAFEGLDPSVKQSGNFNATIIKMSKRGSKLLRYAMLKASGIIIWNSETYNAYYNRKLSQGKSHNNAVCHVAHKLTRVIFHMLKENVEFKEQLEN

SEQ ID NO: 447438 - protein, 289 aa, unidentified
MTTMNYIGLDVHKKTISYCVKDVSGRIQQEGKIGSTRRELDCWMKTLPQPWTVAMEATIFSGWIYDHLLPHATQIKVAHPLMLRAIAAAKKKNDQIDASKLADCLRCDFLPECHMMPRAIRDRRRTLRYRHLLVRQMVQMKNRVSGLLMETGVEYNKQRLHKVSYFRELLSANGEVPPSLRPLLKLSRETIERCQKTEYALVSSLQRDPVLADRIKRLRTVPGVGPITALTWALEIGDVSRFGSIKQAISYCGLCGDERSSADKAMCMPLSCLSPSSRAPCQPCSARRK

SEQ ID NO: 447439 - protein, 333 aa, unidentified
MATWVGIDIAAKEFELVSRIDGKSSRPMTFKQTSEGHQRAIKHLRALAPSGVVMEATGVYYLDLAVALFRAGLPVMVINPKSFHHFAKLMLKPSKTDGIDTALLAEYGERMTPARWIPPDTTCLGLRDIGRQINRLTASRTQAKNRLHALQAKGMTLSLLLEDEQERIALLDRRITRLQQAALTLVADSEELLVELQHLTTAVGVGTASAIALLGELCVLPREMKASQVSRYAGLDVRLNLSGTSVHRPARLSKAGNAYLRAAMYMPAMSAVRHDARANAFYDALVGRGKKKIQALCAVMRKYLTGLWACLQLGTPFDSTKLFSDCHQANACN

SEQ ID NO: 447440 - protein, 351 aa, unidentified
MQRFIGIDVHGQSCTLVVMGPSGRRLGEHVVETSAKALIERIRSIPGDKYVCMEEGTQSEWLYEVLESHVKQIVVTQPLKRAGSKSDAIDAWALADMHRRDALERTVFKSPKTSTALRQAARGYIAVRRDMVRAKCRLNALYRSRGGNPKGEIYDPDTRNSWLAKLPPAYRTLGELLSEQLDGLCQSHQAAESWLLKEAERIPVARRLATAPGIGPIRAALLVAIVVTPTRFRTSRQFWSYSGLAIVTRSSSDWVRDGRGWTRKLTAQTRGLNRNRQPELKAIFKGAATTVIQQMPNHPLHKDFQRMTDAGIKPNLAKLTLARRIAAATLAMWKHQEDYDPSKQTRAPQSQ

SEQ ID NO: 447441 - protein, 420 aa, unidentified
MNRKNEVEFTAFVGIDWADKKHDICFQEANSEKREFCVIPHDVALINEWANSLYKRFGAPIAVGIELSKGPIISALQKHDFLVIHPIPPSKLAGYRNTFTPSRAKDDPTDAACALELILLFPERFKPIPPQSVEIRTLDLLVSKRRALVDESKNITNRLRATLKEYYPQALDLFEHINTRIFCDFITSWPTLMEVKRARKNSLIKFFYSHNMRKKFLIEKRYQTIKSALPLTNDSSIIIPNRMLAVIFCEQLRILLEAIDQFDKAIEELASKHKDYPLFSCLPGAGPILAPRLLVAFGEQRERFQTAADIQKYSGIAPVTERSGKKCWVHWRWQCPTFFRQTFVEWAGQTINKSFWAGEFYRRQREKGSSHNAAVRALAFKWIRILFRCWKSGRSYDESIYLQALKRRGSPLVKQCPEVS

SEQ ID NO: 447442 - protein, 361 aa, unidentified
MEIVYHICCGIDVHARFLVACLLGEGKEVTRRFSTMTCDLVKLREWLTDNGCEYVAIESTGVYWKPVFNILEGDLKVILVNPEHARALRGRKTDRLDSIRLAELLSVGLLEGSFIPPPHIRRLRELTRYRESLVRTHTAAVNRIQKVIESANIKLAQVASDVMGISGRRMLSALAAGVTDPASMAQLALGKLKHKQAELQQALDGALDTSHRFVLGELLRRVRELEAAQEKVTGQINRAISDPDHPELLKAWELIQTIPGVGHIGAEVVIAEIGANPREFFPTAEHLAIGVGSAPVTKAREASGSRVKLDAVTATFGPSLCKLPGRPPIPSKPTSARCIVVWYVVWERKRLSWQLPTLSRL

SEQ ID NO: 447443 - protein, 422 aa, unidentified
MLQEDEQNEEIIARVAALDIGKAELVCCVRIPHEGRPGRRLQEVATYSTMTRSLLRMADRLAELEVTRVVMEATSDYWKPVYYLLEAHGFEAWLVNARDVKHLPGRPKTDKLDAVWLCKVAERQMIRPSFVPPPEIRRLRDLTRYRCDLVEARTAEKQRVEKLLEDAQIKLSVVASDIFGVSGRQMMAALIAGQRDPKVLAQLARGRMRPKISQLEEAFTGYFTDHHSYLLVKMLARIDALNADIAELEDHIEEMVAPFATAVERLDEIPGLGPVAACAALAEVGPDMTRFPTAGHLVSWAKFAPAVKESAGKKKGHGSTGHGNRYLAKVIGEAAVAAGKTDTFLGERYRRIARRRGAKKAIVAVGRSILVIIWHLLSDPEARYHDLGSDFYDKRINPERKKRAHIHQLEALGYKVTLEPAA

SEQ ID NO: 447444 - protein, 352 aa, unidentified
MSISLKVTLGLDVSDHFSSYCLLAADGEVEQQGRVRTTPAALRSFFEGRKLRVVVEAGPHSPWISRLLEELGHEVIVANARMVALIHQNPRKRDPVDAETLARLGRVDPKLLFPIQHRSQKAQVHLGVIRTRQAVVRARTALVNRVRGSVKSLGGRIPKCSSGSFPDKALQHLPDPLRSTLEPTLETIRHLTKQVRFFDREIEALCEECYPETALLRQVKGVGPMIALTYCLVVDDPRRFPASRAVGAYLGLTRRHDDSGDTEPELPITKAGDALLRSLLVQGAQYILGAFGPDTDLRRWGLDYIQRCGGTKQAKRKAVVAVARKLAVLLHRLWITGEVYEPLRNTKHRVAA

SEQ ID NO: 447445 - protein, 425 aa, unidentified
MKITHIAEKINLNQVMDISVDVHKDNLNFFFTADSREYTDICSNRTDVIQKRIIKYQNIAKEHGMNNLRIICEPTGQYQNSLLRTARRNGCLTSYVNAESVKKFRVVETNDTGKTDIKDPRVISTLAKLNKVIKHRMIGEDYLMLRKLGKIYDETDVEIVRLKGRLSKLLVELFCDYSFKKDFLYSASGLALVKKYGCNPYRIIKSGFNRFCKSMKRAVPRIQRKTLNRLFEDAQSSVLNELPPGYIEVLQQRFYQLLQDYLKQYKRKEEIVRKMIEILDRLREKDPNIPPPILGVISAKNLARLFGETGPLSDFSNWRKLMRYFGLNIRMRQSGKYQGQYKITKKGRPLGRKVLDNIILPLVKKGCLYGDYYREKKEKEKRPGNKAMTIVMRNFLKKFYGWYKSGNAFNQKRFFNSESLYLKAA

SEQ ID NO: 447446 - protein, 307 aa, unidentified
MHCFANTAAGHKALLRALTRKGRRVRVVLEATGLYGLDLALALSAQEGIAVMVANPRAVRHFAQAMMQRSKNDRLDAGVLREFAARMPFQPWARPGENTLALWAIARRLEVLVKQRTAEKNRQHAARISQAVPLVVRREIARSLRELENGILRLRREARRCIAADARLQRQWELLCSITGVAEVSAVTILAELAMLPEDRDVRQWVAFAGLDPREYSSGTSVRKQTRISKVGNRHLRHALYMPALVACRYEPHVRDFYQRLLKRGKKKRQALLAVARKLLHAIYGMFRTLQPFDGTRLFAFMPAKTA

SEQ ID NO: 447447 - protein, 338 aa, unidentified
MEQVCTVGLDIAKNVFQVHGVDESGTVLLRRQVRRRQVLGFFGKLPACLVGIEACATAHHWARELAKLGHEVRLMPARYVKAYLKRNKNDAADAEAICEAVTRPTMRFVPVKTPEQQSLQMLHRSRRLLVQHRTRLINAIRAHLAEFGIVAGVGRNGIAALLELIAEGGDERVPELARDCLGALATQLDLVTRQIREADSRILVWHRSNEVSLRLAAIPGVGPLTASALVAAIPDARIFRSGRDLSAWIGLVPKQNSTGGKERLGSISKAGDRYLRQLLVIGAMAIIRRARKLGQTRYPWLVPLMQRRAVKVAAVALANKTARIVWAMMVRNEPYRAA

SEQ ID NO: 447448 - protein, 427 aa, unidentified
MQDKILRITKDTLIVGIDVAKKDHWCRITDCRGIDLIKPFKINNNINGFEGLIRKIVECKEQNKLEKVIAGMEPSGHYWKALGWHLKLNENIDELVGVNPYHVKQSKELDDNSPTKNDKKDAQTIARLIRDGRFFDMYLPEDIYAELRLLTNTRSQYLKKEKRAKCELVAVLDEYFPEYEKVFKGLLGKTSIYILRHYPFPRDIIKLGIKKLTEEIQRASNGKEGVKRAQVLYKAAQSSVGVREGTQSAKLKIECLLDEIEFMQQKLAKIEKAMEEKMQETELSEYFQSIKGIGPIISAVFIGEIGDISRFNNWKQVRRLAGFNLAEQSSGQHKGKTKITKRGRPMLRNILYLAGVTSVNHNPEMRQLYYYLMNRSSNRLAKNQALVAVGLKVMRIMFYMAKNKEKYDPKKALGEVRKKQIKELLAA

SEQ ID NO: 447449 - protein, 371 aa, unidentified
MGKNHRTKFVGMDVHQKSISIALADDGPDKEVRLYGTIKNTPEAIDKVIRTLVSTGAELHFVYEAGPCGFTLYRHLAGNGFRCIVAAPSMVPKKSGVRIKNDTRDAIALARLLRAGELTPIYVPDTEDEAMRDVTRARNDARIAAQKAKQRLHSFLLRNEFIYHGKKKWTKAHYNWLAQLKMNHPAQQIAFQEYIDAVNECTERMARLDEQILHAAEEWRWAPTVKALQALRGVSLLTAVNMVAEVGDFNRFDNPKELMSYLGLVPSEHSSGDRIRRGGITKTGNSHARRICVESAWSYRYQARVTQYLRKRHEGLPQDIVQIAWKAQLRLCTRYRRLRARGKATQVVVVAIARELVAFMWDIARRIPAVA

SEQ ID NO: 447450 - protein, 310 aa, unidentified
MDAVYVGIDVSKDRLDVCVRPGGEAFVVARDGKGLEELVERLHVLTPRLIAVEATGGFETIAAAAIAGAGLPLVVVNPAQVRHFAQAVGRRAKTDPIDAAVIAHFVEAVKPELRAIPDEAQRLLAELVGRRRQIIEMLVAERQRERRASIARVRKSLSRHIKVLEKELPEIDDDIGTLVRDTPAWREKEDLLISFPGIGPTLARTLLAELPELGALDRRSVASLVGVAPYTRTSGRWKGKSMIAGGRPYARSAIFLAALVASRHNPMLKIFYQRLLAAGKPKMVAIIAVARKLITILNAMLRDKQRWQFA

SEQ ID NO: 447451 - protein, 355 aa, unidentified
MSQEKYIGMDVHQASISVAVMDVKGKLIMECVLETKAATILEFIRGLRGTLAVTFEEGTSAAWLHDLLSPHVGRLVVCDPRKNALLKDGNKNDRVDARKLAELLRSNQVKPVYHEKHRTRALKELGRSYLTITKDVTRVMNRIKSVYRSWAIPCAGTSVYTSRHRGEWLEKLVEPGVRTRAEHLYQQLDRLEPLRLEARRELLLESHKHAAVKLLRQIPSIGPIRAALLVGLLHTPHRFRTKRQLWAYSGFAVEVHDSGEYRSVRGKLQRNRERITVRGLNDNHNKDVKSLFKGAAISASTRPGPLHDFYVARVESGMRPTMARLTLARKIAAITLTMWKKGVSFDPKQLQRQAA

SEQ ID NO: 447452 - protein, 315 aa, unidentified
MFPTIGLDVSKTTLDVCVLKGKDDREFYKFDNSDQGHQQFLDLLANLKVALVVCEPTGGYEASICAVLHRHNYAIHRVNTLSFHNFAKSLSLAKNDRIDAYKLAYYGVSMDIKANYHQSEYQQQLKDLVARREYLVSQLSSEKKNLKHKEYSNIQTSIVKHISYLEGAIKDLDKQIDDFASTETEQAKKVELACSVPGIGKTLSYKLLAFLPELGDDTFDLNELAAITGLAPYCRDSGNKSGKRFIRGGRKIPRDALYMAVLSGCHKIPLLKNLRARLLSKGKPKKVAIVACMRKLLGILHSIFKRREAFVEQIA

SEQ ID NO: 447453 - protein, 344 aa, unidentified
MAITTVGIDLAKNVFQVHAINCTGEVLVRRALRRAQVMPFFRKLPPCLIGMEACGTSHHWARELTALGHEVRLMPPAYVKPYVKRGKTDAADAEAICEAVTRPTMRFVPIKSVEQQSALSLHRTRDLLVRQRTQLVNMVRGLLAEFGIDIPKGLTHALAFVRRAIAGEAHEVPKLAAKVIGALAEQAVAVQDSIHRLERDLLAWYRSNDLARRIATVPGVGLLGATALAATVTDPSPFRSGRQFAAWLGLTPLNNSSGGKERLGRISKMGDQYLRRLLVTGMTSLVRRNKHHPSAADPRLNALLARKPVRLATVAMANRAARAIWAIMVRGEVYRTPALGTAAV

SEQ ID NO: 447454 - protein, 441 aa, unidentified
MEEKREEKLPQVSEFPEYCTPVGVTVGRIRKAIHPSGTKRFIGLDLSKQSCYVCIINRDGQIELHRNFSLRSDKRSELYEKLQERDLVLMEASTGTFNIARAMNKLPGVLACVVNPHSTRINETKKKTDKEDSLFLAKLILRTPVEELQLVSIPSDQEMENRDVISHYRQVDNRHTQVVNQLHALFFDKGFPEVGKTHDLHTKVGRYGAIEKYFGTDRAYSFTKRIAKDLSKELSLLEEQQAVGERQMARIVKQNDRVAAILGSIPGVGLKTIAAFIAFVGDVHRFSQGKQLSAYCGLVPRVYQSGQKDGIRKITKEGQAALREYLVEAVFAMMRTKFNFPLKEKYLELRQRMKSRKAAIAVARKLVVMIFSMLKNGTLYMVEKEENREQVAAYHKRKYIQSVGKYYKFRESCKDISAMIEITNTFYSNELGVLKFKQQGA

SEQ ID NO: 447455 - protein, 444 aa, unidentified
MTSKQTLPVIHPHAAGIDVGSLTHYVAVGQQDHDVRSFGCYTEDLHAISDWLKQQGITTIAMESTGSYWKGLFQRLQQDGFEVLLVNGKHTRNVKGRKTDVLDCQWIQRLHSLGLLSGSFLPDGFTATLRQYVRQRDYLIEQQAAYIKKIESALRQMNIRLDAALSDIVGQSGRAILEAILAGERNAVVLATLVNWRVKKSKAEIERSLTGEWKEEYIFETQTSYELYGVIQSKIAACDSRIEQLLTESLQQKEAVEVTATVKKKKNKNAPKMNLQSISTQLSGGVNLYQIEGVSDASVLALLSEIGLDLSKFPSAKHFASWLALSPNNKVSGGKTLSSHTAHHNNRLAQAFRRAANAIGNMKKGALNQFFRRIAYRYGRMAAITATARKLAVIIWNMLTKKEAYRYEETVVYTERLRRLQLKNMQKKINALNIKPDELHFTTV

SEQ ID NO: 447456 - protein, 411 aa, unidentified
MVKENFIYVGIDLHKETHTAVMIDCYNQKLGEITFPNRPAAFPKLVTKVKKCNTDGKEVVYGLENAYGYGRALAVWLIDKGYLVKDVNTAISHRQAKHRGAMYRKSDSDDAEAIALATLNMLDKLPDAYPNDAYWSLGQLVHRRDNIMKQRTRLVNQLHEQLCIAYPSYKQFFNDISRPTALYFWEHYPSRKYLKGKSVEDLRAELVPVSHNKCSTKTCEKILDAVASDKVKNNAYQDARDMVTLSIVSDLQYYDKQLAEVDKMLEQMYKMLGCTLTTIPGVNVITAVKILAEIGDIKRFSNANKLAQFAGIAPLHLSSSGKGKDVATKQGNRRLQATIYFLAIQMVQVSSKGTPRNSVVRAYYEKRKAEGKTSQQALICISRRLISIIYGMLKHGTEYRMPVVESAGENR

SEQ ID NO: 447457 - protein, 458 aa, unidentified
MNRPSKKQKHKPDPTEGLPVLNLHAAGIDVGNREHYVAVPPGRDPRPVQKFGSFTADLHRMAKWLEACGIETVVMQATGVYWVALFQVLQDYGFHVQVVNARHTKTLPGRKTDVQECQWLQKLHTFGLLNPSFRPAEDTRVLRSYLRQRETLVTSASICVQHMQKALTEMNVQLANVISDITGVTGMAILRAMVEGERNLQKLAELKHKQIHASGEEIVQSLEGNWRDELIFVLRQSVDLYDFHLAKIEECDQQIATHMKVMESKVDASAHPMPKSRQGQKRRKHGPRFDVRQELYRCTGVDLTQIDGLDVQTVQTVISEVGVDMSHWPTESHFASWLGLCPDNRTSGGKVLKRGTRRVVNRAATALRIGAWNLIRSQSALGAKFRRLRSRLGAPKAITAMAHQLARLVYRMLKFGREYVDKGMESYEAKYRLHQMKWLQKQAAALNLQLIPAQGVAQ

SEQ ID NO: 447458 - protein, 421 aa, unidentified
MNQLSGEPYTAYIGIDWASSKHDICLQLAGGEERVFERIKHTPEAIEEWAQALYQRLGGPIAVALELSEGPIVSALQKYDFLVLFPIDPKRLARYREAFVPSGAKDDPTDAEFAMDYLMRHPEKLKALKLESAAMRKLRYLVEARDRIRGDQSRCVNRLIQALKQYYPQAVDWFNDHNTLVFCDFLKQWPTLATVQRARKARLERFFKEHNVRFARLIEDRIHAIKAATPLTRDEAVIEAHRLQVEILVEQLRLTIKAMKCFDEEIASIAAQFPDYELLYTALPGAGKVIAPRLLAAFGEDRNRYNCAAQLQKRSGIAPITKRSGNSTWVHWRFQCPKFLRQTFIDFAAQTINKSAWAGAYYRQQRAKGASHHMAVRALAYKWIRVLYRCWQEHTPYDESKYLETLRRRGSPLLKQLAEAA

SEQ ID NO: 447459 - protein, 419 aa, unidentified
MKCFVGLDVSSTKLDVCIMSNDTELGVLYAASLTNDMIGASEIKEQVLSLNEKYEFNRVVIGMEATSLYSFHPAMFFHEDSELKQLGVEVMVEQPAKIKKYREAFEENKNDTLDAFYIADYFRIERFTRSYLKEEKYLALQHLTRTRLQLVEQLVRTKQHFIENIYYKCNTLSAELKNEELSTSVWSATIMTLMTEDYTLDELANTPLEDFTELIQKLGRGRFKAPEKLAKAIKAAIKGSYRLSLVQQDSVNIVLSLLAREIRSLEKMIKEIDRAIEDMVEIIPEYQCLTSVPGIGKVFAAGIIAEIGQIERFKDHPQVAKYAGLNWKETQSGNTSSQNTSLAKRGNRYLRYYLVEAANSVRRHNVEYAEFYKKKKDEVPKHKHKRAVVLTARKLVRLVDVLLRNHQLYTPPRRFMEDN

SEQ ID NO: 447460 - protein, 373 aa, unidentified
MPKYSTAFGMDVHLRSTTVCALDADTGEAVTRRFPGNPWGEIAGWMDGFPGPSLAAYESGYLGFAPQRELAGLGVECVVAAVSKIPRSAADSASKNDRNDAARMAKAILAHDISPVWVPSPEVEGIRDLAGAYDGATARLATAKQRLLAFLARRGFAYGGTTPAGNPRKYWTYDFLRWLDKVRPEDDGGVRTLAALRNEVEAAAEARADLLSEYRAAVDASPIAAEVAALQSIKGCAFALAAAFSAEVGDFTRFRSGRQVTAYFGLAPSQRSSGDSVRLGGISGAGNALVRKLAVEGSWCYAAARHQPKLMPRDTGVPLEIRMHGRKGSERLLRRRKEMLARGVPAAKANAATAAELVRWLWALGMMCREGAE

SEQ ID NO: 447461 - protein, 353 aa, unidentified
MPRKADTAVVSTIGIDTGKNALHMVGLDERGAIVLREKVSRLRIAARLVNVQPCLIGIEAGMATHYLARELVALGHEVKQVPPTYAKPFRQGHKNDFRDAHAVAEAVQRPSTRCVPIKTDDQLDLQALHRVRSRLIGDRTAVINQLRGFLLEHGIAVRQGHRFLRRQLPQILATRTDVLSPRMVRIAGDLVADWDYLDERIDRVTDEIEDLAQTDVSCAQLMTVPGVGPIIASATVAAIGNGAAFANGRDFAAWLGLVPKQKSTGDRTILGRITKRGNRYLRMLFIQGARAVLLRPTSWAKHSFGSWLTAAARRLHCNVLTVALANKLARIALTVLFEGRNYETRVAPAPAPA

SEQ ID NO: 447462 - protein, 316 aa, unidentified
MSQAQTRVVGIDVSKHHLDLAQHDGAATRRYTNTAEGLEALVGGLRDTAASLVVAEATGGYEIGLVRSCQAAGFPIAVVNPRQVRAFARAKGTLAKTDAIDARAIAAFGALMQPRPLLQPVAGREAFAGLVARRRQLVDMMIAEKNRLEHAAGAVRLSIEEMLGVFKGQLAGVDAAIALAIDADAALSHRRDLLTSVPGVGELTAAVILAELPELGSIGSKQAAALTGVAPINRDSGAHRGERHIGGGRPSVRCAIYMATLSAIRYEPRLKAFYQRLRQAGKKPKVAIVAAMRKLVTLLNVLLQRDQLWTPQQHGC

SEQ ID NO: 447463 - protein, 391 aa, unidentified
MPDGICWVGLDVHARESTFAIFDRDSGEVITKRVVGRPHELLPLLRGVERPARMVYEAGPTGYGLARGALAEEIELGVCAPSKTERPPADRIKTDKRDAIRLARVLAAGELTLVTIPSVEREQLRDLVRCREDIRADLVRARHRIGNFLLRREIYWEGTGEAWTRKHRSWLTSIKFADHASRSTLADYLHAHDVLISRRDQVEADLATLALTAPCPPTLARLRCLRGIDTLSALGLCAEIGEWERFDHPDQLSAYLGIVPSEHTTGRQRRLGSITKAASTHARRLLVEAAYHYRRGPVVGEALERRQRGHPPEIINISWKAQRRLNARWRQLRDARRKPNGIVAIAIARELSHYCWEIATCTTTRNRHQRQPAASDLPTHADTNSRLTDTH

SEQ ID NO: 447464 - protein, 367 aa, unidentified
MEKIIKQCIGIDVSQKEIDVSFGTYGLDQSIKLQESKKFKNDEKGFSKFLNWSLKISNKEIPLFFVMEATGVYHECLACFLYDQEQKVIVVLPNRASNYAKTLEVKTVTDKEASKSLTKMGLEKKMDLWVKPDPVFNNLKQLTREREQLQKAKTVTKNQIHAESKSAWVNTESIKRAKKRLKLLEIQIDEIEKEIQSFVKTKPSLEKKLNFITSIKGVGLITAVTVIGETNGFTSIKNKRQLVSYAGYDVIKKDSGTSVHSKPRISKKGNKHIRKAMHFPALCSIRHDEQNKDMFIRMVQKHGIKMKAAVAIQRKLLVLIYTLWKKEENFDPNFLSQDLEKNRAACATLNELDINPLNESIKILQQN

SEQ ID NO: 447465 - protein, 415 aa, unidentified
MKEVQKSSIIRYIALDIHKHYSLVAGVDRDGDEVLSPCRVEHLELEEWLPKHLLQTDRVVIESTTNAWHVYDLLEPLVAEVLVANPMKVKQIACARVKTDKRDTLILARLLAANLVPTVWVPPKHVRELRQLISQRRRLVGMHTQVVNRMHSVSHRHHLGHPRGKRFQEKDMVWREKLQKLERFQLDLDLETKQYLQGQIDQITREMGRMSHEEPWASQMMYLMQIPGFGVVTGMTVLAAIGDIIRFETPKKLASYSGLTPGVEQSGEKLRGKRITKEGRRELRWALVEVAQRAVKADPHWERLFQELGRRMHRNQAIVAIARHLLTVVWSVLSHGASYHHYSEERIAYKYYTWSWQLDDAQRRGLTRPQFVRYYLMRLGIGANLRRLALDPKHPHRLASESEILELMPDFRPPG

SEQ ID NO: 447466 - protein, 559 aa, unidentified
MCSLDIAVPYKGGLVMARRKGSSRRQGRIHRQKVNSAFLERARAVGAERFGILTVDPAKKRSAVKLTNYYGQELMAPLVVEHTDRDLKALVETVKREQQEHGLGDLVVGVERTGRYHAPIRRALELHWTVQMLHPFATKQLRQPVDPGQKTDPNDLNAMTRGMIVGYGAEEPGLPERWLEWRLVSRERENFVRKTATLRNQMKERLEALLPGYAALFGAFWQAPVALAVAERYPSAAALLQAGPDTILEALRRDGQATRRDTVARLLEWARNAPTPDPCADLNHRLLRGEFALLRHLESALRAFECDLVQYLVDTPFVLLISIPGIHVVSSASYAAELGPLEHYLTPKNISGRAGLYPSRYQSDETDRADGPLVSRRNARLRDAIMEIAHNLIRCNHYFEAWAEVRRRQHWPARKLDLAVATRFIRISFRMVSGRMVFRHPCAQGRDAILDKLLDFALRHQIPPRDIQDLLQRALRQIPQDAFEEEARALIGRLPRRDRRDDPRPDTSGREPVRLGDLLRQVIHHLAPHLSLELPRSTTEEPTHTGGLPNHRLSAAEGS

SEQ ID NO: 447467 - protein, 408 aa, unidentified
MKTLHQRCAGLDVHKQDVVACLRLATKGRVHREVRRFPTTTRGLLELAAWLEAARCTIVAMEATGVYWKPVWHLLDGSFELVLANAAHIKGVPGRKSDVNDATWIADLLAHGLIRASFVPPQPIQDLRDLTRTRKQLSREIVRHTQRLQAVLEEANVKLASVITDILGASGRRILKAMITGETDPTRLAELASRRLGCTRDTLVEALDGRVRDHHRFLLDQHLKTIEQLEETMAAFDARIETALAPFRDTVERLTQVPGLSTRAAEVVIAEIGLDMSRFPTAGHLLSWAGLVPALDESAGKRRSTRVTKGAPWLKPVLVQCAWAAANKKNSYFEAQFLRLKGRRGPKKAAVAVAASILTTVYHMLRDGTCYQDLGPNYFARRNPARTARKLADRIRSLGYIVEIRSAA

SEQ ID NO: 447468 - protein, 277 aa, unidentified
MSNSIIGLDIAKNVFHLFTLQSNGKTMKKKLKRAELLTFFATYPASVIGMEACGGAHHWARELTRLGHEVVLLNARYVKGFIVGNKNDFNDAEAIFTAVTQPNKRVVVPKTIEQQDIQMVHSVRSELIGRRTALVNQIRGLLSERGIVINQGIRHVRSHLPLILEDAENNLSALSREMFAEQYEKLKALDREIKEQDQRIARLCSANQLSQRLLEVPGIGPLAATIIAADIGGNSKGYKSSRDYAASLGIVPKQHSSGGKQILLGISKRGNRYIRTL

SEQ ID NO: 447469 - protein, 398 aa, unidentified
MGNENHQIWVGIDVGKGHHWAVAINNAGETLLSRKLSNDEQEILQLIATACETAGQVQWAVDLRGKSATLLLALLAAHGQQVTYVPGRSVNRAAEGYRGEGKTDAKDALIIADMARVRRDFTIITLPAEETCTLRLLTANRRDLIAERVRLINRMRDLLCGISPALERAFDFARSKGAVTMLTRYQTPAGLRRIGVKRLTTWLERRKVRSPQRLAEKAVAAADQQHTALPGETRAAALVAELAHQLLELDERIAVNDREIRDTFRADERAAVIESLPGMGPILGAEFVAVAGDLSAYRDAGRLAAHAGLAPVPRDSGRRTGNLHRPKRYDRRLRWVFYLSAQSAMMYPGPSRDFYLRKRSEGLRHVQAVLALARRRVDVLWAMLRDHRLYTLAPPSAA

SEQ ID NO: 447470 - protein, 460 aa, unidentified
MTKKSKKQSTRQSRGTKQSLPLINPNAAGIDVGATAHYVAVPADRDEQPVRRFGAFTEDLHALAKWLKQCGVQTVAMESTGVYWIPLYQILQDYGLVVKLVNARAVKHVPGRKSDVCDCQWLQQLESYGLLNGSFRPEARICVLRSYMRQRETLVQDAASQVLHMQKAMTQMNLQLHHVISDLVGVTGLAIVRAILAGERDRLKLAALKDWRIKSDENTIAKALEGDYRAEHLFALRQALELYDYYQQKIAECDQEILREMRSMETRASEPAPAKRKKRSSPNPFDFDSPAELYRIMGVDLTRIDGINEGTAQLILSELGLDIHQKWPTEAQFAAWLGVCPNNEISGGKVLRRGTRKVVNRVAHALRMCAQSLLKSKSALGAFARRLRARRDKQIAITATAHKLARLIYRMLKFGGEYVDIGQEKYDEKYRAIVIKSLQRKARYLGYQLVANQTATSVVP

SEQ ID NO: 447471 - protein, 429 aa, unidentified
MNSTQNKKLEQVKVETLVIGIDVGSETHYARAFDWRGYEYSEKAFKFSNDDEGFKSFLTWMKKIKKEQGKKDILPGMEPTGHYWFCLGVFLRDNGIKPVLVNPHHVKKSKELDDNSQSKNDRKDPKVIAGLICSGRYTYPYIPEGVYADLRIASNLRLRIESEITSIKNRLARWLSMYFPEYGEVYGNNNAISGMMILKAAPLPEDIIELGAEGINDIWRQAKLRAVGMKRAMSLVEAAKRSIGLKDGKEAARLEFKMLMEELNQKEDRLREVMSLIKKLMEEIPEAEKLLEIKGIGEKTVSGFIAEVGDVRRFTDPKQLQKYAGFAIVDNESGKHNGRSKISKRGRKRLRYLLFEAALSVCATNPEFREIHRYYTTREENPLKKMQSLIAIGCKLIRVFYTLLTKDVEYDAGKMLKDIRRPERMLMAA

SEQ ID NO: 447472 - protein, 312 aa, unidentified
MNQNITLVYAGLDIAKATLQLQLEDHSYDLNNTTSGHTQLVKRLAAIPGAHVVCEATGGYERAVVAALHAAGIPVSVINPARVRQFARASGELAKTDPIDAAMLTAFGRAFAPEPTPPRTAAEIKMVALVLRRAQLIDLHVSEHQRADTCTEGSLSKLFTSWLTQMEKQIAKVEALIEELLAEQAVLANQVQRLDEITGVGRITAVTVLANMPELGQLNRRQAAALAGLSPYNRDSGQWAGKRCISGGRPEVRRALYMAALSASRRNRQLKPFYDRLVAAGKPAKVALTAVMRKLIVLMNHLLKNPNFSLAD

SEQ ID NO: 447473 - protein, 428 aa, unidentified
MKNRNTQKLEAITPGTLIVGVDIAKETQWAQFVNYRGLELRKFLKFKNHKNGFDSILASIEEICKNRRLDNIIVGMEPTGHYWKPLANYLLKNKVNVVMVNPYHTKRAKELDDNSQTKSDKKDALTIARLVRDGRYYEVYMPQDIFAELRVLSNSRISLMKRSNALKNTITAVMDEYFPEIVTVFKHPLKGKAAMQILKSCPFPSLILELGIDGVLVEIKKAVKKTVGRKKASQLVKTAKSSIGVGYGLVSVKLKLGLMIEELELLTKQLKQLEKAMEKALTDTGHDELILSIPGTGVVTAASFLGEIGDPMRFDHPRQICKMAGYNLIENSSGKNKSRTVISKRGRKNLRSILYQMAMTMVAVNHEMKELYRYLKTRPHNSLKKKQALVVISKKIVTVIYNLIKKQTEYRAELVLGEFRKKQIKQAA

SEQ ID NO: 447474 - protein, 411 aa, unidentified
MLKIVYQNCCGLDVHKTFVVACLAITDGHGITTYKRHRFSTFTNGLRSLADWLELYSCFDLCMESTGKYWIPVHNILEKRDIRITLAHPKYVKAIRGKKTDKKDAQWIADLFKHDLVAGSFMPPADIRQLRDLLRYRFKLTNFTSSEKNRFQNSLTVSNIQLASVVSDTFGKSASKIIERILENPLEPDVDLPSLIHGSLKKKLPELELAIDGVITPEQAEKMKLIKQHYEQLVANKQALETIILELAKPYAKEIELIQSTPGFGSSMMSSISVISEIGVDMTKFYSAKHLCSWAGLTPTNNESAGKKHSVRISRAGCYLKPLLVQIANAVVRSLKHPEIRNRYLALKKRRGHKRAIIAIARQLLTAIYHMLSEHVVYTPPVIKEQNQPTRAMTVEAAIQFAKQHGFRVTA

SEQ ID NO: 447475 - protein, 408 aa, unidentified
MNTLYVGIDVSSKSNVVYLMLPNGDKHSNFSVANSHEGSTQLVKRILSALASHSLDTVLIGLEATSVYGDNLVYFLREDATLAPFNRKIHVLNPKQVKKFHDAYNDLPKNDYVDSFVIADCLRFGRINKEVYMGDYRYKALQNLTRARFFAVQNLVKEKQRFMNVLFKKYSTMTQEKVFSDTFSTTALAVYDEFESAEALANMDLHELTDFIIEKGKNRFPDPDAVAKAIQKAARSSYRLPKTVNDSVNQVLSISITSMKALESQIKEFDKAIKAQMELLPNVLISIPGIGPVYSAGIMAEIGDINRFNSQAALAKYAGLAWKQHQSGGFESEVTRLIPSGNRFLKYYLCEAAFSLVRCDKEYSDFYRLKYKEVNRCQHKRALALTARKFVRLVFRLLKDNRLYCPAK

SEQ ID NO: 447476 - protein, 348 aa, unidentified
MTVYIGVDFHARQQTLSYLTTEDGEIQRLQLEHGQPEEVRRFYRQFAGQRVVVGFESSGRAAWFEELLEELGCEIWIGHATAIRLFARRRQKNDRRDADLILDLLVRGDFPRIHRYSAESRTVLQQLRYRQRLVKMRTMLLNSLVFMAASRGVVLRSQLKTKRGLERLRQIDLPPALREQRDELCQLLLDLKLKIDKVERELAAKAESDIRVRRLRTQYGIGPLTGLCLAHTLESPERFANPRKVTAYVGFDPVEDSSGERRRIGSISKQGSRLLRFLLVEAGQIAVRRDPELARVYQRILVRRGHAKAKVAVGRRLLVRAFIMLRDEIDYAEFQRRGVAARSSREIA

SEQ ID NO: 447477 - protein, 342 aa, unidentified
MKIIGCDFHPSFQQIAMVDSETGEHSEGRLSRSEAVEFYRQLSGPVRVGMEACGNTQWFEGLLAGLGHQLWLGDAAKIRSLEVRKQKTDRRDAELLLRLLLEDRFPRIWVPSAEQRDLRQLLLHRHKLVGMVRQVKNQLQHLALNQGVQQKRKLWSAAGRQALEQLALSGWTAQRRQQLLQLLDELQPRVAQLDQAVMAAARQNPTVRLLQTHPGVGPITALAYVLTLGEIARFGHSRQVVSYVGLNPSEHSSGGRQRLGSISKQGNAMLRSLLVEAGQSAARLVPELKRAYQRLKHRKHSSVAKVMVARKLAVRLYWMWKCEQPYSVTRMQSSPSHPVAER

SEQ ID NO: 447478 - protein, 395 aa, unidentified
MLQDNEGTISTQDQPTGSDVFVSVEMSRSKWVVGIHTPLADKIGLHTMACGDVDALLSLIDRTRAKLIASGSNSPATMVCYEAGYEGFWLYRHFVALGIRVVVINPASLLVDRRAKRAKTDRIDARAMVRALMAWARGERQVLSEVRVPTVEQDDARRGLRERQRLVKERTGHGNRIKGLLKTQGIMDFEPRAADAAERLDAIVTGDGRPLAPYLKREIVRELERLALVMRQIDRVEAERDAVVKACDAGAGTDALAEPEREAAMIGELNRLKGIGMNDATILVREAFWRDFRNRREVGGWSGLAPSPWASGSVLRDQGITKAGPPMLRAQMIQMSWRWLLWQPDSDLAQWFRKRTEGATGRMRRIMVVALARKLLIALWRYATTGMVPHGAIVT

SEQ ID NO: 447479 - protein, 336 aa, unidentified
MDNIEACGVEVSARELVVARRGKSGVQLKCFANTAAGHRQLLRALTRGGQRVRVVLEATGLYALDLALLLSAHPQVQLMVANPRAVRHFAQAMMQRSKNDRLDAVVLLHFAERMPFTLWVRPQENTLALWAIARRLQALTKLCTAEKNRAHAMSLSEAIPATVRRDIARSLQFHQRTMKKLRQQALQCIAADATLQQRYQLLRSVPGMGEISAVQTLAELLLVPADRDVRQWVAYAGLDPREYSSGTSVRKYTRISKVGNAHLRRALYMPALVASRVEPHLRGFYEHLLARGKRKRQALLAVARKLLHAIYGMFRSLRPYDGTRVYLPPCFAEKSS

SEQ ID NO: 447480 - protein, 345 aa, unidentified
MKYYFIGIDVSKEKLDATLIHYESESDSEQQLAYTTVENNPKGFRSLVSWSKKNAGRGVKTDTMLFCCETTGGYDRALCDWLYDNGLDIWRESALQIKRSMGLCKGKDDKADSDMIAHYALRFRSQATLYKPLDGNMRSLRDLFLYRQSLVAERQAKMVSSKEKQHISSKSKVDNFIYRDAQKSIDIMTKSIKECERRMLEIIKEDEEMYRNYLHLISCKGVGLVTSVMLIIYTDNFKSWSPKKMASYCGIAPFYESSGSSVFHKANTSGYSNRRLKGILTQAARSAITHNPTLRQYYLRMKAQGKPYGVILNNVNNKLVHILFSLVLHDCDFELDHEAKRVLRA

SEQ ID NO: 447481 - protein, 345 aa, unidentified
MKYFAGLDVSLEETAICVVDEAGAMVREARVPSEPEALVAFFQGLGLVLERIGLEACSLSAWLHESLVAAGLPAVCIETRRAKAAMGAMPNKTDRNDARGLAQIIRTGWYRAVHVKSPACRSWRALLAARRLVLNKMRDVENGLRALLREAGLKLGTPARKELAARVRELTAADPVLSVLAEPLLTIIAAMTRELAQLTKRVLDIVRDEPVCRRLMGVPGVGPLTALAFRATIDRPERFRHSRDVGAHLGLTPKRYQSGETDVQGGISRCGDELARTALYEAAHSLLIRSRRWSTLRAWGMQVAKRRGMARARVAVARKLAAILHRMWADGTEFRWGKQDAAVTA

SEQ ID NO: 447482 - protein, 391 aa, unidentified
MFYIGIDIAKHNHEVSIIDDNGKALGKSFSISNSQKGVDKFNTYLDSFNITSENCVIGMESTGHYWINLFSFLVNLKFNVFVINPIQSDAFRKMYIRKTKNDSKDSYIIAQIMRFGEYSSSNISDENIFALRQLSRYRTSLVDECSSWKRKIISILDQVFPEYSNLFSDTFGVTSKELLSKYPLPENMLELSTEELTNLLTKASKGRFGNEKAQEIKESAKNSFGVSFAKQTFSFQIKQIINQISFIESQLKELDNEISNMLKELNSEITTITGIGDVLGACILSEIGDISRFEKASQLVAFAGLDVAVKQSGEFTGTEMKITKRGSPYLRRAIWLAATVASFKDPALSIYYKSLIARGKKHLTAIGAVSRKMCNIIFSVLKNKKAYTPNI

SEQ ID NO: 447483 - protein, 375 aa, unidentified
MKEKVRFLGLDVHAETIAVAIAEPDGEVRSLGTIANRAESIRKMIKKLGSVEQLKACYEAGPTGYVLYWQLAELGVACEVIAPTLAPIKAGDRVKTDRRDAERLARSFRSGDLTAVWVPDEGSESLRDLVRAREAAKQDQLRARHRLGKFLLRTGQRPALGVKAWTQSYLAWVKQIHFAQAARESTLLDYLHEVEHMAGRVIRLEQAITEAVKQASPQMQQVVRGLQAMRGIAQISAVTIVAELGELSRFESARQLMGYSGAVPSEESSGKRTRRGSITKTGNAHLRRIAVEAAWNYRLRPSVGPALRKRQEGVSEEIKEIAWKAQHRLHKRYMRLSAAGKDQRKIITAVGRELLGFIWAIGIKAEADSKLRMAA

SEQ ID NO: 447484 - protein, 435 aa, unidentified
MEEVTDEPLYRDRVCGIDIGKAGLAATIRVPSDKNPARRAQETRSFGTTKREVLALADWLRCWQVPAVVMEATGDYWKGPFYRLEAEGFECVLADAKQVRHLPGRPKRDPSDSRWLAACFERGAVTGCFVAAPEFRVIRLHTRYRRDLTEERTREKQRAEKLLESAAIKLSSVVTDLHGVTGRDIMDHLIAGERNPKVLAQLARTRARRKIAELEEALEGAEFFTAEHAALLATMLARIDRLNAGIDELTEVIERLLAPYEEQLQQAGSMPGWGRRTAEDALAETGADMTRFPTGAHLASWAGRTPLDNSSGKRNGKSKSKKGNRYLAGLLGETAVAAGKTQTREGARYRRLARRRGKAKAQVALGNTQLNVYHKLLSSPGMRYQDLGPDYYDRQASTRRQIAHHVGKLGVLGFEVTLCRLPEPGPGGSGSTQAA

SEQ ID NO: 447485 - protein, 355 aa, unidentified
MNDAKYIGLDVHQATTSVAVLDSAGKLVMEAILETKAETILQFIHGLRGSLHVTFEEGTCAAWLHDLLKPHVAQVLVCDPRKNTSMKVGNKNDRIDARKLADLLYLNKLHPVYHGETGIRALREVARSYLALTRDTTRVMNRLKALYRSWAIPCAGQRVYAPRDRSEWLAKITEAGVRRRAEIYYQQLDALRSLREQVRRDLLAEGRKHSAMKLLRQIPSIGPIRAVLLIALMQTPHRFRTKRQLWAYCGLALKTSTSGEYRIVEGRLKRSKKFLAIRGLNANHNHDLKNIFKGAATRAAAVPGPFQEFHAGLVAKGMKPTMARLTLARKIAAITLIVWKKGVGFDAEHLKQQAA

SEQ ID NO: 447486 - protein, 325 aa, unidentified
MMEQGSVYVGIDVAKAWLDAGTWPQSESLRVGNDAAGAAQLVQRLLASNPRAVVLEASGGLEALVASELHAAGLTVAVVNPRQVREFARSLGRLAKTDRLDALVLAQFAQSAHSNGRLQPLEFQDEAQLELKALVARRRQLIGFLVAETNRRERAPKVVRRSIVQSIKGLKKALAEVEQQLRQVVQSAPAQQAKAKLMTAVPGVGPQLSVTLLAELPELGRLGRREIAALVGVAPHAHESGKFKGRRMIWGGRARVRTMLYMAALSAVRHNPVLRASYQGLLDRGKAKKLALVACMRKLLVILNAILRDQLPWNPSYLLDLQHSR

SEQ ID NO: 447487 - protein, 346 aa, unidentified
MEHYAGIDVSLELSSVCVVDAQGKIVKEAKVSSEPEALVSFFKGLGFPMKRIGLEAGPLSQWLHAGLAQAGFETVLLETRHVKAALSAMTVKTDRKDARGIAQLLRMGWFRAVHAKSIGSQEVRALLVARKQLLGRLIDVELSIRGILRGFGLKVGPVTRKGFEARIHELVTGQATLERITTAMLSARAALKAEYEKLHKAVLAIVREDAVCRRLMTVPSVGPLVAITYKSAMDDPSRIAKSKAAGALFGLTPKKYQSGEKDVTGGITRAGDEMVRTALYEAANVLLSRITRFSKLKRWGMDVAKRRGSKRAKVALARKIAVILHRMWVDGTTYRWAAAEPIAAQA

SEQ ID NO: 447488 - protein, 401 aa, unidentified
MTSGFRVFLGLDVGKDAHHAVGLDPTGKRLHDAPLPNSEPKLRALFDKLAQHGPLLVVVDQPATIGALPVAVARAAGHQVAYLPGLAMRRIADLYPGRAKTDARDAFIIADAARSLPHTLRPVDVGDDALAELDVLVGFDDDLAGEATRISNRIRGLLTGIHPALERAIGPRISHPAVLEILSRCGGPTGIRAAGRRRLAAIATAHAPRMGDKLVTAIMTALNEQTVTVPGTTAADTVLPRLADSLKTVLQQRKQIASEVEEILDAHPLAGVLTSMPGIGVRTAARILLEIGDASAFKSSGHLAAYAGIAPVTRSSGSSIKGEHPARTGNRKLKRAFFLAAFAALADPTSRAYYDRKRAEGKKHNAALICLARRRCDVLYAMLRNRACYRHPEPLPAPAAA

SEQ ID NO: 447489 - protein, 331 aa, unidentified
MFPVGIDVSKNTLDLCMLYDGIKGRIKTRNIQNNRHSVENILRWLRLQHCGPEDVHVVMEATGVYHERLATELHDAGFRVSLANPHRSREFARGMGIMTKTDKVDAYMLACYAFLKKPHRWEPPTPEIRYLGALLRRRDVLLGDALREENRLEKYLSTDTPADIISSCRRMAQLLREEVSNIERQIKVHIKASTALRRDYTLLTSIKSVGPQLGMHMLVVLRSHNFVSAEQAAAFLGVVPIEKRSGTSVRSRPRMSKIGPPQLRAKLYMSALCGKIYNKRMRNIYDEMCLRGKPKMVAIGALMRKLVHWCYGVLKTGTIFNDEGLKPVLST

SEQ ID NO: 447490 - protein, 410 aa, unidentified
MRRCIGLDVHRDFAEVAIWQEGVVRSAGRIETTPEELRLFADSLSEHDEVALEATCNTHAIARLLERHVGRVVGSNPMKTRAIAEAKVKTDNVDAQVLAQLLAAGFLPSVWLADEETQALRRQVARRAHIVRQRTRLKNRVQAILHRNLVPRCPAADLFGQKGRRWLAEQELGADERHAVEALLRQLDFHADELRLIDAALAQVALAREEVKRLMTIPGVDATVALSIVAAVGDFDRFRSPDKLVSYLGLNPRVRQSGSHPAVHGRITKQGRAHARGMLVEAAFAAARVPGPLRAFYERVRARRGMQIAIVATARKLAVLCWHLISKGEDYAYQRPSLTAKKLRALELRAGARSHRGRKGTAGAYSLREVRARENALAEQGELVYRHLVADWQAKRPAKAGAGAATGERL

SEQ ID NO: 447491 - protein, 384 aa, unidentified
MKNVYCNVACNGMDVHYEFSKVTFRDEAGRVVRRERLDHRDRERLRARVRQWPKGLPVVLEASFGWGWLSDLLEEAGLEPHLSNCYKVEQMRKARGWVKTNDKDADLVSLLPFETSSWWEVWRAPPEVRDQREQMRFRADLVALQTCVKNRIHAVFHRHGIFHDFSDLFGGQGRIFLSKLCLHNPTGLPPQAWQALRGQVRLLDHVRRQLAEIERNLHRQWTTTPLVRRLKTIQGVGLVLAHVFSAEIGRIERFGNHKRLASYSLLAPRANDTGEGDPTAAPLGRHLGRRGNRTLKWAFIEAAHGAVRSGGRWRAMYDRVTEGGRKDRNRGYIKVARELVKVVYVVWAKGVSYSSTPPVRPGRRKNQKSSRSGTGQLCHPLVHA

SEQ ID NO: 447492 - protein, 418 aa, unidentified
MTATHSIAPTLLVAIDISKHRHEVLIGIPGKARRRRLTVMNTLEDFQRLSVALASYELPVRIGFEATGNYHRPLAHHLGQAGFDLKLVSSVGLARTREALHNSWDKNDPKDAQVILHMLEIGAVQFFHDPLVVGTADIQELSKTHEIVSRSKTELWHRILTHYLPLYFPEAERFHRSSRTDWFLAFLEKYPSPHMISAMGRDVFIADAWDVVGRKVSKERLLSDIYATAVDSVGLPVHPDSDAVRMFRLVLKEGRSLVRQRDEIEARAVELLLDLPDYQLLTTIPGIGPINAMTILAEAGDLRRFRHHRQFLKFCGMDLATVQSGMFRGQSRVSKYGNARLRRTLWMAGQTAVLKRTNSFRDKFERYISKDRHNAHLRRKAYTAIAAKMARTVHAVVNHGEPYRRFFEGVSPGGRTSL

SEQ ID NO: 447493 - protein, 360 aa, unidentified
MVEDRRTVGVGLDVHKSSVRLAAVSGGELLRETTLAYDHDAVERELGAWPGARVCYEAGPTGFGLYRHLVAAGVDCVVVAPGLVPSRPGDRVKTDKRDARRLAALHAGGLLTAIFVPSPELEALRDLVRAREDARLDRMRARHRLGKFILRHDRRMPTTCWGVTRRAWLGRQAFELPGQQQAFDDYLFALDQVDRRIENLEAELSRLAQDGPHQELIGRLRCIRGIDTLTAIGLAAEVGDFTRFATAAQFMGFVGLVPSERSSGESRRQGSITRAGSSHARRLLVESAWHARRRPTVSYELGRRHRGQDPQVLERAWRCQQRLHRRWQRMAGRGKPSQKIVVACAREHAGFVWAIATEQQ

SEQ ID NO: 447494 - protein, 367 aa, unidentified
MKKVSTVGAKPSKKISQQKLTVGLDLGDRNSWYCILDESGQIQLEQRVRSNAKALREVFGQLPHSRIALEVGTHSPWISRLLSELGHEVIVANARKVRLIGESRKKDDRLDAQTLARLARIDPGFLSPVKHRSAQAQADLMMIRARAGLVRARTALVNTVRGLAKSYGERLRGCNVRNMNPEKADGLSPELQSALEPLLAGIEELSEQIREYNERIEKLAQESYPQVALLRQIKGVGTLIALTFLLTLEDPHRFRKSRDVGCYLGLQPGRRNSGQSEPQLHISKEGDPYLRTLLVQGAQHILGPFGVDCDLRRWGLKLAERGGRSGKKRAIVATARKLAVLLHHLWVSGEVYEPLHNSRRTAVAAAA

SEQ ID NO: 447495 - protein, 402 aa, unidentified
MNCVGIDVSKGKSMIAVMRPFGEVVVSPFEVRHTANELSELAGLLKSLDGETRVVMESTGNYHAPVAWLLHDAGLYVSVVNAMLVHDYGNNSLRRAKTDKKDAVKLANYGLDHWLTLPRYVPEEDTRLMLKACYRQYQQYSKVQTMLKNNLISLLDTTFPDANRLFTSPPRDDGREKWIDFVATFWHRECVCDLSEKAFAAKYQKWCKKYGYNFSEGKALDIYAAARGHFGVMPKTDTAKLLVEQAISQLRATSSALAALKQEMQSLAASLPEYPVVMEMFGVGPALGPQLMAEIGDVRRFHSKKALVAFAGIDAPPYQSGQMDVRSRSISKRGSASLRRTLFLVMSVILQHAPMNEPVYQFMNKKRSEGKPYRVYMMASANKFLRIYYASVKSYLDSLEHD

SEQ ID NO: 447496 - protein, 372 aa, unidentified
MQQSSTLYVGLDVHKESIAVAYVAQDHGAEVISLGTIGTRQCDIDKLLRQLQSKSKQLVFVYEAGPCGYWLYRYLLKQGYVCWVVAPSLIPKKPGDRVKTDRRDARQLARLMRSGDLTPVYVPAIDDEAIRDLSRAREDTLRDLKAAKLRLKAFLLRHDIRYTGRANWSPAHLRWLSEVVCPTPAQQIVFQEYVQTVTEQTERLGRLELELHEQGQTWRLYPVVEALQALRGVQFTVAVTTVAELGDLTRFENPRQLMNYLGLTPSEYSSGGRRQQGSIPKTGNSHARRALVEGAWAYRYPAKVSRHLQLRLEKLPAAIQAISWKAQVRLCTRYRHLMAKGKNANQVVVAIARELSAFMWAIAKHIAVTPKA

SEQ ID NO: 447497 - protein, 321 aa, unidentified
MVLGIDVSKLKLAVAVLFNGKFRTKTVTNDQAGFDKLWNWLERFESLPEHVCLEATGPYGEDVATFLYDQGLVVSIVNPTRIKGYAQSEGLRTKTDKVDARLIASFCQSKQEKLQHWKPAPIEHRELRDLTRRLESLKNMRSQEENRLTGNLSDVVVANLTEHIEYLNKQIQQLEQMIKDHIDRHPDLRHQCDLLITIPGIADTTSANLIAELCFDQFSTARQAAAYAGLTPSDRESGTSVKGRPRLSKIGNRRLRKALYMPALAAIRYNPTLSEFSNRLERKGKAAKVIISAVMRKIIHIAFGVLKSGRPFDPKYQPVFS

SEQ ID NO: 447498 - protein, 283 aa, unidentified
MHLYFVGLDVHKQVIAYCVKTEAGEIVMEGTVAATRAALDQWVTTLPRPWHGGMEATMFSHWIYHHLKPHAERLEMGYPARMKAISSGKKKSDKIDARTIADLLRCDLFPACFVISPELGALRQQMRFRRLVVEETVTFKNKTAGLLMEAGVEYQRRRLHGKRYFKELVQDNQWIHEELRPLLTFNREQIETLQGMDQRLIRMLERHPRLQARVEALQAIDGVGPVTALTWALETGTPERFASIKTAVSYCGLSTALRESAGKQKRGPFSKQRNRHLQNCRAC

SEQ ID NO: 447499 - protein, 314 aa, unidentified
MDSAALYVGIDVAQDQLDIATTADHVWSVKHHPRAMAALARRLQKLAPARIIVESTGKLEQELVVVLAEAKLPVVVVNPRQVRDFAKATGVLAKTDRIDARILARFGEAVKPEVRELPDEQARDLMALVARRRQLHQMLRAERHRLLRVARPLKKSLEQHIAYLEKQLAKLDEDLHDAIRQTPIWQEQFELLQSVPGIGPTTAATMIAELPELGRLSRHEIAALVGVAPFNRDSGKWKGKRSTWGGRSPVRSALYMATLVATQYNAYIRAYYQRLLARGKAKKTALVACMRKLIVILNTMLKNHQPWNPKIQTA

SEQ ID NO: 447500 - protein, 386 aa, unidentified
MELKVTNKAFAIDISQSKLTAAKGELVVEQEKSAVYVKEVKEFNHDNEGIEELIKFLGEYKEGIIEATGIYYFYLHEKLTEKGYKVTVINPLHLTEILGKKTDKLDAQRLLVAHMTGVIKGSYIPTGEIMELRELTRYRESLVEKTTQVKNEIRKILEFAGYKIQPFDKKGRKPLEKLVKGEELSKEEKEELKEKLGRNLNDAEKLALKQLVELLKNLEKMIKEVEDMIISKIPKPVIELSKIPGIGLISAATIYAEFGDVSRFSSSKAARAYASFAPKTKQSGDSESHSGMIRGNKYLRRALYLVAKVARGLEPFKGYYERLIARGKSVTQATCALAGKLASICYHVIKDGVYKGVVKKSFRIPRGKEVNVKDFDVGDALDSLSP

SEQ ID NO: 447501 - protein, 366 aa, unidentified
MKTSITPIGTPVGIDVHKRRCKVVEFRRGEIKVRKPMGNTREEWLELLTELPPDAEIGLEVSTAGYFAMSVLEGAGWRERAHWVHTAGIDSNRRQKNDRLDAERLARKLAAHHVDPLPEAWFPPPAIRALRLRARQRCWLALLRTQAKNHVQSLLEMHGLQIPGSDPFGAAGRRWLAEQTLPPPLAESIPQTLRLLALLEEEIHTSERYLQAADKQFPELVLIRTIPGLGPILAPVIWSEIGTIERFPSAKALANGTGLVASFYDSGEVKTTGPITHQGSRWLRWALVTAANVAIQGRNPFARRYHRLRRSKKANVAKAAIAHSLARCVYGVLKHGCPYREDRWGRKVGALEPETRAGARSTKTAL

SEQ ID NO: 447502 - protein, 357 aa, unidentified
MKSQDGKYVGIDCGKKSLEVVRINTENLLERRQFSTTENGINSLLKWLTLNDIVGLEAGSQSFRIAKSILNKGIQVIVLNPGDLATIYQSLKKTDKEDSLKIARLIQRYPKEELPVVPIPTDEEEDNRRLCTEHENWTKQLTQGKNRLHSLFTQAGLTHITKKHLRTKTSREASVTLLPDRYKKEAERILKVLDLVALNLKLIEEEIKEALKKNQSYVQTIMSMPGIGIITSLAIMSYMGDCKRFSSAKQAAYYSGLVPRVDISGDTVRYGRIVSRGCHAIRRVIVQAAWSLVRCQHGGKIKEFYERLYVKKGTKKSIIATSRKMIEVLYTMIRTGNLFDSMPEEALNRKLAQYGLM

SEQ ID NO: 447503 - protein, 342 aa, unidentified
MDHSAGLDVAVKETSVFIVDETGRIVREVKVASEPEELLAVLMNPAYHFKRIGLEAGPLSQWLYSALAEAGLPVICVETRHMRAVLKAQINKTDRNDARGIAQMMRVGLYRPVHVKTLRSQKLRMLLTHRKLLQSKAIAIDNDLRGTLRNFGLKVGMVGKVRFEARIKELVENIPDLAVLVEPLLIVRRVLREQFVIQHRRLLAIVRDDEVCRRLMTVPGVGPVVSLTYRATVDVPARFRKSKSVGAVFGLTCAKYQSGEVEWSGRISRCGDEMMRVMLYEAAQSMLRSEKWSWLKAWAMQIARRRGMKKAIVALARRLAVILHRIWVDGTEFRWTREAAAA

SEQ ID NO: 447504 - protein, 360 aa, unidentified
MSFNGTSVGLDVHALSVVAHAVDEQTGQVERARLCPDHGEILDWLHRLRGPVRVAYEAGPTGFGLARALAGAEIDCVVAAPSKLIRPSGDRVKTDARDAAHLTRLLRLGEITAVTVPEADVEAVRDLVRAREDARADLMRVRHRLSKLLLRQSRVYSGGHAWNGVHETWLRRQRFDDSHTAAAFDHHFDAVLTATAARDRLDEQIVTVAASPRWADQVDRLGCLRGISALTGLALTVEIGDWTRFSGSSIGAYVGLVPTEYSSGASRVQGSITKAGNAHVRRLLIEAAWHHRSAYRNPGPTMRARWAKVDPVLKARGHAGNRRLHQQWCRFNERKKPHVVANVAIARQLAGWCWSLATLT

SEQ ID NO: 447505 - protein, 346 aa, unidentified
MKHIGLDVHQRDTKVCWIDDDTGQVSNRATVPTGQVVATVAAVPGERCVVLETGSQCWFLGRALASLAQTQVFVVDAFKARRSLEGMHPGKKTDKWDAYGLAKLSLERRAAPMAVWLADLPTHELRTLTRTRAALVQQTTALQNQLRALLRAEGLQCPRSDLMGRQAQRDLDALASLLPSLAAVCFGQLRASLVFLKQQIQTLEQQLAQQALAHPDCRRLMTLPGCGIILASTLIAEIGSISRFSQAKYLRSYAGLTPRICQSGERSYLGPLARGHRGLKYALVLLAQHFAWHQGFADTHLKQAYYRCLHRHGPNPAKVALARHLCDVIFAMLRDGTDFTPQRLAA

SEQ ID NO: 447506 - protein, 290 aa, unidentified
MKYYVGLDVSMKETSICVVDETRRVVKEGRVGSEPETIAGWLAQTGLKFERVGLEAGSLAPALHDGLAAAGLPAVCLDARHLKAATSAMPVKTDRIDARNIAWALQSGWYRVVHVKSQATHKLRALLRSREMLVRSRVMLDNHLRGILKAFGLKVGKVDPGRLDQRVRDLIEGDEVLERVVGAVLSVRQEVVERLEDLHRMVLAAVKADPVCRLLISVPSVGPVTALAFRTAVEDPTRFAKSWLVGAYFGLTPRKYASGETDRNGGISRCGARLVRSLLCEAANVLLTGV

SEQ ID NO: 447507 - protein, 343 aa, unidentified
MQSISTIGLDIVKSVFQVHGVDAVGQVVMRRQLRRRHVLTFFQKLPPCLVGIEACASSHYWSRELQTLGHTVRLMPPAYVRPYVKRHKNDATDAEAICEAVARPSMRFVPTKTVEQQSCLMLHRARHLFIRQQTAVINSIRAYLAEFGIIAPVGRRGVEQLLEVVADKADYRLPEVARACLAALGSQLRAMKTQILEFDRRIIAWHRSNATSRRLDAIPGVGPALATALVASVADAKAFRSGRDFSAWVGLVPKQNSSGGKDKLGSISKQGDRYLRSLFTAGALAVIRYAKIHGTGHRPWLTALLARRPTKVAAIALANKLARMTWAMMAKNEDYKEPAALAA

SEQ ID NO: 447508 - protein, 429 aa, unidentified
MDDVDDADLVVERVAALDLGKAGLEACVRVPNPQRPGRRMQELRGYATTTAQLLAMVGWLRHWHVQRVVMESTSTYWKGVYYLLEAEGFECWLVNAREVKNVPGRAKTDRADAIWLAKVAERGMCRPSLVHPAEIRRLRDLTRYRRALVQDRTREQQRIEKLLEDAQIKISSVLSELHGVTARAMMDALIAGQRDPRALAQLAKGRARKKTAQLEEALRGFFTDHHAAILRMMLDNTDRISAQIAALDARIEKEIGPFSGQAARLAEIPGVDAVAAAELIAEIGVDMTRFPSDAHLVSWAKFCPQTHESAGKSKSKGRGRGNPWLAGTLGRIAFANSRADTFLGARYRRLARRRGKQKAIVATGNSVLTVVYYLLSDPMATFRDLGPGYYESRINVHRRARDLVTQLQALTGQHIVIRDGKAVITDAAA

SEQ ID NO: 447509 - protein, 344 aa, unidentified
MKRYLGIDLHTNSFTCCYLHADGHETIRTWPLQGGGLEQFIQGVHAGDEVALEATGNAAYFCKTVEPFVARVVVIAPWQFEVIRRSVKKTDKHDARAIALFLSKDMLPEARIKSEAHVQLASLITTRDQLVKLRVSLLGKVHGMFVRHGLKIKREVLTSQAGFTREVAGHAWNPLEGVELAVIDDQMQSLHRNIKRLEKEIAAFAKTLPGYDNLISIKGIGPLSVAVMLTHIGAIEDFKNTGKLAAYFGIVPRVSQSNETSNSGHITKRGNKLARTTLVQCTLIAIRYSPYLRGFYESLKTRRGTGKAIIATARKLLNTIFHTLKNKWVFADFPNFQLLPCNQS

SEQ ID NO: 447510 - protein, 451 aa, unidentified
MKTTKSQGATSGASITVVHPYAAAIDIGAKFHVVAVGPERDPEPVRSFGSFTQELHQLAQWLKQIGITTIAMESTGVYWIPAFEVLEAYGFEVVLVNARDVRNVPGRKTDVSDAQWLQKLHAYGLLRASFRPRHDIATLRAYLRQRERLLEYAAAHIQHMQKALMQMNLQLHHVVQDVTGATGMKIIRSIVAGERNPEELARHRDVRCKASSETIRDALVGNYQDEHVFELTQALALYDFYQTQVAQCDERIEVVLRQLHANATPVSTPLPAARRRSRQSNDFSFDVRAELYSMLGVDLTQIHGFGPYLALKLVAECGTDMSRWPTVKHFTSWLCLAPGNKISGGKVLSSKTRRSSSKAAAALCLAAVTIGKTDTALGGFYRRLSARIGKAKAVTATARKVAVLFYNTLRYGMKYVDPGAEYYEERYRQRVLNNLTRRAESLGYVLQAKPA

SEQ ID NO: 447511 - protein, 386 aa, unidentified
MQTVADRPEAPTAIRTDLGAIFVSLELSRSTWLITSLSLGGGEKMSKHVVRGGDVAGLLERFAQLREKTRARTGKVFPFVVIQEAGLDGFWIDRVLQNKGIESHVVDPASITTSRRRRRAKTDGIDGEALVRALLAYKRGEPRVCAMVKAPTPEEEDRRRLCRERKVLIAERVRHVNRVKGLLFSQGISGYEPLRRDRRGRLDMLQTGDRRLLPDHLKAQVRRELDRLELLLEQIKAVEAERDVLLAAQQAPAPAAMLLDIKGIGPEFAAILWSEGLFRHFDNRRQVASYAGLAPTPWQSGSVDREQGVSKAGNPRLRTTLIQLAWLWLRHQPQSALALWFEERVRRNGGRLKKPTIVALARKLLVALWKYVTAGVVIEGAVMKAA

SEQ ID NO: 447512 - protein, 387 aa, unidentified
MPKTSDRSEVPAAIQTHITAIFISLELSRKVWLVTSLSPGAGEKMSKHCVPAGDVAALLLRFAELKRKAQARTGDSFPIVTIQEAGLDGFWLHRLLEREGVESHVVDPASIAAPRRRRNAKTDRLDGEALLRALLAFKRGEPRVCAMAVPPTPEEEDRRRLSRERRTLVAERVEHVNRIKGLLFSQGISDYEPIERDRRKRLDELRTGDGRSIPLHLKSAIARELDRLELLIDQIKAVEAERDKLLAKPRADPIPSPGDLLLRLKSIGPEIANVLWSEGLYRHFDNRRQVASYAGLAPTPWQSGSVSHEQGVSKAGNPRLRSTLIELAWLWLQNQPQSALSLWFRRRVADGRGKKTTIVALARKLLVALWKYIAFGVVIDGAVMKNA

SEQ ID NO: 447513 - protein, 376 aa, unidentified
MNKCHSNTELSSHEGTRSQFNGGTGAIKSAVGRMRPVCALGIDVHQDFYVVVEQVDGTNPKPPQRFPKQAFLRWAARLKENTGAEVHAVYEACGFGFSLQRQLSLLGVQCHVVCPQKLDEQNRRVKTDGLDAKALVLKLDRFVQGNRSALALVRVPTEEEEQKRAIHRQREQLVKARKQLEAQGRSLMVNHGLEPVQSWWKPRAFAALPVPQWMKELLANSQPILVALQQKIASLTIQLQSSATPKQPRGLGLMTSVIIDREIGDWRRFSNRRQIGSYTGLCPGEYSSGNTRLQSCVTKHGNPRLRAALVELAWRLVRFQPNYKPIVKWRQILAKGALATGAARKKAIVAVARQLAVDLWRIKTGRLRAEELGLIN

SEQ ID NO: 447514 - protein, 407 aa, unidentified
MFYVGIDIAKNLHEVAILSDSGELAGTSLKIANTIPGAQKLLDHLAKAGVAADNAVIGMEATGHYWLAIYSFLVGQNYAVKVINPIVTDAYRNMSVRKAKTDQIDAVVIAKVLRLGEYKEAPTANEQTLALRQLCRFRAYEVDLCSDLKRKSIALVDQLFPEYAKLFSDTFGVTSREVLLNYSTPEELSQISTRKLTNLLDKASRGRFGKDKALQIKDAAVHSLGITIATDAFAFQLRQLLEQISFVEEKVEQLDLEIAVYMKQTDSFITTIPGIGPVLGAVILSELGDISRFEDAKKLVAYAGIDAAVNQSGNFEGTEVHMSKRGSPYLRRALYTAASVAVFHDPELSAYYQRLRQRGKHHSVAVVAVARKLCYFIFSVLSENRPYEVRLHNAATGGTEPAQLALE

SEQ ID NO: 447515 - protein, 362 aa, unidentified
MIVIGADTHKRTHALAAVAGATGARVGERTIRAEDAGHLAALRWARELDPERVWALEDCRHVSRRLEQALLAAGERVIRVAPKLMGGSRRGEREPGKSDQIDALAVAHAVLRHGIERFPAAFLDERALEIRLLADHRDDLVAERTRAQNRLRWHLIDLCPDLEAALPARSLDRPAQLDRVARRLRRCPPSARVRVARELLARVRQLTHDANALESELRALVRAQRPRLLQETGCGALLAAALIGRTAGAERFATDAKFARQTGTAPIPASSGARHRHRLHRGGDRQLNRALHIIAITRAAHDPTTRAYLDRKLAEGKTRPEALRCLKRHLARRFHRLLTEAPTRSDERPDTINAVVWAPCLT

SEQ ID NO: 447516 - protein, 344 aa, unidentified
MPPLRPVSELDTHADVHVAAALDGNGRLLGIESFPTDTAGYRSLLDWLSGFGPVIRVGVEGTGSYGVGLARHLHNEGVVVVEVDRPNRQKRRRLGKSDPIDAEAAARAALSGEASVTPKWRDGAVEQIRVLMIARRSARMQRNQALNQLRQIVITGPDEVRVRFKDRYKTGLVSEVAAMRPRKGSDPVTYTTHVVIRGLARRIRDLDDEMRTIDDALTELIGATAPSLLACHGVGVVTAATLLVTAGDNPDRLHTERSWAHLCGVAPVPAGSGKTTGRVRLSHGGNRHANAALYQIVLTRMSSDPATRNYVRRRRAEGLSTREIMRCLKRYVARQTFKHLPRAA

SEQ ID NO: 447517 - protein, 393 aa, unidentified
MVCVGIDVAKDKHDCFIISSEGEILADVFTIPNNAEGFDTLLQAIRRSTRPEDKIKVGLEATGHYSYNILGFLLDKGLPTYVINPLHTNLYRKSLSLRKTKTDRVDARTIAAMLMSDVDLKSYTDTVYHNEELKSLTRYRFDKVRERAKLKQSVSRLVTILFPELEKLVSSLHSASVYALLSEFPGAKQISSTHMTHLKAVLKNASQGRYGQEMAETIRNAARSSVGSVMPAKSLELQHTIRLIRELDAEIEDIETAIQAIVDEMQSPITTIPGMGVRMGAVILAEIGDFSRFDSPDKILAYAGMSPSTYQSGQLSLSGAYSHMEKRGSRYLRYALYNATKHVCHWDPTFAAYLAKKRAEGKHYNVALSHAAKKLVRLIYAMEKSRQPYSSAA

SEQ ID NO: 447518 - protein, 368 aa, unidentified
MEKTVYVGIDYHISKLTIAVKMQDQENFHSTIHLENKTKVIADYLKKLSEQFQLKICYEASGSGYHFQRLLHSWGYHCDVIAPSLIPKKAGDRRKNDFRDARELARNYAAGQLTVVHPPTQHEEAVRNVVRCRLDFKENEKRTKQHINSLLISQGHHWQKSKWTLQHRTWIQQLSFSEPFVLQVLQEHLAHLEYLETCTARLDHQIKEIAVSGVYAPSVKKLRALKGLGTLSAMILIAEITDFRRFASPRALMSFLGLIPSEDTSGIRCRHGSITKAGNRRCRTQLIESVRHYIKQPRMSRQMKQDCAQVDPISAGIAQKCMQRLHKRYWALTMKGKTRNVALVAIAREFVGFIWALMTSADAAAQAA

SEQ ID NO: 447519 - protein, 328 aa, unidentified
MNMHPQGGVTNRDQRPNAGIDVCKQHLDVCLGAQDQRLANDATGWDELIAKFKDASVDLVVIEATGGYERGLVCALQGAGITVARVNPRQARDFAKSMGVLAKTDQVDARTLRDFGDVLARHKDRAKYITPMIDAQRQELAALMTRRRQLVDMRVVETNHLEQAGKRAVRSIKSMLKTIDKQLASIDEDVDDLIEKHFKEQRTLLDSVKGVGPVTILTLTAALPELGRLGRRQIAKLVGVAPLADDSGPRKGKRRIWGGRSDVRAVVYMATLSAIRFNPVIKVFHSRLIAAGKPKKVAIVACMRKLLTILNAMLRDQAMWDAAKHLQT

SEQ ID NO: 447520 - protein, 342 aa, unidentified
MTLYKRIGIDTSKARFTVHGIDHADRAVLKIDLRRNQFLAFFRKLPATEIVLETCGGSHHWGRELIALGHVVRLIPPQYVKPFVKRGKNDRIDAGAICEAGGRPDMRFVAVKSIERQADGMLLKVRQTLLDQRTALINTLRGHAAEFGIVAARGVGRVEPLLAAIAAEPSIPPAAKELFAVMGQEIARLDARLEEFAARVAAAHKASALSQRLAGIPGIGPISALTLVNEIDPGAFHSARHLAAWIGLTPREHSTGGKQRLGGISRAGHERLRALLVAGATAVIAAATRHGDARVSEWLRALLRRKPRKLAAVALANKMARIVWALMTRGDVYRAGGARAAA

SEQ ID NO: 447521 - protein, 358 aa, unidentified
MKMAGIDVHKKVLMVVVVDTSALQGKPARRRFVTLPSELQRFRIWLQEQGVEEAVMESTAQYWRSVWLELEPHMGLHLAQAFSNRAPRGRKHDFKDAERLVRRLIADELILSFVPNGEQRIWRSLTRMKVQLTRDRVRLQNQMECLLEEMRIKLSIVVSNLLGASGLRILHALAQGETDAKKLAELGDERLHCTEEQLVDALTGRVQAMHRGMLALQLQRLQLIDQQMAQLNHMIAQAMKSHQDAVIRLAEVPGLGVDSAQQIIAEVGAQASTFSSAAELAAWVGTCPGKEESAEQNQSSRSAKGNKYLRRVLNQAAHAAVAKKGCHFQVVFRRLMPRLGYKSAIWAVANRLCRVVWK

SEQ ID NO: 447522 - protein, 405 aa, unidentified
MICVGIDVSKDKSTVCILKPGGEVLAPPFEIIHSIESILVLVRRIQSYDEETRVILEATGHYHLPVVTLLVEKGIFVCPVNALQIKNFRSQDLRKAKTDKIDAINIAKYGLSHWEELQPVLPPETVYRELRLLARQYYQTTALITKERVNISNLLDQAMPGLNRLFSDNYNSKLTNIAARYWHFGRILDMGEKRFSADFCKWAKKQGYRQCERSAKEIFALAQNSIPVLPFTLSTKISVTEAIRLLHQLEASRNAILAQMLELAKTLPEFSVIREMPGVGDTLAVRFIAEIGDVRRFHSKRAVTAYAGIDTPPYESGCFVAVNRHITKRGNKYLRKTGFEIMQSKLKHKPINDEVYSYIKKKQSEGKSWKEANIAGLNKFLRIYYGKVNSLYEEINNELIFCSAI

SEQ ID NO: 447523 - protein, 371 aa, unidentified
MNKFSKYVGLDVHKETIAVSVAEGNGGEIRYIGEIANTPESIGKLVKQLRKDGATLSFCYEAGPCGYGIHRQLTDLGWDCQVVAPSLIPKKAGDRVKTDRRDSLSLARLHRAGELTAVWVPDGAQEALRDLTRAREDMKHLQRQAKQRLLAFLLRHGKRYDGKSNWTQAHYRWLEAVKCDHPVQQIVFQEYVDTVKAMTRRIEALDKQVESVSAESVFWPVIEGLMALRGVNLLTATTIVAEIGDLRRFSSAPQLMAYLGVVPSEHSSGGTKSRGGITKTGNGHVRRVLVEAAWTYRHHARKTAVLERRAEQTSEAVQEIAWKAQTRLCGRYRLLEARGKLKVQVCTAIARELTGFIWAIGQALPQPMAKA

SEQ ID NO: 447524 - protein, 341 aa, unidentified
MKKNKFFIGLDIACDDFVASIYESPEKQPITKETIENNPDGFSVFVNWLKQYDINSSNAIICMEATGVYSEACAYYLAANGFKVSVEPPLKVKRAFDPVGHKTDPVDSRQIAEYAYRYTDELRFWKPKDEIVEKMRQLLAARERFTKQSVMIQNAMKSYERHVIKVPLIEKADQKTLKEVKKHIAEIDKELDKLIRQNPTISNMSNQLKSIPGVGLLLAANLIVMTDSFRAISDYKPLAAFLGICPYQHRSGKSVYRQPHMRIFGPSYARKLLMLAARSVATHEVSFKRYYLRKQAEGKSKQLALNNIANKILKIACAMIRDNKSYIKEHRSINPMCLKTA

SEQ ID NO: 447525 - protein, 329 aa, unidentified
MSALVCGLDVHKDSTYATILNPEGKIVNQTRMTNERVLPYLSHFDVGKVGMESSNQIAPLFRQLTAKGYNVVVSHPKKTRYIAEAKIKSDRVDSKAIAELVRLDALPLAYFPEGEIAKLREKVRRRAFLVRSRVKLRVKIKSVLTYEGLKWPTDHGLFTQKGVEWLHGLNLDSVECYLRVLKPLDEEIKLLSKELVGIAEDDEEVKLLMTIPGIGYYTAILMKSEIGDVNRFVFPERLCSYAGLVPSTHASGKTVWHGGITKEGSRWLRWVMVEAAQTHVHKYDTAITRAYNRIAEKRGKKIATVAAARRLLMCSYSVLKNKKPFYAQA

SEQ ID NO: 447526 - protein, 339 aa, unidentified
MREFIRIGVDVSKGFFQVHAIEGEGSSAVRRKLSRAKFLSFFAGIAPTRIGIEACGSAHHWARELRALGHEVVLMAPAYVKPYLKRGKTDANDAAAICEAMSRPDMRFVPVKSADQQAMLMLHKTRALMIKQRTMAVNALRGHLSEFGLIAARGIHRIKDLLALAETDERLPEAAREATAMLAAEIQGLDGRIDGLEAKIAAASSPMIRHLDEIPAFGPLIASAMVAFNPDPRAFRSGSDFSASLGLTPSQHSSGGKEKLGHITKAGNRYLRTMLVVGCTSVLRVAHKYKGALAEWIVAMRARKPERVVAVALANKLARIAWAMMATGEAFRKELYFKA

SEQ ID NO: 447527 - protein, 379 aa, unidentified
METSSKTCVAVDTEQATLFVALELSQATWLVGLHSPIADKISINRIDGGDTDKLLALIEKKREQAARQLGRPVRVVSCYEAGRDGFWLHRFLIGHGIDNRVLDSASILVDRRARRAKTDRLDAAALLRVLMALVRGEEQVCRVVQVPSIAQEDERRLSRARARLLHERNSHIARIKGLLALHGVRDYRLVVGVWKERLDAIRTANGHALPARAKTEIERECRRLWLAKEMLAEVEREIEQMIERDSAAAGKLIRVRGIGPTFASVLTHEVFYRSFDNRRQVGSYLGLVSIPWQSGGVRRDQGITRSGNARARRCAIELAWLWLRHQPGSALAGWYRTRIGTMTGRMRRIALVALARKLIVALWRYLQTGTVPEGAVLKA

SEQ ID NO: 447528 - protein, 431 aa, unidentified
MATKRRKRTEDLPVLHPDAAGIDVGASELFVAVPADRDAEPVRSYPTFTRDLHELADWLQRCGIRSVAMESTSVYWIPVYQILEARGIEVFLVNAHYLKNVPGRKSDVSDCQWIQYLHSVGLLRASFRPPGVICAIRSLWRHRESLIEMAAEHVLHIQKALDQMNLQIHRVLNDITGLSGLRILDAILEGKRDPVALARLCHARVKSSRDTVAKALEGDYREEHLFALKQSLESFRYYQRLIGEVNKEIESRLQGLEKSPAAEAKPPARTKKSPYQRRHYEPTSFDLRSELYRILGVDLTEVPGISGVTAHTILCEIGPDTSPFRNASAFASWLGLCPERQISGGKVLFTKSRRVRSRVALALRMAANFTPSRRQLSWGILSTDHQKIGQATGDHGHGSQIGAHCVSSVEHEGGLQGERLRAVRRGSQETG

SEQ ID NO: 447529 - protein, 424 aa, unidentified
MKVTYLTCCGVDVHKSFLVATIVKTNGGIEPSYQKKRFSTFNHSILEFKQWLLENECHDVCMESTGKYWVPAFNLLEDEINVTIANPKWVKAVKGNKDDTKDSKWIGDLFRLGLVKGSYIPCKKIRILREYTRYRYKLVSCRSSEKNRYQNALTVCNVALDSVVSDIFGKSSTSIIDYLLEQADNSINHEEIASKLLRRLKSKEDAVIESIEGYQMTDSQKYRMRLVRAHMDYITAEINDVDSMIESMISSDPDYENAIQFLMTIPGVKRDSAITIISETGIDMSQFCSSKRLCCWAGLVPGSNESGGKKKSVRIARAGVYLKPALVQCAHAAVKSEKSPYYKKKYESLMKRRGKKRAIVAIARMILTAIYQMLSTGEAWNPSDLYKIDMPEALLEKQKTKAIKQAMKLLQREGLYPPPEPIAS

SEQ ID NO: 447530 - protein, 355 aa, unidentified
MDSTKYIGMDVHKETISIAVLNSSGKLVMETIIETKASTLLQFVQGLRGSLHVTFEEGTWAAWLYDLLRPHVTKVVVCDPRKNALLKTGNKSDRIDARKLAELLRSNLLRPVYHGEHGVQTLKELSRSYLTISGDLTRVMTRLKAVYRSWAIPCAGKQVYAPRYRSEWLGKITEAGVRRRAEFYYQQLDALRSLRLQVRRELLAESAKHKASKLLCQTPSIGPIRAAQLIAILQTPHRFRTKRQLWAYGGLGIETHSSADHRYVEGQLRPSKRPVSLRGLNRNHNHELKNIFKGAAIIAATKAGPFQEFYAALVAKGIRPEMARLTLARKIAAITLIVWKKGVCFDAQHLKPQTA

SEQ ID NO: 447531 - protein, 297 aa, unidentified
MDKYIGIDVHSASCTIAVVDAHGKRAGLHVVATNGQKIVECLAVIPGQRHVCFEEGTQSGWLYEVLEPHAVEVVVAGVAGSRGAKDDKRDAFGLAEDLRLGAIKTRVFESGGPFKPLRELARTHRMVVADVVRTKNRIKSAYRSRGVPVAGKSAYSSAGREQWQEQLPEAYRGPLLTLYAELDALEEVRSDAEKALVQEARKFPITKLLATCPGLGAIRAAQLVPIVVSPHRFRTKRQFWSYCGLGIVMRSTSDWLPDPPGTSTSVPVSFGKAKSFRDDDARTRPRSRGCDSLLLLA

SEQ ID NO: 447532 - protein, 341 aa, unidentified
MNKTLFCGVDLHSNNAMYVITDQEDRPVLKKRLPNQLPMVLESLEPFRPQLKVVAVESTYNWYWLVDGLMDHEYPVVLAHPSAIEPYDGIKEADDLTDAAFLARLARLKILPTGYIYPREDRPVRDLLRRRTLLVRQRTAIILSLQNLALRQTGQRMGWRTLRDLSADERTELLGDHDCLAFVTTEQADLIQLLTEKIKRFEKKVLEHARLKPVYACLLTLPGVGVILALTIMLETGDIGRFATVGDYTSYCRCVRATHTSNGKNKGKNNRKNGNAYLAWAFVEAVHESFQTCPQAKRFYDRKRAQRNGALATKALAAKWSKAAYYMMKRQEVFDLTRVFG

SEQ ID NO: 447533 - protein, 355 aa, unidentified
MNDAKYIGLDVHQATISATVLDAEGKLVMEAILETKAETVLQLIHGLRGSLHVTFEEGTSAAWLYTLIKPHVTRVLVCDPRKNALLKVGNKSDRIDAHKLAELLRSNLLRPVFHDDTGLRTLREMARSYLTITKDVTRVMRRLKAIYRSWAIPCGGQEVYSPRHRAEWLGKISEASVRRRAELYYQQLDALVYLHRQAKKELLAEGRKHQATKLLRQIPSIGPIRSVLLVALLQTPHRFRTKRQLWSYSGLALETRNSGEYRFQDGQLKRSKKVFAIRGLNKNHNHDLKNVFKGAAIRAAAIEGPFQKFYEAIVAKGMKPAMARLTLARKIAAITLIVWKKGARFDAEHLKQQAA

SEQ ID NO: 447534 - protein, 440 aa, unidentified
MKSYQALQQKRDFIKDKNIIGVDPAKAKHQVAIIDKDGIQQGKSFYFLNNYQDYNKTLWDKTSIQIPELFPENTVFAIETSCNLWQNLSFFLFSKGYTVLLVSPLTTHQSRSLINHDFSKTDPKDALLVASNAQQGYFDFYKNYSPLINAMHTLSITYYKLNKNLRQNRARLRALIEHVFPEFLSVLQPDTDTALYLLKKYILPQDFADMNITSEAIVISRISRKQHGFNTLVQLKKLACNSIGVNKQLDEIIAIRLSLDAWLILIDTLEKQCHTVMEKLISLAKLTPYFDIISSLKGISDKSAAPFIAEIRDLSLFNHFKQIEKSAGFNLRLSQSGQSSSYKHISHIGNKRLNMIIYKMTEETSKYIPEIRIKFLKRQIKRKNHRKNVTACVPNLLKLIFKLVNDNRFYEEKNKNVQELALLEAQYQKIIKKNNPEIAA

SEQ ID NO: 447535 - protein, 363 aa, unidentified
MSSSAVFSVSDPAALEVILGVDTHRDVHTAAVVSTLGAVLACREFAADAGGYEELLEWALGHGVVRRAGVECTGSYGAGLSRRLQAADIAVVDVNQPDKRARRQGKTDVVDATAAARAVLAGRAEAVAKSGAGEVEAIRILKLSRDSAVHARTKAMNQLKALLVTADPVLRSALHGLGSAVLIRRCAELPLSTADTPAQEATRYALRSLANRIQSLNDEAAETERRIAGLVTNRVPELLARTGVGPDSAAALMVVAGDNADRIRHEGSFAALCGVSPVEASSGNTQRRRLNRGGDRQANAALHRIVITRLRWDSTTQDYMRRRLAEGKTRREIIRCLKRYVAREVFIIIQQAGMPVETAATAA

SEQ ID NO: 447536 - protein, 333 aa, unidentified
MVLTELGAEGRRMAVMLGVDPHKRSHTAVAIDGEDVELDAIEVRASARQVAELLAWAAGFEERTWAVEGAGGVGYLLAQQLVGAGERVLDVPATLAAGVRVLGSGRSNKNDPNDGYSIAVAALHAPRLAVVTGADHASVLRLLAKRNQELSSARTRTACRLHALLVELVPGGITKEITVSRAAQVLASVTPSGPVETTRHELALEHLEDLRRVEEQIRASKRRLTAAVEASATTVSEVFGFGPVGTAIAIGHTRNIGRFPSRDHFAAYNGTGPIEMSSGGRVVHRLSRRGNRQLNTRSISRRSPRSATRTHPAAATTTANSPKERQPKKRSAH

SEQ ID NO: 447537 - protein, 428 aa, unidentified
MKIKIIEGIDQLDNKALDVAFDVSGESLDYSSYCLTERGKELWEGALSNRAGSIKKELLELDALAREKGYPGIRVLCEATGVYHRRLLKVANKLGMKTALISGEAVNMTQVVQSNDYIKSDEKDPKTMLLVSKVGKPLKDRNLSGGWLVMRQLNLEYERNQCDGTRFKNRIRQGLFELFPDLGFKSQWIFESRASIAIAELYGFNPYRIIDAGRSGFTQKLRRRKLRKQTINRLWEYAKQSTIMLEDKGITDCLEDEIRELHAHLQNLLSKRLELRSRMVAELEKLHRKGSVNIDPHAAPIGPFMLARTFAETGPLSDFINSKKLLRYAGLNITCRSSGTFKGQDKIAKKGRARLRRCLQQASLKLVVKGGLYGEYFHAKKASGKSGNQAMVAVSRKLLKMLFGLERSGGVYNAERVFQNQLPLRQAA

SEQ ID NO: 447538 - protein, 346 aa, unidentified
MEHYVGLDVSLKLTSICIVDRTGKVEREGVVASDPEAIATFIKLHATHVVRIGLETGATSTWLWTELNKIGLPVICIDARHAKAVLKMQINKSDRNDAAGIARIMQCGWYKEVCVKDLDSHATKALLVSRALLVKIKRDIENQIRGLLKNLGLVIGRAKMNMFAMRAAQLAEDRSELFAAVDPLLKAREAVEQQIVDLDRKVLRLARNNAQVRRFMTAPGIGPVTALCFLATIDDPARFKRSRSVGAYAGLTTRRYASGEIAWTGRISKCGDKMLRSYLYEAANVLLTRVAKWSALKAWGIRLAKRSGLRKAKVAVARKLAVILHRMWIDGTEFKWSSKDAADQPA

SEQ ID NO: 447539 - protein, 416 aa, unidentified
MEFAAFVGWDWADKKHDLCLVDAVTGKKESSIIKNTPQAIEEWATSIRQRFVGQQVAVCLEQSRGPLIFALLKYDFLVLYPVNPTTLAKYREAFSPSRAKDDPTDAEYASELVMRHRDRLKAWRPEDERTRTLQYLVEHRRRVVADRTRTSNRMTALLKLYFPQVLDWFDDVRTDLVCDFLLTWPTLAEVKRVRRATLEKFFRSHHSISTKANEERFLSIKAAIPLTNDVAVITSSVVMIKVLANQMKVAISAIREFDKRIEELCAAHDDFHLFASLPGSGTVYSSRLLAAFGTRREKYESADEVARFCGVAPVMERSGNSCWIRWRYFCPKFLRQSFVEYAGESTKHSFWARAYYEQQRAKGKSRQAAVRALAFKWIRIIYRCWQTRTEYNEVKYLEGLRKKGSPLLSYAAREAA

SEQ ID NO: 447540 - protein, 413 aa, unidentified
MEVLYPCCCGLDVHKKSITACVLWAEPRGKTRKEKRRFGTFTQELLKLADWLRASGVTHVAMESTGVYWKPVWNILEGQFEKVLLVNAQHIKAVPGRKSDQKDSEWIADLLQHGLLKGSFVPPRGTRELRDLTRYRVSLAQECNRIANRIQKVLEDANIKLAWVASDALGVSGRQMIQAMIGGQQEAGELADMAKGLLRKKIPELKLALEGRVTEHHRFLLHEMLDDLQHVEAKMSKVEVEIERRLRPFQNEVDRLCTIPGVDRVTAWGLISEIDLNMDQFPTSGHLASWAGMCPGSFESAGKRLSGKTRKGSAFLRRHLCQAGWAVSTKRDSYLSALFRRLAARRGNKRATMAVGHAILVIAFHLLKRKERYQDLGVNYFDRKNADSLRRSLVKRLERLGHTVTLSPIAQPA

SEQ ID NO: 447541 - protein, 410 aa, unidentified
MRYYLGVDWADQTHAVWVVEEKGTKTAARTVPHTAEGLSEWGRELDEWRAQGIELWAAIERREGRVVDFLLDHGVVVYPVNPKALDRARDRFRQSGAKSDPFDARVLADFLRTDHTHLQALQPSSEAAQELKLLTEDYQQQIRQQTRLINQLTATLKAYYPRALEIAELPTALAREFLQAYPTPEAVAALTERQWQRWARAHRLSETRTQALWNLLQQPQLSVPAHVVRAKARLMRSLVAQLTLVVAAVAEYREAIEDFFARMPAAQWARTLPIGKHGITAPTLWARLGDAPGRWESFRHLQAHAGAVPVTKRSGKQQRTIQFRFACDKALRYVIDHVAFLSLHSSVWARAYYDQQRARGHTHRQALRALAAKWLKIIFVMWQHQVPYDEQYHLATMTRQQLRHGQKQIA

SEQ ID NO: 447542 - protein, 291 aa, unidentified
MDRYIGIDVSKAMLDIATLPDGESWTITNDDQGLAELLPRLGALAPTLVVLEATGGFELLAALTLAKAGLPVAVVNPRQVRDFARAMGRLAKTDALDAGLLATFAERVRPEPRPLPDEAALHLESLVTRRRQIVDMLTAEKNRLGFARDPVKRDISQHIRWLEKRLADVNGDLQDAVTASPLYHAKAALLRTVPGVGQVTTLTLLATLPELGHLSRHQIAALVGVAPLNRDSGTRRGKRMVWGGRAPVRAALYMATLVGIKHNPVLRSFYDRLRAAGKPFTVAATACMRRR

SEQ ID NO: 447543 - protein, 341 aa, unidentified
MVMIGIDPHKGSHTAVVIDRDERVVDEIRVRTSNGQTGELCEWASGYPDRVWAVESARGMGYLVSQQLVAAGERVIDVPAMMASRVRLLGSGKSQKTDPNDARSVAIAALRHSGLATVQADDHARVLGLLAKRHRDVARMKNKVACRLHALLMELAPGGLASEMTVNKATSLLEQVDVTDQVTHQRVVIATELVDDIVRLEDQMKASKKRIRAAVDASGTTLCDIRGIGPIGAAIILGSVGDITRFPTAGHFASYNATAPIEASSGDRRRHRLNPRGNRKLNHVLHIAAVTQLRYPSSGRDYYQKKLAEGKTTKEAIRALKRRISDVVYRRLLADARRRNI

SEQ ID NO: 447544 - protein, 317 aa, unidentified
MTSKVEGKVVGIDASKKMLDVNVYGEKKVNGWDNDNLGVNQLGERFSQMNIKLIVVEASGGVETRLVSELASRGLPVAIVNPTRVRNFARAAGQLAKTDKIDARMIAEFGAKMAPKPQQLVSEARRKLSALVTRRYQLVTIMTAEKNRLSTTPDSVLDWVTQSLDWLEGQMAAIDQAIDDCIAAEENWQEEAILLETVPGVGPVTAFTLLAELPELGKLNRQEIAALVGVAPFNRDSGPKKGKRRIFGGRASVRRVLYMAALSATRHNPVIHAFYHRLMAAGKLFKVAMTACMRKLLTILNAMMRSGNPWKSPIPCV

SEQ ID NO: 447545 - protein, 326 aa, unidentified
MEQELHFIGIDVSKAKLDVDVLRPDGRHRSKKFANTLKGHNELLHWLNSHNVAPAHICMEATSTYMEDVAAHLSDAGFTVSIINPALGKAFAQSEGLRSKTDAVDARMLAEFCRQKRPAVWEAPHPVERALRALVLRHQSLTDMRTQELNRLETAREVQRPSIDAHLLWLHAEIKRIEKQIKDLTDDDPDMKHRRKLLESIPGIGEKTSAVLLAYVGLKDRFSQARQFAAFAGLTPRQHESGSSVRGMSRMSKSGHVSLRRALYMPAMVAISKTEWGRAFRDRLAGNSKKGKVIIGAMMRKLAHVSYGVLKSGEPFDASRHGVITA

SEQ ID NO: 447546 - protein, 361 aa, unidentified
MDTHKKEHVVALAYADTGEIEVFSVHNTVKEIKKMVKRLQRKAPGPVRFCYEAGVCGFVLKRQIEALGSDCMVIAPSLVPVKQGDRIKTDRRDARKLLGQFLAGQLTEVYPPSLEQEAAREITRCREAAREDLTRARHQLVKFLTRHGYLYRDGNHWTGKHKTWLRSLQFDSSDLEDIFNSYHTQLEPCQQCLVTQTQEVEVLAARPVYKEAVGRLRCLRGVDTLTAITLLTELFEFGRFDSPRKLMAYLGLVPSESSSGEKRRPGAITKTGNRRVRRMLIESAWHYKHRPAVPKALKQRRDGQPQWAIDVADRAMQRLHKRYRRLSERGKMPQKVVVAIARELAGFIWALLNGQPLASGT

SEQ ID NO: 447547 - protein, 427 aa, unidentified
MAYRIAGIDVHKKKLAVVVADVEVHDEYQFERRWFGSNPEQLQQLAEWLIEQRVEEVVMESTAQYWQGVWGALERYWRPTCQKREGAGAMSGKLHLAQALSNRGRRGRKRDFPDAERLVKRLVAQELVLSFVPDPEQRLWRTVTRRKLQMTRLHVRMQNQLESLLEEAHIKLSGFVTDLLGVSARRMLQALADGETDPAALAALADKHLRATPAQLCDALGACTELNPVYRRLIKMALQELQFLEQQMGQLDQEIANLLRPHEDAVKRLAEVPGLGVDSAQQIIAEVGPTVATFPSDKQLCSWVAVCPGDNESGGVNYSHRSPKGNRQMRRILNQAANAAARTKGSIFEIVYRRQVTRMGHNQAIGVIAHRLCQLIWILLHRKVRYEERGPAVTETSKRKRTARMIRQLRALGYRVEALNLQTAASM

SEQ ID NO: 447548 - protein, 323 aa, unidentified
MQGQKSPERSAQPEVYVGVDVCKDWLDVYLHPIGQKFRVANTPEGLKALKRRIAELPVELIVMEATGKFHRQAHRTLHAAGFAVAVVNPLRARLFAEAAGQLAKTDRLDARVLALMGQALEPSAIAPAPEAVEALQELARARSAAKADQTALSNRRGASQTAFLKAELGRRLKTLAGHIERLDAEIQRRIGVDPALKRRFDILLTIPGVGPVAALALVIGLPELGACSAKAASLLAGLAPLACDSGQKAGERHIKGGRAFVRTGLYLAAIAAARFNPQLRDDYNRLRDAGKKAKVAITAIMRKLVVLANVLIKEDRPWKPFHA

SEQ ID NO: 447549 - protein, 410 aa, unidentified
MSLFCGIDWATEHHDVAVIDDDGYVVVRGRVSNDAAGFAQLLTLLAQAGDSAADPIPVGIETDRGLWVAALRETSRVIYPINPLAASRYRARYAVSGAKSDATDAVLLANIVRTDPGAHRPLPADTELAQVIRVLARAQQDAVWARQQIGNQIRDLLKDFYPAAIAAFADLPEGGLARRDARTILTAAPTPAEAAHLTPARLRRLLIKAGRKRYLDRDVDRLRDVFTGTYLHQLPQVEAAMGIQLTALLRQFDAACTAADDLAQAAIAHFEKHPDAEIITSFPGLGNLAGARVLAEIGDDRTRFADARGLKAFAGSAPITRASGKKTVVLHRHIKNRRLAAVGPIWALGSLRASPGARRHYDTRRATGDWNHQAQRHLFNKFLGQLHHCLQTGHRFDEHLVSCTWNSLKI

SEQ ID NO: 447550 - protein, 460 aa, unidentified
MNRKKTKSKVDRTMPMVHPNAAAIDVGATMHMAAVRADRALEPVRSFGTFTADLDQLVDWFTECGVETVVMESTSVYWIPIFELLDARGFAVLLVNARDAKHVPGRKTDVSDAQWLQRLHSFGLLRASFRPKGHIAELRAYVRQRERLLEYAASHIQHMQKALTEMNLQLHHVVADITGATGLCIIRAILAGERDPEALACLRHYSCHSSAETIAKALTGSYRAEHLFALDQALALYDAYHEKASACDVRIEAVLKELSIHRGRDHGSTPPASRRRNRTDQANALAFDVRAALFGLLGKDVTTIDGLGPYLSLKLIAECGDDLSSWPSAKHFTSWLGLAPSNKVSGGKTLSSRTRRSGGRAAALLRLAAVTVGRTDTALGAFYRRLSSRIGKAKAVTATARKIAVLFYNAVRHGMDYVDPGASSYETRYRTRVINNLHRRAKAFGFVLQPLEPKAGAAVS

SEQ ID NO: 447551 - protein, 403 aa, unidentified
MHAVGIDVSKGKSMVAVMRPFGEVVASPFEVTHTDSELSKLAEMLKSLNGETKVVMECTGAYHIPIAFTLRNAGLFVSTVNAQLIHGYGNNTIRKAKTDKADAIKIANYGITNWLELPEYSPELDIRQMLKAFSRQYSKYTKLKTMLKNNLISLLDQTFPGVNELFKSPPRKSDGHEKWLDFACSFWHCECVCSLTPKAFYERYRKWCKRSGYNFSQAKAEDIYADSCGHVFVMPKTDTTKLLITHAITQVNAVAESIAVMAREMHNFAKKLPEYDIVMGFRGVGEVLGSQLMAEIGDIYRFPKKSSLVRFAGLEPVNNQSGDYDGKRPISKQGSPHLRKTLFQVMDCLLKHAPADDPVFQFLDRKRSEHKPYRSYMSAGSAKLLRIYYSRVKQFLDTYYDEM

SEQ ID NO: 447552 - protein, 360 aa, unidentified
MDVVVSRCAGIDIGKTEVVVCLRVPGTRRKRVSEVRTFRAFTGEIVRLAAWLTEHRVTHVVMEATGQYWKPVWDVLAECGFELMLVNARHVKIVPGRKTDVADAAWLAELLEHGLLRGSFVPPRVIRELRDLTRYRKRLVQTHTSEGQRIAKILEDAGIKLDSVISHLLGVSGRAMLRSLIAGQRDADQLAELARGRLRTKIPALTAALEGRFHQHHAVTIALALDHFEYLERMVVRLDERIDELMVEHAVARDRLDTIPGVGKRAAEVIIAEIGADMNVFPTAGHLASWARLCPGNNITGGKRKSGSTGGGTAGYAKHSWNVRGRHPGRRTPIWRPSSGGSRGGSGRRKPRSRSGIRSW

SEQ ID NO: 447553 - protein, 416 aa, unidentified
MKIVRPICCGMDVHKNIIVATIGITNKKTRITEYIQETFSTLNPDLLNLKQWLINHKCFDACMESTGKYWIPIFNILEDEINIYLTHPKYVKAIKGKKTDKKDSKWICDLFKHDLIKFSFIPPKEIRALREISRYRYKLVGMRSSERNRYQNCMTVSNIGIGSVFSDPFGKSAQAIMKEVLESDIIEDEKILKCVHGLCKNKDKILDSIKHCNIETDQRFKMNESMTHMEELQVHIDNCEIEMMKRAAPMFDQFMHITQLPGISTLSAILIISEIGVDMKQFESDKQLTCWAGLAPANNESANKKKSVRISKAGQYLKPLLVQCALGAIKDKEGYFGIKYSRIKKRRGHKKAIIAIARMMLVSIYHMILTGETFNPSDYESFKNPKPPIKQQVLTEESAIEFLKKSGFDVSKLTKP

SEQ ID NO: 447554 - protein, 305 aa, unidentified
MSSTSAPTTIATIGIDLGKNSFHLVGLDRRGAIVLQLKLSRGQLERRLANVPRCLIGMDACPGSHHIGRRLTELGHDVRLIPAQYVKPFLKGHKNDYRDAEAIAEAVQRPTMKFVATKTAEQLDLQALRRVRERLVGQRTGAINQIRAFLLERGVTVRQGLRFLRAELPTILATRSDVLSSRMLRLIVDLAGDWRRLDARVEAISGEIEELARKDQACERLMTVPGIGPIISSAIVAAIGTGDAFSKGRDFGAWLGLVPKQISTEDRTILGGISLPDVGEGCQQGHSNRRFCADQAGQDDTERVV

SEQ ID NO: 447555 - protein, 329 aa, unidentified
MKILALDLGKFKSVYCFGIDDQPPIYGKTATEGRSIHDLLVKLGPDRLVIEIGPSAGWVHDLAVALGLAVQTVNPNDERWHWKRVKEKSDRKDAFKMYELSRRGDLPLMPMPDAHTRQWRSLIRYRSNLVDRRTSVKNSIRAIFQMQGKLLPKADQAWTIEGLKQINRESNDKPPADQLWRLQLHSELVCLQSLEQQIDQITAQLDVLGKSDPRVQRLQTAPCVGPRLSETVVAAIGDPRRFKNARQVGCYAGLTPRRWQSGNSDRQGHISRAGNRYLRRALYMPALVAARRDPHLRAFYQVLLARHKAKLQALWIQKCHLPLGRHHSI

SEQ ID NO: 447556 - protein, 363 aa, unidentified
MDSVYYVGLDVHKKTISYCVKLADGRIVKEGGVATKRRELRPWVEQLPKPWHGALEATLFSDWIYDFLLPHARALQVANPAMLKAITAAKKKNDRVDARMIADLLRCNLLPACYTAPAALRELRRLLRFRNLMVTQAVRMKNRTSGLLMEVGAEYSKEKLHQKGYFRDLLDTVEDVPDSVIDLLKMSRGATEMFETAQHRLVQGLLRHPRLQQRVERLQTIDGVGEILALTWALEVGEPERFRSVPRACSYCGLTSAQVNSAGKEQRGPISKQRNAHLQSMLVEAAKVAPRWNPTLAAVHERECARGNRNRATLAVARKLVAYLLAVDRSGKPFRPAAVEEERPSSEIQERRALPIAAVAAVW

SEQ ID NO: 447557 - protein, 350 aa, unidentified
MSEIIRIGIDTSKSVFVLHGVDGTERPALRKKLRRRDLVGFLAKLKPTRIGIEACGAAHHWGRTFQALGHEAVLLPTQLVKPYIARNKNDSADAEGICEAMSRPRMRFVPIKTAEQQAAQMLIGLRDRLVRQRTQVSNAIRGYAAEFGLVAAKGLDKIEPLLARIADAPDLPDLAKELFALHSQEYVQLKVRLRQIEAKLMAWHRHNELSRRLAEIPAIGPIGACALAIKVTDPGAFRCGRDFAAWLGLTPKDHSTAGKQRLGAITRAGDEMLRSVLVVGATAVIQQARRQRGKATPWLIDLIKRKPPKLAAVALANKTARIAWKLMVSGERYDPHHQGRGRLDEGNGQT

SEQ ID NO: 447558 - protein, 425 aa, unidentified
MNYKQNEKINQVKESTLVVGIDIGSTTQYARAFDWRGIELGKVFPFSNSREGFESFKAWMQHLQDKYKKLDAIVGIEPTGHYWFDLGAYLEDEGILLVMVNPYAVKQTKELDDNSQSKNDRKDPKVIAKLVTEGRYSAPYTPDGVYADLRIMVTNRKRLIREMTQIKNRFARWFAIYFPEYTDVFGDYEAQSSMLLLKKVCTPEAIVELGAEKINQIWRDAKLRAVGMKRATTLCETAKRSIGLKKGSSAAQYEMKLLLEDYEYKKAQLDAVMEEIEKLCRKIPESEQMLAIKGIGVITVAGFLAEVGDVRRFESPRQIQKLAGLSLRENSSGKHKGQTSISKRGRSKLRAVLFNAAIPLIAKNPEFKSLHEYYTTRANNPLKKKQSVIAISCKLIRVFYAILANGVTYDAQKMLSDIHRQPQAA

SEQ ID NO: 447559 - protein, 344 aa, unidentified
MTYYTGIDVSLRSVSICVVNDKGEVCFEAKVAAEIATIVECLHRFDRDVKSVGFEAGTLTQYLTYGLQAAGFEVVCLEARQVSVTLAAMRNKTDRNDARGIAQILRTGWYSHVHVKSLHSHQVRALLASRKVILKKCVDLENELRGLLKVFGIRLPSRVGHGAFDTELRETVSGDEMLACALVPLLDARTVLYKTYLKLDNAVKALVRVDPICQRLMSIPGIGPVTALTFKAAVDDPSRFKSSRTVAAHFGLTPRRFQSGELDNPGHISRAGDADVRSALYVAAHSLLTRNAQWSTLKAWGVGIAKVRGHRRAVVAVARKLAVILHRMWIDGSEFRWGLAPASA

SEQ ID NO: 447560 - protein, 335 aa, unidentified
MEFTYFIGIDVSKNDLDFAVRQNKDQLFHKKISNSPAAINSLLKELGKLPKFTPGQAVFCLEHTGIYSNHLLSVLFKKGYFICLEGALQIRNSLGNIRGKNDKIDAIRISEYAYKNRDQLRLWQPKRELVIRLSQLSATRSRLLEAQKVLTTPLKESNEFIPYKLAKENAGVCENTIKAIKNDLVKVDKAIKEIIASDQELSRLFHLIISVDGIGKATATQIIITTNEFKSINKPEKFACYAGVVPFPKESGLFKGRARLSHLANKKMKTLLHMAALSAVRYNHDMKAYYERKVVQENKNKMSTLNAVRNKLIQRIFACVNNNRCYEKNYQRLVA

SEQ ID NO: 447561 - protein, 392 aa, unidentified
MDSPPPRHHSATVAFKEANGSEGETMKKHTTKHDSLLSTDVDLCQNLCVDLAKQVFQLVGDDGTGRVIYEARLKSRQAFHELLIKLPTTVSVLMESGPGAQAWARMLQAKGNPVRILPAQRVAEHRSGAKNDRNDAHAILRAGRDSSIASVPIKSTLSLAIQALHRVRRGNIKRHTAMGNQIRGLLLEHGVALAQGDAAIRQRVPRILEDASLPLPDMLRELLDELLNEWLYLGERIAVLSGRLEAAAREDKVAQRLTTIRGVGPIIATAIVAKQTEPSRFASGRMYSAYFGIVPDQHSSGNKIRLGKMSKRGDGYIRSLMIQGAHAVLNHLKPDSDQPDDRRLLHWLSRLGRKEAAIRLANRNLRIIWSLLQSDQVYQRQPNSRPEAAMSL

SEQ ID NO: 447562 - protein, 416 aa, unidentified
MNAVGIDVSSRKSTVAVLRPLGEVVCLPFDVTHDIAVLASLAEKLKAIDGETRVVMEHTGRYYEAVAKALHEAGFFVCAVNPLLIKEYGANSLRRVKTDKADAIKIARYALDNWADLRDFTPMDAIRYDLKTLNRQFQLASKQRTAFANNLIALLEQSFPGIRKCFDSPVRSDGTQKWVDFAHSFWHVDCVRKQPFPAFCERYRKWCKLHAYFFKLRNAEKVYALAKSAVVLTPKSKVVKVLVQEAANQLISISRSVEVYRAEMDRLAAMLPEYPVVMAMYGVGKSYGPQLMAEIGDVRRFERKQALVAFAGIDPMPNQSGDKNVRSNKSSKRGSPYLHKTLFNVIRTYLQCAPQDEPVFQFLNRKRAEGKPFYVYMLAAANKFLRRYYAKLRDYFASLDTLQPVAPIPTILKAAL

SEQ ID NO: 447563 - protein, 350 aa, unidentified
MVLKGVPMALKIVYQICCGIDVHKTFVVACIASTNKQGVTTYKRHRFSTFTQGLKELLQWLLDNHCKDVCMESTGKYWIPIYNVLEKDCNIVLAHPKYVKAIRGKKTDKKDAKWIADLFKHDLVAGSFMPPADIRQLRDLMRYRFKLTCFMSSEKNRLQNCLTVSNIQLASVVSDTFGKSSQRILDKILENPDDTSFDIEPLIHGSMKKKLPELELAIDGFITPEQAGKLKVIKKHFEDLESRKAELEKLILALASPYQQELDLILTAPSFKNKFTAIGIISEIGVNMEAFPSAKHLCSWAGLTPTNNESAGKKKSVRVSKAGCYIKPVSGFRRECGIDTGNDSIYAGAE

SEQ ID NO: 447564 - protein, 346 aa, unidentified
MDQIIRIGMDTSKHIFQLHGVDAAERPVLRRRLRRNEVLAFFAKLPPTVIGMEACGAAHYWARELRKLGHEVKLMAPQHVKAYVKRNKNDGRDAEGLCEAMSRPTMQFVPVKTEEQQAALMLAGVRQQLIARRTQLSNAIRGYAAEFGLTAAKGLDKIEPLLARIAQDESLPALAREMFAIEGREYAQLQVKLKAIEAKLMAWHRANAASRRLAQIPGVGPIGATALVMKAPDPGAFPSGRHFAAWLGLTPKDHSTAGKTRLGKITRAGDEVLRSLLVAGATAVIQQVRHGRGHPSPWLVALVKRKPPKLAAVALANKIARIAWKLMTTGESYDGVRMPGASAAAA

SEQ ID NO: 447565 - protein, 360 aa, unidentified
MEVGQTVADHGVVGGVDTHKDLHVAAVVDALDRVLESRCFATTRHGYKQMLTWMRSFGQLRRIGVEATGTYGAGLLRYMQNAGVEVLEVTTPDTHDRRKRGKNDDLDAQNAAHAAFAGRRTVTPKSRDGMVESLRVLKACRKTAVAARRVALQMIHNTIVCAPDELRETLRRMTRMQLIRTLAAWRPDLTDYRSVVSAYRITLKSLGRRYLELHDEIADLDTMIVAIVDELAPALVARNSIGHGSAAQLLVTAGENAERLQSEASFAALCGASPVPASSGKTTRHRLNRGGDRAANSALHIIAIGRLRTDPRTKAYIAKRVAEGHSKLEAIRCLKRYIAREVFSLISQRKREINQGRNAA

SEQ ID NO: 447566 - protein, 354 aa, unidentified
MRFYSQPHRFYCGIDLHARTMYLCILDHDGNIVFDHNLACNPKAFLHAIAPFRDGIVVGVECMFGWYWLADVCRQEQIPFVLGHALYMKAIHGGKAKNDRIDAGKIARLLRGGTFPLSYVYPKGMRETRDLLRRRMYLVHQRGALTTHVQILNSQCNLPPFSKKLSFAGNRAELKIAERFSDPSVRKNVELDLDLIDKLDELIGATELYLTRTVKVDDTQSYYRLRSIAGVGPILALVLLYELHDVARFEHVGQFLSYARLVRCAHESAGKKLGSGSKKIGNAHLRWAFGEAACLFLRASERARKWKQKQEKKRGPAKALAILAAKLGRAVYHMLRKKEAFDEERFWNTATAVV

SEQ ID NO: 447567 - protein, 341 aa, unidentified
MQTITTIGFDIAKSVFQVHGVDASGEVVIRRQLKRRYVLAFFQKLPPCLIGIEACASSHYWSRELQALGHTVRLMPPAYVKPYVKRQKNDAADAEAICEAVTRATMRFVPTKTPEQQSCLMLHRTRHLFIRQQTAVINSIRAHLAEFGIVAPVGRKGVMELLHVVADPGDKRVPEVARACLAALGTQLLRLKQQILEFDRMIMAWHRSNQTSKRLHYIPGVGPMLATALVASVADPRTFRSGRNFSAWVGLVPQQHSSGGKDRLGGISKQGDRYIRSLFVALAVIRYAKIHGTKHRPWLTALLGRRPTKVAAIALANKIARMAWAMMAKGERYKQPVALAA

SEQ ID NO: 447568 - protein, 359 aa, unidentified
MQEKISEKTFEGQSIYVGIDVHKKDWKVTIMTAELSYKTFSAVPIAEKLNAYLRSNFPGATYYSAYEAGFSGFWLHKELTNLGINSIVVNPADIPTTDKERKQKEDLRDSRKIADNLRAGQLKRIYVPKEPVLHDRMLLRSRHALVKDLNRSKNRIKSMLFFLGINLPDRFSSRGSGWSKPLVKWLEELSFEYPSAKGSLDAHLGQVRHLRSSVLKVTRQIKELAKTKEYQQNVTLLISMPGIGLLTAMTLLTELEDISRFETFENLCSYVGLVPSTSSSGDNEIDTGITPRKNARLRSALIESAWVAIRNDPALLSSYQHLIKRMPGNRAIVRIAKKLLRRLTYVLRNKSCYERGIVK

SEQ ID NO: 447569 - protein, 337 aa, unidentified
MSTIHILGIDLGKHCFHAIGNNYSGKEVIRRKFNRSQLLHFLSVLEHTTIAFEACGGAHWLARKCQALGHRVRLIPPQYVKPYVKGNKNDFIDAAAIAEAASRPTMRFVSVKSEEAQVISAIHRVREGYVKERTSCMSRIGAVLLEFGLSFPRGHAKMKALFQWLAEQDVELPQSLIAELLSIHEHYKYLNDRVSEQDQKLKSIAISNESAELLKTIPGVGDLTATLCVANISSASNFDGGREMAAWLGLVPRQFSTGGKSKLLGMSKRGNKHLRTLFIHGARAVLSRIESTGKVFGDWLVNLRATKPFNVVLVALANKLARIAWAVLYHRQAFRAA

SEQ ID NO: 447570 - protein, 400 aa, unidentified
MNRTRTVAGLDVHKDSIYLCIMGYDQAIIWENTYGVLTPDLREMHHDMRAHGVTEAAMESTAVYWVPVWTELCESMELRLVNPYFIKQLPGRKSDVKDARWIAECLLKNLIKGSFVPEPIVQDMRKLNRRIMDLCEDTTYNSNKLDAALQRCGFRLSNYVATTKSKSYRSVLKAIIDGQTDPDELLRLVHGRIINKHGRERVKAALTGSFSETDLIVLRQLKETLDLIEKQTADCQQELVRLCKEHYPKPYERLQTIPGVKERAATAIIAETGVDMKMFATAASLVGWCGLKPRNDVSNGRFKSRKVTHGNRYLRQILIEIAWAASRTRNCFFSHFSYLQTTVKKKNKMKIQVAIARKILVALWHMLSKEEDFIDIYLKRQEELKRTEGQIKLLESYMAD

SEQ ID NO: 447571 - protein, 424 aa, unidentified
MNHTQNDRLKQVTSDTLIVGVDVGSQTHFCRAFDWRGVELSRRVFKFSNTGMGFLIFLRWTEELMNKTEMKKVIVGCEPTGCYWLTFQKFLQDHDIQLVTVNPFTVNRSMELDDNSPEKSDLKDPKTIALLVKDGRFSTSYLPSGVYAEIREASVCRDQIMKQHVRLSNQIQGWLQKFFPEYFECYADWDSTSGLMLLKEAPLPQDILKIGAGGINQIWRDAKVRAAGIKRAQTLVEAAQNSVGLEAGEAARLEIWVLVNDYILKAEQLRRLDEYLEEKVKEVPNVEKLLAMKGVGPSTVIGFIAEVGDIGRFTDPKQIQKLAGLEIVKKSSGKKKGQPRISKRGRRKLRRTMYESARALINWNPAFQDVFLYYRNRQRNPLGGMQAKIAVACKAIRVFYVVLQTGCDFDEEKFRKDIIRPEVA

SEQ ID NO: 447572 - protein, 465 aa, unidentified
MKHAHRRHRRTPTPHSSLLERINPNAAGIDCGAEEHYVAVPPDREAAPVRSFTTFTTDLHRLADWLTACGITTVAMESTGVYWIPLYEILEARGLDVVLVNARQVKNVPGRKTDVMDCQWLQELHSVGLLRGSFRPTAAIAALRAYLRHRETLVQSAATHVQRMQKALLQMNLQLSTVISDITGVTGLRIVRDIIAGQTDPRALAQHRDARCQASEARIMAALTGHYRPEHVFVLQQNLELFDAYQRQLAACDAAIEAHVHTLATEAPAPAAPLPGPRTRKKPRDNEPRFDIRTPLHQLTGVDLTQIDAIGPYSALRLLAEIGTDMSRWPTEKHFTSWLTLAPHNKITGGRLLSSATLPSANRAAGILRMAAMSLSRTETALGAFYRRLALRVGKAKAITATARKLAILVYRTLKDGLVYRDPGAAAYDAHHRQRVIRRLRQRAAHLGLALVNRETGELIEGAVS

SEQ ID NO: 447573 - protein, 327 aa, unidentified
MPSTTVSERVVIAVDPHKASWTAAAVGSALAPLATLRTPVSRQGYRQLRRFAARWPDAEWAIEGATGLGAPLATWLSGDGIEAVDVPAKLATRVRMLSTGHGRKNDDADAVSVGIAALTAPGLRSAVVEDAIITLRAVVEHRDDIVRTRTQTVNRLHVLLTGLLPGGAPRQLDADTAARLLRTVRPRATGPATLRRLAAELIGEVRHLDRRIATASTQISDAVTASGTTLTQLRGIGDLTAGKIIGRVGDITRFRSPAAFASYTGTAPIEVSSGDVVRHRLSRAGDRQLNYCLHVAAITQLNTTAPAGTTTCANAPAGKATRKPCGV

SEQ ID NO: 447574 - protein, 411 aa, unidentified
MEKVYDKCCGIDVHKKLIVACFKNGSKQEIRDFGATTRELLEMADWLKEGGCEMVAMESTASYWKPLYNILETCELKAMVVNARHMKAVPGRKTDVKDAEWIADLLQHGLLTASYIPDKDQRELRELVRYRKSLVGERNRELNRLQKMLEGANIKISGTITDINGKSARNILEHILTGRQIDSAEYDILYEKKIIAHNLKATKEQIIDDLNGVMSELQRKMMRILLDHLDELNAHIKELDDDIDSFMKPEEKKAASVIQDIPGIGNTSAQAIISVIGTDMERFPTDAHISSWAGLCPGNNESAHKRKSGKTTKGNALLRDTLVVCAHSAVKNKNSYFSAQFARISAHRGKKRAYVAVAHSMLVAIYHILKDGVVFKDLGADYYNQFNKERKINAYLKKLKALGWEAPVVAA

SEQ ID NO: 447575 - protein, 343 aa, unidentified
MVSSVVGGVDTHADVHVAAALDQNGGLLGIESFPVNEAGYRRLAEWLAGFGPVVKVGVEGTGSYGVGLARHLHANGIEVVEVDRPNRQKRRKLGKSDPIDAEAAARAALSGEANVTPKRRDGTVEQMRVLMIARGSARMQRNQTLNQLRQIVICGPDEIRTRFKDRYKTGLVTEAAAMRPRKGSDPITYTTYVVIRSLARRIKDLNDEMRSIDQALTELIGATAPSLLECYGVGAATAATLLVAAGDNPDRLHTERSWAHLCGVSPVPAGSGKTSGRVRLNHGGDRQANAALYQIVLTRMSSDAETRNYVRRRRAEGLSTREIMRCLKRYVARQTFKHLPRAA

SEQ ID NO: 447576 - protein, 340 aa, unidentified
MGEVSTIGVDLAKNIFQVHGADASGAIVFRRKLRRHDVLGFFAAQPRCVVAMEACGGAHYWGREIDRLGHEVKLIAPAYVKPFVKRQKNDVADAEAICEAAQRPTMRFVQVKSDEQQASAAVFRVRDLLVRQRTQLINALRGQLAEYGLVADGPSHVTKLIDRLRDRESGVPSSARLALELLVTMLETLRNKIAELDLEVGRRAKEDQAARQLMTIPGIGPVTATALVALAPDASSFRCGRDFAAWLGLTPRQHSTGGKQKLGATSKMGERTLRRLLIIGASAVVRQARRRGVAEDTWLSRMLVRKPPMLVMVALANKMARTVWALLARGEVYKAPTAAA

SEQ ID NO: 447577 - protein, 371 aa, unidentified
MAESNRTLYVGLDVHKDSITVAYAPDDRGAEVISLGAIGSRQCDIDKLIRKLQAKGATLVFVYEAGPCGYWLYRYLTRRGLVCHVVAPSLIPRKAGDRVKTDRRDAITLARLMRSGDLSSIYVPQVEDEALRDLSRGRDDAMQDLKRSKRRLKSFLLRQDIRYEGRANWNAAHLRWLSEVVCPTPPQQIVFQEYVRAVTEQQERLQRLERELHEAVKGWRLYPVVEAIQALRGVELTGAVILMTELGDITRFDTPRQLMSYLGLTPSEYSSGARRRQGGITKAGNSHARRALVEGAWAYRYPAKVSRHLQLRLEKLPAEVQAIGWKAQVRLCKRYRQLTARGKHVNQVVVAIAREMAAFAWAIARIVPLAA

SEQ ID NO: 447578 - protein, 321 aa, unidentified
MQANQMFVGVDVAKATLVICVHGVSGKRTVANDARSIQSWLKTLPEQAVVATESTGRYHALLARLVHRSGRNAYVLNARDVHLYAQGLGARCKSDRVDAQIIARYVAEHHAELHAWAPGSHAQELVQALVQRRARIADHRAAVRQLLHGFKPLQPQLRQLEARFDALLAQLDRQVDEQIAREPPMADGRTRLRTITGFGPQGSALLAVLMSRLRFANADALVAYSGLDPRAKDSGTKRGRRRLSKRGSAAVRRQMYLAAFSAARSKALGALYRSIKARGFAPTEALVILARKLLRIAWAVWKSGKPFDRTRLTAPVTCAQL

SEQ ID NO: 447579 - protein, 391 aa, unidentified
MLICGIDIGKNNHEASVIDQNGRLLAKSLRFANSTSGADGLLEYISRCNPEKDVVVIGMEATGHYWLSLYCFLFDAGLQVNVINPIQSDAIRNLFLRKTKNDSKDSFLIAETIRIGRFSKTELADEDILSMRQLCRHRMDLVDYIADQKRKIIGVMDRVFPEYQTFFTNMFGKTSTELLAKAVTPEELLAIPTDELCDLLKSNSRGRFGEAKAEEMRQAAKTSFGITIGTAAFSMQLRQLLEMIELLERQLVELETEIEQYLTKLNTPITSCPGVGNVLGAVILSEIGDISRFSEPKKLVAFVGIDPSVKQSGEFTGTQNKMSKRGSPHLRRAIWLAANVAAFHDPVLSAFYQKKRAEGKHHYTAIGAVARKLTFIIYAVLRDNKPYVPNC

SEQ ID NO: 447580 - protein, 410 aa, unidentified
MDTLIERCAGLDVHKDSVTACVRLPAAGGGREQVLATFATTTADLLALRDWLGALGVTVVGMEATGVYWKPVYYVLEERVQCWLLNARHLHNVPGKKTDTLDAVWICQLVEHGLVRPSFVPPPAIRELRNLTRYRKAQIEERTREAQRLDKVLQDAGVKLSSVASHLLGVSGRAMLQALVEGTRDPATLAELARGTLRKKLPALREALHGRFSRHHALLVGAILTKLDFLDEVISNLSAEIEQVIAPFAAEVALLDTIPGVDRRTAEAIVAEIGVDMSRFGSAARLASWSGFCPGNNESAGRRGPGTTRKGSKWLRTHVVEAAKAASRTKQTYLAAQYARLRPRRGTGRATVAVGHSILVAAFYILDRHQPYRDLGPDYFRRRHSREHHARRLARQLQALGYRVTLEEAA

SEQ ID NO: 447581 - protein, 344 aa, unidentified
MKITTVGIDLAKNVFQLHAVDERGKAVLRKQLRREQITPFFANLAPCLIGMEACASAHHWGRVLQRLGHSVRLMAPQFVKPYVKTNKNDVADAEAICEAVSRPSMRFVPIKSVEQQAILCVHRVRQGFVKARTAQGNQIRGLLGEFGLIIPQGISHIAERVPALLEDASNELPAALRQLIEHLTAHLKELDRQVKEFERQIIAWHRSSELSQRLEKIPGIGPLAASALVASIADAHSFDNGRQVSAWLGLVPRQCSSGGKSTLLGMSKRGDAYLRTLLIHGARSAILAAQRKSRNTNVWLTNLLNRRHPNIAAVALANKNVRTVWAMLAHDREFKANYASAIAA

SEQ ID NO: 447582 - protein, 430 aa, unidentified
MKSNTQNAKIKAITEKTLVLGIDIGSETHYARAFDYRGIEYSKKPFKFSNTETGFEAFKEWILDLKEKHEKDNVVPGMEPTGHYWFNLGKFLQDNEMKPVLVNPHHVKKSKELDDNNPTKNDRKDPKVIAGLVREGRYMIPYLPDGVYADLRTASNIRFQLQAELTRIQNRISRWFNIYFPEYKTVYGKPDAKSGMLILKKAPLPEDILTLGIEGVNQIWRDAKMRAVGKARAKTLIEAAEHSVGSKEGAISARLEIRMLLEDYESKSMRLQEVMTLIEELVGKIPMAEKLLEIKGVGIKTVSGFLAEVGDISRFTNPKELQKLAGLALVENSSGKHKGDTRISRRGRKRLRYLLFEAAMSLVSKNSEFRKLHEYYTTRRLNPLKKMQSLMAIAAKLIRVFYAILTKGVIYEPMKMVSDIKRPAVYLQAA

SEQ ID NO: 447583 - protein, 338 aa, unidentified
MKYKRIAIDISKHVFTLHGVDEQERPVLRRNLKRADVEPFFGKLAATDVVMEACGGAHHWGRVLSRLGHRVRLIPAQYVKPFVKRAKNDRADAEAISTAASLPSMSSVALKTADQQAAAMVLKHREMLLSSRTQAINALRGHATEFGVIAAKGTAQVQTLLDKLAADETIPPTAQAMFVQMGAHIDALDQQIAALDDELLALHKAHPVSQLLTEVPGIGPISAITLALTVQPEHFTSGRHFAAWLGLTPKEHSTGGKPRLGKISKAGNERLRSLLVVGATSVIRHARPGKPSASAWLLALIQRKPRKLAAVALANKTARIVWAMMSRGEAYRRQPMAA

SEQ ID NO: 447584 - protein, 334 aa, unidentified
MENIALIGIDLGKNSFHIHCQDRRGKAVYRKKFTRPKLIEFLATCPATTIAMEACGGSHFMARKLEELGHSPKLISPQFVRPFVKSNKNDFVDAEAICEAASRPSMRFVQPRTESQQAIRALHRVRESLVQDKVKTTNQMHAFLLEFGISVPRGAAVISRLSTILEDNSLPLYLSQLLLKLQQHYHYLVEQIKDLESQLKRKLDEDEVGQRLLSIPCVGTLTASTISTEIGDGKQYASSRDFAAATGLVPRQYSTGGRTTLLGISKRGNKKIRTLLVQCARVFIQKLEHQSGKLADWVRDLLCRKSNFVVTCALANKLARIAWALTARQQTYVA

SEQ ID NO: 447585 - protein, 333 aa, unidentified
MKNYDLFIGIDVSKLKLDITGIDQDNAIYLKHCVIKNDAKEIKKYFRKMLKNQVRPMIVGFENTGVYSALIAFVLQELGIDYCQLPSLEISRSRGISRGKNDRIDALKIAQYLLSHRFKISLSTVTEIHLTEMRLLYTHREKIIKSISQYEKEFENTDFLPREIQKEILKSTNSILKSLHANLKKIEDRLGVILKEHAAMEKNFKLITSIPGIGKQTALYLMIVTKNFTAFKEARQVACYAGVAPFPYQSGSSINGRTKVNNLADKKLKSLLNMCALSANKYDIELKEYFQRKVGEGKNKMLVLNNIRNKLLTRVFAVINRQEPYVNLRKYAA

SEQ ID NO: 447586 - protein, 338 aa, unidentified
MKYTVFGMDIAKQIIQLHTVHPETGEVERHKLKRSQVLEFFVRREPALIAIEACGGAHWWARKLVEQGHEVRLLHPKSVRPFVLRNKTDAADARAIWTAVQQPEAHEVAIKTEVQQSVLALHRMRAQLMKFRIMQTNALRGLLYEFGVVLPQGHTALLKALPETLGALDAQLPAILLDSLCEQWARVQQMQVEIDHIERRLAFVLRDTTQCQQIAEIPGVGLLTATAAVATMGEAASFKSGREFAAWAGLVPKQRGTGGQVRQLGLSKRGDVYLRTLLMHGARSIVIRHRNVPWIAALLARRPYNVAVAAVANKLARTIWAVLAKGRPYDPAAFSAVA

SEQ ID NO: 447587 - protein, 335 aa, unidentified
MKHYAGLDLSMETTHVCVVDADGHKIGAQCIDSTPGAIARALEQYGPIERTVIETGRMTPSIALGRRELGVPIVCIDARQAHQSLKAMKANKTDPHDAAGLAQLARTGFYKEVHVKSPAAHGVRSVITARGHLVEARVRLDNTIRGLCATFGIRLGVGQGERFLARMQVAASVPGLGEAVASLLRARERLVVEIGQLDRQLKAISTASPVCQALMSIPGVGVQTSAAFAAAVDDASRFKRSRTAGAYFGLVPRRHQSGELDWTGRITKQGDSTVRKLLYEAANSILTRTKQSFALKSWALKIAKRRGLRKARVALARRLAVIMHAMLRDGTLFEA

SEQ ID NO: 447588 - protein, 324 aa, unidentified
MAKRITVCAGIDTGKRKLDVAIDGSCEQMQVENTADGHKVLWEWLQRHKVKRIGIEASGGYEQPVVAALRRKRFVVIVFQPAQVRAYAKFHLQRAKNDRIDAALIAACTAAVKKIHPAPDPRLSPFAEQLTMIDQIGEDIMKLKNRIETCRNERIRAAWKEDIARLAKRERSELKALVAAIRQYPDLAERLELIYSVGGAGMPTAVAILVRMPEIGQLSREQVAALAGLAPYDDDSGDQMGARHIDGGRERLRRALYLAALPASFRWNPQLIALYQRLRAAGKEHKRALIACARKLLIFVNTVVARGTPWQGEPPAARANPLIA

SEQ ID NO: 447589 - protein, 312 aa, unidentified
MNRVICGVDVSKDWLDAFVRPSGVFERFSNDAAGIGALAALCRVEGVELVVMEASGGYERSAFLLLWELGIACALANPRHVRRFAEAMGFLEKTDRIDAAMIAHYAEARRLSALPPPKAAQLRLSALMTRLSQVTSDLTVQRQRRSAARDQQSVASLDEVIALLVRQSRALEGEIASMIDDDPLWACLNQAFRSIKGVADRTVARLMAELPEIGRISNKAIVKLAGLAPIANDSGKRSGPRPVRGGRSGPRGILFLVAATAARYDPHLAAFRQRLQSAGKPKMVIRIALARKLLVILNAKARDARREFECAT

SEQ ID NO: 447590 - protein, 339 aa, unidentified
MKYIPVGVDIAKHLIQVHFINEHTGEVVDKQLRSKDFLTFFSNREPCLIGMEACGGSQHWARELEKLGHKVRLMQGRFVKAFVMGNKNDVMDARAIWMAVQQPGKEIAVKTEEQQSVLVLHRSRRQLVKFRTAQINALHGTLLEFGETIHKGRAAMDRELPATLERMRVKLPPYLIALLEDHYNRLSELDSLIDGIEKQLISVARQNETCKRLMEIPGVGPLIATAAAATMGEASAFKSGREFAAYVGLVPKQTGSGGKVRLLGISKRGDTYLRTLFIHGARAAALLAKEPSPWITELKKRRPTSVAIVAMANKLARTVWAIAAHDRKYDKNHVSIRPY

SEQ ID NO: 447591 - protein, 340 aa, unidentified
MTQVVTIGLDIAKSVFQLHGVDAAGAVLLRKRLPRSRMLAFFEKQAPCLIGIEACGSAHYWGRELSRFGHDVRLIPPSYVKPYVKRQKNDAADAEAICEAVTRPSMRFVPIKAPEQQSMMVAHRTRSILTRQRTQLSNAIRGQMSEFGLVAPVGRNGLEMLIVIINDATDARVPPTARGSLLMLIAQLRLVNEQILESDRCIIASARSTEVGRRLMEIPGVGPVLASALVGTIADPTSFSSGRNLAAWIGLVPRQNSSGGKERLSGITKQGDRYLRQLLVVGAVAVIRHAQRNGARRPWLVQLLARRTPKVAAVALANKNARMVWAIMTSGERYREPLAA

SEQ ID NO: 447592 - protein, 422 aa, unidentified
MLEETQDREEIIERVAALDIGKAELVCCVRVPGPPGKSRRVQEVTTYKTMTRALLVMVDRLRELGVTRVVMEATSDYWKPPFYLLEAAGFETWLVNAKDVKHLPGRPKTDRLDAVWLCKVAERQMLRPSFVPPPPIRVLRDLTRYRWDQVAVRTAEKQRVEKLLEDAQIKLSVVASDVFGVSGRDMLAALIAGQRDPKVLAQFARGRMRGKITDLEEAFTGRFSDHHAFLLTKMLDRIDRGSADIADLDERIDAEIAPFAQEVVRLDEIPGVGHTAACVIIAEVGIDMSRFPTAAHLCSWARFAPGIKESAGRKKGNGATGHGNRYLARVLGEAAVSAGKTDTFLGERYRRIARRRGKKKAIVAVGRSILVIVWHLLNDPEARFHDLGSDFYGTRLGTQRATRTHVRRLQELGYRVTLEPAA

SEQ ID NO: 447593 - protein, 375 aa, unidentified
MNNHSEAFVAFDSSKLRNAVAIAECGRTGEIRFLGEIENTGTATAKLVRKLAAKYDRLTFCYEAGPTGYERYRQIKSLGHECIVVAPSLIPKKPGDRVKTNRRDAVSLAKLLRAGDLTAVWVPDRHHEAIRDLTRARDTAVMDLRSKRQQVSAFLLSHGLHYSQGKKTWTKAHLNWLTSMKLEYPEQRFVFEEMMLAMRQACERIERLEQALRAAVSDWSLSEVVTALMAMRGMDLISATTFLAEIGDLSRFQTPRELMAYLGLVPSEDSTGDTIKRGPITKSGNRRARRMLVECAWSYQHPPRVGKDKQAKVAAAPRAVREIAWKAQSRLNRRYRALIRRGKLKTVAITAVAREFAGFIWAVAREANTVRAAAR

SEQ ID NO: 447594 - protein, 345 aa, unidentified
MEHFAGLDVSVKDTSVCIVDETGEIVREVKVASEPEALLAVLKSPAYHFKRLGLEAGPLSQWLFSALAEADLPVICVETRHMRAVLKAQINKTDRNDARGIAQMMRVGLYRPVHVKTLRSQKLRMLLTHRKLLQSKAIAIDNDLRATLRNFGLKVGLVGAVRFEARIRELVEDLPDLAALVEPLLIVRQALREQFGILHRRLLAAVRNDEVCRRLMTVPGVGPVVALTYRATVDVPVRFRKSKSVGAVFGLTPARDQSGERDCMGTISRCGDEMMRTALYEGAQVMLTHSAKWSWLKAWAMQIARRRGMKKAIVALARRLAVIMHRIWVDGTDFRWTREELAKAA

SEQ ID NO: 447595 - protein, 423 aa, unidentified
MNNPTLCVGADIHLDEIVLCAVDQADGHEVIPRFRVTNNLPGAEAAAAALAEAASSGGYAHLQIGWEATGMLWIPFHRFLAACPHLHPFALDFTCFNPQLVTSFKDGLVLRKPKSDERDALDVAARLRFGELPISYLPTDFWQGLRRLTRYRYRLAQNLGREKMRFQSYAFLKCSDWKRVKPFSDVFGAASAALLTEFTAGELRVMTHDQLVDVISHRGRSRFYDPDATARAVQQALRSSYPIDPQMDEMVTATLATAWEHIRAIKRLMNRLDKLIARHIDSIPNPLITVKGLGNVITAGIMAEIVDITRFPKHPQLAQYVGLTWQKRSSGRFVSQNTRLSKVGNPYLRYYLVLGADRLRQFNLEYKAFYWRKYSEASKYQHKRALVLTARKLVRLVHALLTKNVPYVRPQMQHTLMEDDLLQ

SEQ ID NO: 447596 - protein, 324 aa, unidentified
MQEYYSGIDISKDKFDFSILINSKYIHRVFKNNRTGFSELRKFLLENKVNKLIIGLESTGSYHIDLSNFMYDNNHNVYVLNPKRVKDFIKSMGYNTKTDSIDSKAILDFIEFNHKKNTVNLYVKPSNDEAMLKAYLKIRSNLIQEKTRESNRMESLHNQVKELKEFYRNKINYIKKELLKIDKKIKILMSKNKTYLEKQEKLTEIKGVGFVTVMTVLSVLPELGYLSKNQITSLVGLAPHPRESGNLSRKRFTKKGRSNVKSVLYMAAMSAQRHNKDLKIFYNRLVKNGKPKKVALVAVMRKLLVTMNAIMKTYIKENPKIGVI

SEQ ID NO: 447597 - protein, 466 aa, unidentified
MGWLPNRLPTTVAWLDNDVPACRALAVAWLERGATALIDLELGMPATGPPPELERKGQSMAAVMIGVDPHKGSHTAVVIGQAEMALDQVKVRACAAQVQRLLAWAAAWPERTWAIEGAGGLGHLLAQQLVAAGERVLDVQPKLAARVRLLAAGDVNKNDPNDARSVAVAALRSAACPPVRAEDHATVLKVWAKRHRDLSRSRNQVVCRLHAVLCELVPGGVSKQIYAAAAARILDQIEPAGAVQAARRELAGEFLADLRRIDAQRRDIRKKLTAAVRASGTTVTEVFGVGPAVAAAVIGDVRDISRFPGRDRFAAYNGTAPAEVSSGNRKVYRLSLRGNRRLNHAIHMAAVTQIRYGHTKGRAYYDKKIAEGKTAKEALRALKRQVSDAIYQHLKADARRAAAGPGGHPGNGSVASAAGSHPEHRLFGPATPGPESTLRPRPGPSKATRPGSSRRTRRSVPSHTSA

SEQ ID NO: 447598 - protein, 325 aa, unidentified
MNQSGRVLKKKKLKRYQVLSYFSQLEPSIVVMEACGSCHYWCRELTKAGHEVKAIAPQYVVAYRKGNKHDYNDAEAIAEASQREGMRFVPFKSQEQQDIQLMHRIRERMIAQQTALSNQIRGSLAEYGIVYARGVATVVKELPFTLEEADNGLSMLARQLFQGLFNDLLVLRERIKEMDKELKAFAQNHPVCERLMSMTGIGPLIATALYAGIGQGQAFNSGRHLAAWLGIVPKQHTTGDNPRLLGISKRGNTYLRTQMINGARAALRHIGDKTDKVSQWCRACLARMSFNKACVALANKMARMAWAMLHHQQDYLPGQINKAAV

SEQ ID NO: 447599 - protein, 410 aa, unidentified
MEVLYTVCCGLDVHKASVTACLRAPGDGPQRRQEVRTFGTTTRELLRLADWLSAAGCTHVAMESTGIYWRPVYNLLEGRFELSLVNAQHVKMVPGRKTDVRDSEWLARLLELGLLRRSFVPPAAPRELRDVVRYRKRLIEERAREANRVQKVLETANIKRGSVVTTVLGVSARAMLKALITGEGAPEQLADLAKRRLRRKRAALGEALTGRVTAHHRFLLDQLLRHIEFLDGAIAVCDRQVETRTAPDADALARLDTIPGVARRPAEVIAAELGCDMSRFPTAGDAASRTGLGPGNRESAGKRLSGRTRHANRTLRQALVESARGAVRKRDSYLAAQYRRLVKRRGDKKAIVAVAHSILVIAYHLLRDGTSYRELGGDYFERLNADRLTRYHTKRLAALGYAVTLTKCAA

SEQ ID NO: 447600 - protein, 409 aa, unidentified
MLFVGDDWAEAHHDIEIQDEQGRRLARRRLPEGVVGIGQLHALIAEHLSGDAEPAEVIVGIETDRGTWVQALVAAGYQVYPINPMSAARYRERHVTSGAKSDPGDAKVLADLVRTDRAHHRAVAAGSQLAEAIKVLARTHQSLIWTRQRHANMLRAALREVYPGALVAFPELADRDALAVLSVAPTSAHGRTLSQSKIAATLRRAGRRRNIEAGATEIQSALRAPQLEAAPMLAEAAGHTVRALVEVMATLTAQIERLEGELNASFSHHPDAEILLSQPGLGPILAPRVLAEFGDDHTRYANPKDRKNYAGTSPITKASGTRRAVLTRYAVNKRLRDALYMQAFASLRTSPGARAYYTARRNSGATHHQALRALGNRLVGILHGCLRHRTTYSEAIAWHAQPQDQKVAA

SEQ ID NO: 447601 - protein, 310 aa, unidentified
MEQVFVGIDVSKDRLDVHVLPGGPAFAVARDGEGLAALVARLGALAPYLVVLEATGGFEQTVAAALVAAAIPLAVVNPRQIRDFARATGKLAKTDALDAAAIALFAERVRPEPRPVQDEQARALGELVARRRQVIEMMTAERNRRRQLTSRRLIKSVDRLLAVLLKELADLDRDLGEGIRGTPAWRERDELLRSVPGVGDVVARTLIADLPELGQLDRKQIAALVGVAPLNRDSGKMRAKRTTWGGRAKVRSALYMAALVASRHNPVLAAFYQRLVSAGKARKLAITAVMRKLLTILNAMLRDKTTWQNA

SEQ ID NO: 447602 - protein, 385 aa, unidentified
MQANATKAPTAIRVDLAAIFVSLELSRSKWLVTSLSPGGGERMSRHLVSGGDIPGLLDHFAELQRKAEVRTGQSFRVISIQEAGLDGFWIHRVLEREGIESYVVDPASIATSRRRRRAKTDRIDGEALVRALLAYNRGEPRVCAMLRVPTPEEEDRRRLVRERKALTNERIRHVNRIKGLLFSQGVSGYEPLKSDRRKCLDALITGDGRPLPPALMAQISRELDRIELLIQQIKEVEEARDALLVAADEPTPALLLSLKGIGPEFAAVLWSEGLSRKFDNRRQVAAYAGLVPTPWQSGQINCEQGVSKSGNPRLRSTLVQVAWLWVRHQPNSALSQWFRARVIQNGGRYKKTAIIALARKLLVALWKYVNAGVVIEGALLTKPSA

SEQ ID NO: 447603 - protein, 371 aa, unidentified
MQKKALYVGLDVHKASISTTVAEDGRDGAVRFIGAIPSTPFDIAKLAKRLSKDGGRLEFCYEAGGCGYGIYRQLLSLGHSCMVVAPSLIPRKPGERIKTDRRDSEKLARQHRAGDLTSVWVPDPVYEAIRDLVRAHMDAAAQLTRARQQCLAFLLRHGRIYGPNRKNWTLRHRRWLGLQTFEQAPHQIVFQDYVEAVWAAQDRRDQLEARIAAMLPDWSMAPLVEALRAMRGLDTISAVIFLASIGDLARFETPRQLMAYLGLVPSEQSSGTSVWRGGTTKAGSSEARRMLVEAAWSYRYPPRLASEKVLVVERQEKPVRDIAWKAQVRLCGLYRKLSATGKKPTVVVTAIARELCGFIWAIGQEVAPAPS

SEQ ID NO: 447604 - protein, 343 aa, unidentified
MQTITTIGLDIAKSVFQVHGVDAGGQVVIRRQLKRRSVLAFFQKLPSCLVGIEACASSHHWSRELQALGHTVRLMPPAYVKPYVKRQKNDMADAEAICEAVARANMRFVPTKTPEQQSCLMLHRTRHLFIRQQTAVINSIRAHLAEFGIVAPVGRKGVTELLGIVADPSDKRVSEVARACLAALGTQLLSLKEQIVEFDRMILAWHRSNQTSKRLHYIPGVGPMLATALVASVADPSTFRSARNFSAWIGLVPKQHSSGGKERLGSISKQGDRYLRSLFVAGALAVIRYAKIHGTGHRPWLTALLARKPTKVAAIALANKIARMAWAIMTKGERYKEPIALAR

SEQ ID NO: 447605 - protein, 343 aa, unidentified
MKVTTIGIDLAKNVIQVHGMDERGKTVLKKQLKRDQVAAFFANLPACLIGMEACGSAHHWARKLESFGHSVKLMAPQFVKPYVKTNKNDAADAEAICEAVSRPNMRFVPIKNGEQQAVLALHRARQGFVKARTAQANQIRGLLSEYGIVIPQGIGHIAKRLPDILEDGENNLPGPFRQLLNRLGEHLKELDRQVGELEVQIQRGHRENEASKKLAKIPGIGPITASALVASIGDAKSFDNGRQLAAWLGLVPRQHSSGGKPTLLGISKRGDSYLRTLLIHGARAVIRVVERKADGPDAWLRGLLGRRNKNVAAVALANKNARTAWALLAHERDYQPGYEPAVV

SEQ ID NO: 447606 - protein, 341 aa, unidentified
MKILLKQTVGIDVAQKELVVSLGRMDEQISIEVYAYKVFPNTKKGFSSLVLWVNKQTLTTTEVRYVMEATGVYHESLAYYLCSVQKQVSIVLPNKISNYVRTLDIRTITDKSASQAIARFGLERQLEVWQPPLKIFNDLRQLCREREQLVQERTMLKNQLHAECTSAKSSEKSVKRTNKRIALIDRQEKEIREEIAKLIRGDEVLVEKMKIISSILGVGNLTAVTIIAETNGFELIKNKRQLVSYAGLDVREKTSGTSVKSKPRISKRGNRNLRKVMHFPALAAIRTNERFRDIFLRLVSRHGIKMKAIVAIQRKILELTFILWKNNSYYNSEYAYQILPS

SEQ ID NO: 447607 - protein, 353 aa, unidentified
MKYYTSTTEFNCGIDLHARQMYVCVLDRTGKKLVHTNIRHNDFAYFLKLVAPYRHDLTVCAECMFGWYWLADACAAAGIHFVLAHALYLKAIHGGKNKNDRIDSEKICHLLRTNLIPPGYVYPAAKRPLRALLRQRLLYVWNRSELLSRIQSHQLAYNRPTTRQTLYNREPWEKHLLASEPDPVRQLALQNDLALIGHYDAQLTSLEKELLHLTKQTASRDFTLLKTTPGIGDYLGLTILHEIGDIARFPSVKDFLSYCRLVKGTVASAGKIKGLRGAKLGNPYLRWAFGEAAIIAKRDALLGPLAQRLEARLANKFKANTVLAIKLARAVYFMLKTKTVFDPERLVAALSHN

SEQ ID NO: 447608 - protein, 341 aa, unidentified
MSIAGAFDVHRRQLTFDYLDTVTGEVKRGRIAPADREHLREWLARFAGCDDVHFALEGCTGWRYVTEELAAARVTPHLAEPADTAALRGRKRHAKTDKTDSRHLRVHLAAGDLPECWIPPAQVLEARAIVRLYKDLLDERGGWHQRIAATLFHQGVPVTASMSTAPGRAAVAGMALSPAGLQAVETGLRQVGRLTAELEPLRRQLDMISRRQSGCRALRATQFGVGAVTSVAIWAELGDVRRFGNSDDVIRHTGLDITVYSSDGKRSAGHLSRQGPQLLRWALYEAAKCAARPGAPDHGYYAATRDRRTGGLATLPVARKLARRCYHTLRELGEEAMRPAA

SEQ ID NO: 447609 - protein, 437 aa, unidentified
MITLRSRDTQEIESAMRKLVIHCNLFSEVFVMLNAVGIDVSKGRSTVAVLQPGGVVLHRPFDVFHNTKDLHNLARYLVSLDGETRVVMESTGRYHEPIRNVLSEAGLFVCAVNPHLIKNFGNNTLRKVKTDSADAKKIASYTLDNWATLREYSVMDTTRTELKTIHSQFNFFMKQKTSAKSNLIALLDETYPDVNKLFSSPIRSDGSEKWVDFAYSFWHVNCVLDAGLKTFTERYQRFCKRHHYEYQPNKPVQIYEQAKRLVPAVPKDPIYKELIQDSIQQLNLISQHVEQLRKKMDELASALPEYDTVRAMYGVGPSLGPQLIAEIGDVTRFTHREALTAFAGVDPSKNDSGQVVHKSGRASKRGSARLRKTLYQIMSVMLKLGPRDDDPVSQFLFKKKSEGKPYLVYMTAGANKFLRVYYGKVKECLRNQAAQET

SEQ ID NO: 447610 - protein, 343 aa, unidentified
MQVSTIGVDLAKNVFQVHGVDNAGKVVITRQLRRKQVIDFFSKIPACLVGMEACGTAHHWAREISKLGHTVRLMPPSYVKGYVKRSKNDAADAAAICEAVTRPSMRFVPIKSADQQALLMLHRTRDLLIRQRTQLINALRAHLAEFGLIAEMGREGLAQLAAIITDENNREALPLAMKQALQAIVDQLAALELQIGALDRAIHAHHRANDMSCRLETIPGIGVIGATAIASTVTDPSNFKSGRDFAAWIGLVPRQHSTGGKQRLGGISKQGDRYLRRLLVNGATSVVRNARQHPQKHPWIMRLLAKKPAKLVAVAVANKMARIAWAIMAKGGYYRAPELAVAA

SEQ ID NO: 447611 - protein, 347 aa, unidentified
MNKPVTTPTATVFCGIDVSAATLAVAVIEQDQPFQQREFANRASGHKALIGWLAKRKAQVRVSLEATGIYSLDLALALDAAPQLEVAVLNPKMVNHFAQTLRRSKTDTADAQVLAEYSRRMPFTAWQPPSLNGLRLRVVGRHIAALVAQHTREQNRLHAVAGSQAASRCVLQDLKRSLVSLQQRIVKMRRAARELIRADAQIEQRFRLLTSMPGIAETSAVQILGELVLLAPQLTVRQWVAHSGLDPVHQDSGTSVHKRSRISRCGNRHLRRALYMPALSAVRWDPHMKAFYEALQLRHKTKLQAIIAVARKLLHAIYGIFKCRTPYDGSKLFPQLILTTELQSASR

SEQ ID NO: 447612 - protein, 316 aa, unidentified
MSGTLYVGIDVAKDSFDVASNPAGLKLSLPNDPTGRQQLLDTLQNHPVALIVLEATGGYERSLVADLLGAGHKVVVANPRQVRDFARGIGQLAKTDRIDAHVLARFASMVKPQPRQKPSEQAVNLAELVTRRRQLSDLMTQESNRLPMARHAKVRKSLQKVIRLLEQQISDLDQLIRDNIDSDDGLRRTDEIVQSFKGVGPGTSAMLLSHLPELGRLNRQQIAALAGLAPWDFKSGKWAGKSRIWGGRMPVRNMLYMAALSAIRSNEIIRKFYQRLESQGKKFKVAITACMRKILVILNTLVRNDCLWSPPLPKNA

SEQ ID NO: 447613 - protein, 316 aa, unidentified
MEAPQPFIGIDVSAQRLDVDMLPTSHPFSEPNTDDGISSLVLRLQALKPEIILLEATGGYEVHAAYALCDAGLPVVVMNPKALRHFAKAIGRLAKTDKLDAQVLALYAQSIRPPVRPLKEPEQLELANLMTRRRQLQGMIVMEENRRRTSTPKVRGNVERSLAHLRQLLKDLDRDTQDFIRRTPLWHNKAAKLKEVTGIGPVVSSELIAHLPELGTISHKKIAALAGVAPMNRDSGQWRGQRRIQGGRPAVRRALYMAALVASRHNPVIRAFYQRLRLAGKPAKVALTACMRKLLVILNAMLKHRTHWNQQLPLAA

SEQ ID NO: 447614 - protein, 363 aa, unidentified
MPTEAPSRLYAGLDLHKSNVFCGLIDQEGKPIYRRRLAAELPTILQALEAYRPQLKAIAVESTFNWYWLVDGLQAADYPVHLANPAAMEQYSGLKQTDDETDALWLAEMLRLGILPEGYIYPKAERPVRDMLRRRMLIVRQATQTLLSLQSMVTRHTGGSVSAAQLSGWTQPEVRATFADAYSQQTAAAMVELLGEQRRIQHRLEKQALAVVKPTEPFQRLQTLPGIGPILGLTIALETGPITRFASAGDYASYCRTVTSRCESAGKKKGQNNRKNGNEYLAWAYVEAANFAQRYSPRARVWFARKTARTHRVVAVKALACKLAKAAYYVLRDGVNFDENKLFGTVAGGGRKPGKGLAHNPTD

SEQ ID NO: 447615 - protein, 371 aa, unidentified
MGKYIMVGCDLHDASMLLKVAVDRQESQKLYFDNDPEGRQRMIAELKKRKKAAKADRICFAYEASGLGFTLYDELTEAGIPCFVLAPSRMERSVKQRRNKTDDKDAERLLKELRGHLLGGNELPAIWVPDPQTRDDRLVVRARLNVGQKRTGVKTQIRSLLKLHDVPGSSRTPGGRTKAYRVWLQDLSDCEKALPWGARIALKTLLAQLAALDQELARLDEAVRQMSEFPRYAEAVRELTKLTGVGILMAMVFLTEMGDLSRFPNREAIGAYLGLAPSADESGEQEDHKGHITGHGSGRVRYMLCQITWVRKRLDPATKERYERIAARNPKHKKIATVAMMRQLAVVLWHIGLEAQRRAGVFAKGTAAAAA

SEQ ID NO: 447616 - protein, 417 aa, unidentified
MNKLFVGLDVSKNDYKVRILDDEGETLTKFRLLNNGDDSSKLVEVIVSNCIKLNIDKVFVGYESTSVYGWHLQYFLADSKDLAPFHPSIICFDPSVITSAKTTLGDLPKTDDIDAYAIAERLRFGRLPKSELVDFRYLALQRLTRHRFHIIQSIIREKSYYLSNLFLKCSGLCQSNVFSNNFGAAATSIVDELDNWENVAEMSLEELALFLMDKGNEHFADADKTAKKLQKAISSSYRLAPEVDNSLNFVLRSCLDNLKSLESQKKAIDKAIKSEVEYLNNEYTCLTSVKGIGPVISAGLIAEIAGVYRFENDNSLAKFAGIYWNSYQSADFSAEETNLRKRGNKYLRYYFVQAADQLRKYLPEYSDYYSRKYKESKKHHHKRALILTARKVVRLVFALLHDNKLYSPNYKGVDPAN

SEQ ID NO: 447617 - protein, 340 aa, unidentified
MKTITIGIDLAKSVFQVHGVDAAGLITVRKKLRRAEVLTFFASLEPCLVGMEACATAHFWARELSRLGHEVRLMPPSYVKAYLRRQKNDAADAEAICEAVMRPSMRFVPVKSAERQGVLVLHRTRELLVRQRTMLINAIRGHCAEFGMIAPQGARRSAELIGQVQAADAAVLPDLARSALLRLADQLDALAIEIHALERQLMAWHRQDEASQRLATIPGVGIITATALAASVTDPSLFRSGREFAAFLGLVPRQNSSGGKDRLGRISKMGDGYLRKLLVVGATSVIRRAADNASATGAWVRSLMERKPSRVVTVAMANKTARIAWAVLSRREDYRAPAMI

SEQ ID NO: 447618 - protein, 400 aa, unidentified
MISVGIDISKGKSTVCIMKPYGEVIRTPYEIKHTEKDLSDLADIILDFDEESRVTLEATGAYHLPVLSYLKQKGIFVAVINPLMMKKYSSLTLRKGKTDKIDSIKISNYGIDNWFHLNDYCVSDVLYDELNTLCRQYNQYVAIKIKCKINLANLLDKTMPGITNLLRNNDYIGKYKLNSFVKEYWHYDNITKKSENQFIQSYLKWAKREGYHANEAKAKSIYTLAKESITTLSSQMKSTKMLVIEATRVFKEVEKTIRMILLQMQELAKKLDEYNVVRAMPGVGDVLAPRLIGSIGDIRRFHNGKALIAYAGIDAPPFESGNFKGTRQKISKRGSAYLRKTGYEIMTSLNAIKPIEDSVVYDYMLKKESEGKAKKVAKIAGLNKFLRIYYARVKEVYSKV

SEQ ID NO: 447619 - protein, 386 aa, unidentified
MKTVAGLDVHKDSVYLCILRENGEKIERVYGVLTPQLDSMRDFMAKNKVSEVAMESTSVYWIPIWRVLVDSFELKLVNPYFIRQLPGRKSDVKDAQWIAECVMKELIRGSFIPSPLVQRLRLYDRRIFEINAELVRKYSKIDAILQRCNIRLSNYVSNTDCKSYKAVVKQISEGVTSPQELLRHVHKRIINKHGEDTILAALTGVVSDSEIDMLAQYVAESAILEDNKNKCIEKMREICNSEFKEQMKNLQEIPGVSERSALTVLAEIGPDVNAFPSAKHLVSWCGFNPRNDESNKKIKSNKITHGNRFIRIASVQCAWAASRTKDCYFSKFYAFHTQVRKKFKLKVVVAVARKVLVCIWHILKFNVPYKDFEPQKSVTKDCTQFA

SEQ ID NO: 447620 - protein, 411 aa, unidentified
MDVVHPICAGMDVHKDDVKVCLVWRDAQGGRQQEIRTYATTTGALLTLSDWLTQARCPIVAMESTGVYWKPIYNLLEDAFTVWLVNPAHLKHVEGRKTDPRDAAWLAKLLEHGLLQPSYIPPRAIRDLREVTRYRRKLVQERASQVNRIQKVLEDANIKLASVASNVTGVSARQMLAALLEGTQTPAQMAELAQTRLRAKRAELTAALEGRFRPHHARLLRQMLEHLDHLDEAIAECDTLVEELLRPFQTQVQALTTIPGVAQRAAEDIVAEVGVDMTVFPSHKHLCSWAGWCPGDHESGGKRKSGKTRKGNKYLRAILVQGAQAVGRSKKSYAGARFQRLAKRKGKQRAAVAVAHDLLEAVYFILRDGVVYQDLGADYFDKLQREYLVRYYKTRLQDLGYAVIPAVPVAA

SEQ ID NO: 447621 - protein, 333 aa, unidentified
MDTETGELGEQRLIHPKEAEQFYGELKERNIAVRVGMEASGHARWFERLLRQLQFELWIGDAAEIRTKRVRKQKTDRQDAQLLLRLIMEDRFPRIWVADAENRDLRQLLWHRHRLVQMRTRVMNQLHVVALNEGLRRRKALWRPGGRKELELIALAPWAGRRRQDLLDLFDQLTPKIQELTRALEQEVEKRPVTRRLMTHPGVGPLTALAYELVIGTPERFHNGKQIASYVGLVPEEKSSGDRRRLGHISKQGNALLRFLLVEAAQVTIRSQAQWRSKFFHLAMRRGRKIAKVAMARKLAVHLYWMWRQGWDYGQFKRFGSYAGEPGHPDGKQ

SEQ ID NO: 447622 - protein, 418 aa, unidentified
MEVLHERCAGLDVHKKTVVACVRLARDGGVEKEVRTFKTTTADLLALGEWLDGHDVNHVVMEATGVYWKPVWHLLDDGDRELVLANAAHVKNLPGHKSDVSDCDWLSDLEAHGLIRGSFVPTRQTQELRGLLRTRKQKVRERSSNTLRLQKTLEEANIKLDSVISNVIGVSGRRMIEAMIGGETDPVALAALADRRIKAPPEVLCEALRGRVTGHHRFLLGLQLEHIDALDGMIDKIDQQIDASVEPFRAAAGLLTTISGVNQLAGRAIVSEIGIDMSRFETAGHLISWAGLCPRNDESAGKRRSTRIRKGAPWLKDILVQCAWAATRTKATYLHAQFVRIRSRRGPKKAIIAVAASILTAAYHMLKNGVPYRDLGPQHFHSRNKQAQAKRLLARLRDLGFTAEFDSLKPIPDAVVSY

SEQ ID NO: 447623 - protein, 422 aa, unidentified
MTSVVEWKEEGMEVLVERCAGLDVHKDTVQACVRVPGSDGRETHQHEFGTTTRELLALRDWLSAQGVTLVGMESTGVYWKPVYYILEDAFECHLLNARHLRNVPGRKTDVKDAAWICQLVEHGLVRPSFVPPKPFRELRNLTRYRKTQIEEHTREAQRLDKILQDAGVKLSSVASDICGASGRAMLAALVEGTRDAAVLAELAKGQLRRKIPALRDALEGRFGHHHSLIVSSILAHLEFLDEAIDRLSEEIGEAIAPFGLAVEMLRTIPGVDRRTAEVLVAEVGVDMDRFGSPERLASWAGLCPGNNESAGKRYSGRTRKGSKWLRAALTQSAKAAARTKDTYFAAQYARLKGRRGYGRRHRRRRPLDPGGRLPRPRPGNPIPRTRRRSLPAPPRPRPPGHQAHPATQYPRVSRHLDPIQAA

SEQ ID NO: 447624 - protein, 339 aa, unidentified
MNTTTVGLDLAKNVFHVVCLNEHNKEVRKKMLRRNQVRQFFAQLPVCTVAMEACATSHYWGRELIALGHEVKLIPPQQVKPMVQGNKNDYNDALAIAETVNRPKTTFVAVKTVEEHDIQAIHRMRSQCIRDRTALSNSTRGLLGEYGISFSKGLATLRKKIPELLEDADNGLSFRFRNLLARRYDQLVELDEHIAFYTKELEILSRQDEACQRLQTIPGFGPIVASAFRSTVGDGSAYARGRHAAASLGLVPRQHSSGGNNLLLGISKRGDRYLRKLLVHGARTVVRHAVDRDDPFSRWINRVSERRGKNRAAVAVANKLARVGWAVLRYNTEYDPAMA

SEQ ID NO: 447625 - protein, 338 aa, unidentified
MSVYVGIDVHRKRSQIAVLDEEGAVRINRNVSNGVGTVLGVIGDLPIGTPVAFEAAYGWGWLVEMLEDYGYQPHLVHPLRCKAIASARLKNDKVDAATLGRLLRADLLPEAWIAPLDVRQQRALLRHRFQLVRLRTLLRNRIHAVLADGGHDRAGGFATAPGRAWLAALDLPDASRRVVDDLLMLIDAIQVPIDALDAQLAAHARGDPRVKTLTALPGVGTLTALVIIAEVGDVTRFPSARKLASWTGLTPTVRASDLTVHHGHISKQGDTWLRWIMCEAAQTAKRHPDFADTYQAIAARRGKKIATTAIARKLLTRAYHLLQAAEHDHPRGRKRATR

SEQ ID NO: 447626 - protein, 376 aa, unidentified
MKDCIYLGLDVHASTIAAWVVYENGKERSLGTIPNQRKSVGRLLKKLGSLERIRAVYEAGPTGYHLYWMLSSLGVSCAVAAPSLIPRRAGDKVKTDRRDARQLARYHRSGDLSYVWIPDEGHEALRDLVRAREAAKRDERRARQRVKSLLLRQGVYKPQGLRSWTTSYKEWLKGLKFGVEALDRTLEDYVHEVDHQELRLARVEAAIGEAVEQAPEPFREVVRALQSLRGVRKTTAIGVAAEVGAFSRFRHPRELMGYSGAVPSEHSTGGPGKAKRGSITKTGNALLRRLVVESAWSYRHRPALRGDLKKRQQAQRAEVVEIAWRAQVRLCGRYRRMSARGKPKQKVVTAIARELLGFMWNIGTEVERQVPPKVVA

SEQ ID NO: 447627 - protein, 339 aa, unidentified
MKLYGGIDLHSNNSYIVLMDSGGTVVQRSRVGNDMGLVLRSLAPYREQIDSLVVESTYNWYWLVDGLKAAGYRVKLANPSAMQQYQGLKYSDDRSDARWLAEMLRLGIVPTGYIYPQAQRPLRDLLRQRSFLVRQGTGQLLHTGNILCRNQGRKSSRQQIRQMTVAAAQQLFPDRERTLAVESSLRVIEILEQQIAVIEKQVLSRIKPEAGFQNLQTVYGIGPILAMTIWLETGDIGRFHQVGDYASYCRCVASTRLSNAKKKGENNSHNGNPYLAWAYVEAATYAARFYRQAARFVERKTAQVNRTLAIKALAHKLARACYYVLRDGVVFEPTRLLGS

SEQ ID NO: 447628 - protein, 358 aa, unidentified
MDYYAGIDVSLELASVCIVDANGKIVKETKVESCPDALVAFFNDLRLPMAQIGLEAGPLSQWLHAGLTQAGFETVLLETRHVKAALSAMTVKTDRKDARGIAQLLRMGWFRPVHPKSVRSQEVRALLVARKLLQNKLKDVELSIRGILRGFGLKVGEVTRKKFESRIRQLVTGHAMLERIADAMLSAREGLLIQFNKLDKSVRQIARYDKVCLQLMTVPSVGPLTAITYKSAIDDPQRIKKSKSAGPLFGLTPRKYQSGETDVTGGITRVGDEMVRTALYEAANSLLSPKTRFSALKRWGLEVAQRRGLKRAKVAVARKLAVILHRMWVDGTPFRWSKADGAHTDPSRAKTSGSGSCR

SEQ ID NO: 447629 - protein, 387 aa, unidentified
MGQVIIGVDPHKRSATVEVIDQRERVLGKGRYSTDTDGYRAMLTAGRTHPDRMWAVEGCNGIGRHVAQRLLADGETVLDVPAKLSARARVFATGQGRKTDPVDAHSVAVAALRTPGLRRVEIDDTTVALRLLVDRRDQLGRARTELVSRLHHLLLELVPGGAKKDLSAQQARALLNTVRPRDVVGKTRRWLASELIHELVVIDKKIKVAKQELTDLVAATGSGLMNLHGIGSSGAARLLGDIGDIARFPSRAHFASWNGTAPIDASSGNQDRHRLSRAGNRRINRALHIMAIVQLRHDTEGRRYYRRKLAAGKTSMEALRALKRRLSDLVYRQMLADTEQAGTGPGGHVGATLTSSAADPNPKIDTSEKSLPGPAATHPKTPTLIGG

SEQ ID NO: 447630 - protein, 359 aa, unidentified
MRIIGCDLHARQQTVAMLDTTTGEVVEKTLLHEASNVREFYSTLPRPVRVGIEATGSMQWFVNLMEELGIECQVGHPAKIRAAEPRKQKHDRRDADLILKLLVENRFPAIWLPSQELLDLRSLLRHRHQWVRMRTRVQNALQAIALANGLRRGPSLWSHDGQSAIASLPLAPHTAHRRSELQALYGKFETEIEQLNQRVEEQAGGRPGAQLLMTHPGVGPVTALATDVFLGDPTRFADGKVLASYVGIIPREYSSGGRQRLGGLSKQGNPLLRFLWGEAGAHAVRRDPELKRFYRRKLIQKGLGKARMAVARKLGIRLWIMLRDQIDYSEFCRRGQKNGGACAGMPETRNGATSHRPVD

SEQ ID NO: 447631 - protein, 352 aa, unidentified
MQQFIGCDAHKRYSIFSSVTEKGRIGRAVRVSHEREAFRGYLEQLPTGSPIAVESSGHWYWLVDEIERAGHEPHLVNAGEAKRRMGKPNKTDKLDAEGLAILLRNGTLPEVWIPPIVLRDQRELLRLRMFLVALRTDIKNRIHGALERYNIQIGVTDLFGIEGRQKLEQRMGELLIETRESVKQQLITHDFLELQVEQLEKRLQKMMGDVPGADLLKTLPTVGPILSAVLALEIGDVSRFPSAEHLASYAGLVPRVSSSGGRTRMGQVGGNVNRMLKWAFVEAANLVVLQQRRMGHTHALRLYRRIRSRKNHQKAVVAVGRHFAEAAYWVLRKQEAYREPTTRSLAVSSTHG

SEQ ID NO: 447632 - protein, 367 aa, unidentified
MQFIGIDLHTNRFTCCYREGNSPADGKRTETFELTAQGLAQFYTTLTKETYVLLEATITTFSFARLINPLVKEVIVANTYELKQISLGRNKTDKIDADKLCRILKMQVLSGEKTISEVTIPPAEIQELRGLFSTYRLLKKQTTQLKNRIHSLLKEKLYGFTQEQIFGKGSRKMLRQMQGDPTLGFQINHLFDLLENLEAGIHVLEDKIKEHAEPFMREIEILTSMKGVSVFIAIAIIADIITVERFKDSKTFTSYLRSAPRVESSNTTKGNNGTNKMGRKLSATFLTQILNHVLDASPKLNRWYQRLTQYKKAGSVRTGLRRRVFAEIYQMLKKGEYHYGRDPKNHEEKMEHYKKFLEKRKNILKSA

SEQ ID NO: 447633 - protein, 446 aa, unidentified
MNKDSIQTNSTNATPPAPLPPLVCWVGLDWADQKHCLVVRTRPAGPSKTHRVDQKPEQLDEFFLGLRAQNPQGRIAVAIEQSRGPVLYALMKYDFLALYPVNPRTLADYRRAFKLSGAKDDPLDADLLCELVCQHSDRLRCLVVEDASTRKLRLLTEARRGFVDERTGLSNQLGATLKCYYPLALELAGEDLTTTMVLELLRRWPNLAKLQAAKPGVLRAFFYQHNSRSEDKISARLQAIEQARPLTEDPALLEPLQLQMQRLVAHLRIVQQTIAQYDERISQVFATHSQAWLFAPLPGAGPVLAPRLAAVFGTIQSNFEAALDLLCFSGVAPVRKQSGNQEVVRFRYARPIFLHQSLVEFAKCSIGQCAWARLLYEHELKQGKSKWMAIRKLAFKWIRILWRCWTAGQPYDETKYLRSLQRDGVQLYRSLYEALPPLPTPSVNNS

SEQ ID NO: 447634 - protein, 386 aa, unidentified
MPQLNDLSRSLVILEQDATLIAVIEMGQSNWLVAGIVPGVERSPLKKLAVDESALLKLLNRWREEAEKAGHRIERIAIAFEAGRDGFWLARWLRARGIEAHVIHASSVAVSREHRRAKTDRLDTELLKRAFLGWLRGERDHCKMVAIPTLAQEDAKRPNRERENLVGEQSRIVNRMKAALARLGIRGFNPKLKKAVERLDGLRTPEGEPIPPNTLAELKHDMERRRLVRSQIRDIEGTRLERLKQAPGDGPHVMVRLLARVIGVGVETADMLVQEVLSRNLRDRRAVARYGGLTGSPDESGKKRREKGLARSGNARVRRGMIQLAWRFLMFQKDSALAHWFYARTKNAPQTRKTMIVALARKLLIALWRLAREGAIPEGIVLRPAL

SEQ ID NO: 447635 - protein, 352 aa, unidentified
MQTQSNELDFSGQNFYCGIDIHKKSWSVTIETDDMPLKTFTQEADPNQLVKFLRRSYPGGKYIIGYESGYFGFTLYRHLLNQKVDCKVIHPADIPTTHKEKDQKRDPLDSRKIARGLRTGEVSSIWVPPSNLEQDRQLLRLRRTLAKDITRVKNRIKAILQLYGIKYPDAFEKNGTHWSKRFICWLEGIELSEDTGTESLQMAVRNLNYLREEQLTVSRKIKSLALTERYNTAYTELIKLPGIGVLIAMIILTEVGQISRFKKVDNFRSFIGLIPRSHSSGEKDYQGGITKRSNTHLRALIIEATWSAIKKDPYYLHVYYNYKNRMQHNKALIRTARKLANNIYYTLKQVNY

SEQ ID NO: 447636 - protein, 338 aa, unidentified
MGWYSGIDLHSNNCFVVVIDESDRVMYRRRLPNELGKVLEALELYRSELAGVALESTYNWYWLVDGLQAAGYKVHLAHPAGVKRYDGLKHSGDESDALQLAHLLRLGILPTGYIYPAAERGLRDLGRRRLQLVRHRTMHVLAVENVQARQSGTRMTGDRVKRLSAEEVQALGFDEDVTLGLQANVAVIATLNAQIAKLERRMLEHLKPRPDYALLNTVPGVGRVLGPIILLETGSIERFREVGNYGSYARCVNSVRISNERKKGEGNRRNGNKYLAWAFIEAANMARRWCPQARRFHDRKRARTNATLATKALAHKLARACYHVLKKREPFDMRRCFG

SEQ ID NO: 447637 - protein, 406 aa, unidentified
MRVLYERCCGLDVHKQSITACALTPEGKEIRTFGTLTDDLEELVDWLKEKKVTHVAMESTGVYWKPVYNLLEAEPIEVLVVNAQHIKAVPGRKTDVKDAEWIADLLRHGLLKGSYIPHRAQRELRELVRYRRSLIEERARELNRIQKVLEGANIKLSSVVSDINGMSARLIIRALIEGKDDPAALAQLAKGRLKQKTEELRRALKGVMGPHQRMMLAEQWRHVEYLDEAIARLDREIEERTSPFHEALELIDTIPGVGRQSAEQIVAEIGTDMSRFPTAAHLASWAGMAPGNHESAGKRLSGRTRKGNKKLRSCLVECARAAARTKNTYLSAKYHRIAKRRGANRASVAVGRTILEMIYYILTRKEPYRELGADYWDRQREARIVRQTVKRLEGLGYEVKLEKTSA

SEQ ID NO: 447638 - protein, 345 aa, unidentified
MIIIGCDLHTRYQQIAMLDTETGEVTERRLEHENGEARAFYAGLVGRVRVGMEATGHTRWFERLLGELGHELWIGDAAAIRATVVRKQKTDARDAAHLLDLLLSNRFPRIWRPSLEERDLRQLVWHRQKLVWMRNAVGNQLHALAMGEGVCRKKKLFTQKGRAELESLALGPWASYRRQELLRMLDELDRSLQRLDQAVQQQAEQNAEAVRLMTHPGVGPVTSLAFVLTLGPVGRFPRSKQVVSYLGLNPREHSSGGRQQLGSITKQGNPMMRSLLVEAGHTAARLDAELRQDYQRLKLRRGSGVAKVAIARKLAVRMYWMLRSPANYAQLVRMQGSPRGTLVGQ

SEQ ID NO: 447639 - protein, 351 aa, unidentified
MPRTTTLHAVTAIGIDMGKNTLHLIGLDARGAIVLREKVARGRIALRLANLPPCLIGIEAGMATHYVARELAALGHDVKQVPATYAKPFRQGHKNDFRDAHAVAEAVQRPTTRFVPAKTNEQLDLQALHRVRSRLVSERTAVINQIRGFLLERGIVVRQGLRFLRQQLPDIMAKRADVLSPRMVRIVAELAGDWRRLDERIETVTDEIEALAKSDDSCRRVMTVPGIGPIISSAMVAAIGNGAAFARGRDFSAWLGLVPKQMSTGDRTILGRISKRGNGYLRTLFMQAARVILLRSANWPKHGFGLWLVRAAQRLHPNVLAAALANKLARIAWTVLAQERSYEARVTKAAA

SEQ ID NO: 447640 - protein, 366 aa, unidentified
MKKISTAAKRGNEIFKAPKLTIGLDLGDRSSHYCILDEAGNVLLEHRLPTTPKGIHQVFSRIPRSRIALETGTHSPWVNRQLTRLGHEVIVAHARNVRLIGESSRKDDQLDARTLARLARIDPGLLGPVRHRSAKAQIHLTVIRARAALVSTRTALVNAARGLTKSYGERLRKCGTRQMNREIAKGLSQELRDALEPLLEEIESLNERIAEYDRRIEQIAKEVYPEVALLQQVKGVGTLIALTYVLTLDDPHRFRRSRDAGCFLGLRPGRRNSGRSEPQLHISKEGDRYLRTLMVQGAHYILGPFGQDSDLRRWGLKLAERGGKNAKKRAVIAVARKLAVLLHKLWVSGEVYEPLRNNHQVVSAVA

SEQ ID NO: 447641 - protein, 513 aa, unidentified
MTSNQNTDTVPGARAGVIKLGLDVHASLIVVVRQVDGQASQPPQRFSEEAFVGFVHRQLAAAEAVHSCYEAGPFGYVLHRRLTALGVHNLVVRPRDWSTYGERVKTDARDAGALCSSLDRHLAGNRGALAVVRVPSEAEEAARGVSRQRQSLVRDRVRFTLRGKGIARLRGIALPPEWWRERAFARLDIPADLREQLSGLRRVILSIDAEAVALTTQIEAAAPAALPAYLGPLTWEILRREVGDWSRFANRRQVASYTGLCPSEHSSGASRLQGSINRHGNPRLRHILVEAAWRLLRYQPAYRPVAKWREAFMDQGRPGRRKKIVVAIARQLAVDLWRLATGRALSSNLLRIPKLSIRHANLGNPGLALAAVTHVIVHVEQLEESVGIVAVGRPGLDHLAEPLVPGGPAGSKRGKPRGPGGDLGREPLGVAPDPGEHLGVGPAELELGKERLVLDAREIEEMLVERAVVVELAVLPGDRRPRLVEEAREVGVAPKPNAWAARGMLREVGVGQV

SEQ ID NO: 447642 - protein, 354 aa, unidentified
MMVIGVDPHKQSHTAVAADELGRKKAQRTVRARREGHRELIGWAREIAPAGRLWAVEDVRHVAGGLIRELLAAGEQVVFVPPKLMAGERRGGRERGKSDPIDALAIARLALREDADLPAARLDEQVLEVRRLTDYRDDLVAERTRVVNRLRWMVHDLAPELAPAPRSLGSGRARAKLETGLRALPAGGAGRAVALSQLARITALSAEITDLQQHLAALVAVLVPELLAIPGVAVITAAKIVGETGDIRRFRSPAAYARHNGTAPVPASSGTGHDGPHRLNRGGNRQLNAALHRTALVQARCHPRAAALLERRGQDKHETRKASLRVLKRHLSDVIYRALNADAWRLDQPAPHAA

SEQ ID NO: 447643 - protein, 352 aa, unidentified
MTNLPLNTAAESVHRLFAGVDVGADDLVLVIRKNGKPFDPQKYANTRSDRARLVNRLIKLPGLKVCLEATGIYHFDLAIALHDAGIPVMVVNPKASHNFAKVLMKNSKTDAVDANTLAEYVERMDFVAWTRPSNQLLALRGYARRIDALTGQKTAAKNHLHALSATQETPKALLRDAKLAISQLEKRIDALAKEALALIDKHPELQRIFELLTGIKGIGQTSAIALMGELLLLPPNLSHREWVKFAGLDPKAFESGKSVHKKMRLSKAGNRHIRSALYMPALSAKQHDPHVRAYFQHLIDNGKKPLQAVCAVMRKLLHAIHGMLKHDQPFDNTRFYAIPTPISAEENTMEFC

SEQ ID NO: 447644 - protein, 413 aa, unidentified
MDKIYDICCGIDVHKKLIVACLNHKRKKELREFGATTRELMELAEWLQKNECEIVAMESTGSYWKPLYNIMESYDLHAIVVNPAHMKAVPGRKTDVKDAEWIAELLQHGLLQPSYIPSKDQRELRELVQYRKSLVGERTRELNRLQKMLEGANIKLSGTVTNINGKSARKILEYILSGNEIDEKKYDEIYEEKLIAHNLKASKEQILDDLKGFMSPLQRRMLKELLQHLDELNVHIENLNDEIDNFMKPEEKQASQVIQDVTGIGNTSAQTIIAVIGTDMERFPSDRHISSWAGLCPGDNVSAKKRKSGKIRKGNALLKSTLVLCAHAAVRHKSSYFHAQFKRISTHRGKKRAYVAVAHSILIAIYHILKDGVKYQDLGAEYYNQFNAERKIHAYLKKLKALGWEPPKEAVPA

SEQ ID NO: 447645 - protein, 468 aa, unidentified
MALTLGIDVACRAAHQAALARDGVTVWRGRKFWSQPADLQRLWTDLGVEDPAELTVVVEPTRNAWIVLAEWFRRRGARVVMVPTTQSADLRRYYSKHTKNDRIDSELLARLPLLHPEGLREYSGQGPADPLRRLVKQRSTMVKRRTAVHARLDALVELLGPDWYAVLGSNYGIAALEFLARYADPHAVLRLGQARLTRFLIARSRGAWRAEHAEGLITAARQTLQLWGGIGGADGMDFAELAADIGHEAEQALFLTRQIKQIDERVANLYADADPEGIVGSAPGVGPVIGAVIAGRLGDPHRFTSLAAIRAYSGLVPRVSQSGVSKTESNLTKAGDPLLREMLFAAADSARKVDPCIAAKYQRLMAGDRHHTSAICHLAAHLLTRIATCIRNGEQYVLRDVDGRPITEAEGRAIVAERYQLQPRRRDTIRHQRMRTRKKATGRESQKSPSAPTPRPAATTKATSRHVA

SEQ ID NO: 447646 - protein, 350 aa, unidentified
MKKGTTIGIDLGDKTHEVCVLDASGDVMVRKQIVNTQETVKKFFKVHAGALVVMETGTHSPWMARVLESLGCAVLVGNARKLRAIWMAKDKSDVRDAEMLARIARVDRALLYPVHHRGVEAQEDLAVLKARDVLVGTRSDLVNHVRSVVKATGHRIAKCSTDAFAKRARESLPPGLLPALLPLIEEIEAMTERIRAYDREVAALINQRHPEAKRLSQVPGVGPVTSLGFVLSLEEPDRFRKSRAVGPYLGLTARRDQSGQTDKQLRITKAGDEYLRRLLVGCAHHILGPFGPECDLRRFGLKLAARGGKNAKRRAVVAVARKLSVMLHRLWVTGAEYDPDYLSHRKQQAA

SEQ ID NO: 447647 - protein, 410 aa, unidentified
MEVKYRRCCGLDVHKDTVVACVRIVSGGEVVSEVRTFQTTTASLIALSRWLAENGCTHVAMEATGVYWKPVWHILADGDFQLVLANASHVKNVPGRKTDVNDATWLADLLAHGLIRASFVPDTQTQELRNLLRTRKQLVREKASHILRIQKTLEDANIKLDSVITDVMGMSGRAMIEALIAGENNPAKLARLANYRLKTSQEKLREALRGRVTKHHRFLLRLHLSQIDGLDASIAAIDQQVEAGIAPFRTAVDLVTSVPGVGSLGAQVIVSEIGTDMGRFPSDSHLISWAGICPRNDESAGKRRSNRLRKGAPWLKTTLVQCAWAAVRKKDSYLQAQFHRIKSRRGPKKAIMAVAASILTAIYHMLKDGTLYHDLGANHFQSRSKGQQTKRLVKRLADLGYDVALAPVTN

SEQ ID NO: 447648 - protein, 343 aa, unidentified
MKLQALGIDLGKNVFHLVGLDSNGQVVIRKRCSRRQVLAFIANVQVQVIGMEACSGAHFLGRALREQGHNVRLMPAQYVKPYVQTNKSDYIDAEAIAEAVQRPRMRFVPIKTEEQLDLQALHRVRERWVMRRTAVVNQIRSLLLERGITLAQGRRHLEQALPRILEDAELKLSGSFRILLAQLKLELEQLGTRIEQMDTEIQREARENEACQRLTAIPGVGPVTATALVGAIGNGSAFGKGRDLSAWMGIVPGEYSTGGKQKLLGISKRGNKYLRRLFVQGARSVLQHREKQVPALSSWLAGLLGRTHQNVVIVALANKLVRMAWAVLCKNECYRAPVLAATP

SEQ ID NO: 447649 - protein, 403 aa, unidentified
MILVGIDWSENWHDVCLMDEGGQVLARRRLDDSPGGLTQLQSLIAEHAEGPAQVAIGIETPRGLMVRGLRAAGYTIYAINPLAASRYRDRHAVSKKKSDRGDALMLADLVRTDRHKHRQLGEDSELAEAIKVLARSHKSLVWTRQQLGSQLRSALREYYPGALEAFGDHLYEADSLALLERAPTPAQGRALSLAKITSALRKAGRRNLEQRAVEIHDALRARRLEQPAMVAHAHGVAAADLAGLLLDVIARIEQQEKELDRSLKEHPDAEIYLSLPGLGTVLGARALAEFGDDPNRYHDGKARKNYAGTSPITQASGRTKVVLARFIRNDRLADACQRWAFSAISASPGARRYYDLQRARKKGHNEALRIVANRLVGVLHGCLRHQQLYREDIAWASVEVTAA

SEQ ID NO: 447650 - protein, 348 aa, unidentified
MQDILTCAMGLDVHRDVIVACLARGELGTEPEIEIRSFSTLIPEMRKLRDWVLEVKCRHIAMESTGIYWQPIYEMLEPCFDGQISILVVNARHMKNVPGRKTDMRDAQWIATLLRAGLLNGSFIPDKTFRELRHLTRYRKSIDEILVALNGSLSEHQRSFLRMIFEHLESLERHRHTVEDAISEEIVKHEAALSLLCSIPGIDVTAAASIIAEIGTDMSAFPDSQHICSWAGLSPGNNESAGKRKSAHINKGNPYLKSMLCEVGWVISGKRTLYLSGWYWRVKQRKGAKRATIALARKLLALIYTMLKTGTPYNEECFEIRRKQSERKRASRMVNELQKLGYFVAAPD

SEQ ID NO: 447651 - protein, 308 aa, unidentified
MYSIGLDISKASISVHIPVNSLDLEIDNTLVAFKALYSKLKKLYKKDLDKLTFVYEPTGSYSSLVTKFCASKNIKSFIINPKQSSNFAKALGHRSKSDKIDAIMLSKVIAIARKDEIKIPIINLTMETIKELMSYYKFTVKQRVALNNHYEALKTKDGDKYTLRDIAKRIKSFKEKEDEILNRIKEIIEDDDKLSTAYTNIQTIPGIGKIAGIVLVHLFISYPKANKNQIVSLTGLDPIIKDSGTSVKSKPRISKAGIKLYRGSLFMATMVAIKYNEQMKEFYNRLKDNGKHSTVAQIAVMRNSTTMD

SEQ ID NO: 447652 - protein, 348 aa, unidentified
MAYFVGLDVSVKETSVCVVDDSGKVISEQKVLTEPDNIITLLTSIGETYARIGIEAGPLSQRLVNALIAADLPVICVETRHMKALLTAQQINKTDRNDARGIAQMMRVGLFKPVHVKTLVAQEKRMLLTSRKLLQRKLLDVESDLRGTLRNFGLKVGAVSGGRYDARVRELVEGFPGLAAIVEPLLTVRRVMCQQFAVLHKMLLDTVRDDPVCRRLMTAPGVGAVVALTYRATIDQPQRFVHSRAVGAHVGLTPKRYQSGEIDYDGGVSKCGDALLRTMLYEAAQTMLTRAKKWSWLKAWGMRVAQRRGIRRAIVAVARRLAVVLHRMWVDGTEFRWSKDSATVLNAA

SEQ ID NO: 447653 - protein, 349 aa, unidentified
MSHKLNAGIAVIGIDIGKNSFHVVGLDRRGAIVLRQKWSRGQVETRLANLPPCLVGMEACVGAHHLSRRLTSLGHDARLMPAKYVRPYSRGQKNDFRDAEAIAEAVQRPTMRFVATKTAEQLDLQALHRVRERLVSQRTGIINQIRAFLLERGVAVRQGLRFLRAELPRILATPCDALSPRMLRVIEDLAGDWRRLDERIEDLSSEIEVLARRDVGCERLMGVPGIGPIISSAMVAAIGSGDAFTKGRDFAAWLGLVPKQISTGDRTILGKISKRGNRYLRVLFVQAAWVVLIKPKSWQRHGLKPWLEAAKKRLHHNVLAIALANKLARIAWSVLAHGRAFEASKIQVA

SEQ ID NO: 447654 - protein, 390 aa, unidentified
MLLDHPSDGLTAIRTHIGAIFVSLELSRSNWLITSLSPGKGEKMSKQSVTAGDVAGLMKLFAELRRKAEVRTGQSYPIITIHEAGLDGFWLHRVLHQEGIESHVVDPASIAMPRRKRRAKTDRLDGETLLRALLAYKRGEPRVCAMVVAPSPEEEDRRRLCRERRTLIEERVTHGNRIKGLLFAQGIFDYAPLRRDRRARLEALRTGDGRELPAHLKAQIGRELDRIELLLGQIKAVEAAQEALLAAARTPATSQEAAPDPVTMLLALKGMGPNFAAVLWSEAFYRQFSNRRQVAAYAGLAATPWQSGGVRHEQGVSKAGNPRVRTTMIQLAWLWIRHQPQSALTRWFKERSPQGRKRAIVALARKLLVALWKYVTQGVVIEGAVMKPAA

SEQ ID NO: 447655 - protein, 353 aa, unidentified
MSKIARKMGEGKRKMCWKASDRVFVGLDVHKASAHAALMVNGMIVKTWSMPYDAAVIAASLEPYRAALCGVVYEAGPTGFSLARRLIALGYVVKVAAPSKTPQPSGPQAKSDRLDCRRLVDFYAKGELTFVAIPTETQEADRQVMRARGQCLGKVKRAKQQIKSFLLQHGIAEPEGLAHWSNGSLRSLRHLKLNAQLRFCLDQLLEELDCLRGELKAFEEHLDRLARTARLRKSIRTLDDHPGVGPLTAMAFAVEVFSPERFSQGKGIAGYTGLAPKISQSGATRRGGPLMKTGRGELRALLVEASWRWVSKDTHGRRLFAHLVRNTGSKQKAIVGVARHLSIELWKRLVQAA

SEQ ID NO: 447656 - protein, 340 aa, unidentified
MFTNFVGIDVSKSKFDLALIKGQDKDHVIQGVFDNTLKGIKSMSNFLEREHKVQLSETIFCMEFTGVYGYPLTDFFVKKDCHVWIEMPVNIIRSLGLQRGKNDRVDAYRIALYAYKNRDDVKLWKPQREAILKLRDLLALRERLITAQKSLQMPINEKISMGDKKGAEILRKGCQKSMSSLENEIGQIDKNLDDIIKEDPQLKELFQLATSVPGIGKLTALFMICFTNEFSMYTNPKQLACYCGVAPFEHSSGSSIRGRTRVSHMANKVLKRMLHMGAMSVISRDPELRDYYQRKVAQGKNKMLVINAVRNKIIHRLCAVIKRGYEYQSEIIFKERLVLS

SEQ ID NO: 447657 - protein, 367 aa, unidentified
MKKASTAAKKTRPRPQLTIGVDLGDRTSRYCVVDPAGEIMLEQEVDTRTEALVKKFGALDRSRIALEAGTHSAWVARLLEGLGHQVIVANPRRVPLITAHSAKSDELDARTLARLARVDPQLLRPIQHRGEMAQIHLLTVRSRAALVEVRTKLINAARGLAKAMGYRLPAAKTDAVTAEILCGLPAVVQAPLSHLIQQVQSVNQQISQLDQQMEEIAATHYGLETAKLQQVKGVGPVIALTFVLTLESAERFSSSRAVGCYLGLRPKQRKSGKSNPQLRISKEGDSYLRALLVQGAHCILGAPGEDCDLRRWGLKLCARGGKNARKRAVIAVARKLAVLLHRLWVGNEAYDPFYNAKRVTKTMSACA

SEQ ID NO: 447658 - protein, 352 aa, unidentified
MTLVGCDLHSRKQQVAVLDTDTGEVLEQELLHEGDAVERFYRGLPRPVTVGIEATGYTLWFHALMQKLEYTLLVGEAAKIRAMVVRKIKTDRRDAQHLLDLLKHDRFPTVWMPDPATRDLRALIAHRVRFVRMRTMVKNGLHAIALNHRVALGPALWTKRGLAQLQALALPPHTAQRCGESLELLTWLTTRIDQLDAQIAAAAAADARAQLLLTHPGVGPLTALITVLVLGPAYRFPTSKHVVSYVGLAPAINASADKYHLGKITKQGNALLRWILGQAAPLAARADGELKRSYFTVLHRRGRPKAKVALARKLLVRLYIMLRDQIDYDEFRRRGGARRSQPAWHPVAAPTM

SEQ ID NO: 447659 - protein, 465 aa, unidentified
MRTDKKLWRNRKARKELARRLQSQNPGLEVVHAHAAGIDVGNSAHYVAVRPDRDPQPVRRFECFTADLHRLADWLQSCGVKTVALQSTGVYWIPLYDILEERGFEVYLVNARHTKNLPGRKSDVQESQWLLKLHTYGLLNNSFQPPSKIRVLRTYWRQRLQHVTGAATCVQRMQKALTQMNIQLANVISDLSGVTGQLIVRAIVGGERDPRKLAELSHPRIQASRGEIAKSLEGNWRQELIFVLQQEIEMYDTYQRRVAECDQKLQKHLSAFADTVPPPVKEELPPKKNKKQNKNNPHFHLADELQRITGVDLTRIDGVDVIVAQTLVSEVGLDMSRWKTEAHFASWLGLCPDNRISGDKVLARGTRHVLNRAANALRLGASTLLRSQTYLGAQYRRLRSKIGAPKAITAMAHRLARLVYRMLKYGQHYVDKGAEYYEQRNRQQQIEFLRKKAAQLGLQVTPAHA

SEQ ID NO: 447660 - protein, 339 aa, unidentified
MQLYCGIDLHSNNNYVAILSDTLEQVACRRLRNDLGQVMGFLERYREDLVSVAVESTYNWYWLVDGLMEAAYDLRLVNTTKASKYSDMKYTDDKHDARWIARLLALGILPEGYIVPPQERRLRDLLRRRSFFVRKRTDHLLSVGTLLERSTGLRVGTTEIQTWSGKEVRALIDDSFVAESITVMLPVVRAFTRQIKSVEKQVLAEAKLRSDFQLLKTAPGIGDILALTIMYETVTIDRFPKVGNYVSYCRCAKSEHTSNNKRKGAGNRKNGNKYLSWAYSEAAHHATRLDPLARGYFARKKKRSHPMVAKRALAAKIARGCYYVLRDQTAFDPSRTFPK

SEQ ID NO: 447661 - protein, 343 aa, unidentified
MGEISMIGLDLAKHVFQVHGVGASGGVVLRRQLRRSAVEKFFAQLPPCTVGMEACGGAHHWARVIGRYGHQVRLMPPAYVKPYVKRNKNDGRDAEAICEAAGRPTMRFVAVKSVEQQAVLAVHATRALLVRQRTMIANSLRAALSELGIVAAQGIKGLRELMAKLETANEEIPEMMRGALLVLARQWQALDADERALERHIVQAARTDREARRLMEVPGVGPIIASTVLAKVPDAKVFRTGRDFAAWIGLTGRDHGTGGKHRPGRISKQGDRMLRALLISGASAYLRHQRTRGVSDPWLRELLARRPYKVVMVALAAKTARILWAMLVKGEPYRDRASASAAA

SEQ ID NO: 447662 - protein, 345 aa, unidentified
MEHFAGLDVSVKDTSVCVVDDTGRIVREVKVASEPDALLAVLTNQAYRFKRIGLEAGPLSQWLFSALAEAGLPAICVETRHMRAALRAQINKTDRNDARGIAQMMRAGLYRPVHVKTLRSQKLRMLLTHRKLLQSKAIAIENDLRATLRNFGLKVGVVGTAKFEMRIKELVENLPDLTVLVEPLLIVRRALREQIGILHRRLLTIVRDDDVCRRLMTIPGVGPVVALTYRATVDVPARFRNSKAVGAVFGLTPSKYQSGEIDRTGAISRCGDEMMRAMLYEAAHIMLVRSVKWSWLKAWAMQIARRRGLKKAVVALARRLAVIMHRIWGDGTEFRWTREQAAAAA

SEQ ID NO: 447663 - protein, 416 aa, unidentified
MSNELIVGVDVHRQQNVFSVLDGKGQELVASFACDNNRPGTQAAADRLAGIMAQGHYQQVHIGAEATGWYWFHFFLALSQNSVLNQWPVTLYPFNPRLTANYKKSFSDLDKTDTIDAFVVADRLRLGRDLPAPFAFNDDALSLRMLTRYRYHVVHNLAREKAYCLSVLYLKASEYTRSEGKPFAHTFGATSRAVLQEFATMDEVAALPFHDLVEFIDVKGKRRFPDPTDNARRLQQVARDSYQLPRQLQESVQLVLGMSFQYIAHLERQLKRLDTAITQHMDAFHHSLQTIPGFGPVFCAGILAEIGDIARFDFDQAKVANYAGLKWRKTQSANFTADESPMTRKGNRFLRYYFCEAANIVRMCDADYRAFYDRKYKEVRKHQHKRALVLTARKLVRLVVRLLTTNQPYRPRSMPI

SEQ ID NO: 447664 - protein, 312 aa, unidentified
MKNDTIGVDVSKDHLDAHRLADGATRRFANDKRGQGALIQWLAETPANRVVFEPTGPYHRAIERALGASGVPFVKVNPRQARRFAEATGKLAKTDRLDAAILARMGALLELQARPAPSEILLELKELYVAREALVKDRTAAKNRGKVLTLPLLKRQNAQRLEQINRQIATVEAAILQIVEADPGLSDRFAILTSIPGVSNITAFALLIEMPELGALEPGQAASLVGLAPIARQSGRWTGRAFIRGGRAGLRQALYMPALVAARFNPDLKAKYLKLVDAGKPAKVALTAIMRKLVVLANALLKANRRWQPKHP

SEQ ID NO: 447665 - protein, 400 aa, unidentified
MLSIGIDVSKGKSTVCGMKPGGEIVYAPFEVQHTREGMLELVSLLRGSGEEVRVVLESTGSYHCPVVAALLENGIFVSVVNSLRMKRFCSQSIRKVKTDRIDAMQIALYGLAYWQELQPARLPEDTYRELQLLARQYYQMTSLLIKAKVDFNAICDQVLPGMQELMSDHAGRHKLSDFVLRYRHTTHILEMGETRFRKDYCKWAEKKGYRNCERMAAHIFATAQNGIPVLPNAPSTQIVITEAIRVLHTVEASRDAILTQMQALAKTLPEYSLVREMPCIGDTLAPRLIAEIGDVRRFHSKRALIAYAGIDAPPYQSGKFCANNRHISKRGNRYLRKTGYEVMQSYVMHKPANDPIFTFIEKKRSEGKCGKLAMVAGLNKFLRVYYGKVTELYRSLPAIE

SEQ ID NO: 447666 - protein, 361 aa, unidentified
MAGTMTWVGLDVHARSTHAAAIDTVTGELARARFGPGFDGPVGWLAELPGPVRACYEAGPTGFGLYRSATAAGIEMQVIAPGKTPRGPSDRVKTDRKDAELLARLLLAGSLTGVVVPPPAVEGARDLTRAHDAARRDLMTARHRVSKMLLRHGRVYPKPSTWTQEHRRWLGRQQFEQPASELTFADLVAAVDGLSARKMAIAGRLSQLALDEQWWPTVARLRCFRGVDTLTAFSLHLELGGDWERFGRAPQLAAWLGLTPSLNQSGESSRQGAITKTGSTLARRLLVESAWHYSREPRIGATLRNRQQGQPDHVLAIANRAQQRLHRVHHRMRARGKPANVTVVACARELACFQWAAATAD

SEQ ID NO: 447667 - protein, 360 aa, unidentified
MEPMYYIGLDVHKRKISYCVKDASGQLHGEGSIPASRYDLDCWMKTLPRPWSAAMEATLFTGWIYDHLKPHAAALKVAHPLMLRAIAAAKRKNDRIDANKICDCLRCDFLPECYMAPTGIRERRRILRYRNLLVRQMVQMKIKTGSLLMEAGVSYNKERLHKAAYFRELLATNPDIDESLRSLLRQCRETVLRLSKTENALIRSLQHDHLLAERVERLMSIPAIGPITALTWALEVGDVRRFSSTKKAVSYCGLCGAEKSSGNTVRRMPLSKQRNKHLQTTLIEAAKMAPRFSPTLALLYDREKQKGNANRATLAVARKLVAYLVAIDRGQTHFGIGPPGQHRRLSCKSLLSASPPGLAV

SEQ ID NO: 447668 - protein, 319 aa, unidentified
MDKLSQGQIIGIDVGRDWLDIYGLPDGYRRRLPNGPDGHAVVAELAQARNAVVCFESTGGHEWQLWARLEAEGIVARQVPPAQVKAFARNRGRQAKTDRIDAELIARFSAFRPEAGRSLPAEKLRLLRALVSKRAQLVELRKRLLAQIQAHRRLGTAALFEDLDSDLKALFDTRIKDLEERIGRSVSCDDRLAERISILRSIPGIGPVASTMLITEMPELGTLTSEQAAALAGLAPVARDSGTLRGRRAIAGGRRDLRCVMYQAGLVAAHHNPNLKVFAERLRRAGKPHKVIITAVARKLVTLANILCKNHQTWVPSPP

SEQ ID NO: 447669 - protein, 346 aa, unidentified
MKHVGLDVHQVNTTVVWVDDQTGEVSRARDLPTAAVPEHLAGVGEVLRVVMESGLHSKFLARQLLSCGFEVWVLDARKVAAQMAAYKTGKTDKLDARALAKMSFENAIHKMRVWVADEHTEELRALTRTREKLVEQTTALRNEWRSQLAAFGLICPANDVLSAKAERWLAEHLERLPQWGQFCLQRLHESLLALREQIKLLDREIERHAAADPACQKVRSLPGCGALLAVTIVAELGDVARFASLARTCSYAGLTPTVRKSAERTYIGPIARRGNPHLRRALILLAQHFAWQKDLGETSLKKLYYRTLHKHGPNAAKVALARGLCRVIVAMRRADQAFAPPQAQAA

SEQ ID NO: 447670 - protein, 346 aa, unidentified
MTIVETRVITGGVDTHADTHVAAALDPLGGLLGVREFPATAAGYGRLMSWLGGFGTVALVGVEGTGSYGAGLTRHITAAGVRVVEVDRADRQDRRRAGKSDSLDAVSAARAAQSGRAAGAPKGRDGAVEALRALMVAKRSARAERTRAVNQARALITTGPEDLRIRFARHTAPALVTALAQLRPRPGDAAGYATRIALRELGRRARFLDAQAARLDELIIPLVTGRAPGLLALHGIGPDTAALLLIAAGDHPQRLRSEAAWAHLCAVAPIPASSGKITRHRLNPGGNRQANHALWRIAISRMSTHPATRAYVERRTEEGLSKKEIIRCLKRYVARQVYPCLRATAD

SEQ ID NO: 447671 - protein, 370 aa, unidentified
MEGYAGRQFVGIDLHRRRSVIVRTTDRGDPLETVRINNDVDSLTKVMARAGVSPEVVLEATYGWYWAADALADLGARVHLAHPLGVKGFAYRRVKNDVRDATDLADLLRMGRLPEAWIAPPATRELRELVRHRAKLVAIRSGCKCEIHAVLAKCGIQVLMSDLFAGPGTRLLEHLDLPAPYLARVGSLRRLIDDLDGEIDLFARLIRGRLAADPGYRAVQQIPGVGPTLGAVFVVEIGDVHRFPGPGQLASWAGLTPKHRESDTHVHRGRITKQGSRLVRWAAIESVQALGPGTGAGRLKTPRRGPPWPQHRQNRRRPAAVDLRVLRDAGRARPFPAPLSGRRMSAPILTSWPGLVVQVMTPAWRRGRAF

SEQ ID NO: 447672 - protein, 319 aa, unidentified
MQVSSVFIGVDVASKWLDICLSDTSEPLRIDNTPQAITAWLKTLPKHSIIGMEVTSHYHKLLAQQAYGILKNVYVLNPRDVKHYALGVGRRAKTDQIDAQIIRRFISREHQLLRPWKPATATQDQITSLFHRRANLIKQKQAIRQSCKALQASLHQLEPAIAGIKTLIEEMDTLLFKALALTPDTYSGYKAMETIPGVGRLTAAYLANLFARTDFKKTDQVISFLGLDLLFNDSGKKRGKRWLSKRGPSEARRLLYNAAMSAARGVFKVMYDSYRERLCYTQAIVALMRKLAKIAFGIWKSGEKFALDTFNSPLMVENT

SEQ ID NO: 447673 - protein, 433 aa, unidentified
MKVLHERVAGIDVHKEMIKVAIRSPGEKPWTRKTEILEYRTFYGVLQEMARELRRRGVTHVVMEASGVYTEPVYYALAERDFTEVAVINPAHAKALKGHKTDAKDCTRLAELFECGLLHGSYLPAPELKEVRDLTRYRMKTVQARTSEIQRLAKALESAGIKLGSVASSITGVSATAMIEALIDGERRGGVLADLAQGRMREAGKLADLSMALSGRFTGHHALLCRLHRDRIKMFEDAVAGLEDRIAGKAAPWRRELDLLMTVPGFGDAVTQAWLGEIGPAPHLHFSSHDKLACWVSLCPGNNISARKRKYGRTGDAGTYIKPMLVQAAWSAIRVRGRLQARYNRLVRRFGGDKNPGAKKKAIVAIAHTLLKIAYQVLKTGTPYQELGADFYARRESPEQKQAWLERQLQKLHPGCAITITISPPQTALPPGA

SEQ ID NO: 447674 - protein, 384 aa, unidentified
MNKHSMIFIGLDTHKEFHEVAYCEEQRGATPVHYGRIPSSKVSVKKLLRQFESKFPGATLHVVYVAGPCGYWIYRLITSLGHCCYVVAPSLIPKKPGVRIKTDRRDALKLVRALKSEDLTPIYVPEPEDEAVRDLSRAREAAMKDLKEAKYQLKALLLRNNIRYEGTANWSKKHLRWLTELILPHPAQQIVLQEQLQTIEERIRRLERLENELTHHVHQWRYYPVVKAIQAMRGVRLLVAVGVVAELGDLHRFDHPRKLMAYLGLVPSEQSSGGKRHLGAITKAGNGRARRLLIEGAHSYRYPANVSTELQLRQEGLPKDIVDIAWKAQLRLCKRNQRMSKKGKHYNLIITAIAREMAAYIWAIAKEVVLTPVNPKLRLSRVPA

SEQ ID NO: 447675 - protein, 352 aa, unidentified
MRRTTTLHTVSTLGIDMGKYTLHMIGLDTRGAIVLREKVSRGRINSRLANLPRCLIGIEAGMATHYVARELTALGHDVKQVPVSYAKPFRQGHKNDFRDAHAVAEAVQRPTTRFIPIKTNHQLDLQVLHRVRSRLISSRTAVINQIRAFLLERGIIIRQGVSSLRQSLPDILSQRTDVLSPRTVRVIIDLTSDWHQLDNRIETVTDEIEALAKDDETCRRAMTIPGIGPIISSALVAAIGNGVAFGNGRDFSAWLGLVPKQRSTGDRTILGRITKRGNGYLRMLFIQAARVILRRPKNWPKHGFGLWLTHAAQRLHTNVLATAFANKLARIAWTVLAQGRSYEARTTEITTA

SEQ ID NO: 447676 - protein, 438 aa, unidentified
MRVIYECVAGIDVHKKTVVACRMRVTEAKRVEWETKTFGTMTADLLGLHDWLTEWEVKQVALESTADYWKPVFNIVEEGFEVILVNAQHVKKVPGRKTDATDAEWLAELMLHGLLRASFIPPKPQRTLRELTRYRTTLVRERGRVVNRVEKLLESTNIKLSSVVTDVMGVSAKAMLTELAAGATDPQALAKLAKGRLRNKMKELEAALTGTVAEHQRFILAQQLGHIDFLDEQIENLSQQISRHLEQMTRPLADDDEDDGAGPTATEPDQPLSWNAAVELLDTIPGVDQRTAEVILAEIGLDMSQFPTADDLASWAGFAPGNHQSGGKRYSGRTTKGNRPIGAALNQAAWAASRTKDTFLEARYHRLAARRGKKRAIVALGRSMLVSIWHMLSRQEPYQDLGADYYDQRRKETKVAYLTKQLTRLGFAVQLDPLPVPA

SEQ ID NO: 447677 - protein, 400 aa, unidentified
MNIIGIDVSQGESHATLITEETEKVAFKFKHNKSGFQILNSYIRSNTIIIFETTGVYSAQLTAYLKSKKVKFYELNPLEAKLRMASLRRNKTDKNDSFKLALLGATQLTEIKNHCNKQSALPYDSLRILSLRYKQLIKCRTRILNFLRSSLELTFPELNQIFKKAYAVLALQVFRMYCHPDFLAGLTLKEMTNRVYQFVSRRIHKDVIQSYCAQVWLAAKDSYPAVPADSLEIEIISEYCDEIESYNKEIAYIQSKLIKTAVGLDDFKVISSIPGAGQLNSALLLGFTGDIARFDNYKQLNAFLGLDLNRYQSGKYGKGDTINRRGSSQGRAVETDMIRSMLRNQGKIQNHLVDYYYKLKKPPFNKHDKVALIACANHLNRTIINLVHTHQLYNYSKAIH

SEQ ID NO: 447678 - protein, 408 aa, unidentified
MEPIYTCCCGLDVHRRSVAACVRRLEAGGRLHQETRTFGTMTRDILELADWLAAEGVTHVAMEATGVYWKPIYNLLEDRFTLLLVNARHVKHVPGRKTDVQDCQWLAQLLQAGLLRGSFIPARPQREFRELTRHRSQLVAEKSRVANRVQQVLEDANIKLGTVATDILGASGRDMLRALIAGEQDPEKLADLARRQLRNKIPELRRALEGKVTDHHRFLVGQLLAQVEHLEGQIEALSRRIEEVSRPFASANKAVSSLPGFEQRSAQNVLAEIGADMEPFPSAAHLASWAGVCPGNNESAGKRKSGRTTHGNRWVRTALVQSAWAATRKKDSYFAAQYRRLAARRGKKRAIFAVAHSLLTVIYHMLKTGSTYKDLGGDYFDKLNAKRLLPHLVKRIKDLGYQVTIQAA

SEQ ID NO: 447679 - protein, 461 aa, unidentified
MAHHDAHVRSGPDEGLDGFPVLRRDVAGIDVGSEQHWVCGPAREGSGREIAVFAATTPGLEQLTAWLRDRRVTSVALESTGVYWIVPHEMLEAAGFAVVLADTRTLGRVPGRPKSDRRDCEWLQRLHACGLLRGAFRPAEQVCMLRTLMRDKATLVAERSDWLRRMQKSLDQMNVRVHRAVSDLDGVTGMAILRAIAQGERDPHRLAALRHRRCQKSEAEIAAQLTGHWRADHLFSLQQALHMYDAITARLTAYDGEIQRQLAQMTPPDRRDVDAPPPAKATKAKAMKTRGDDPLRHALYRVSGVDLTSIDALGVETVSIVLSEYGSDLSRFPTEKHFVAHMRLAPYKPISGGKVVTTRKKPASTSARVAAALRMAALAARRSQTALGAYYRRLAQRCGADVAVFATARKLAQYIYRLLRWGQPYVDEGAAAYETRYHQARVKRIAANAKQLGYALVPVNT

SEQ ID NO: 447680 - protein, 388 aa, unidentified
MTKTDTDGVIGVFAAGGCSRQDVRTWSVLIGHKHREEAAMKHYAGLDVSLEETAICIVDENGRIVKELRALSEPPALIAAFDGIGLQLERIGLEACSLTAWLHDGLREAGLPAICIETRQANAAMKTMPNKTDRNDARALAQIMRTGWFRQVHVKSRQCRLWRSALVARRTVLNEMRSIENVVRAILREGGIKLGTPSRTVFAAKVREMAASDPLVTAIAEPLLAVLATMLEEFARLTKQVLDIVKGEPVCRKLMSVPGVGPITALAFRATIDRPGRFDRSRSVGAHLGLTPSRYQSGETDIQGRVSRCGDELARTALYEAAHSLLTRSKKWSSLKAWGMGIAKRRGMARARVAVARKLAVILHRMWSDDEEFRFGKEAFAKAGSAAA

SEQ ID NO: 447681 - protein, 339 aa, unidentified
MKLTRVGVDLAKNVFQVHGVDEHGKLVWKRQLKRATWLQVLLDKAEPSCVIGMEACGGAHHWARELQSRGYTVKLIPPQFVKPYVKSQKDDAKDAEAMSRPGMRFVSVKTVEQQDIQSIHRVRSLLMSERTAKANQIRGLVAEYGLIAPLHMSPLRQAIPGWLEDAENGLTDRFRSWLHELWNELLRHDQRRKALDAEIKRISDTHPGAKRLKQLRGVGPLVATALVARFGDGRHFKRGRQAAASVGLIPRHHGTGGKNRLYGITKQGDRYLRSILIHGARAAVWQAKRRDDRLSLWLTELAARSHPNVAAVALANKTVRIAWVMRRHGTDFDPELAVA

SEQ ID NO: 447682 - protein, 345 aa, unidentified
MHHTITGVDLAKEEIQVCVTKHNKVHSNKAMTPIEFSAWLASNKKMIVVFEACGTSNYWKQRTLEYGHDARLISAKLVSSVRQNQKTDKNDALAIAQAAQLTDVSFINGKSKEQQELQTLARLRELAVKHKVALQNQLTALLLEFNIRVSSAKGGLSGVIESVLEDADNGFSMPFRDALYTGWQQYLFNLKNIQKYDLCIEKAANKNRECKRLQALEGVGPMNAINLYISLGCGDMFLFKNGRDAAACIGVTPIQHSSGGKVKLGTVGKYVKNKNVRSSLVSGAMAAINQATRRKAKTKKDLWIQQLVERRGKRCAAVALANKTVRTAFAMLTNNTEYKAELLTA

SEQ ID NO: 447683 - protein, 395 aa, unidentified
MHQVYVGDPEGKKVRELKIVETVEGLAEIGRWLDEKRAEGIELWAAIEKPQGRIVDFLLDHGVVVYPINPKALDRARDRYRMSGSKSDPFDAYVLAEFLRTDHVHLRALQPNSEKAQELKLLSRDQRRVERQKTRLIQQLTITLKEYYPRALEAFEDLQTQVALDFLKQYPTPAHLRALKRKEFNRFATKQHHLSKKRFEQLWQELKEPQLPVPEHVVRAKAQLLEILIEQLAASIKAVKIYRDRVESFFASTPAAEIARTLPGGKGGVIVPAIWAELGDAPDRWESSRHLQAEAGVVPVTIASGKSRFVQFRFACNKHLRYAMYWFAFGSLKNCEWARLYYRGQKAQGHTHPEALRALGAKWLKIIFVMWRDHKPYDENFHLANITRQKMRQAA

SEQ ID NO: 447684 - protein, 538 aa, unidentified
MFLDGRLPRAALSESLCPDTLSKVIHSRAERASKAERSEAVNNFAAMNFESNLRLGHNGSGRKVPGRTRSACPDPTRIEPRTPVGPGAFVTKSERTTPCEGPRIRTTHDKSQGPRASKTMNKPIGWESITHYAGFDWAKDHHDVVVVNQQGKIVQDLTFDHSAEGWAKWKEVVATYPHLAAAIETNQGAAVEQLLQSGVVVYPVNPKSAERYRDRKAPSGTKTDFLDAWSLGDALRVDGHGWRALKPLDPLIHELRLLCRDEVELIGKRTELVNQLQAALHEYYPAALKAFDDWTATPSWKFVQQFPTPELLQKAGRRKWEKFLHVHHLYRPELNEKRLEIFSKAQEFCGSAAVTRAKSRLALALVKLLQALEIQLEDYRKEIRRLFNEHPDHDLFGSLPGAGEKLAPRLLSEMGSDRSLFESAQALQCYVGTAPVSFQSGQVHQVYVRFLCNKSFRHAVHLWADLSRKFCSWAQVYYQQLRAKGKTHATALRCLGQRWLKILWRMWQTKTCYNPDLHLANQLKHGSWVLTIKTSTTK

SEQ ID NO: 447685 - protein, 311 aa, unidentified
MEADAIAVGVDVSKHRLDFATLGASQRGSEPNSPSGIAALVKTLAEIGATRIVIEATGGYERAVSHALFEAGLPVCVVNARLIRHFAKALGIAAKTDAIDAEVLARYAAMVAPPIRRPRAESEQEVADLMARRRQLFQMIVMEKNRLQAPGHRQAARLEAHLAWLEREVARVDRDLARWIAADPERMETDAILQSMPGVGAVVARTLIADLPELGSLGKRQISALVGLAPFNRDSGAMRGKRKIRGGRASVRGVLYMAALSGARFNPVLAAFYKRLCDAGKPKKLALAAVAHKLLVILNAMMRNRSRWAHE

SEQ ID NO: 447686 - protein, 378 aa, unidentified
MWRCTSDAQDGEVRVTVGVDTHTDQHVGVALDQFGRRLGTRSVPTTPAGFAELLAWASGFGVLEQIGIEGTGSYGAGLTCCLRARGFTVVEVERPHRHDRQARRRRGKSDPLDAEAAARVVQAGTVTGQPKAGDAQVEMIRTLRLTRRSAMKARTQAANQLHALVVTAPDELRARLRPLSVVELIALVAAFRPVRAWTALATPLAAAKLALKGLALRYRRLSAEIDALDVHLGRLVATAAPALLMVKGVGTDIAGTLLVAAGDNPDRLHSEAAFASLCGVAPVPASSGKTNRHRLSRGGDRDANRALYLLALGRMGWDPDTRTYVTRRTAAGLSKPEIIRCLKRYLAREIYRILVKSPTSVSRLADDHPMPPASARAS

SEQ ID NO: 447687 - protein, 312 aa, unidentified
MDAMVVGIDVSKDRLDVAVRPTGESFVFKRTAAGIEDLVARLKARSPTLVAIEATGGFEAVVAAGLAGAGLPVVVVNPAQVRAFARALGKRAKTDPIDAVVIAHFAEATKPQLRQIPDEMTRLLAELVARRRQIVDMIAAEGQRAGRMSDHRLTRSIGRLRKALEKELDELDRLIDDHMRGSAVWVETEKLLVSVPGVGKTIARTLIAELPELGSLDRRQIAALVGLAPWTRQSGQWRGKSFIGGGRKSVRSSLFVGAMVAARYNPQLKRFRDRLVAAGKPKLLALVAVARKLITTLNAILRDRRPWQPLAA

SEQ ID NO: 447688 - protein, 454 aa, unidentified
MAKRRTSGTKKRKSSRVWEQVNHHAAGIDAGAAEHYVAVPEESTDGPSVRKFATNTIGLYRLADWLAECGITTVAVEATGVYCVPLLEVLEDRGFKVVLAKPSSLKSVNDHQKSDLKDCQWIQLLHTFGLLRASYRPTKQVAEYRTYNRHRQNLVMQAATAIEHMKKALTSMNVRIDQAVSDVTGKTGMTIVRSILKGERDPAVLAEMRDERCAKSVEAIAEDLRGKWADHHLFELRHAVETWDHFQKLIAECNKELDKRAQAFAKKATRETMPPPRRKEHVRKNVLTFDARELFFEILGQDLTQIDGISTGTISVFLAEVGTNLDAFKDEKNFASWLRACPGMNRSGGKNRSGMNRTTTNRLWTALRIAAQTLASSKSALGAFYRRKRAHLGPEKAINAAAHKLARMIYFTIKKQRPYVDPGPDFYLKQHQEKLIKSMEKRLRQLGYTIEKAA

SEQ ID NO: 447689 - protein, 458 aa, unidentified
MKRTTKSVAEQTLPILNVNAAGLDIGSAEIWVAVPADRDPQPVRAFGTFTPDLHALAAWLKQCHIETVALESTGVYWIPVYEILDAQGIHVFVVNARHVKNVPGRKTDEKDCQWLQRLHTYGLLSASFRPDAEIVALRAYLRHRANLLEYRAGHIKHMQKALHQMNVQLTQVLSDITGETGLAIIRKIVAGDRDPVALAQLRDPRCQHSTDEIAKALTGNYRPEHVFALKQALALYDFYTQQVCECDSEIEKQFSGMKPRHDQDDLPPLDLTDKRNSHSKNAPSYDARTLLYQLVGVDLVAISGLTEVTLVNESTVQTIVSEIGTDMSKWPTVKHFCAWLGLAPHHDISGGKVLRSRVLKTHNRAGQAFRLAAQSASRSPRTGYGAFYRRVCGRLGPAQAIVATAHKIARAFYHMLKHRVPFRDLSAQDYEQHAREREIANLRKKAKRLGLTLVEQPA

SEQ ID NO: 447690 - protein, 339 aa, unidentified
MTIVMGLDQHRAQIAAEWVDTATGEVSRLRVAPAHRESVRRFLARFEGRELEVALEATTGWRFVVEELRRIGASVHLAEPAETSALRGNKKRAKNDRADARHLRELLMAGRLPESWIPPDHLLDLRARVRLRHALVHERGEWQQRMQAVLYHHGLPKRVDLLTRENRAWVEQLGLPDAGREQLTVGLHVIDAVDERLAPLDKQLCSYARRQAGCKALQAAHYGIGALTSITILAELGDTRRFSSSRQAVRYSGMDITVHASDQRRAPGHLSRQGPPALRWALYEAAQTASRTGSPDHDYFLQAAERLGRNRACLALARKLLKRSYHTLRDLGEEAIQPA

SEQ ID NO: 447691 - protein, 348 aa, unidentified
MTHSTITTVGLDIAKNVIQVHAVDAKGTPIIRKSLKRHQVLPFFANLPPCLIGIEACGGAHDWARRLMALGHTVKLMAPQFVKPYVKANQHDAADAEAICEAVTRPTMRFVPVKTPEQQALLALHRARQGFVTARTAQANQIRGLLAEFGLVMPKGMAALKQRLPDILEDAENGLPDACRELMQTLSAHLNELHRQVEAITQRIAMAHQANPLSRRLAQIPGIGPVIATALLAAIGDIREFASGRQLAAWLGLVPKQSSTGGKTRLLGISKRGDTYLRTLLIHGARSALSAAQRSKEPGATWVTRLADRRHPNIAAVALANKNARIAFALLAHDRDYQPGHSPVRATA

SEQ ID NO: 447692 - protein, 347 aa, unidentified
MRFYTRQHRHYCGIDLHARTMYLCVLDPTGAVLLHRNIPCDPTIFLQAIAPYRDDLVVAVECIFTWYWLADLCARETIPFVLGHALYMKAIHGGKAKNDKIDALKIATLLRGGMIPMAYVYPRDMRSTRDLLRRRLYLVRKRGQLLAHIQNTHHQYNLPGPSRKILYKVNRDGLAERFADPAVRRSIAIDLELVDHLDRLIRDLELDLVRTVKVHDPQTFFRLKSLPGIGKILSMTLLYEIHDIARFPRVQDFASYARLVKCARESSGKILGTGGSKIGNVHLKWAFSEAAVLFLRANPRAQAFLQKLRRQHGKAKALSILAHKLGRAVYFMLQRETVFDMHKFLAA

SEQ ID NO: 447693 - protein, 338 aa, unidentified
MSKLKNFVGIDISKLWFDAALIQTDNPSQIIHQQFTQKPEGFKKLQEWLLKNNVKADDETFFCMENTGLYNTGLVNYLLKNKAQLWVEMPLRIKKAGGFERGSDDKTAAIKIAWYAMRYQDHVKLWQPSDSSMENIKHLITQRDRIINAVTQLTVPVNELRACGCEAEAKQLEKLQKPALMALQKTKANIEGEITKAVKEDEQINKKVTLVQSIKGIGPVTAVALLVYTKSFDKFENAKQLACYCGVVPFKRESGTSVKYKASVSPFANKKLKKLLHLCSLSAIKNDKELRCYFERKVMEGKNKMSVINAVRNKLVHRVYAVLRDERMFEENYVRNCA

SEQ ID NO: 447694 - protein, 356 aa, unidentified
MKQVKILSFAGQDIYCGIDVHKKDWSICIWDDDRELRCFSQPPQPAILSDYLKRNYPQANFQAVYEAGFCGYWIQQVLSQHGISCIIIHAADVPTTDKDRRQKTDRVDCRKLAQALKEGSVKAIHIPNQQIIEDRSLVRGREQLVQDQTRYKNRILSWLHFFGIAIPEGYKKSTHFSKRFISWLEQLPINENAKSSLQTKLGALQGVRNQLLLANRSLRKLAQSERYQKKVELLGSIPGIGITNAMIFLTELDDINRFKSFDHLGSYAGLKPDIYSSSDTIIIKGITHRCNLLLRDSLVESAWKAVAKDPALLMAYKEYKKRMHYNNAIIRITKKLLRRIRYVLLHQTPYVTGIVE

SEQ ID NO: 447695 - protein, 336 aa, unidentified
METKTKFIGIDFSKATFDATIYEGEHCKFTNDDQGFKEFLAWVETHIDGLSLQDCLFCGENTGNYSVRLSNFLYVHHCTMWLESALRIKRTMGLVRGKDDKIDSAYIARYAARNAEDAVSYEPCCKNIGELRRLFARRQLLVSQRTALMNAGKEANVLGEKSKYDRALEKQNTKLITMLAKEVLRIEKMMLEVIQADERLSRQYQHITSIKGMGPINAIALISVTEGFTKYASDAKKLACHAGVAPFKKESGTSVNGGTHVSHLSNHILKPLLTQAALSAILYNRQIIAYYERLISRGKKSQVALNNVKNKLLHIVIGLIRKDEDYDIQYQPAPKI

SEQ ID NO: 447696 - protein, 409 aa, unidentified
MRIIGLDIHRAFAEAVAWDDGKLKRLGRVDMRRHLLEAFAKKLAKEDIVVVEATGNAASVAAVIAPHVKKVVIANPKQVRVIAHAKIKTDTIDASVLAQLYASGFLPEVWIPDEPTQALRRQVTRRNQIVRQRSRLKNIIQSILHSHLIPSCPHADLCGASGRAWLFHQVLPEDERLAVERHLREFDRLGEDLKVIERDLARSALGDEGVKRLMTIPGVDMVVALAIVAAIGDVGRFEQSQKLVSYLGLNPSVRQSGPGPAYHGRITKQGRGHARGMLVEAAWAAARAPGPLRAFFLRVRARRGQHVAAVATARKLAVLIWHLLSKGESYVWARPALHARKLRDLELKAGYKAERGQRGAAHAYNIKSHRDQERRWIEQAETAYARFVSGWNPRGPKGVRTGAATEVRR

SEQ ID NO: 447697 - protein, 322 aa, unidentified
MSAPVLGVDIAKQRIEVALLVDGKVKNKSFKNATEGFEALALWLRKLGIPEVQACLEATGNYGEDLGIYLHEAGHSVSIVNPARIKGFAQSELIRTKTDRIDAGVIARFCLAMEPKAWIPPSPEVRSLRALVRRADSLIGMLTQEKNRFGTAHESVIPSIKEHLDYLNKEIKKVRDQIADLIDQNPNLRQKKELLVSIPGIGRATIAVILAELDNLEKFNHVRQLVAFMGLAPKETLSGSSIKGKPRLCKVGQARLRKALYMPARVSIQCNPVIIAFYNRLKEKGKNGKVIVCAIIRKLVHIIFGILKSGKMFDPNYKPSFA

SEQ ID NO: 447698 - protein, 336 aa, unidentified
MKRVDYYVGIDISADTFTVSFYQEDQEATPSRTYPSSIEGFEESEKWFHTQGITLENSVFCMENTGVYHESLCYYFHRKGFQLSVEAPHKAKRTFDSESKTDDIDAQQLAEYAYRFFDKLSWWQPQTEIVAQVETLLGLREQFSKQLTADKNTHKAYRRKVVKTPMALEMLEANTKALTRQIQQIDQELKRLLNYDDKIRSKVKLVKTIKGVGLLLMANLFVFTNGFQDPFNSKKMAARLGISPNSFQSETSVKKKDASRQQGNSRIRKLLYLAAMSLKTHSPKFNKYYQRKFDEGKPGKLILNNIENKLLHIIGAVLRDDKPFDTDHHSINPTSL

SEQ ID NO: 447699 - protein, 417 aa, unidentified
MQYVPSVLPAEPINGLTCGIDWARDDHAITIVDEHGRQVHRSTVEHSSAGLHELVGLLARTGATEVAIERPDGPVVDALLDAGITVVVISPNQMKNLRGRYGSAGNKDDRFDAFVLADTLRTDRARLRPLVPNSSATVALRAVVRARRELVIHRVAVANQLREHLKRVFPGALGLFEDLDSAISLKFLTRFDCQDRADWLTPKRLGAWLKSVGYTGRTDPATLHTRLTAAPRGATGTEGAAHVCITRALVASLTSLVEQIKTLEKRIGEQLATHADAHTFTSLPRSGTLRAARLLAEIGDCRARFPTPEALMCLAGVAPSTRQSGKMRSVGFRWSCDKRLRDAVCDFANDSRHANPWAADIYNRAIDRGKDHPHAVRILARAWLYVIWHCWQENTAYNPAKHKALQALLEQRENPAA

SEQ ID NO: 447700 - protein, 348 aa, unidentified
MVANFTFDEYAVQCVGIDISMDKFTACLFTYNTASDLGWWTDVIEFRNNKTGFNQLVRWSRKNANKEYPIRYLMEPTSTFHEPLAYHLNAIGCTVFLIFPAKAKEFAKYEGIRTKTDDIDARTLSTIGCTNRKLKPWTPPKPIFRKLKQMCRFNVRMERMRTELTNQQSALKSGANAEVSLMNRYKALLNELDKQVENNKKLIKKTVESDSDLKERVARITTIMGVGYLTAVVIIAETDGFSLIGNRRQLASFAGLDVIAYKSGTIDTNHRISKKGSSYIRAALYWPSISASMHNPQMKELYDRIASKNTRTKMIAITAVMRKLLLLIFTLWKSGEEYDSKRSASCTV

SEQ ID NO: 447701 - protein, 356 aa, unidentified
MLYLGIDQHARQLTISLRDDNGDVLQARQVSTQPEKINAFFQRLTRERLHNGEQFVAVLEVCGFNDWLIRMLRDYRCHKVILIQPGERKKRKTDRRDAAALSELLWVNRGRLLEDKPVRGLRQIDISSAADKEVRRLTTLRKDAGRARTRIINMLRHILRRHNLQWEMPTKTFPTQLAITWLKTLVLPEIDRLELDYLLADLRYIEQRIGGLDKVIAQRCGTSEDAMLLSSIPGVAAFTATSLACRVSGVERFPRARSLANYWGLTPGCRNSGEKTQRLGSITKAGSGMARWLLAQVTQQALRKDARLREWFKRIKRRRGSGIARVAVMRKLATIIWYMLTHRKTYLACRGDLDHV

SEQ ID NO: 447702 - protein, 357 aa, unidentified
MTQVKKLDFTGITLFCGVDVHKKNWRINIQDSEFELEDFSQDADAVLLHKHLNRKYPGANFKVCYEAGFSGFSTQRYLSSKEIDCLVINAADVSTTDKEKRQKNDKIDARKLCEHLQTRKVKSIYVPELHWEHGRSLVRARTRIVSSQTRCKNRIWQLLHFSGLALPKGYEAAQYWSSRFIKELQAIDCSSEELKTTLGLYIKDYQQTKTLLLEATRAIRKLCKQPGYQKDITLLRSIPGIGEINAAVMLFELQDISRFKRFDHLCSYVGLVPNTSDSGETKRTKGITSRSNYYLRTALVESSWSVIRKDPALLMKYKTYCRKMEKNKAIIRVAKHLLSRINYVLKNKKEYVTAVVA

SEQ ID NO: 447703 - protein, 407 aa, unidentified
MEVLYPRCAGIDVHSESVTACVRVASGQEVTHEHRTVATTTRGLLDLVDWLTTAGCTHVAMEATGVYWKPVWHVLEGAFTLVLANAMHIRNVPGRKSDMNDATWIADLLAHGLIRSSFVPPAPIQELRDLTRTRKQLVREIARHTLRIQKTLEDANLKLTRVVSDILGISGRTILRALVAGETDPACLADLTKGRLKASRPQLLDALHGRITAHHRFMIQLHLTQIEALEAAVHDLEAHLGDTLEPFRAAISLLTTMPGLSDTAARVLVAEIGIDMSRFPTAGHLVSWAGLCPRLDESAGKRHSTRIRHGAPWLKTTLVQSAWGATRKKGSYLQAQFVRLKSRRGPKKAIIAVAASMLTAVYFMLRDGVEYHDLGPQHLAQRDKAQIAKRLLQRLRDLGLNVEVTAA

SEQ ID NO: 447704 - protein, 359 aa, unidentified
MSQDTPVLLPSNLSSLTIGVDLGDRTSRICELDAAGRCVREGTVATTEVAMRRYLAGRPRCRVVFETCTHSPWLARLVAALGHEVVVANPSAMFTRGARRRRNDALDAQFLARQGRADVALLHPITHRSAAAQCDLAQVRARDQLVKTRTLLINHVRGAVKAVGQRLSGCSAESFARRARGELPAALVPALLPLVEVIEVLTQRIRAADRALAQLIAERYPVAARLQQPAGVGTLTALAFVLLIDDPTRFRRSRDAGAYFGLVPRLDESSTATPQLRISKAGDGLGRRLLVSAAQYILGPFGPPCDLRRHGQAIAQRGGKNAKKRAVVAVARKLAVLLHHLWVTGAAYDPDYLLHRRAA

SEQ ID NO: 447705 - protein, 335 aa, unidentified
MEKNWEFVVGIDVSKKTLDLALGLNVPNAGVIKACFANDLKGYNKLSKWLKEQNLRFSQALVCLENTGIYQHLLVQYLVDKKTFVWVETPVQIKWSGGIQRGKSDVIDAERIMNYAYRNQDKAKKYEPKDNTLKQISDYLSLRERLQSCLQSLNHPIKELMSVGLEAEAKTVEKSCRKSVNALKMELDLLDEKILSTIEQDEELKHKYDLTTSVRCVGFVAASYLLVYTHGFTRFDSAKKLASYAGIAPFEFSSGTSIRGRTKVHPMANKTLKTILHMCAVSSVRHNKELKAYFARKVGQGKNKMLVLNAIRNKIVQRVFSCVKNQRMYTDNYAV

SEQ ID NO: 447706 - protein, 436 aa, unidentified
MPQSIPYLSVGLDVGADFTWMSIMLPNGTLVGKPFKIIHSDPQSRELAVTKIKEAQSAYSLKSRCFLESTGIYHIPLLCFLRDKGFDCSVINPIITKNSTNMNVRKLHNDKFDSKKAAKVGLDASLKTSFVPDDAVIDLRNLVRDYYYFRDLQSVVVLKLNAELKVSFPAYLDVFSKVTTQTSLKLLEAYPLAADMLAAPKNELVETIRKTARFGEKYAISKYDAICAAAKDAATFGRALPSNALRIKLYIKTYQEYQAHLDSILEELHKVVDKLQGEPVYDRICLLQSLRGVGFLSAVVLIAEMGSFDLFSSPKKLYAYFGMDLGVNDSGKFHGDRVHMSKRGSSLARRILHMIAINNLKVDKVTKAPVNPVIYDYYIRKCDSRKKMVAVGAVMHKICNIIFAMLRDNKPFEVITPEEHRERYAAEHPESVNTAA

SEQ ID NO: 447707 - protein, 454 aa, unidentified
MKPAEEFVLSRHRHLGQLSFLNTSGKNEPTPGLTASQPFPEEKEAVMEVVHLVCCGIDVHKQSLTACLRRVDATGTVAKEVATFGTMYRELLRLSDWLVEGHCPIVVMESTGVYWRPVYHVLTGNVEVLLANPHEVRQRRGKKTDKADAEWLAELLAHGLVTPSFIPTPEISTLRDLTRMRTGLVQTRTQAKNRVLKVLEDTNLKVGDVVSDVFGVSGRRMLDALVAGERDPVVLAEMALRKLRSKIPALQLALEGSFTEHHGWLIQMSLDMVDMANRQIHEMDERIGKLLEPLSSQAAQLATIPGVSEQAARVILSEIGADMSRFGSPQRLASWAGMCPGNNESAGKRRSGRTRKGNKHLRRVLVECAWATVRTDSFLGRTFRRHRARIGGKTAAVAVGHKILVIVYHLLAEGSVYDGERYDRPDPKEEARRISRAVQALARLGYEVELKKAV

SEQ ID NO: 447708 - protein, 309 aa, unidentified
MAMLAINTELGIDVAKDWLDISNGKVVVRIKNNRRAIKSYLKQLCTKACISIESTNTYHELFVELAFLAKHTIYIVDAYRLSRYRDAVGIRAKTDTNDAHLLLRYMRSEKQHLTIFEPIPKAVKRLNRLLKARAKLAKSKATIGLSLKGVAELAQTRKALMKRIEQAMAFIDKRIQVCIKDAGYSEDYSRCLSIPGIGPANAAALVAMFHRGHFRKSDSFIAFIGLDVRVRESGYYKGKRKLTKQGNPEIRRLLFNAARAAARTETWNDYYMSMRARGHSTTAAAVSLSRKIARLAFAILRDQSEFRTV

SEQ ID NO: 447709 - protein, 426 aa, unidentified
MNEQGGSRQQRKRCWAGLDWGGSGHAVSVVDDRRRVLASFAVGASLEDLESLSQRLRACGEVAGVAVEATRHPVVGHLLSAGFTVYAVNPKQSKNWRGCASVSASKSDARDGLVLAVELAGRHESLRPLRREDPAVAELAGLCEKVRDLVDERTALVQRLKATLGQYYPGALCFFSDWTSPVAWRFVKRFPRPKTLAQARKQTLCAFLKSNRVGLRPVWLERIEARGDAARWPLPADSEALEAVALATVAQLLALQPHIDKMDRLIAEQSKKVPQTTLMKSLPGAGKRLAPALAAMAALTTTGKKQNLEALRCVSGVAPVEDKSGKRQRVRARRRCNRHWRDVLYLFAHCSINCCDWARAFYDMHREQGDNHAGALRKLADKWLKIIHHMVEANEPYSDVRHVQSLRKHASWFPPEPGGKPGGKLH

SEQ ID NO: 447710 - protein, 317 aa, unidentified
MKKVSKMPTRLGETIGIDLGDKVSRYCIVDPDGEVMEEGSFRNQASSLEKHFGDQPRRIALEAGAQSAWISRELKRLGHEVIVANPRELNWITASDAKNDPADARKLALLARADVRLLAPVEHRTPNSKRNWAVIRARDAILRARTLLINSARSIAKGFGVRLPKSIIGTFGKRAIEVLPVFLRTALSGLLEQIDVLSRAIAGYDQQIGELAGKRPELARLESIPGLGRLTAMTFVLTLGRVERFTHSRDVAGFWDSGRSSGRAARAIRSWGFPKLAILICASCWCSAPTIFWAITERTRRSGDGAWPRAKAEKKPR

SEQ ID NO: 447711 - protein, 343 aa, unidentified
MEHFAGLDVSVKLTSLCIVDDAGGIIREAKIESDPDALLQVLKSGAYHFKRIGLEAGPLSQWLFSALAEAGLPVICVETRHMRAALKAQINKTDRNDARGMAQMMRAGLYRPVHVKTVRSQKLRMLLTHRKLLQSKAIAIENDLRATLRNFGLKVGMVGAVKFEARIKELVENIPDLAILVEPLLIVRRTLREQFGIVHRRLLAVVRQDEVCRRLMTVPGVGPVVALTYRSTVDVPARFRSSKAVGAVFGLTPSKYQSGEIDRTGAISRCGDEMMRVMLYEAAQSMLYSRKWSWLKAWAMQIARRRGIKKAIVALARRLAVVMHRIWVDGTEFRWTRQEAAAA

SEQ ID NO: 447712 - protein, 352 aa, unidentified
MYRKNDIILAVDYHDGNVVVRQLDTGTGEERLLKRPTTAENIRRIVADAQSLAAVSGGRVIWVMESTTGWARVKELLGSSAKLVVANVLEMPLPPKARRKKTDKIDTKRLLREVVSGKLPLAFQPPRKLRELRRIVALRESLVSRRTAVQNWLNRYLAHETWLDRDGLWSALGMGRLRSFAVGLTGLDAVTWSVKLDELEHLAPLIERVEAELFAVHKDWPLAQWIDEIYGIAEISSVSILARIGPIKRFSNAEELISFAGLAPGVRQSDGTRHYGRIGGGGTDKHLRHYIIEATIWARRIPRYQATYERVSAKRGKKIGRLVVGRLLLRSIYKMLRDGVRFDRVPQNRVVA

SEQ ID NO: 447713 - protein, 340 aa, unidentified
MDEIRTIGLDLAKHVFQLHCVNAAGECVLRKRLRRSQVISFFAQLPRCLVGLEACATAHYWARELQALGHEVRLMPAQYVKAYVKRNKNDAADAEAICEAVRRPTMRFVPVKTADQQAAVLLHRGRERLVRQRTTLVNALRAHLAEFGVIAPAGLRNVGQLIAIIRDESDRRLPDLARPVLQVLAAQVEQAEAAVATVEQQLMTWHRSNPVSQRLATIPGIGPIIATAIAATVVEPSGFASAREFAAWLGLVPRQHSTGGKARLGGISKRGNRYLRRLLINGASANLLRSKATNADPWVIGLRRRRPSLVVAVALANKTARIAWAVMQRQVNYRSMAVAA

SEQ ID NO: 447714 - protein, 403 aa, unidentified
MNNVAGIDVSKGKSMVSVLRPFGEVVAKPFSVGHTGSELKELADYLKSLDGETRVVMEHTGRYYEPVARFLHEEGVFVSAVNPKLIKDYGNNTLRKVKTDKADSRKIARYGIDNWAELRQHTPMDTIRMQLKTLNRQQSLYTKTKTMMKNNLIALLDQTYPGVNALFDSPVREDGSQKWVDFATTFWHVDCVRNMSLTAFAERYRKWCKRHGYNFSQSKAVEVHTGAQDLIAMLPKDALTKTMVRQAIDALNAVSASLERLKAEMQALAAQLPEYTVVMAMHGVGDSLGPQLMAELGDVTRFTHRNAITAFAGVDPGADQSGTHEAKSTRVSKSGPPELRRALFLVMDCLLKTQPQDDPVYRFMDKKRAEGKPYLVYMTAGANKFLRIYYGRVKEYLASLEGN

SEQ ID NO: 447715 - protein, 335 aa, unidentified
MLYVGVDAHKSTSQITVMNEAGVILGRKRVHSTSEGFKEALAGYNEPFKAVLEASYSWGPMYDWLDDMSEEVLLAHPLKVRAIASARIKNDRIDSEVLAHLLRANLIPAAHAPSREIRALRRVLRQRMFFVQLRTMLRNRVRALLAQHSVKLPENESLYTKQGRAWLDQVTLPDSDAHLLHADCKLHDNIEVQIASTDTLINKLAAQDPSVKWLISLPGIGRFLSVLIRWEADDIHRFPDAKHFVSYTGLAPSTYASSSRLVHGAINKQGNKWLRWGFIEAVTPAVRSSDFIRDHYMKVKSRRGTNDARCSTARKLAEITYTVWSEQRCWEETRS

SEQ ID NO: 447716 - protein, 412 aa, unidentified
MYFVGIDWADQKHDVTIVDESGACLAKNFSVKKSVQGFTQLLDKLRSITEDSQTFKIGIETPNNLVVDYLVDLGYAVFAMFPGSMKSFRKRYRSSSARDDKFDSYVIADVLRTDKACWRLVDFGSERIRQIRLYAWHHHHLVEDHVALANALRATLKEYYPAFLEFFADVACANALVFLCAYPDFDAAVQLSHEQLAAFFKEHHLRNGKIVQHIYARLHQPHLRVPPAVVEVKKIKMVSCAKRLLSLAPDIEYAAQRLTALVDQHPDGQIFLSYPGVAHGTAARLLALFGDNRARYQEVSDLQSLTGTCPVTQSSGKNFRAIYFRRACNKFHRDTMQNLAFSSLKEAPWAMAYYQKHKAMGKKHSHVLRCLANLHLRILFTMWKNRSRYDENLFLAQRARNQIANQKTQFLT

SEQ ID NO: 447717 - protein, 438 aa, unidentified
MRKKKNKASKRAHFQSLPLIHPNAAGIDVGAKEHVVAVPCDRDPQPVRTFQAFTPDLHELAVWLKRCGIETVALESTGIYWLSLYEVLEQHGFEVRVVNARHVKNVPGRTKTDVLDCQWIQKLHSFGLLNGSFRPDHQIRELRTYMRLRDNLVVEGTQAIHHMQKALFEMNVQLSNVISDITGESGLRIIEAILAGERNPEQLAALCSTRIKASRQTVAKSLHGNWDEALLFCLKTALETYRFSKNQIQDCDHCIERQLATFEIRIPLPNARQSLRTQLHQVCGVDLTKIPGIKEQGAQIIISEVGLDMSRWNTEKQFSSFLGLCPNNLITGGKILRRATRKVYNRAADTLRLCAQSLTHSKSALGAKYRRLRARLGAPKAIVAMAHHLARLVYRMLRYGENYVEKGIEHYEQKFRLQRIKWLKKEAKSLNLQLVAAQ

SEQ ID NO: 447718 - protein, 409 aa, unidentified
MDVVISRCAGLDVHQATVVATVRVPSPTGGRDVVTTTFGTMTPDLIALREWLQAYGVTHVALESTGVYWKPVYYVLEDGFTLLLINMQELKRVPGRKTDVKDSEWLAQLLECGLLRASFVPPPPIRELRDLTRYRVQQVRDRAQEVNRLCKVLEDAGVKLSTVATNVIGVSGRAMLQALVEGTTDPAVLADLARGKLRKKLPDLRRALTGRFRPHHAFLLEQVLAKIDFLDEALDRLMAEIESRLGPFASMLTALDTIPGINRVGAISLLAETGGDMTRFATAGHLCSWGAMCPGQNESAGKRHSGKTRKGNRYLRAALIQAALAASRAKGTALQAQYLRIRRHHGHKKAVVAVGHQILEIAYYLMRDGGSYHELGPSYFDQRNKQRTIRRHLKQLEALGVHVTIQEAA

SEQ ID NO: 447719 - protein, 391 aa, unidentified
MSMYFIGIDISKYKHDCCIISATDQKVVSKFSIKNDKAGFEQLLTIFHSLSNPQDIKIGFESTAHYALNLELFLENANHSFMEINPVLIKEYKKSTSLRRTKTDSVDCESIARWLMTVEYKPHSKGFYHAYSLKSLTRLRDRLVRQRSFYLVKITNVLDHTFPEFKPFFHERFSKTALYLLENYGSAEKMARMNSASYEKLRSLSRGNFSPQQFLRLKELAANTVGVNNSIFDVERNSLLTLYQSLVKEIDTLETEINKLIEEVHPHYMSVPGIGTISAAVIYSEYGDISNFSTPAQMLAFAGIEPGVNDSGTESHGGGMVKHGSPGLRYVLINCCLPLIRFDMTFAAYYAKKRGEGKPHRVAITHVAKKLVRVIHALERQGVDFNAQKLQ

SEQ ID NO: 447720 - protein, 339 aa, unidentified
MTKYVGLDVSQKTTVLCIVDGEGHRLWRGECSSSPDQIVHTVLQHAGAGASIGVETGPMTPWLVHELRARGLDVICLDARHARAALRMQLNKTDRNDAEGLAQIMRTGWFRAVHVKSFDAHRARALLGARQQLVGMVTRLSNHIRGVLKTFGMLPGSVRGRSFAERVELLVAERLDVAPIVRPMLTAWSKLREQIAAFDKAIRAEVKQSRECRLLMSVPGIGPVTVLAYVSAIERPDRFRRSRLVGAHLGLTPRQYQSGDVDRSGHISKCGDTLARLCLYEAATVIMTRVKRPLGLKIWAMKIAKRSGTNKARVALARKLAVILHSIWRTGEAFCWGAH

SEQ ID NO: 447721 - protein, 428 aa, unidentified
MDFTQNQRLAQMNERTLIIGVDVAKHKHVARAIDDRGRDLTKRLVFANTMDGFSNLLTWARELSEAHDRPDLMIGMEPTGHYWLNLAYHLKARGIHTVVVNPMKVKRFKEMDDDSPTKNDTKDAKVIAQIVKDGRFHEPTLPEDVYAELREGMKVYDIMQEDLSSIKAQMQNALDRYFPEFLQVFKDWTGKAALHLLEKGFLPEDVRQASEEALRAEVKAAAKRAVGTKRIQALKQAAETSVGLTVGLRMAREEFRYLIEQYKRIEERLVALEAQLEELVLHVPGADQMTAIKGVSALTVAGFFAEVGDLANYRDPRQIIKLAGLNLKVNQSGKFKGQTTITKRGRKRLRSLLFQVARPLAFHNEAFRKLHEHYRHRSTNPLTGKQSFVALSRKLVKIFYTLGTRECAFSETRMIRDIPGISDLQEAA

SEQ ID NO: 447722 - protein, 340 aa, unidentified
MNATTYGLDVAKRVFQMYWVDAQTGEIVNRRFRRDELIGFLAQRPAGRVALEACGSGHWWARKIKALGHEVVLLHAKFIRPFVQTNKTDAADARAIWTAVQQPEMRTVAAKTEDQQAMLSLHRMRALLVKFRTMQVNQLRGLLYEFGVTFRAGRLAGLAEIRARMAELDDALPGAMLCSLQDQLQRIEALEQDIARLEQRIGAWQKQEAACRALAAVPGIGKLIATALVATIGDAKTFKSGREFASFLGLVPRQSGTGGKIRLGSISKRGDPYLRTLLIHGARSVMCHAKVPTTWQRKIQARRPANVAAVALAHKMARTAWAILAHGQAYQKDYVSVKPA

SEQ ID NO: 447723 - protein, 416 aa, unidentified
MNERGTVAAGIDTHKDTHALCVIDLVGRVVATGAYAADGEGRDRIAAAIGDPRDCVVVGVEGTGSYGAGISRRLAELGYDVVEVVRPKREKRMAGRDKNDPADAERAARDALAGKASGAPKAGGGWVEALRFRMVARDAAVSESTRAANSAHALIVTAPAPIRGELGGMKTPALMKALSRRRRARDVVESSLWESLRSLSLSWIGAKKAAAAHEEAMREILLANAPALLDIHCCGTISAARLAVTAGDNPERVSGESAFASLCGASPVEASSGKVKRHRLNRGGDRQANRALHTIARQRMKRDSRTKLYVDKRTKEGKSRREIERILVRYIAREVYGALMRPMDAACEPYRASARAAKSERLRAGAAQAQASRALGVASARISEMERGRLVDAPLLQRYRSWLESLSAGERRESPE

SEQ ID NO: 447724 - protein, 369 aa, unidentified
MGEYNEAFVAFDVAKIKHAVAVAEGGRTGEVRFLGEIENREGPIERTVKKLAGRYGRLHFCFEAGPTGYGLYRQLQALGHDCMVVAPALIPKRPGERVKTNRRDAVTLARLHRAGELTGVWVPDAVHEAVRDLVRAREATADDLRRKRQQLLSFLLRHSRIYSGSGHWTLAHRRWLASQAFEHAAQQIVFQDGIDAIEDAIARRRRLEEQLVAIVPSWSMAPVVEAYQAMRGASFLVAVTFAAEIGDVRRFDNPRQLMSFLGLVPAESSTGDTVRRKGLTLAGNRRARRALVEAAWTYRYPARVSETLRARLEGLPKAVRDIAWKAQVRLCARYRRLSATGKKPPVVVAAIAREMAAFLWAIGREVAPG

SEQ ID NO: 447725 - protein, 404 aa, unidentified
MPNFYVGIDVSKFKHTCCIISDQGEVIQKSFDFSNSKEGFTSLLNALKLIAEPHRFQIVMEATGHYHEALFRYLLANEFQTQIKNPVVISRFKDSEFVDKAKTDKLDALLIANYALRHSFTPSLLKSYNILRIQKLARAKYYLYQDRMRVINHLHRYLDESFPEFVKFFKERDDKVKRYQGRNFFDSPTILWLLLNFPSAKKFANARIETSEKLRRMSKGSFSLVKFNKLREVAKNSIGVSFLETEIIIVQLVKDLISVDENNEELDRCLEPLIDEFAPQLLTIPGIGYRLAGLLISEIGDATQFSTPDKLIKFAGLDVRVYQSGTVEKRGGIRKRGSPLLRYALFQAAEKARIHCPELAEYYSKKKSEGKHWICALTHTARKILRTVWALLTTGQSYNPNSIH

SEQ ID NO: 447726 - protein, 338 aa, unidentified
MCSVKVFVGLDYHQDQVQLCVLDESGTVLCNRGISNSAAVIRAAAERYGCVQAAALEACCGSANLAQELSDLGWSVSLAHPGFVARMKQNPDKTDFADARLLADLLRVGYLPKVWLAPERLRRLRRLVRYRQQLVDQRRDTKLRIRALLRENRLRPPSDVSPWTKRWVAWVRHVAALVEEDRWIMDQHLEMLAGYGEKIAFVESQLRQWVADDAVIKKLMSLPGVGLVTAVTLRAEVGRFDRFLNGKQLARYCGVTPRNASSGKRQADAGLIRAGNPQVRRVLIELAHRLVNRLDDRWSALAWKLLREGKKKNVAVAAVANRWTRWLHHQMQPGALVA

SEQ ID NO: 447727 - protein, 351 aa, unidentified
MKVTTIGLDLAKDVFQICAADANGKILYNKQLRRHQMAEFFTKLPTCLIGVEACGSAHYWARKLQAMGHEVKLMPPQYVKPYVKTHKNDAVDAAAICEAVTRPTMRFVAVKSEEQQALLALHRVRQSFVKDRTAHSNQIRGELAEFGLIVPVGLSALRKRVPTLLEDPLLPAAFGQLIQRLLDEVLHLDEQIKLLERDIVLWHRSSELSKRLAQIPGIGPLTASALLCSIGDISYFKKARQLPAWLGLVPRQHSSGGRTTLLGITKRGDCYLRTLLIHGARSAILAAQRKEQSPEQPSWLHKLLARVHPNIAAVALANKNARIAWALLAKHQDYKRGYDPSLSALPLAHVA

SEQ ID NO: 447728 - protein, 316 aa, unidentified
MTAQCVAGIDVSKARLDVFVLPQRLAFACTNDEAGITMLRQKLQGLGVERVVLEATGGLEYCAARALADAELSVERVQPGRIRAFRTVLGKRAKSDPLDAKLAARFAQAMPEEQARSVPSHQAEAIRSLSARRRQLVDLLVQEKTRLKMSRDPFVLESLKITITHLKQERARIEALLESAIEKDAAIARKNALLRTIPGIGPVVATTLITDLPELGRLNRHEVASLGGLAPHPERSGISRPGDHIGGGRACVRTALYMAAVCAIRCNPGLKTFYKRLVEGGKPRKVAVVAVARKLIVLANTLIRTDAPWNPAFGIG

SEQ ID NO: 447729 - protein, 452 aa, unidentified
MARSKRSRAERDISLTHPDAGAIDIGSRMHVAAVPPDRDKSEPVRTFGTCTGDLQRLVDWFERCGVRTVAMESTGVYWISVYEILEQRGFEVMLVNARDAKHVPGRKTDVSDAQWLRRLHEYGLLRASYRPKGELAALRAYLRQRERLLDYAASHIQHMQKALMQMNVQLHHVVTDMTGATGMRIIRAIIESERDPMALASHRDPRCRASAGEIGAALSGNWREEHVFALRQAMELYDAYQAKIAECDAQIEAVLGRLREAAARPAGPLPPARHREATANAPSFDARAALHSVLGVDLTQIHGLGPSLALKLVGECGTDLSAWPNAKHFTSWLCLAPGNKISGGKVLSTRTRRSGSRAAALLRLAAVTVGRTQTALGAFYRRLSARVRKAKAVTATARKIATLFYNTLRHGMAYADPGASYYEDRYRARVLANLQRRAKSLGYVLQKELSPT

SEQ ID NO: 447730 - protein, 347 aa, unidentified
MDKVIVIGMDMGDKNHKAVGLAENGEIVDRCEVACTPAAVREYLMRHPGALLVIETGTHCRWVCRIGLRLGHAVLVGNARKLRMIWQSSRKNDWNDAEMLARLGRTDPKLLSPVRLRDDEAQELLRLLKVRDLLVKERTMIVTQIRGFCKSEGARLPSCSSEAFGRKDFETPASLRMVTKPLFAVLRELNKKIGLYDKMIAKVLKTKYADDAKLLESVNGAGPVTVAAFLATIGDPATFGDARDAGPYYGLVPKQDQSGETDKQKRISKEGNEMVRRLLVTAATYIMGPFGKDCDLRRHGLKIAERGGRNARMRSRVAVARKLAVLMLAMLKNRIPYRPLMQVENPV

SEQ ID NO: 447731 - protein, 359 aa, unidentified
MGEYSEAFVAFDTAKVKHSVAIADGGRSGEVRFLGEVSSSPATVARLIGKLAGRYQKLHVCYEAGPTGYGLYRQMRALGHDCMGVAPSLMPKRPGERVKTNRRDAVTLARLLRAGALTPVWVPDATHEAVRDLVRARAAAADDLRRKRQQLLSFLLRHGRIFEGRSHWTMAHRRWLAGEKFDHPAQQIVFQDAIDAIEDAVARLRRLEAQLVAIVPSWSMAPVVAACQAMRGAAFLVAVTFAAEIGDVRRFANPRQLMGFLGLVPRERSTGATVRRAGLTLAGNRRARRVLVEAAWSYRHPARVSQTLQDRLEGLPKTIRDIAWKAQIRLCGRYRRLSATGKKLPVVIAAIARDCAAID

SEQ ID NO: 447732 - protein, 458 aa, unidentified
MKKQDSYDYYVGIDCAQNKHDFAMKNNQDKFLIKRGHFSNTLQGYEKFLNTVLSKCLNKDKILFGMEVTGIYGTNLYERLKSDGYHVVMISPDSVKNYRDYKRLNKTDKIDSGCIAELLLNGDAQIVHVAKNGYTDLKAYIRRRNALKVTCTQETNRFLAKVCLYFPDLLKVFPSGRATLKAIFSIYPTPYSIIEADFDELVSVLQKASKNKFGVDKANELIHAARNSIVVRKSISDGELYNIHSLIDSIDSLESEIRNLEKIIDSKAEEFPAYHVLLTLTGCGKITAATIVAEIGDISRFHKASQIVSLAGLYGDNSKSGSSVNKRGKISKKGSRYLRHAIYMVAEFARRNNPIFKAYFTRKKNGDRTKHTLAVNAVANKLCKVIYSLMKNQSTYIIQYRDLVKLSESTQNEFFQNAETDFSAKTRRKKYLYEDEYGELHEFVFKSVSYTHLRAHET

SEQ ID NO: 447733 - protein, 423 aa, unidentified
MENNAARKRKQVPEGYLIIGVDPHKRKHAAVAITQDFTIRDKFKFGNTREGLETMLRRARMVMVKSACRGIMFAIETGGHYWRNVAYFLDEQGVLFRFINQFTLKRRREGKDLNRRKNDYRDSEVAAQLLCTGEFTESTIPQGVYAELRTAHNAYRRLVKERTRITNLVKGLLDALFPEFTLVFKDPCGLTALSVLSTCPIPGVITGMTEEEFVATIEAKHQGRLMRKKLRALHHMARASIGIAAGARSVSSEISFLVEKLELISGHICIIERTLVSLVDETEEGKYLLSIRGLNYIAVAGLLAELGCFKAYRSAKQMIKMAGSNPTESESAGKRGSHTPMSKQGRPVLRYCAWTSVIPMLRFNPDFRAWAKQRRERPAHANPLNGREIVGAALNRLLRLAFALVKNRTYYQFSKPELTLVAV

SEQ ID NO: 447734 - protein, 387 aa, unidentified
MQKPHDNSKASPAAFMQDNTLIAVIELGLSNWLVAGLIPGVSREPLKKLEPNPEDLLKLLHGWRDEAIKAGRPITRIAVAYETGRDSFWLARWLRERGIDAHVIHATSVAVSREHRRAKTDRLDTAMLKRGFLGWLRGERGHCTVAIVPTMEEEDAKRPHREREGLVHEQTRVVNRMKSALIQFGVRNFNPKLRKARVKLQTVRTPEGKSLPPNTIAALRRDMERLKIIKEQIKAIEQTRLQQFEQKPEALANRMVYLLVRIYGLGWETADLLVHELLSRTLRDRKAVARYAGLTGSPDESGSKRREKGLSRSGNARVRKIMIQLAWRMVKFQPDSALVQWFKQRTENAKGSRKPMIVALARKLIIALWRYANDGVIPEGFRLHSAA

SEQ ID NO: 447735 - protein, 365 aa, unidentified
MPTRKLQNPEDFSGQKFYIGIDVHKKSWAVTVRSLNFVVAHFTQPPSTKALLSHLQGKFPGGDFYSAYEAGFSGTGVHEELCKLGIKNIVVHPGDIPRTDKEQKNKTDIHDSRSIAFNLEKGNLHSIYVMPRHQQEFRALFRLRESKARDVARAINRLKSCLLYFGIDYSSIFEGYISAKVITWLRKLHMDNEAGSFTLKKYIDDLAHQRTELGKITKALRSQAKKSHNIPYNCLLSVPGIGHTTAIGLLAEIGDFGRFKDPAEYCSFLGLIPWQHSSGESIRVKGIQPRCNKHLRPLLVEASWLAIRNDPSLLKYYRKHAVKNSRHAIIKVARKLALIAKGVVQKLQMYQADYFPLSNQGLVTQ

SEQ ID NO: 447736 - protein, 335 aa, unidentified
MKKFYVGIDISKEKCNLCYRDGLEIVMEEESVNDVKALKKSLSAVLKTFSVAIDEVLVCAEYTGRYIYPLTVACQELDIFLWMDDPTRIKNSMGLTRGKNDVIDAARIAEYAYRYSDKASRYCIPDAALVSMKSLLVDREFLLIDKKRYQSQITDQKRYMASGDFKHKCARWNKVIRALDEQIKAIDAEIESLIAANPVLTRQKKLLTSIDGVGDRIAINMIAITGGFSRFQNARQFCSFAGLTPYKYDSGTSVRSKAKISKRANQTMKALLHLAAVGAATHMKESEYRDYFDRKIKDGKHVMCILNVVRAKIVHRMFSVIRRDTEYTKTYKPSV

SEQ ID NO: 447737 - protein, 417 aa, unidentified
MRKARAIVGVDCGEQRHRFVMIDENGERVASCWVENDLGKIFQSFDELGSLSETAKLEVVTESIGSLGAMVSQALRGRGDELFVVSTKALRHYRDLEGQPHKSDDRDAYLAARMQLFGMEGVRTPAPVSEEEQALARLIRLRSRLMDQKKALGLRLRSRLLELAPVMASKDWEGPRHSSRAMVAILQRWPGLVGLERAHRKSIEKLLRKVTRNGDACVKLAKHLREAAKTTALEGMAREVLTMEMTILVAQFEANHKQLEQVRKRENELVDAHPVGQRLLTMPSVGYRTAAVLLAESLPQARVRSEAQLATYSGLTPLSRQSGNSSRSRLSRGVNRFLASAHYMSAVNACTRSPIDKTYHDKKRKDFKGHPAEFKKATIALARQRHKVIYRILAMGEVYDSSRLAASTVNRPRKTAN

SEQ ID NO: 447738 - protein, 347 aa, unidentified
MRFYTQQHRHYCGIDLHARTMYVRIIDQDGTILVEKNIPARPGPFLELIAPYRDDLVVAVECMFTWYWLADLCYEEGIAFVLGHALYMKAIHGGKAKNDRIDAGKIAALLRGGMIPRAYVYPREMRSTRDLLRRRLHLVRHRGRLLAHIQNTNHQCNHDAFGAKLTYKANREGVAERFDDPSIRKSVEVDLALIGHYDGIIRDLELFIIRMAKQHDADMFHRLRSITGVGKILALTILYEVHDISRFETVQQFASYSRLVKCSRESAGKRMGTGGAKIGNVHLKWAFSEAAVLYLRANPTGQKYLARLTGKHGKGKALSILAHKLGRATYYVMTRSRNFDGKKFLAA

SEQ ID NO: 447739 - protein, 352 aa, unidentified
MYYVGLDLHKKYITGCALDSQGAVVATERRLPPVLETMLGWLAPLGQPVAVALEATLYWAWLHDRLTAAGYQVAVAHPQQVKLICHARCKTDPVDARKLADLLRTELLPAIWIPDAETRARRTLLRGRAWVVRTRTRVKARIQAYLAAENERVPVSDLFSRGGRAWLATVALPPEVRSQVDRLLALVEQLDVQIAGQDRTVRELARATPEAERLQTIPGIGPFGALLLLAEIGTITRFGSSHELAAYAGLVPSTRSSGGKTAHGSVGPAGSAWLKWLLVEAVQTLKRQPGPVRSQYERLLRAKGKPKATVAAARKLCCYVYWMMQEGRSYDDWLRQRHQREVRPIQAVAAVA

SEQ ID NO: 447740 - protein, 364 aa, unidentified
MEAAGRFVGIDLGKRTYEMCLVDRKGKITRTNGKTDFKGLDKLCEKLSAEDLVAIEACNLAMRIERQIRQTVGCKVLVLNPGKLAIIYMSTRKTDKEDSLKLAKLLKNHDEDELPIVTPPTDEEWERRKLLSEYKSLKGMRTKEINKLHAIFEHAGYTQFKRKDMCCEKNRANILPLLKGYEKEEAERLVERLTLLERQIGLLVQKINAEVESDEKAQLAMTVPGIGPITALAYVAYMGDLSRFDNPHQVSNFIGFVPKVDNSCTIRHSGRTTKNGNALLRSMLVQAAWGAVRSKDGGALRDKYKYMSQTKGIGKGKSIVTTARKLGELLYMLLKTNTEYKPQKFILPEVQISKMADEALAVNL

SEQ ID NO: 447741 - protein, 475 aa, unidentified
MNVKGTKKKNQVVTANIFEQQELLKKAEVIKKNLTASTWRELETNGKFDKNEKLSFISDDMLILGCDVGSETHYLRAIDTRGRELSKSAFPISNDSEGFQSAKEWAVRIAADHDKKQIVLGLEPTGHYGFCLATWMISNGISVVQVNPYAVKQTKEVEDNSQLKDDTKDPKLIANLVKDGNFGMSYLPEKLYAELRRLSMFRDQLNEDRIRAINRMHREMKIYFPEYKDAFGKVDGAFSLELLKAAPFPDDLKALDENGIRQIWREAKLRGGGYSRSGEILGYARLSVGIRDGADAAKIAVQWFVKKIMELDEELAVIENLINQKCQEIPHAGNILEISGIGENTLSGILADMGDISRFDDVKEIQKLSGLGLVACSSGKHKGETKISHRGRKRLRYWLFQAAKSAVAHAEEVKELHVYYTTRPDNPLKKMQSLIVIACKLLRIVYTILKKGTVYDPKKMLMDIRRPEKKEAIAA

SEQ ID NO: 447742 - protein, 412 aa, unidentified
MNIVYERCAGIDVHKRSVVVCAITPDQQGQRHKQQDTFSTMMPDLLRMRQWFQSLGVTHVAMESTGSFWKPIFNVLEGYVEVLVVNAQHLKAVPGRKTDLKDAQWIADLLQHGLLRPSFVPPAFQRELRELTRYRSSVVEERSRTINRLQKILEDTNLKLSAVATDLMGLSAREMLAALLAGETNPTVLAELARGKMRAKRDLLVQALQGQFKPHHRLLIGEQLTHIDALDEEIERLSADIAQRVRPYEAQLKRLETIPGIKRRLAEVILAEIGPDMQRFPSARHLASWAGMCPGNRESAGKRLSGKTRKGNSWLRTALVEAAHAATHCKDSYLAAQYHRLVLRRGGKKATIAVGHTLLVIVYHVFADEQDYQELGGNYFDDYDRQAVQKRLVHRLEKLGYEVTLTPTSPAA

SEQ ID NO: 447743 - protein, 354 aa, unidentified
MQLQDANTPKLFIGVDIHKLTWSVSIQTDLFFHKTFSIPSETEVLYQYVEGHFPDHEVYVAYEAGCCGFHAARYFLNLGWEVLVVNPADIKLSDKDRYLKTDAIDSKKLSDQLKKGDLKGIYIPSEEHEQLTSLARHRSQLTRQLRRSKVQIKSMLLYHGIKIPEQYDNNYWTHAFLDWLESLDFRHDPGNYSLSGKIRMYRFIKLEYQQTANQLRAYCRKHHRQDYELLRSIPGIGGFLAAVIIAECGDLRRFNNEKQFASFIGLVPGIYSSGQSEKSLGLTHRGRHQLRSYLVEAAWIAVRKDPEMQAYYRKHYGKNVKNIIIKVAHKMARRILSVIKTETPYQVNYSLKVE

SEQ ID NO: 447744 - protein, 299 aa, unidentified
MQYRTNIELSSVEETRGQFNGGTGVIKLGIDVHQDFYVVVEQVGGSCPKPAQRFQKEAFLRWAAKLKSQGGQVHAVYEACGFGFALQRQLSALSIHCHVVCPQKLDEQNRRVKTDGLDAKALCLKLDRFVQGNRDALALVRVPSEKEEQLRAVHRQREQLVKVRKQLEAQGRSLLVNHGIEPVKSWWKPRTFAALQVPEWMKELLQNSQPILLALQEKIAALTLQLQNAATTNQPRGLGALTSVIIDREIGDWRRFNNRRQIASYTGLCPGEYSSGNTRLQSCVTKHGNPRLRELRWWN

SEQ ID NO: 447745 - protein, 460 aa, unidentified
MLITRGFGQHMIPRINLLLQAPRILDRKGGDIMIKINPLSSLYVGIDVSSKSNYVCALDFYKNKYINSSFANNQPGAEELAQKILECLKEHPDLNTVVAALESTSVYSIHIANYLSSCEELLHLKPYVFVINPKCTANYKKSYIGVGKSDPIDAFVIADYARAGNIETEPWRGSQFLALKRLTRHRLHLVECMTREKAYLVSNLYLKFSELQMLEKDDQPFCDIYGATSSSILTEYLSPEDIVSSSEEELVSFLAEKSRNRIKDISKTADLLKKAARDSYRLDKALYEPLNVSIASSFNCIETFKKEIKVIDAAIEREIKGLNPNAFIILQSIDGIGPVFAGGIVAEIGDISAFHSSDALAKYAGLMWKSNQSGDFDGEDTPMSKAGNRYLRYYLGEAANSMRKHNVEYGAYYRKKYNEVPKHQHKRALALTSRKFVRLVYGLLARNQLYSGVSLDTSNE

SEQ ID NO: 447746 - protein, 368 aa, unidentified
MNMNAVGIDVSKGKSMIAIIRPYGEIISLPFEIQHTSDEIRCLIDQIKSIEGEYRIVMEHTGHYSAPLASELSLAHLFVSAVNPKLIKDFGENSLRKVKSDKADALKIARYALDSWNDLKQYSLMDEIRNQLKTMNRQFGFYMKHKTAMKNNFIGILDQTYPGVNTYFNSPARDDGSQKWVDFAAAYWHVDCVRKMSLHAFTDHYQKWCKRNKYNFSQSKAEEIYGATMKLVPVLPKDALTKLIVKQAVDQLNIASKTVEELRTLMNATASKLPEYSIVMAMKGVGASLGPQLMAEIGDVRRFTHKGAITAFAGVDPGVNQSGTYDQKSVRTSKRGSSTLRKTPLADFTSRSLNFNQSIFYRFHKNMR

SEQ ID NO: 447747 - protein, 388 aa, unidentified
MQFAADRLEAPTAIRTDLGAIFISLELSRSSWVVTSLSPGGGEKMSKHTVRGGDVAGLLKRFAQLREKAKGRTGKVFPLIVIQEAGLDGFWIDRVVQNEGIESHVVDPASIATSRRRRRAKTDGIDGEALVRALLAYKRGEPRVCSMVRLPTPEDEDRRRLCRERKVLIAERVKHVNRIKGLLFSQGVSGYEPLRRDRRERLDALQTGDGRPLPPHLKGQVHRELDRLELLIAQIKTVEAERDALLAVEQTTAPVPPAMLLGVKGIGPEFAAVLWSEGLSRPFENRRQIAAYAGLAPTPWQSGSVDREQGISQSGNPRLRTTMVQLAWLWLRHQPDSALALWFHDRVKRNGGRLRKTTIVALARKLLVALWKYVTAGVVIEGAVMKTA

SEQ ID NO: 447748 - protein, 453 aa, unidentified
MLKPGVPHSKMEIADRQVGEQHKTGGGTNMNNTQNQKIAQVTDKTLIVGVDIGGEKHFARAILARGYEVSKKPFPFMSTEEGFESFVTWAYNLADSHKLTKIMIAMEPTGHYWFTFAAFLKKYDVQVVLVAPQHVKHSKEMDDNTQEKDDRKDPIVIARLVPEGRYLIPYIPEDVYAELRAAFNRRCELVEEQVQIANRMIRWFDIYFPEYRKVYGRIDAKTGIMILKRAPLPADILGLGVDGICQIWKDAKVRGYGPKKAKQLFAAAEHSVGMEGCASVRWNLWQLLEEYELIERQLNDILQLIEGCLHQIPGADKLLKVPGAGLVTVAGFLSEVGDIKRFSDPKQIQKLAGLAVVENSSGKRKGLPGISKRGRCRLRWVLFQLARSMVMFNSEMKAYHQYYTTRKDNPLKKLQSLIAIAARIARIFYGMLKNGTEYDPTMVMKDFNKAVAA

SEQ ID NO: 447749 - protein, 462 aa, unidentified
MPERNDGETGESNRRQLQGLPVIRRNVAGVDLGSERHWVCAPTQDGSGREIASFGATTPDLLRLAEWLKARQVESVAMESRGVYWIAPHEVLEAQGLQVLLVDTRQLARVPGRDKKTDPSDCEWIQRLHSCGLLRGSFRPEEAVCMLRTLVRDKANLVAESADWLRRMQKSLDQMNVRVHRAVSDIDGVTGMAILRAIAAGERDAQKLAKLRDRRCSKTQQEIAEQLAGHWREDHLFSLQQALKMYDAIQERIAAYEQEILRKLGEMEEPGQRGQTAPPLNNTNKARAIQKRGQESKRQALYRMSGVDITQIDALGVETVEVVLSEYGPDLSRFPSEKEFVAHVTLAPHVPSSAGKPLKRKKRNSASTRVAAALRMAALSLRHSQTALGAYYRKLAQRLGGDVAVFATARKLATLIYRLLRWGQPYLDEGVEAYEKRYRQQRVKSLTAKAKDLGYELTAVNA

SEQ ID NO: 447750 - protein, 324 aa, unidentified
MSSHEIVGIDVAARKLVVIGERLALAEYENTAAGRSKLVNALSRSPQPVRVVLEATGMYFLDLACELAAAGIAVMVVNPKATHHFAEAILQRRKNDPVDAAMLREYGRRMDFVSWQPPRHELFGFRALTREVQALSKTVAAARNRLHAITATQLAPAVLIGALERQIAHNQTLIDELVAAALAQTETDPELARLFARTDSVPGFADKAAVLVIGELAVLPPMTARQWVAQAGLDVREESSGTSLARRPRLSKRGNKRLRQTLFYPALTAARCCPAAGAFVERLVAHGKTRLQAIVALMRKLLHGLHAMWRNDEDFNAEKLFAQA

SEQ ID NO: 447751 - protein, 319 aa, unidentified
MSKTEQTALAVGIDVSKGKLDVDLAPTREPRQFVNASAGHVALVEWLSQVDIRIIVIEATGGYERSIVAELAAAGMPVVVINPRQARDFARAQGRLAKTDPIDAAVLADFGLAINPPQRPLPSAELLEIQEKLARRRQVVAMITSENNRLEHAAARTVRRSIEAVLKLLQKQLRQIEEDLDQTIRGSEVWQDKANLLESVPGVGPQTSRTLLFQLPELGECSRQEIAALVGVAPMNRDSGIFRGRRTIRGGRGEVRASLYMATLSASRHNDKIHAHYQHLLATGKSKKLALTACMRKLLTMLNAMVRDHKPWKPVPRGT

SEQ ID NO: 447752 - protein, 350 aa, unidentified
MLTELVHHVVGVDPDRDWITLAVLDACSAGVVAEGRFPATRDGYDEAITFVDGHSVDSERAWVIEGSAGYGRGLAVALSRRGEWVIEFDRPTRKTKDGAKSDALDAVRAAREMLGRKRLSVPRAHDGVREAIRVHAVTRAGAVRVRTGAINELKAMIVTADDSLRSELRGLRTPAQVAACAKFRNRPRSAVHEKATRAAMRSLAQRIQFLDDEIDAHDRALRELLDQTAPQLIAERGIGYVTAAQFYLAWSHPGRCHSEAAFARLAGTAPVPATSGQNQTRHRLNRGGDRQLNRALYHVAITKQRCDPATRAYIARRVADGKTEREAIRCIKRFLARRVWRLLEHPKITA

SEQ ID NO: 447753 - protein, 341 aa, unidentified
MGNRSFPSCAVLYCGIDVSAETLAVAVQPEGSAGFEQREFANSAAGHRQLIVWLRKRGASVRVSLEATGIYSLDVTMALEGADGIEVAVLNPRTVHQFAESLRRSKTDAADAVALAEYSRRMPFVAWVRPSKAALELRAISRHIQTLSEEQARLKNRLHAARGTASTPRCVRDDLRKSIGGTEKRLLRLRREARAAIAADAGLQRKFEHLTGIPGIGEVSAIQLLGELAGLDPRMTVRQWVAQSGLDPVHQVSGTSLHKASRISRRGNRHLRRALYMPAVSASRSDPHMKAFYTLLLTRQKTKMQALTAVTRKLLHAIFGIFKAGSAYDGAKLFPKLIPTS

SEQ ID NO: 447754 - protein, 323 aa, unidentified
MSKNTKYFGIDISKGIFDVMDQNSNYYQFSNDFKGFKQFFKLLDNSSHCVMESTGYYHLQLAYYLLENNIKVSVENPLSVKRFIQMKLSKIKTDKSDAKMICLYAQKVDLKLWVGNSKNQRECLQITRTLSIYIKQNTALKNKIHGEEVLGNPSKMVVRSLKRSLKNVKKEIKLLESKLVELVKTDYQDLLTRLVTIPGIGKKTALLLIVLTDGFNRFEKANQLCSYAGITPIIRQSGSSVNARPRISKIGNQKLRNLLFMCSFTASVHNKSCSEIYQRITNKGKSKKLALMAVCNKLLKQSFAIAKSGLIYDESYRSVLVKQ

SEQ ID NO: 447755 - protein, 404 aa, unidentified
MWYAGIDWANAHHDVLVIDDAGRQVGSLRVNHTPEGLHHLNAFLEDITGPDDRDQMACIIETSRGLLITALLEAGWHVYPVHPKTVDRRRPASGVKTDALDAYLLAKHGRAELVDLRRLKPDSDIIAELKALTRDQDSLIQSQTRLVNQLTACLKAYYPVALQLFAKLQQHSTLMFLQTYPTPQAAMGASVQEIEVTLRQGRHTNPTKAAPLIFQRLHQSHLTADAITTRTKSRLMLVQVKQLLPLVEEIAEYDKVIEDLFLTHADSPIFSSLPRAGKRLAPRLLAEIGDERSRYLRASNLQALAGTSPVIFQSGTYAKAHRRYACSKPLRNALHQFAWQSTQQEPWARDYYLRKRSEGKSHTEAVRALSNLWVRILFALWSKHECYDAAIFQSAKLAHAPRAA

SEQ ID NO: 447756 - protein, 351 aa, unidentified
MSRKTEAGLACTIGIDTGKNTLHLVGLDAKGAVVLREKLARGRIAARLANVPPCLIGIEAGMATHYVARELLVLGHDVRQVPPSYAKPFRQGHKNDFRDAHAIAEAVQRPSTRCVPVKTDAQLELQALHRVRSRLIGGRTAAINQIRSFLLERGITLRQGLRFLRQQLPQVLATRTDVLSPRTIRIIEDLSSDWRRLDERIEHVTEEIELLASDSEACRQLMTVPGIGPIIASAMVAAIGNGAAFAKGRDFAAWLGLVPKQMSTGDRTILGRITKRGNRYLRTLFMQGARVVLLRPTNWAKHSFGPWIAAAAKRLHHNVLATALANKLARIAWTVLAQGRSYERRAVPGIV

SEQ ID NO: 447757 - protein, 412 aa, unidentified
MEVVNPRCCGLDVHQKSVTACALVTEAGRARPRKAIRTFPTMPADLLALGDWLAAEQVTQVAMESTGVYWKPPWAALEDRFTLLLVNAQHVKAVPGRKTDVKDAEWLADLLRHGRLRGSFVPDADQRELRDLTRLRTVRVRARAAELNRLQATLEKAGLKLAVVVSQIDGVSARRILEAILAGEEDAATLADLAEGRLRVKRAEMERALAAIPNAHYQWLIAEHLAMLDDLEEVIGRLDALIAEELAPFAAERERLQTIPGVKRRVAEGILAEVGHDVGRFPTSKHLASWAGLCPGNDQSAGKRRSGKTRQGDVWLRSLLCESANAVGRTKGTHLGAQYHRLVTQRGKHKATIAVAHSILVRAYCLLRDGTTYEEPGANYFDEKDEPAVRRRLTRRLERLGYTVTLTPLAAD

SEQ ID NO: 447758 - protein, 421 aa, unidentified
MNQLADAEYTAYVGIDWAAAKHDICVQAADGGRCEFACISSQPEGIDAWAQALYGRFGGPIAVALELSKGPIVSALQKYDFFVLYPINPSTLAKYRETFTPSGAKDDPTDAQLAVDLITRHAERFTPLKPQSTTMRKLIGLVEQRDKFVSDQGRVVNRLGHALKQYYPQVLEWFSEHNTVVFCDFLNQWSTLNQAKRARKAILERFFKSHHVNSSQLIEKRITAIKAAMPLTLDAAVIEPHCLQVEILIEQLRITIRALKRFDEEIAITAQKLPDYDLLFSPLPGAAKVLAPRLLAAFGEDRQRYPQADALQKYSGIAPVTKRSGKTTWVHWRWQCPTFVRQTFIDWAAQTINKSAWAGAYYRQQRAKGCSYQVTVRALAFKWIRILHRCWQDRTPYDESKYLEALRRKGSPLLKYLAETA

SEQ ID NO: 447759 - protein, 331 aa, unidentified
MEQRKTIIGIDVSKKTLDVFIKTIEVHIQISNDPEGFKKLLALLKANKLKPEDCLFVLEFTGGYEYRLVQFCQAKMFSYVRISGLALKRSMGMVRGKSDKIDAKRIAEYGDEKQSKLEAETGSLANIVRLKRLLSQREDFVADRKAYDHRYKELQYMMDLPDSDSILKRFKKTVADFQKLIEKTEDEIVKLIKANDAFQLNFELLTSIKGIGQINAWTMIAYTENFTSFQNGRQFGAYIGVVPYDFTSGTSIKAKSRTSKMANQQIKALLQMAARAAVLHNKELNLYYERRIALGKHHMAVMNEIKFKLVNIMFAVVKKQKPYVDKYKIAA

SEQ ID NO: 447760 - protein, 530 aa, unidentified
MTKYKHNGHGKGTKCRKRIDDDLRQRVRKIGGDKFGILVVDSSKRNAELWMTDFYGEPMWDESRTVPIAGGQLGEMIKVVSGTCRERGLKDLVVGIEQTGRYHRPVKRALERRWEVKMIHPFVTKQLRQPASPGVKTDGVDLDAMIRAIISGYGNDQREVPTLYAKWQLLNRAREDAVDRRRRLKQQCQERLDAFMPGYAALFEKLWETPAALAIAKFYGSAKRLSATEAEAISKRLRSKGLRMMRPTINRVLAWAADAPSPDPGGALNRRIWSDNLRVLEHLERDIMRYERSMAAYLVQTPFVLLLGIPGINVVSASGYGSEVGPITHYIKPSHLNGRAGLFPSRYQSDQTDCADGPMVGGRNARLRDAIMEIIVNLILHNDHFQGWSNLRAQRGWSKKKIHIAIANRFNRIAFHIVAGQMIFDHPCLKKRRSVLKKLAVFALSRGIKPETTMSLVAKAARQLPADAVAGEFAELQDGLADLPTSEGVPVGIRREAMLLLPALVSQINQACKSQEGDDNQYVEGDSHTA

SEQ ID NO: 447761 - protein, 319 aa, unidentified
MSRPSRLVYVGIDVARDQLVGHVRPLDQRFVFANDPTGHRLLIKMLKGLRPHRIVLEPTGGYERLLLRALRDAALPAFLVNPHKLRAFAQSTRGLAKTDPLDAAALAHYAEIWQPPTPISREPPAERLAEYLSWRTLLVERRTALANRSAQLLDPLLRRRVRANLAQLDAEIALAEATMRQIVAEQLGLAQLCRRLKTAPGIGNLSAFALIARLPELGRLNGKCVASLVGVAPHPWDSGRRRGRRFIQGGRFDLRRILYMAALAAVRQPGCLRTFFLKLQANGKPPKVAIIATLRKLLCRLNAMIRDQRDWEEPHIVPA

SEQ ID NO: 447762 - protein, 353 aa, unidentified
METAYDGRQVVGMDLHRRRSVLVRMTEDGQRLGVARITNSPAGLCRVIAQAGASPRVVLEGTYGWYWAADTLAAAGAEVHLAHPLGVKAFTYRRVKNDERDAADLADLLRMGRLPEAWIAPPEVRELRELTRYRHKLVGLRTSCRNQVHGVLGKLGVPVTCSDVFGVAGSVWLDELRLPQPYAGKVTSLRQLAGELTTEITMLSEVIADLLAGHRDYQVIQQLPGIGPALAAVIVAEIGEVRRFGSAAQLCSWAGLTPRHRESDTKITRGHVTKQGSRLLRWALIEAVQHVPAGSLPGTVKQRIIARRGKQAKNIAKVAAARRLLTLVYYGMRDGQVRCLSQNPAGSPPARAA

SEQ ID NO: 447763 - protein, 443 aa, unidentified
MHTPHPFDLLIGLDRSDKKADLHLIETRSLERSSAVIDTSPEALWEWLLQLRQQHPDARVALCLEQPAGHLISFLEAYEWITLFPINPITLQKYREAFVTSRAKDDAKDAFYLAELLLNHADKLQPWAPEDSATRAVQQLVFHRRSVVDERTALTNRLQALLKQYFPQALQLCGEDLWRPLATAFLLKWPSLSAVKKAKASALKEFYHLHGSRSQKLIAQRLEMIERAVPVTDEIGVIQSFVLRVQLLARQLQITQQTIAKFDQQIAEAYAAHPDRDIFASLPGAGPVLGPRLLSSLGSQRERFEAPGQLQRYTGIAPVTKKSGGSCHIHRRYLCPKFHRQSFHEYAKESVLWSRWAAAFYLQQRSKRCPHNTAVRALAYKWQRVIWRCWQDRKPYDEATYELALRKNDSPLVNLFEQIELGKSPWKTAQTKIKKPLAGLPQR

SEQ ID NO: 447764 - protein, 540 aa, unidentified
MSQAFSLQIKFRAMNPGRCPDTFSEVIHSRAERASGAARSEAVNNFAAMNFESNLRPGNNGSGRKARVRTRSACPNPTRIKPRTPAEPGAVIKKSERTTPHEGHRIRTTHDKSQGPRANKPMIETINWETITHYAGFDWAKDHHDVVIVDQQGKIVKDLTFEHTAEGWAKWKELVAAYPHLAVAIETNQGAAIEQLLESGVVLYPVNPKSAERYRDRKAPSGTKTDFLDAWSLADALRVDGHGWRALKPLDPLIQELRLLCRDEVDLIGKRTELVNQLQAALHEYYPAALQAFEDWTATPSWNFVQQFPTPQLLHQAGRRKWEKFLHVHHLYRPELNEKRLEIFAKAHEFCGPAAVTRAKSRLALALVKLLHALENQLEDYRKEIRRLFNEHPDHELFGSLPGAGEKLAPRLLSELGSDRSLFKSAQALQCYVGTAPVSFESGQVRQVYVRFMCNKSFRHAVHLWADLSRKFCSWAQVYYQQLRARGKSHATALRCLGQRWLKILWKMWQTKTSYDPDFHMANQLKHGSWVLTVKPSKSK

SEQ ID NO: 447765 - protein, 349 aa, unidentified
MQKKSQIRSIGIDLGKTTFHLVALGIRSQILVRKKFSRAQLLAYTANLPSTLMGMEAGVGSHFLGRALREQGHQVRLIPAQFVRPFVKSNKNDYRDAEAIAEAVERENMRFVPIKTEDQLDLQALHRVRDRLVARRTSVINQMRAFLLERGISFRKGPASLRRQMPEILENADEKLSARMRCLLDFLWQEWKGLQEQIESLNTDLEQIASSDASCVRLQQIPGVGPLVSTAVVSAIGNGAAFKKGREFAAWLGLVPRQWSTGGKPKLLGISKRGNPYLRKMFIHGARAAVLRVKREGSSLGKWMSGLETRAARNVVIVATANKLARISWAVLASGNDYHPSYKAVVVSN

SEQ ID NO: 447766 - protein, 458 aa, unidentified
MQTCPPGTVAGFASVSGSSAHEVVERRDEVPTRPAMRQGPGCQGAPLVPHNTSTSASEVFAGIDWGGSFHQVCLINAHGEVIVQQRVQHDLAGLTELDRLLLVHRNAAGRLRVAIERADGLLVEHLHTIEVEVFCVSPKISARARERYRLAAAKSDAFDAFVLADTLRHEHRHWRALSPASPALAELRAISRDRDRVVIAQQATENRLRAVLEAYHPAPLHLFSSLDRDITLDFVTDYPTPEQAARVGEARMQQFCRRHGYSGRTDPTVLVERLRPHLLSAAEGTEAGKAFSATMFTEELRLLNAHLRAYDKRLVELLDQHPDTPIFTSFPGIGPVVAAALISEMGEDRGRFPAPEALLAEAGLSPVTRASGRTRQVRFRYAANRRMRHMIDWWAFVAAREDAWSRRIYDDARARRQGKYRALRGLGSRWTRILWRCWTDHTTYDPAIHHKQQEPAQA

SEQ ID NO: 447767 - protein, 363 aa, unidentified
MKIMTGIDLHSNNAVCGLVDMKGKRLLHKRVPCDLKEIVRILKPHQKQIDTIAVESTFNWYWLVDGLQEEGYKVVLANPAAIEQYNGLKHADDTSDAFFIAEMLRLGILPCGYIYDRKTRPTRDLLRRRLGLVRKRTSFYVSFKSLYTRTTGEQMSLTELKKMSAQDAMKLFKHPSDQLIAGELVELIERLTQSIRKIEETVIKTASKTSYYRRLQSIPGIGVILGLTITMEVGDIKRFPTPGDFASYCRCVRSQRLTNGKTKGKNNDKCGNPYLGWAFIEASNISRRFDLPCRRFYDRKAKQANNILATKALACKLAKAAWHVMHDKKDFDSERAFGPAPAEKRFAERDVKPLKRVGAKPSD

SEQ ID NO: 447768 - protein, 381 aa, unidentified
MKPTKKLTPTSHQQTEATAEVIKLGIDIHKTKYVVIRQIDNQAAQSPQSFSPDEFIVWVQRQRLLAKRVVSCYEAGCFGFVLHRKLAEVGVDNFVVRPRNWDEYGSSVKTDARDARELCGHLDRYLAGNERALCVVRVPTEEQEQARSLSRQRETLAKERKRLQNVGTSSGLYHGVDVPANWWKPKVFTKLCTEIPEFMKLILDPFQQVLEIIDKQLRETTAREERKANRKIPVGLGALTTSILDQEFVDYSRFTNRGQVSSFTGLCPGESSSGNKRQQGSINKHGNPRIRHMLLEAVWRMIQFQPDYKPVLHWKARMANEPFGAAKKKKMAVAIARQFAVDWWRIQTGRITPEDVGLRVDFPSAYSTRALREGRVSKVYA

SEQ ID NO: 447769 - protein, 391 aa, unidentified
MATGERVVIGMDPHKRSVTIEVMSAEEAVVGGGRFGTDVDGFRAMSEYVKGWPDRVWAIEGCNGIGRHVAVRLLADGQDVVDVPPKLSARARVFSTGQGRKTDATDAHSVALVGTRVAGLRPVVADDQLAVLRMLADRRRALGAEHTRKVSQLHALLLELVPGGAKKDLSAAQAKALLARVRPRDLVGKTRRRLAAELVSDLEQNYARRKAADKELKALVAATGTGLLDLHGIGPSGAARLLVEVGDITRFPDRNHFASWTGTAPIDASSGDRVRHRLSRGGNRQINRMLHTMATVQLRNPTDGRAYFDRKKADGKSSMEAMRCLKRRLSDAVYRVMAEDLAATMRTDPGGQPGNDSVSSATGSQPSTGSSDKPLPGPVEQQPRTPLPAAS

SEQ ID NO: 447770 - protein, 439 aa, unidentified
MKVNKVSAFRDKRGLRRVSGAEPQVVGLTPQTTEIRKTDTMKTYILRAAKTVEPQKSTPPPRPKPVATKGPALFIGLDVHNDSIAVSLAPSDGAEVRRYGIIGGEHDDVIKLAKKLALAHPDLHLKFCYEAGPRGFALCRCLRGHGLDCILVCPSKIPRKPGERVKTDRRDADDLARLYRAGELTGIYVPEPEDEAMRDLLRARFQVGRQQHRARQQLKMYLLRHNLRYGGKSSWTPAHLRYLAKLKMPFPVQQIVFQEMLEVISEATARLERYDVEIERAVPGWRWEPAVRALMSLRGMALLHAATLVAELGDFNRFEHPGQLMGYLGLVPSEHTTGKDRQQGGITKMGNAPARRALVEAAWQYRVGPRLSPHLKKRQEGLPKAITDIAWEAQRRLHHRYVHLTRVGKKKSQVAVTAVARELTGFVWAIARQVKPVTT

SEQ ID NO: 447771 - protein, 418 aa, unidentified
MNKEQIVQRVIGMDAHPDSFTAAILTGPTPAAAVIEKQFDKVPIDRLCSWATKHTSADDLIVLEASGNSFHIVRRLAGVGRKAIVLESCQVGKLKEAHANNDKLSAVRIGKAYLAGTAKEVWVPDEKTQERRDLWHAHRKAVKRCSQMRSRIKSYLSDNGVRLKRGTRLAEDKMAEEQIRSLKPWSRLQWGLIEGMLQELRQADEQRRRLRSLIAEDVLGNPDALVLTRLCGIRELVAFGIIAIVGDIRRFVEPAKLVSYIGLNPAFESSGNSSWTGGVGKHGRKDLRSLMMEAAQSIMRCGKTPLAQWGRRLLRRKGDKGANLAVAAVARKLVVMVWYSLMGRTSPPEQIDHAMKLKVGKMISALGRDGLERLGKKRAALRKEIIESMAFQRVYVLDPNRKYEPAIQGSKQQSSDGN

SEQ ID NO: 447772 - protein, 437 aa, unidentified
MDTVSSNKDTVSQSKDTVGPNKAGIDVHKKMLAVIVRSQQQDGVHYEKRTFGTNRQQLMELTIWLLDQKVSEVAMESTAQYWRPVWAELEPHFKLRLTHPLETRAPRGRKRDFRDAQRLVDRLWAGDLATSFIPDAQQRDWRSLTRRRVQMKRQVVGIRNQMEGVLEECGIKLSCVVTDLLGVTGREILRAMAQGETDGEALAGLARGSLKSKRKDLEAAVAGGLRPVQRTVMGQMLEQVSLIESQIKALTQELVRAMSEHSVLIERLTHMPGIDVEAAQELLAEIGPQAEVFATPQHLASWIGVCPGRQESAGISKSNRSAKGNVYLRRLVCQIAWSAVRVKDSFFEGLFRRYCPRMGPQAAIWAVAHRIVKVLWKLLREQVDYKEKGRGAISLHTMKSKLRRYIKQLLQAGLDPEKFFKDVATPLTVASTGNGCG

SEQ ID NO: 447773 - protein, 353 aa, unidentified
MRIVVALDVHRRQITYKTLDRESGEVRRGRIVPATRGAVREWLEQFAGREAEFVLEGTTGWRFVVEEIEQAGHPAHLADPAETASKRGRKRRAKTDNADCDLQLKLLLAGELPESWIPPAHILELRTRVRTRKLLIDQRTAWQQRLQAQLFHQGVATGLKPRTRAGREALARAELSPAGRELVALALRAMDAIDRELAPLDRALRSFAHRQPACRALIANLYGVGAISATAILAELGDCRRFASSDDAVRHSGLDVTVHQSDNKRSAGHLSHQGPELLRWALFEAAHQSARRGSPDHAYYLQVARRIDHNRACLSVARKLCRRSHHILRELGDAALAPVERERQTGEAIQAAA

SEQ ID NO: 447774 - protein, 388 aa, unidentified
MFFLGIDVGKNTHVASLVDEKAKIIFKAYSFANTLDAAEALLVKLEPYKDSLEIGMEATGHYWLSLYSFLAEHKFIVHVLNPIQTDGWRKGIEIRKRKTDVIDSVLIADLIRYGNFLETSLADEDILSLRNLSRFRVYLVNSVSDLKRKAIAVLDQIFPEYASVFSNVFGQTSKELLKSLSLPSDYENLSATKIEEVLSNITQKKKASKTISTLSDKASRSFGISFCKDSFAFQLKLIIEQICFIEEQIASVELEIDQLMSKLGTNIKTIPGVGSVIGAVILGEIGDIERFDNPSKLVAYAGLDASVSQSGEYEASSSKLSKRGSPYLRKALYMAAQRAEFCDPVFHAYYEKKRNEGKHHLVATNAVARKLCHTIYAILKKDIPYEVQ

SEQ ID NO: 447775 - protein, 340 aa, unidentified
MITTTIGLDLAKSVFQVHGVSSEGQVTVRRKLRRAELMGFFRDLPPCLIGMEACATAHYWARELSALGHEVRLMPPSYVKAYLRRQKNDAADAEAICEAVTRPTMRFVPVKSAERQAILTLHRTRELLVRQKTTLIRAIRSHCAEFGLVVPQGARRIFDLLQLVREASPSALPETAVLTMQMLGVQLDALAVQIRTLERRLLAWHQQNQTSQRLATIPGVGIITATALAASISDPGLFRSGREFAAFLGLVPRQNSSGGKDRLGRITKKGDGYLRKLLVVGATSVIRRARTGVTPSAGWVQSLLERRPSRVVTVAMANKTARIAWAVMTRGESYRTMAMV

SEQ ID NO: 447776 - protein, 414 aa, unidentified
MEQIRDRVAALDVHRDSVTACARVPGPRGGVRLDKERFATTTAGVAQLAAWLAERGGTTVGMEATGVYWKCVYYALEGLFEEVWLYNAHHVKNVPGRKTDMSDAEWLADVVAHGMVRPSFVPTPPIRALRELTRYRKTQVDARAAEIQRLEKLLQDAGIKLTSVASKVLTQSGRAMIEALIAGERDPRVLAELAKGKLRAKLPQLAEAMAGRFGSHHAVVARSILDHLDFLDHTIDALTAQVVARTRSFAEQVELLAEVPGLDQATIQVILAETGGDMARFPTPAQLASWTGVCPGNHESAGKRRNVATPPGNRWLRRALIEAARAAARTRGSYFAAQYRQIARRRGPNKAAVAVAHSLVVVIWMVLATGEPFHDLGEDYFQRRRDPGRESRRLVHQLEQLGYTVTLQPAEAVA

SEQ ID NO: 447777 - protein, 432 aa, unidentified
MAEGKTGSEPEFAALVGIDWADRKHVWCLQAAGSRKREAGELEHKVETVEAWVAELCRRFGHRPIAVAVEQVKGALVFLLNKYEGLHIFPVPSTTTAKMREALYPSGAKDDPRDADLLLDILGQHRDKLHRLSPDDETTRRVQNLVEERRKLTAERTAQSNRLTSYLKIYFPQMVEWFEKLDMPLVCDLLERWPTLEELQKVSPEELRTFFCQHHCQRGLRERRILAIGGAIPAKGDRAVIEAKSAVVKVIVQLNRSLLEGIAELDRKIAEAATEHPDFFIFDSLPGAGAVMAPRLLAAFGSQRDRYLCAAELQTYSGIAPVTERSGKRKWVHFRWACPKFLRQSFHEWAGHSIAQSVWARAYYQQQRDRGSDHHAAVRALAFKWIRILFRCWKDRVAYDERKYLAALAKRGSPLGKLLVVDMAACEIPCGS

SEQ ID NO: 447778 - protein, 410 aa, unidentified
MRFAGIDVGAERHMVAIVGEQGEVLCRSSPFGEDASGYARLFELLGPPEGCLLALEATGHYWRNLFVALLAKGYAVAVLNPLRTRRFAEEELQRTKTDAIDALGIARFAAQKRPPAAQLPDVATEELRELARLRERLAEDFASRLRQLHRAVDLGFPEFTRHVRTLESQLAATSLSRYPTAASFRGASVKKLARIVYDGSHKIGEELARALIEAAAKSVGSYHSEPYRLRIKYLCEDLDVLRRRLKDLARDFECKLDDHEVGKLLTTIDGVGPLTAACLIAELGDPARFRSAGAIASYVGVAPRLRQSGKKRFFSGSPTIPFGNARLRKALWMVVLNAVRCNPWLRQYYERLRAAGKPGKVAVIAAMRKLLAAVWSVATHRRPGIRDRGKSQVTPRSMPREDDACGSGEL

SEQ ID NO: 447779 - protein, 427 aa, unidentified
MGLIVPTTIHPEREDQPLPYEWFVGIDWGSQQHQVYVLDRDRRRVGERVVDHDGASLARLADWLWTLSAGQPQRVAVAIEVPRGAIVEGLLERGFHLFALNPKQLDRFRDRHSVAGAKDDRRDAFVLADSVRTDQPSFRRLHLEEPQLLVLRELSRAEETLLEDLGRSANRLRDQLHRFYPQMLQLCSAADEPWLWDLIDLVPTPAHAALLSEEQVQRVLKAHRIRRVTGKEVLTCLQMQALPVAPGAAEAAQAHCQLLLPCLRVLAEQLQACSQQVSALLSTLAEERGEGESPSDVAIVLSLPGVGRKITAWLFAEAAQPLAERDYQRLRTHSGVAPVTKQSGKRRLVVMRRGCNPRLRHALYHMARVAMQRDAHCSSVYAALRAKGQRHGQALRHIGDRLLRILMAMLRHRTGYDASRIRCEPVV

SEQ ID NO: 447780 - protein, 343 aa, unidentified
MHIASIGIDLGKTTFHLVTLDNQGTIMMKKKFSRKQLLAYTANLPSSLVGIEACSGAHFMGATLRHQGHDVRLIPAQFVKPFVKSNKNDFLDAEAIAEAVSRQNMRFVPIKTDDQLDLQALHRVRDRLVHRRTAVINQIRGFLLERGITFAKGPANLRNHMSTILEDADQNLTPRMRNLLSRVWQEWRQLECDIATASDEIERIAGEDEACRRLRQIPGVGPLVSTATVAAIGNGAAFRKGREFAAWLGLVPRQHSTGGKARLSGISKRGNIYLRRMFIHGARAVLLRVKYDTAGLGQWVHQLEQRMARNKVIVALANKLARIAWAVLFKGEAYRHSAVCARA

SEQ ID NO: 447781 - protein, 417 aa, unidentified
MEQGYKAKCSVDNSITILHSGGIIMICVGIDVAKDKHDCFILSSEGEVLADVFTIPNNRNGFETLLQCIRSCTLPADKIKVGLEATGHYSYNILRFLLDKGLATYVINPLHTNLYRKSLSLRKTKTDRIDARTIAAMLMSDVDLKSYTDTAYHNEELKSLTRYRFDKVRQRAKLKQSVARLVNILFPELETLVPTLHMASVYALLSELPGAQQIASAHLTHLKTLLDDASKGRYGRDKAVDIREAARRSIGSKMSAKSLELRHTIQLIRELDKEIDEVEAAIEEIMSSIQSPITTIPGMGLRMGAMILAEVGDFANFDSPDKILAYAGLSPSTYESGKLKATGTYAHMEKRGSRYLRYAIFNATKYVCRWDPTFAAYLAKKRAEGKHYNVAISHAAKKLVRVIYSLQKSGQTYRTAA

SEQ ID NO: 447782 - protein, 335 aa, unidentified
MSVKETSVCIVDDAGRIVREVRVASEPEALLQVLANNTYRFKRIGLEAGPLSQWLYSVLAEAGLPVICVETRHMRAVLKAQINKTDRNDARGIAQMMRVGLYRPVHVKTLRSQKLRMLLTHRKLLQSKAIAVENDLRASLRNFGLKVGMIGTVKFEARIRELVENLPDLAVLVEPLLIVRRVLREQLGILHRRVLAVVRDDDVCRRLMTIPGVGPVVALTYRVTVDVPARFRNSKAVGAVFGLTPAKYQSGENDRTGAISRCGDEMMRMMLYEAAQSMLVRSTKWSWLKAWAMKIARHRGMKKAIVALARRLAVIMHRIWVDGTDFRWTREVAAA

SEQ ID NO: 447783 - protein, 408 aa, unidentified
MKTLHKRCAGLDVHKAEVVACLRLISERKVEREVRRFPTTTQGLLALAEWLESARCTHVAMEATGVYWKPVWHILEGHFVLILANAAHVKNVPGRKSDVNDATWLADLLAHGLIRSSFVPPPAIQELRDLTRTRRQLTREIVRHVQRIQAVLEEANIKLCSVITDIMGASGRRMLKAMIAGETDAEKLAALGHERLGCTRAELVEVLTGCVREHHRFLLGQHLRTIEQLEDSVAAFDARIEAALSPFHDIVERLKEVPGLGATATETVIAEIGTDMSPFPTAGHLLSWAGFVPRLDESAGKRRSTRIRKGAPWLKPVLVQAAWGAARKKNSYFQAQFLRLKARHGAKKAAIAVAASILTTVYHMLRDGTCYQDLGPEYFTRRNPAKAAARLANRIRNLGYHVEIRAAA

SEQ ID NO: 447784 - protein, 461 aa, unidentified
MIVRLGIDIAVRAAHQASLADERGQLLWSGHRFRTTAADLEALWARLPDATSAEGVTVVMEPTRNAWVPLAAWFRRRGATVVLVPPERSADLRAYYAKHTKSDRLDSVLLARMPLLHPDGLHPEHGLGPGDALRRATKLHSTLVRRRTTSLARLDALLEILGPDWHAAFAGDLANKTPLRFLAAGHADPHAVRRLGRARLARFFHRHSRGAFGEAEADRVLAAAAATLALWGDELSFPDLAEDIAMEARLALGLTEEIKELDERIATLFAAIDPAGILTSAPGIGPITGAAIIGRLGDPDRFRSLSAVRAYSGLVPTLNASGLSGHHGGPTKRGDAVLREALFMAASQARRLDPTLAAKYHRLMVENGKHHNSALCHVATTLLTRVVACWRNGDHYQLRDLDGTAITREQARAIIAERYTVPQNIRAARTTTTGTGRRSKESQRAPSTGPSTTHARTTGAA

SEQ ID NO: 447785 - protein, 325 aa, unidentified
MSLPCLGIDVGKHKLYAALLLTADKKPKRKTFSNDASGHQALLKWLAYHQVERVHACVEATSTYAHPVARCLHNQEHVVTIANPKQVKAYGDSLLVRTKTDRVDAAIIAQFCLERNPRAWTPPAPEVEALQALVRRLDVLEKIMSQERNRLETTPDELIEDIKTHLDFLKQQRQSLLEKIKHHIDHHDTLKDQRDLITSIPGIGEKTAAIILAEIGDIRFFKRARQLAAHAGLTPKKHESGSSIRKKSRLSKVGNARLRKALYMPALASINHNLVIAQFRERLLAAGKLKMQVVGAIMHKLIRWVFGVIHSGTPFDVNKALTAHA

SEQ ID NO: 447786 - protein, 355 aa, unidentified
MNQEKYIGMDVHAATISAAVKNAEGKLLMECVLETKAATILEFIQGLRGTLALTFEEGTSATWLHDLLKPHVSRLVVCDPRKNALLRDGNQNDRVDARNLAELLRTNQVKPVYHENHGTRALKELGRSYLTLTRDSTRAMNRIKSVYRSWAIPCAGTSVYSARHRAAWLAQLVEPGVRIRAEHLYEQLDSLQPVRQAARRELLRESGKHAAVKLLRQIPAIGPIRSALLVALLQTPHRFRTKRQLWAYSGFAVQTYDSGEFRIVRGKLQRNRERITVRGLNRNHNHDLKNLLKGAAISAIQRPGPLQDFYAALVEKGMRPSMARLTLARKIAAITLIIWKKGVSFDPKQLQRQAA

SEQ ID NO: 447787 - protein, 374 aa, unidentified
MGNVIEAFVAFDTSKLRNAVAIAEAGRAGEVRFLGEIENTAVAVAKLVRKLAGKYGRLTFCYEAGPTGYGLYRQIEGLGYECLVAAPSLILKKPGERVKTNRRDAVSLVKQLRAGDLTAVWVPDPHHEAMRELTRARETAVEDLRRKRQQVSAFLLRQGLHYPGERAWTKTHRDWLASQKLEYAEHRTAFEEMLLAMRQAQERIERLEQAIRVAVPDWSLAEVVTALMALRGIDFISASAFLAEIGDLSRFRTPRELMAYLGLVPSEASTGDTVKRGAITKAGNRRARRILVESSWSYQHPPRVGKEKQEKLAAAPPAVREIAWKAQCRLSARYRALTRKGKLKTVAVTAVARELSAFIWAINRQIANSRAAAR

SEQ ID NO: 447788 - protein, 348 aa, unidentified
MTIVDAPRAVTGGVDTHLDLNVAAALDAIGGLLEVAEFPATSGGHRRLLGWLAGFGPVTRAGVEGTGSYGAGLARYLRSAGVEVVEVDRPNRQARRRAGKSDPLDAIEAARAALSGRASGAAKTRDGNVEAIRALVVAKRSARSVKIKTLNQIRHLSFTAPEELRQRLKEVSRQQLGARAAALRPGRREGADPVLVATKTALRILGRRVLALDEEKARIDALLSELVTQTAPELLRLHGVGIDTAATLLVTAGDNPGRLRSEAAWAHLCGTAPIPASSGKVTRWRLNRGGDRQANSALWGVVITRLRNDPRTQAYMTRRLAEGRSKPEVIRILKRYIAREVYHHLPWP

SEQ ID NO: 447789 - protein, 342 aa, unidentified
MQITTIGLDIAKNVFQVHGIDASEKVVVRKQLRRSQVLAFFKALPPCLIGMEACATAHYWARELTKLGHKVRLMPAKDVKAYVKRNKNDAADAEAICEAVRRPTMRFVQVKSAEQQGGLMLHRTRDLLMRQRTQVINALRAHLAELGITAAQGREGLKELLKIIASDADERLPADAHASLVVLAAELQAMQTLIGSIEKRITAQHRGNEASKRLESIPGIGVIGATAIAATVTDPTVFRSGRDFAAWIGLVPRQDSTGGKQKLGPISKQGDRYLRRILVVGAIAVLRYAKQNPEKYPWLTQLLARRPFKVVAVALANKMARIAWALLAKGGTYRAPALAAAA

SEQ ID NO: 447790 - protein, 392 aa, unidentified
MTLINFVAANQKYYAFNLLSVFIMVFWSVQYLLQHLLVQTQLSDQLLQRLILILQLPQTPQFRHARPGKFFLPVNGMDYLLPLRLTVRNVLTRRITMNIVFLGIDLAKNVFQLCGLNQAGKPVYTKRTGRKELLQTLANIPACLIGIEASTGAFYWQREFEKLGHKVKVISPQYVKPFVRGQKNDGNDAQAIAVALMQPTMQFVPPKSPEQQDIQALHRARQRIVNHRTATVCQIRGLLLDRGIPIGSAVSRARRAIPLILEDAENGLSSRMRRTIAELYDLFNDLERRIHFFDKEIETVFRQSEACQRIAKVKGIGPKTATAVAAAIGKGTEFKNGRHFAAWLGLVPRQHSSGDRQVLMNMTKKGDKHLRTLLFMVPALSSGLPRITMMVI

SEQ ID NO: 447791 - protein, 402 aa, unidentified
MSKRDAKVCVRIAGPGRRAASSTTTTWTAMTNQILALRDHLVTQQVTLVVLEATGDYWKPFYYLLEDGPFEVMLVNARHAKNLPGRKSDVSDAAWLAQLGAHGLVRGSFVPPEPIRQLRDLTRTRTAITRERTREIQRLEKLLEDAGIKLSSVATDITGVSSRAMLEALIAGQRDPGALAELARRRLRAKIPVLTEALTGRFTAHHAFLARVHLNLIDQHTQAINEVTAQIEVVIAPFRLARELLCTIPGVSTTVADIMIAETGADMTRFPSAAHLASWAGTCPGSHESAGRVKSTRTRPGNLYLKGALGIAAMAAARTKDTYLAAKYRRVASRRGPIKAIVAIEHAILIATWHMLTHGAVYEDPGGDYYTRRDPAKARERAVGQLRAMGYTVTLEPLPNTG

SEQ ID NO: 447792 - protein, 346 aa, unidentified
MKKITTIGLDLAKHVFQIHGADAEGSPVFNRKLRRAEVLRFFAKQPSCLVGLEACGSSHYWARQIAALGHDVRVIPPVYVKPFVKRGKTDAADAEAISEAVTRKTMRFVPIKSAEQQAAAMVLKTRSLLVRQQTQAINALRAHLSELGIITAIGTTKVSGLIDIVRDATDARLPKTARFALSTLANQIEALFAQIVKLEREIVAEAKRDEDMRRLATIPGVGPITAASIKALVPDPGGFKSARHFAAWLGLTPRSHSSGGKERLGGISKMGNPELRSLLVLGASSVLRRVRGNDKAPKWLSALLTRRPYKVVAVALANKTARVIWALLTKGGIYRGMAPVDSVANA

SEQ ID NO: 447793 - protein, 329 aa, unidentified
MGQPTTFIGIDVSKDTWDACLLAPGGATRQASFPNDARGHAALLAWADRHTAGAERHFCLEATGPYSEAPAAALAEAGRRVSVANPARVKAHAVAAGQGNKTDPADARAIAEFARDRDPPAWRPPAPEVRELQALVRRRDDLREMAAREKGRLDSPALTRAARQSIQRAVKFLGREADRMQAQADALIAASPALRADRDLLESIPGVGRQTAATVLAELPPVDRLPSAESAAAYAGLAPREFRSGASVRRRTRLSKAGNARLRKALFLPAQTAVRFNPLLKEFFARLVGAGKPKMQAVGACMRKLVMLCYGVLKNRAPFDPAWASKKAA

SEQ ID NO: 447794 - protein, 443 aa, unidentified
MSKFKKTFELTYPNAAGIDIGASSHFVAVPTDRDDQPVREFASFTEDLHAIADWLTACGIDTVAMESTGVYWIPLFELLESRGFMVFLVNSRHVKNVPGRKSDVLDCQWLQQLMSFGLLSGAFRPQGDYAALRVVARLREMLLRYQATHIQHIQKALLLMNILLTEVLSDVMGETGQKIIRAILAGERDGETLARYRNGHVKASEEEITKALQGSWRDEHLFSLKVAVELYDFYAEQLLACDQQIEQLMKDLARYDLKPEKHKRRGGKPKNAPKFDARLLLMQMCGVDLTRIDGIDVTTAFKVLSEIGADMSKFKSAKHFASWLGLCPGTKISGGKVLSAATKRTANKAAKALKMAAVNLRNSQSALGAYYRRLCGRMDKGKAVTACAHKLARLIYAMLTKGEEYVDQGQTYYEEKYRERVIKNLTKRAEALGFQLTPAPEMT

SEQ ID NO: 447795 - protein, 437 aa, unidentified
MRRKKKNANKSVNLQVLPLVHPNAAGIDVGAKEHVVAVPCDRDPRPVRTFQAFTPDLHELAAWLKSCGIETVALESTGIYWISLYEVLEQYGFEIRVVNARHVKHVPGRTKTDVLDCQWIQKLHSFGLLNGSFRPDQQIRKLRTYMRLRDNLVVASTQAVHHMQKALFEMNVQLSNVISDIVGETGLHIIEAIIAGERDPKQLAALCSTRIKASRETVAKSLHGSWDEALLFALKAALETFRFSQTKIQECDCCIQQHLAQFESRAEQINSPQDLKTQLHRVCGVDLTKIPGIKEQSAQIIISEVGLDMTQWKTEKQFCSFLGLCPDNSISGGKVLHRATRKVYNRAADALRLCAQSLTHSKSALGAKYRRLKARLGAPKAIVAMAHHLARLVYRMLRYGQNYVEQGIHQYELKFQLQRIKWLKKEAKSLNLQLVPA

SEQ ID NO: 447796 - protein, 353 aa, unidentified
MRKMQEHIVKSNRIFVGLEDSKRTWKLCVRCDRMVVHETSMPTDYDNLRSYLKGRYPGCEIKVMYEAGFQGFWLHDLLEADGIDCIVTPPNKVTQEKDNKVKTDKRDAHRLSKNLENRDYVSCCVPDRERREDRQISRTLDQIQKDIVATKNRIRRFLDYHGLNGGLKNRNWSLSDYMNLKSLGLSHSMKVSLDTYLRLLEELEDMRRGLQKELKSLCEKERYREMVNSKKNCSGVGWLSAIRFTLEWGELSRFKTRKKFASFTGLTSREYSTGDTIRRGRITGQSYERIRSWLIQCAWRAIRIDPVLLAKYLAVLKNSGSKKKAIVAVARKLALRMRAMELTHETYCIGVIE

SEQ ID NO: 447797 - protein, 359 aa, unidentified
MKIVGCDFHPSYQQIAVLDTETGEVVEKKLMHAHGEAEKFYGELERPALIGMEATGNALWFELLLQKFGHQLWIGDAAKIRASYVRKQKTDKRDAGHILTLLTEQRFPRLWLADSHQRDIRQLLIHRHKLVGVRTRLKTELQHLALNQGVQKKRQLWNEKGRVLLSTLALEGWTRQRREDLLQLLAVVEPQIAQLDKAVEQAARASSQAVLLMSQPGVGPITALAFTVTIGEVARFPRSKQVASYLGLIPSEHSSGSKRRLGSISKQGNVFLRTLLVEAAQSAVRHDPDFRKEYQHRCHHKAKGVAKVAAARKLAVRLYWMLKSNKPYPEVLLIEGSPRHPVAAKAKAVQLNGHPRISH

SEQ ID NO: 447798 - protein, 347 aa, unidentified
MRFYNNQHNYYCGIDLHARLLYVCILDSLGNKVLHKKIDADPDALLELITPYQDNIVIGVECMHCWYWVSDLCLDYAFDFVLGHALYMKAIHGGKTKNDRIDSFKIASLLRGGNFPIAYVYPKAMRATRDLLRRRTKIMRHGADLKAHVANTFSQYNQQSHNVQLRYPCAREQVRNQFDEPSINRSINMDLNVIAFYTKELASVEHFIEKTAKQHSAQDYNLIQTVPGIGRILALTILYEIGNIERFPSVQNFASYSRLVKCKAESAGKQKGTNGNKIGNAYLKWAFSEAAVLYLRGNDPAKKYIQRLQKRMSKAKALSALAHKLGRCVYFMLRDKTVFDEKRFLPQ

SEQ ID NO: 447799 - protein, 390 aa, unidentified
MKIFVGIDIAKLNHFAAAISSDGEILIEPFKFTNDADGFQLLVSKLESFDKNSIIIGLESTAHYGDNLVRYLVAEFYQVCVLNPIKTCQMRKNNVRKTKTDKVDTFVIAKTLMMQDDLRFITFFDLDMMDLKALGRFRQKTIKQRTRLKIQLTTYVDQVFPEIQYFFKSGLHQNAVYALLKEAPSPKEIASMHMTHLANLLKVNSHGHFTKEQAKELRVLAQKSVGANDSAISIQITQTIQQIELLDSQLEKIEVEMTDIMKFNDSVIMTIPGIGYINGGMILGEIGDIHRFSNPNKLLAFAGLDPSVYQSGNFQAKTTRMSKRGSRVLRYALVNAAWNVVRNNATFKAYYDAKRAEGRSHYNALGHCAGKLVRVIWNCLLYTSPSPRDS

SEQ ID NO: 447800 - protein, 386 aa, unidentified
MTRPSNVLLRAINYDHTLVLAIELSNKSWVLAAQVPGFPQTKAQRTIEPNKNALLAAIDGYRARAAAVGHSVDRVIVTYEAGWSGFWLARWLIAQGVEVHVVQPSSVPVDRRLRRAKSDGIDAELLLRTLLAWLRGEPRVCSMAPIPDEADEDARRSVRERTELLSERVGLTNRIGAVLATLGVNDYNPLLQSRRRRLAELRTGLDEPIPPNALAKIERLLARLELVLAQIAELERDRDKVPAADAPDRAGQMIQQLTSLRGIGVQSATVLVREGFVRHFSNGKALGSYAGLTSTPYSSGGTDREQGIGKAGNRRLRTVMVELAWLWQRYQPGAAQVTWFRDRVGSTGRRIRKVMIVALARKLLIALWRFVIDGVMPEGAMMKPSI

SEQ ID NO: 447801 - protein, 360 aa, unidentified
MRTEITKDSFKGQSFYVGIDFHKKNWTVTILGEQYEHKTYSQNPDSELLAGYLKRNFPGALYHAVYEAGFSGFEPCRKLKQLGVNCIVIHPADVPTTHKEKEQKTDKADSRKLARCLRSNEFEAIDIPDPELEADRALVRQRFRQVKDVSRTKNRIKSLLFQFGIAIPGGFTSGQTRHWSKVYINWLKDLKVDHESLKQAIDNYIRIGEAQRQELLLLEKQIRKLSLSDRYKENYMLLLSIPGVGPKTAITFLTQIGYIGRFARLDDLCNYVGLAPGMYGSGDKMQVGKLTRRGRKELKIMLIEASWQAIRKDPALMLKFNELIKRMNKNKAIIRIARKLLSRMRFVLLNRQPYCLGVVQ

SEQ ID NO: 447802 - protein, 346 aa, unidentified
MKQIIRIGMDTSKHIFQLHGVDAAEHPVLRKRLRRSELLAFFAKLPPTVIGMEACGAAHFWARELGQLGHTVKLIAPQHVKPYVKRNKNDGRDAEGLCEAMSRPTMQFVAVKTQEQQAALMLAGMRERLVSRRTQLSNAIRSYAAEFGVTTAKGLDKIEPLLAAIAANQTLPALARNLFVLHGREYAQLQAELKIIESRLQAWHRANADSRRLAQIPGVGPIVASTLVMKAPDPHLFQSGRHFAAWIGLTPKDHSTAGKTRLGAITRAGDERLRSVLVAGATAVIQQARRGRGHPSPWLLALLARKSPKLAAVALANKIARIAWKLMTTGERYNNARMPDTSALAA

SEQ ID NO: 447803 - protein, 358 aa, unidentified
MNMHKVQDFVVEGKEIFVGLEDSKRTWRLAVRCERMLVHQTSMEAKYPLLKQYLKNRFPGCSIHVVYEAGFKGFNLYDRLTEDGIECIVIPPHMVTEPKVSRVKTDGRDANRLARIMESHDFKDPCHVPDKERREDRQVSRTLIAIQKDIVCTRNRIRRFLDYYGIKPPFADKERWGRKEFHALRELDLGESLKIGLAVLLTHLEQLWCHQATLRSYLRGLCSKERYVKAFRVARSLPGIGWFTAIRLVLELGEDLSRFTSGKSIASFVGLTCREYSTGQTERKGCITGMGSAFIRHVLVENAWVAIKRDQVLLSKFLRVWKSSGSKKKAIVAVARVMIVRLRACIIAGRPYMMGVVR

SEQ ID NO: 447804 - protein, 519 aa, unidentified
MIAIPVISERCAAIDVGKRGLAVAVALGPADKEAEIKTRASGTTVPALLDLKAWLVEQGCTTVALESTGSYWIPVKNILEDGFQITLVCARKHHPKKGDKTDFRDAIDMVIHHRHGLLTGSYLPERGIVELRDLTRRRKKLLGNLRAEKNRIQKVLETANVKMGNVVSDVFGVSGQEILQALLEDKPLTAEELADKAKKRLRDKIPQLTEALEAHQMNNHHRWLIDQSVEHAKFLDRQIEELEKKIDQHLPPYRRQHELLMTIPGIKQAAAANILAEIGADMNQFPEGDHWSSWAGICPGNNQSAGKRKGSRIKKANKFLLAALVEASWAAVRKKDSALQRKFHRWLRAKGEKKTNVAISHSLLKVIWSVLKHDRPYVEPDVLVLKTLEREKQIRHHAQRLRQLGADEQTIATLIKNLLEAPKPDSTDHPPVATHPYPSDSACASRPKCSPQKQGSPPPRRRPLARGVLGFRIRTAEKKQYSAVQDLPDSPSTTTPPEKNTPPKPSATNNKKGQSTTRH

SEQ ID NO: 447805 - protein, 483 aa, unidentified
MENNVVMRKPAEIVDADHELVIERVCAIDVAKASGMVCTRLPQGAAAGRRVSRVWEVAATTRAITELADHLVAVGIEQVTVESTSDYWRIWFYLLEARGLDVQLVNARDVKNLPGRPKTDKLDAVWLAKLTEKGLLRPSFVPPVEIRVLRDYTRLRVDLTRERTRHWQRLEKLLEDALIKVSSVASKLDTRSVRDMLEALIAGDRDPRRLAELARGRMKTKRGALVEALSGRFDEHHAEIARMLLDQIDGLSAAIDQLTTRAELLLQTLLAARAGDQPAGGAVPAPSSGDPCQAPTEARTEAPTEASVPANGPLAHRGGNGLSASQRLDEIAGIGPLAAQVIIAEIGLEMSRFPTAGHLVSWAKLCPRTIQSGATRRGGAAGKGNPYLKGVLGEAAAAAAKTNTFLGERYRRLVKRRGKLKALVAVARSILVIVWHLLSDPTARFYDLGPDYHTHRIDTTRKIQNHISGLTALGFRVTLEPAA

SEQ ID NO: 447806 - protein, 331 aa, unidentified
MNTHVGIDIGARTSAMGWRQNGKTSGQWEIQHTPKGRKTAAAKMLGLKPLSVVMEATGIYYLDLALELHAAGLPVSVINPKSFHNFAKLMLQNSKTDQIDSQLLAEYGERMAPRLWVPPTADQMTLRAIGRHINRLIGHRTRAKNELHALQATETSVELLIEDEKEAIAGLDARIDRLKKAARDAIAKCPDLSLQFRCMMAAPGVGEASAIAALAELTTLPVTLKSAQVSRYAGLDVRLTQSGTSVNRPGRMSKCGNAYLRAAMFMPAMTAIRCDENVKAFYEALVARGKKKMQAIGAVMRKYLTGLWACMRSGEEFNTAKLFSEKHLAKA

SEQ ID NO: 447807 - protein, 424 aa, unidentified
MNLTQNDRLNQVTADTLVVGVDIGSETHFARCFDWRGYEFSKRAVRFSNTQVGFLTFIRWVEEMMKKTEKTKVIVGCEPTGCYWLTFQKFLTDRDILLVMVNPYSVKKCKELDDNSPEKSDLKDPKTIAGLVREGRFSTSYLPEGVYAEIREAQVCRDQIMKQHVRLSNQIQGWLQKYFPEYLECYKDFDTASGMMVLEHAPLPEDVIKLGAGGINEIWRKAKLRAAGIKRAKTLVEAAQGSVGLSGGEAARLEIWFLINDYQTKAKQLERLDEFLAKEIMKVPHVEKLLAIKGVGLSTVIGFVADVGDIGRFTDPKQVQKLAGLEITKASSGKKKGQPCISKRGRRRLRRTMYESARSLISWNEAFSEVFMYYRYRTRNPLGGMQAKIAVACKAIRVFYAILKTGCEFDAEKLRRDIIRPEAA

SEQ ID NO: 447808 - protein, 367 aa, unidentified
MKLYAGIDLHSNNHYLGIIDEENKAVFRQRLRNDLGETLCSLAPFRAEMVGIVVESTYNWYWLVDGLMDQGYRVHLANPAAIHQYKGLKHVDDKRSALWLANLLRLGILPEGYIYPKEERPVRDLLRKRSQLVRHRTAHILSIKNIVSRSLGLTMKSNEVKQLEERMVRDLFREEHLILAVQSSVGIMRYLGERIKQIEGVVKSRIKLRPEFEGLLSLPGIGEILGLTIMVEVGDIGRFREVGNYASYCRCVRSSRTSNEKEKGEGNRKNGNKYLAWAYVEAANFAIRDYPEVQRYYHRKAAKTNEVVAIKAISHKLSRASYYVMRDQVGYDPGKLFHRKAEGEWEEGSSLLRKSRRKESPCFSEQG

SEQ ID NO: 447809 - protein, 420 aa, unidentified
MRNAGIHANSLLEVRRMYNAVGIDVSKGKSTIAVLQPGGTVIRKPFDVSHTSQNLNELADYLSSLDGTTKIVMECTGRYHEPMVKALSEAGLFISIVNPHLIKNFGNNSLRKVKSDPADARKIARYTLDNWTELRQYSGMDNTRTQLKTLNSQFSFFMKQKVAAKANLIALLDNTYPGVNKLFDSPTREDGSEKWVDYAYSFWHADCVRKIGLKAFTERYKSFCKKHHYIFQQDKPEKLFNASKELVAVFPKEKTYKLLIQQSIQQLNLASEHVERLRREMNELASTLPEYSTVMGIYGVGKTYGPQLIAEIGDVSRFTHREALTAFAGVDPGVDESGQHKSKSNRASKVGSARLRKTLFQIMTTLLQNAPEADPVYRFLDKKRSQGKPYYVYMTAGANKFLRIYYGKVKECLRNLEQTE

SEQ ID NO: 447810 - protein, 351 aa, unidentified
MLIIGCDYHPSVQQIAFVNAETGESGERRLLHKDGEAERFYRDLKLRGVSVRVGIEATGHARWFERLMAELGFELWIGNPSEIKAARVRKQKNDRLDAQLLLKLLVEDRFPRIWVPSPENRDLRQLLWHRHRLVQIRTRVMNQLQAVAMNEGVRRKGALWSKSGRAQLESFVLLPWASRRRQDLLDVLDRLNPTIDALSMAVEQEAKQRPEVLRLMTHPGVGPLTALAFVLIIGSTKRFACGKQIGSYLGLIPCEDSSANHQRLGHISKQGNTLLRFLLVEAAQAAVRCDEVWRRKYLHLALRRDPRIAKVAMARKLAVSLFWMWRKEWNYEQVAKFGSHAGESEHVHGVQ

SEQ ID NO: 447811 - protein, 335 aa, unidentified
MKKIYVGIDISKEKCNLCYRSGLKIVREEEISNEVKALKKAFKAALKALGASVEEVLVCAEYTGRYIYPLTVACQELDIFLWMDDPTRIKNSMGLTRGKNDAIDAARIAEYAFRYSDKAVRYAIPDAAIVSMKNLLADREFLLIDRKRYQSQLTDQKKYMAPGDFKHKNSRWKKVIKSIDEQIAAIDAEIESLIATDPVLARQKELLVSIDGIGDRIAINMIAITGGFTRFQNARQFCSFAGLTPYKYDSGTSVRSKAKISKRANQTMKALLHMSAVNVATRMKAREYKDYYERKLKEGKHVMCILNVLRAKLVHRMFSVIKRDTEYTKEYKPAC

SEQ ID NO: 447812 - protein, 315 aa, unidentified
MDTPFVGIDVSKETLDVAVLPGGGRKTFRNDDVGCEQLTTWLLDVEPVIVVLEATGGFEMLAASTLSSAGLPVAVVNPRQVRNFAKALGKLAKTDAIDALVIAHFAQAVKPKNRPLPDDQALALKALVTRRRQLIEMLVAEQNRLAGAHPRVKPAIRISIDWLRTQIEEIDRTIATSITDSPLWREKEELLTSVKGVGPVVASSLICLLPELGILNRKQISALVGVCPYNRDSGAYRGTRSIRGGRADIRSILYMAALSATRHNPVIKAFYQRLKQAGKVSKVALVACMRKLLTILNALLRTNQKWNAARTLSLT

SEQ ID NO: 447813 - protein, 440 aa, unidentified
MIKETTQINSSTPPEPPAPIVCWVGLDWADKKHCLVVRAAAGATAQTHLVEHQPEVLDEWFLQLRKDHPQGRIAVAIEQSRGPVLYALMKYDFLALYPINPRCLADYRRAFKVSGAKDDPLDAALLCELVYLHADRLRALTVEEPATRQLRLLVEARRTFVDDRTLFSNRLGSTLKCYYPLALEWVGQDLTTPMALDLLGRWPNLAKLKAARPATLRAFFYAHNSRSEDRIAARLQALAQAAPLTEDPALIGPLQLQMEQLVRQLRALHKSLEEYDRQIKTVFGQHREAWLFAPLPGCGPVLAPRLAAAFGTIRANFESSDDLLCFSGVAPVKKESGGQKLVQFRYARPIFYHQSIVEFAKCSIGQCEWARLLYEKQRRKGKSNWAAIRMVAFKWLRILWRCWQERQPYQETTYLRSLQRDGVQLYQSLYEGLPPLKTSV

SEQ ID NO: 447814 - protein, 348 aa, unidentified
MAHFVGLDVSVKKTSVCVVDAADRVILEQTVPTEPADIIALLTSLGVSFCRIGIEAGPLSQWLVNALTAAELPVICVETRHMKALLTAQQINKTDRNDARGIARMMRVGLFKPVHVKTLVAQEQRMLLTSRKLLQRKLLDLELELRGTLRNFGLKVGIVSGSGYEARVRELVVGFPRLAAIAEPLLNVRRVMRQQLAVLHKMLLDTVRDDPVCRRLMTAPGVGAVVALTYRATVDQPQRFVHSRAVGAHVGLTPKRYQSGETDYDGGVSKCGDALMRTMLYEAAHLLLTHSRKWSWLKAWGIRVAQRRGMRRAIVAVARRLAVVLHRMWVDGSEFRWSKHSVAVPPVA

SEQ ID NO: 447815 - protein, 420 aa, unidentified
MKPVPDGEFTAFIGIDWADSKHDICLQAADSEQREFDRFAHRVDRIEQWACAMRQRFGGPIAVALELSKGPLVYALQKYDFFVLFPINPSMLAKYREAFKPSRAKDDPTDAQLALELLLHHRDRLNPLKPQSVQMRTLLYLVEQRRRLVGDKTRFTNRLGYALKQYFPQALDWFDQTDTTLFCDFLTRWPTLAQVKRARKASLETFFQAHNVRFVKLIEERIDAIKTATALTEDVAVITAHQLQALVLVDQLRVTLQAIERFDVQIATIAPTLPDYALFRALPGAGPSLAPRLLAAFGEQRERFAGADELQKYSGVAPVTERSGNKSWVHWRWQCPTFLRQTFVEWAAQTINKSFWAGAYYRQQRNQGSSHQAAVRALAFKWLRILYRCWQARTPYDESTYLNALKRRGSPLLKAIGATT

SEQ ID NO: 447816 - protein, 382 aa, unidentified
MSIRKDTTPTAVEQNSIAIYAAIEMSGSNWDVVVHTPASSKLSRYRLRAGDTAQLLELMERVAAKVARQAEQTVSVVSCYEAGYDGFWLHRVLSAQGLTNHVIDAASLQVDRRARRAKTDRLDGEALVLALMAWYRGERKACRMVRVPSPAEEDAKRGHRERERLIKERVQHVNRIKGLLATQGIVGFHPLHRQRRARLAVLSLPPHLQAEIERELVRLELLLEQIAALEAERDALFAAAPAADDPVADKIRALARLKGIGPTGASVLGREAYYRSFRNRREVGSYVGLTPTPWRSGKLAREQGISKAGNARLRTTVIELAWSWLRYQPDSALARWFRDHAGSQAGRVRRIAIVAVARKLAVALWRYVETGIVPTGAVLKKA

SEQ ID NO: 447817 - protein, 388 aa, unidentified
MLAAADRTDASTAIQTDLPAIFASLELSRSAWLITSLSPGAGEKMSKHSIRAGDVAGLLMRLAQLKEKARGRTGRDFPIIAIQEAGLDGFWIHRVLQSEGIESHVVDAASILTSRRRRRAKTDGIDGETLVRTLLAYKRGEPRVCAMVKAPTPEEEDRRRICRERKTLVGERVEHVNRIKGLLFAQGVSDYEPLKRNRRARLEELKTGDGRPLPAHLKAQISRELDRLEIVLPQLKAVEAERDALLKPVSEGCPAPAAMLAQLKGMGPEFTAILWSEGLFRSFSNRRQLAAYAGLAPTPWQSGSVAHEQGVSKAGNPRLRTTMIQLSWLWLRHQPTSALSVWFQERVQSNGGKMRKTMIVALARKLLVALWKYSTGGVVIEGAVMKTI

SEQ ID NO: 447818 - protein, 359 aa, unidentified
MKIIGCDFHPSFQQIAMVDTETGEIVERRLMHAGGEAQRFYELLRGPVLVGIESSGNTLWLERLLVKLEHKLLIGDAAAIRATVPRKQKSDKRDAKHLLRLLLENRFPAIWVPSLQERDLRQLLKHRHTLVQIRTRAKNQLQHIALNQGLQKKYKLWTKEGLKQLQALELEPWTQRRRDDLLKIVSEMDAHIARLTAAVEAEARQRPDAELLMSHPGVGPILALATVVTLGDVERFRRGKQVASYLGLIPREDSSGERRRLGSITKQGNSFMRFLLVQAGMSAARGDAELGRAYKRLVHRKHHGVAKVAVARKLVVRLYWMLRSKKQYPEVVRMQGSSSHSVAQATADRLSGRPASQPQ

SEQ ID NO: 447819 - protein, 353 aa, unidentified
MEITTIGIDLAKNVFAVSGADRRGRVVVRKQLRRAQLMGCLRTLRPCVVGMEACGGAHHWARALTKLGHQVRLMSPALVAPYRKGNKHDRNDADAVLEAVSRPSMRFVAVKTIAQQDVLALHRVRARLLKQRIALSNQIRALLHERGVAARPGAAGLRAAVAAALAADHNELSAELRQVIAELLDELRQLELRIKAFDQRLARAAQGDERCLRLREVPGVGPQIATALVATVGDAREFKSGRELSAYLGLTPRQHSSGGKTVMLGISKRGDRYLRTLLIHGARSLLYRNRRLAHPRARWAARLSAARGPNVAAVALANHNARVLWALLSRGDRYRPDFQPRGFPSRPSAGAVN

SEQ ID NO: 447820 - protein, 347 aa, unidentified
MRYKARSACAHCPKLEPLLEHDNFKNHRSSYYTSMSPNNNDILYVGLDVAKLSLQLHLAGRLHTLANDAKGHTQILKLLRRHPQIHVVCEATGGYEQPVVRALHAADLPLSIVEAGRVRYFARAQGQRAKTDPIDATVLSAYGATFHPPAAAPASLQQQRLADLSQRRRQLIHSLTVETNRAEHYTDPLCRRQARQLHKTLEKQIQQCDQAITQIIAEDALLAHKAQRLDAIPGVGPVVAATVLAEMPELGQLNRQTAAALAGVAPYNRDSGGQKGIRHISGGRRPVRCALYMATLSAVRYDRILKEFYLRLRAAGKKPLVAITACMRKLVILMNHLLKNPNFSLAH

SEQ ID NO: 447821 - protein, 321 aa, unidentified
MNKYKEIYGIDISKDVFDVYGSEAGHNQFKNDAQGFTSFLKHLPKGVLVVMEATGYYHYRLAQFLYKSGVIVSVVNPLSVKRFIQMKLAKVKTDKSDAKAISEYGKINDVPLYTALTDVQSECLQLFRLLDSYIKHRTATKNKLKGEEVLGIPSRFVYRSLNRDSKHLNKEIVTLEARLLELVKQDQQYQLTLLKSIPGMGIKTALFLIVVTDGFKKFETASQLCSYVGITPTIRESGSSVRGRSRISKVGNKKLRNLLFLCAFSACKHNKACRDIYERIVNKGKSKKLALIAVANKLLKQAFAIVKSGRPYDENFVSKLV

SEQ ID NO: 447822 - protein, 321 aa, unidentified
MAKRITICAGIDTGKRKLDVAIDGTSLQLQVENTAEGHKMLLEWLRRHKVKRIGIEASGGYEQAVVIELRRKRFVVVVFQPAQVRAYAKFHLQRAKNDRIDAALIGACTAAVKKIHPAPDPRLQPFAEHLTLIEQVGEDVELYKNRLETCRDPRIQKLWKEEIARLAKRARVELKALVAAIREHRDLAQRLDLIYSVSGAGMPTAVQILVRMPEIGQLSREQAAALAGLAPYDDDSGKQVGARHIDGGRKRLRRALYTAALPASFRWNPQLIALYQRLKAAGKEHKRCLIACARKLLIFVNTVVARGTPWQDQPPPAAATG

SEQ ID NO: 447823 - protein, 347 aa, unidentified
MEKTVLVVGADISKDEFHVCAKVRTADGKVKIVGTRSFSNNTSGFVEFVLWVSKRSKENWSIRYVMEATGSYYEDFAYYLYETGSRVSVVLPNKIKHFAKSLNLKTKTDKVDAVMIAEIGIERELDAWQPMLPQYKMMRDLSRELLSIKKEKSRAMCQLHAMKHSHEKTDSVIEIKQKQIEFYEQSILLIESEIEKIVEADTDLKQRVEKIKKVKGLGLITIIIVLCETNGFLLFNNIRQVVSYAGMDIEMKESGNFKGKTKISKRGNARIRQCLFMPALAATVHNEKIKELYERINERNPKIKKKGVVAAMRKLLILIFVLWKKNEEYNPDHQWQRKDIKIVGEGC

SEQ ID NO: 447824 - protein, 407 aa, unidentified
MDSHPDTFTAALLTGRTPAEALVENTFHKIPMSQLQSWAKKHTSAEDLIVLEASGNSYQVVRTLEAIGRKARVLESAQMGRLKEAHANNDKISAVRLGKAYLAGTAKEVWVPDVLSQERRDWMHAHRKVVKRTTQLENRIQSYLSDNGVRPPQGVSADDLESLRPAKAWSARQWSVLEGLFLELGHAEQQRTHWVSVIAREVLNDPILLSLTRLCGIRDITAFALGAVIGDIHRFSEPKKLVKYFGLNPAFDDSGENNWSGGIGGHGREDVRALLIESAHAILRSGHPLAKWGKKLLARKGEIKLAVAAVARKLVVAVWYLLMGRETPVQEIEDGMARKVGKIISHVGSKGLQAMGQTRAELRTKTYESLKTGRIYQLDPNKKMPPKQTFTQKATASSLAAEYGLVQ

SEQ ID NO: 447825 - protein, 416 aa, unidentified
MINDVHWFVGIDWATQSHSVCLLDAEGRRVGEREFAHGGAGLTELRDWLLEKTQAVPGQIAVAIETPHGPVVEMLLEHGFVVFAINPKQLDRFRDRFTVAGAKDDRRDAHVLGGSLRTDREAFRQLATDHPVVIELREWSRITDELQQERTRLSNRVRQQLWRYYPQAAELTDDVPDDWFLALWQRLPTPAAAAKATEKTIAPILKEHRIRRLDAATALKTLRKPPLFVAPGTTEAACAHIRSLAARLRLVNQQIKEAQQNLDRLCAQLEEENPSGQSFEQCDVAILRSWPGIGRIVLATLLAEATEALRRRDYHALRALAGAAPVTRRSGKQRFVIRRLACNGRLQTALYHWSRVAIQHDAAARRRYDNLRQRGHGHARALRSVGDRLLYALCTTLKRQTPYDAGYHRAQMLAKG

SEQ ID NO: 447826 - protein, 333 aa, unidentified
MQNSSDNLHFALGIDIGKADCNVALLRPTDAALLAEAVFANNKTGFVALLRWLRKMLPKGAAVHACMEATGSYSTPLALYLNKELARVSVVNPQTIKAFGQMKLRRSKTDPADARLIASFCLKEQPQPWQAPSAQQQKLTALARRVANLQTQQTAENNRLGQCLDEDAAKSLRSHLRWLKAEQKRVERQIQELVLADPQLRQKAQWLDSIPGIAAKSATVILAELPQVEAFGSARQLAAYAGLTPRHQQSGTSGKKGTPLCKIGSNRLRWILYFPAIAAMKHPALRDFAQRLLERKKSKMVVICALMRKLIHIIFGVLKNRQPFNPNLLLKHA

SEQ ID NO: 447827 - protein, 388 aa, unidentified
MIYVGIDIAKLNHFASAISSDGEILIEPFKFTNDNDGFQLLLSKLDPLDKDSIIIGLESTAHYGDNLVRYLVACNYKVCVLNPIKTSTMRKNNIRKTKTDKVDTYIICKTLIMQESLRFVTFYDLDLMDLKALGRFRQKTIKQRTRLKIQLTSYVDEIFPELQYFFKSGLHQKSVYALLKEAPTPEAIASMHMTHLAHLLKVNSHGHFDKEMAQQLRVLAQKSVGANDSALSIQVTHSIQQIELLDSQLERVEAEMTDIMKFNDSVIMTIPGIGYINGGMILGEIGDIHRFSNPNKLLAYAGLDPSVYQSGNYQAKKTRMSKRGSKVLRYALVNAAHNVVKNNATFKAYYDAKMAEGRTHYNALGHCAGKLVRVIWKMLTDEVEFNLE

SEQ ID NO: 447828 - protein, 410 aa, unidentified
METIVERPAALDVHKAQVTACVRVPEEGGGREQHIAAFPTTVGGLLTLRDWLAAHRVTQVTMEATGVYWKPVWAILEDEFECVLVNARHVKQVPGRKTDVSDAAWLCQLAEAGLLRGSFVPPKPIRALRNLTRYRKTQIQERQREANRLHKALEDTGIKLDCVATDILGVSGRRMLGALIEGTTDPEVLAELAKGRLRAKLPALKEALEGRFDHLHSVWIGAILAHVDFLDQQIAGLTEAIGEQIAPFESAVELLRSIPGVQRRTAEVIVAEIGTEMSVFPTAKHLASWAGQCPGNDQSAGRRRSGNTRKGSKWLDWALEEAALAAVRSNSTYLAAQYKRLRPRRGHKKALGAVKHSIICAAWHMLSTGELYNDLGGEYFQRRDPERTTKRLVRQLEALGHSVTLEAVAA

SEQ ID NO: 447829 - protein, 437 aa, unidentified
MKVLYERVAGIDVHKEMIKVAIRSPGEKPWTRKTEILEFRTFYGVLQEMARLLRRRGVTHVVMEASGVYTDPVYYALCEQDFAEVAVVNPAHARALRGHKTDAADCRRLAELFECGLLRGSYIPPAELREVRDLTRYRMKTVQARTSEIQRLGKALESAGIKLGSVASDITGKSATAMIDSLIDGERRGAVLADLAIGRMRTAGKLAGLSMALTGRFTEHHALLCRLHRDRIAGLDAAVADLDDQIAGRAGRWQRELDLLKTVPGFGDVVAQTWLAEIGPAPHRHFASHEKLASWVTLCPGNNISARKRKHGRTGDAGTYIKPMLIQAAWNAIRPKGRLQARYSRLVRRFGGEKNPGAKKKAITAIAHTLLKIAYQVLKSEVPYQDLGADFYTRRESPDQQRAYLERRLRKLYPGCAITITISPPEAVLTSTVSNAP

SEQ ID NO: 447830 - protein, 347 aa, unidentified
MNFYNSTHRHYCGIDLHARSLYVCIMDQQGETLLHKEIPAKPEPLLHLIEPYLDDLVIGVECMHCWYWIADFCEDQGIVFILGHALYMKAIHGGKTKNDRVDSYKIAALIRGGNFPLAYVYPRSMRATRDLLRRRTGLVRHGADLKAHVVNTTSQYNLPPNKVNLKNVSAREQLGRTFDDPLVQRNIDLDMAVLECYHRELSQVEWLLEKQAKKHQPTYYHLLKTIPGVGRILALTILYEVGDIRRFESVQKFASYSRLIKCKAESAGKTYGTQGNKIGNAHLKWAFSEAAVLYLRGNPGAQKLLQRFQKRMRKAKALSALAHKLGRAVYFMLKNEKVFDEQRFLTS

SEQ ID NO: 447831 - protein, 343 aa, unidentified
MTISILGIDIAKNTFQLHGADSTGKAVMKKRLPRHKLAAYAATLPTCTIVMESCGGANYWARVFQRSGHAVKLISPQFVKPFVKTNKNDANDALAIVEAASRPSMNFVPIKQVEQQDIQSIHRIRTRVVKNRTALINEIRGLCLEYGVMLTTGAAKVKPSLCAAIASCDNELTTSSRESMQDLYEELVDVEARLKKLDSKVRQLCRQSESCQRILKVPGVGELTATAIVAAVPESHEFRNGRHMSAWLGLVPRQSSSGDKQVLLGISKRGDRYLRTLLIHGARAVLSHRKVLDNNYDRWVANKKATLSHNKAAVALANKNARIIWSMLNTGEEFNYGVQKTAA

SEQ ID NO: 447832 - protein, 348 aa, unidentified
MKNIIIGIDFSKETFDATVLDLSKTNGVLSASIDGMHQKFQNGKLGFRQLLRWVKTSTRQRPSKDWMFCGEQTGKYSHGLCDFLSSNGLDMWCEAPLRIKRCMGITRSKNDSLDSLRIAEYAYRYQDKMSAYKPVSKAIAQLKELFLARLKFVEQRKALYVRNNTCTEYSKGSDAEKMVAELSQKLIEQFDESIKKLDKEMQAIIDSDEEILETFENISSIKGISLINASAFIIYTNNFKDFGADPRRIAAYWGVAVFAQDSGTSVHHPARTSPMCSKMLKSLLSEAAVAARIYNPGIKQYYDRLIAKGKHKGVALNNVKNKLVHIITALAVNKTKYMEGYESFRKAS

SEQ ID NO: 447833 - protein, 447 aa, unidentified
MSKKVSMEVINPFAAGIDVGSRSHYAAIGQGESDVREFGVYNENLLELAQWLLDNEVKTVAMESTGTYWQSLYATLQANGLEVILCNGKFTKNIKGKKTDVQDCQWIQKLHTLGLLSGSFLPDEATEQLRTYCRHRTNLLEQAAGTTKKMQKYLRLLNLRLDVVVKDVTGLSGLAIIDAICKGETNAEKLAAYRHGNCKKSEQEIAKALQWNGRKDYLFALGHEYQMYQTLQLKITECDAEIQKLLDEQIAQDENKKQHVIDKKVYKKINKNTPKNMDINLLSYQYFEGVDLLAIEGVSYSTVLTLMSEVGNGIHKFESAKQFSSWLRLSPNNKISGGKVLSNKIPKGSNRLKIALRNAANAIGNLKDTALSNFFKRIAFRKGRVSAISATARKLAVIIWNMLVKRIPYRAETTYEFLDQKRKRKVQEMRKLIAKFEIRTDELNLQL

SEQ ID NO: 447834 - protein, 355 aa, unidentified
MNDTKYIGMDVHRESISIAALNSAGKIVLECVVETKASIILQFIDGLRGELHVTFEEGTWAAWLYDLLKPHVRELVVCDPRKNASMKQGNKSDKIDARQLAELLRLDHLNPVYHGEHGLRSLKELVRSYLTITKDVGRVMSRVKAIYRSWGIACSGKQVYAPQHRVEWLAKITEPGVRRRAEFYYQQLDALRSLRREVRRELLEESKKHQAWKRLCQIPSIGPIRAAVLLGILQTPHRFRTKRQLWSFGGLGIETYSSADHRYVEGQLKRSKKPALIRGLNENCNHDVKNLLKGAAIIASTKPGPFQEFYTALLAKGMRPEMARLTLARKIATIVLIVWKRGVSFDAQHLKPQTA

SEQ ID NO: 447835 - protein, 342 aa, unidentified
MEQVTIIGIDLAKRVFQVHGAASDGKVVFRKKLSRAQLLPFLAGQPRCTVAMEACATAHEWGRAIGALGHAVRLLPPVYVKPFVKRQKNDVADAEAIAEAACRPTMRFVAVKTEEQQARSMIFRTRDLLVRQRTQLINALRGHLAEHGVVAPQGPAHVKRLADAIEDEESLIQPIVRDVGRLYLQQIAIYSEKITELEETLRREAARSETTARLQTMPGIGPITAIAIETYAPPLETFRRGRDFAAWLGLVPLQKSTGGKQRLGRTSKMGQRDIRRLLIVGAMAVVRWATRKGQPEGSWLARMLTRKPPMLVAIALANKMARSAWAMLTKRENYRDPAAASA

SEQ ID NO: 447836 - protein, 353 aa, unidentified
MKDKYVGLDLHQSSTMAVVHDEKGKAVMESILKTEAEAIRDFVKGLSGTIHVTFEEGTQAGWLYEMVKPLVAEMVVCNPRANKLLAVGNKGDRVDAHKLAELLRGGQLKSVYHGGSSSRQLKELVHNYDSLVSDTTRVMNRIKAIYRGRAIRCAGRDVYYRRHRDEWLEKLKEAGVRRRAEFLYQELDTLRKLRREAKQAMLKESRRHAAYPTLKQIPVLGPIRIAEILAKVVSPHRFRTKRQFWAYCGFAVVTRSSADYEFVEGRAQKRQRAPMTRGLNPNFNRRLKYVFKSAAVDGMHQEPFQSYYLRRVAVGMRPEMARLTLARKIAALTLTLWKKGEGFDELKIGESVA

SEQ ID NO: 447837 - protein, 398 aa, unidentified
MLAVVIADAAEGEFRFERRKFGTLGTDLDELSAWLGERGVREVVMESTALYWKPIWRRLEEQCKLHLAQAHSNRAPRGRKRDFQDAERLVRRFLASELILSFVPDSDQRLWRTLTRAKHQLTRDRVRLYSQVESLLEDARIKLSTCVSDLFGVSSRRILHGLAQGATDPAALAGMAEPELQVTPLQLANALSAAPTMNPMHRQILNLFLQRLELVEQQMATLRLHIAASLDAHQQAVVRLAAVPGYGIDSAQQVIAEVGPQAATFDSPEQLASWVGVCPGREESAEVSRSNRTPKGNRAMRRVLNQVAHAAVKTRGSKFQLIYRRFLPRLGHNRAIWAIAHRLCRLTWKILRQGAAYIEYGELPNPKRLRARVAKFTRELRALGYQVIPPAPAPGSSV

SEQ ID NO: 447838 - protein, 400 aa, unidentified
MLSIGIDVSKGKSTVCGMKPGGEIVYAPFEVQHTREGMSELVSLLRSSGEEVRAVLESTGSYHCPVVAALLENGIFVSVVNSLRMKRFCSQSIRKVKTDRIDAMQIALYGLAYWQELQPARLPEDTYRELQLLARQYYQMTSMLIKAKVDFNALCDQVLPGMQELMSDHAGRHKLSDFVLRYRHTTHILEMGETRFRKDYCKWAEKKGYRNCERMAALIFATAQNGIPVLPNAPSTQIVITEAIRVLHTVEASRDAILTQMQALAKTLPEYSLVREMPCIGDTLAPRLIAEIGDVRRFHSKRALIAYAGIDAPPYQSGKFCANNRHISKRGNRYLRKTGYEVMQSYVMHKPANDPIFTFIEKKRSEGKCGKLAMVAGLNKFLRVYYGKVTELYRSLPTIE

SEQ ID NO: 447839 - protein, 424 aa, unidentified
MNLTQNERLNQVTADTLVVGVDIGSQDHFARAFDWRGFEFTKRAFRFSNTGVGFLSFVRWLNELQNKTDTKKVIVGCEPTGCYWLTFQRFLKDHDIQLVTVNPYSVKKCKELDDNSPEKSDLKDPKTIAGLVREGRFSTSYLPSGVYAEIREASVCRDMIIKQHIRLANQIQGWLQKYFPEYLECYKDWDSTSGLMLLKYAPLPQDIIKLGAGGINQIWRDAKVRAAGMKRAKTLVEAAQGSVGLEGGEAARLEIWILVNDYTSKVEQLARLDEYLNEKVMEVPNVEKLLAIKGVGLSTVIGFVAEVGDIGRFTDPRQVQKLAGLEITKISSGKKKGQPGISKRGRRKLRRTMYESARSLINWNPAFLDVFLYYRNREHRPLGSMQAKIAVACKAIRVFFVIMQTGCDFDEERFRKDIMRPEAA

SEQ ID NO: 447840 - protein, 346 aa, unidentified
MEYVALDVHKNYTWARVENSQGARLYESRLAHGHGTIKNFVNRWSGRSPVAVETVGNWYWVVDEIEAGDGTPQLVNARLAKLMMGNVNKSDKLDCQGMNRLQRTGTLPTVWIPSSSVRDGRELARTRMVLSRQRTQLKNRIHATLGKYGYTVKGASDAFGKKGREIIEELLLKLPPHTQQALRLILDELDHVTDNLKAIEGHMIEIFSPCPQTQWLKSLPGVADILAVVIWTEIGTIERFNRAEQLASYCGLVSRENSSGGKIRLGPVRRDVNVYLKWAFVEAANSALLNAGRCGYAHISRLYERIKPRRGHGKAKVAVARHLAEANFWMLKKGEPYREPMPSTQR

SEQ ID NO: 447841 - protein, 384 aa, unidentified
MSSESSESTPAAAVSRPIIHLGMDVHKDSITIAVLPEGVKAPTRVEKLANDLPKLKKWIDRVARDGALRVCYEASGAGYVLHRALTEWGYACDVIAPSLIPKRPGVQRKHDKRDATDLARLHRAGELVVVRIPSEAEERVRDVVRCRETFQREILKSRHYILKFLARRGFVFRAGTNWCTPHLKWLLHLTTDGSPLETYDRLIFREYHALLMYKLQRRDELDRQIEHLALLPALAPIVQRLQCFRGISVHSAMVLATEIVDWRRFERPSQLACYLGLVSREDSSGDRSRLGSITKAGNSHCRHVLVQAAWSYRHRPQTSVDLSRRQKGQPPAVVTHAWKAQQRLHQRFNHLSYRKRPQIAVVAVARELVGFLWAVMHDLESAAA

SEQ ID NO: 447842 - protein, 429 aa, unidentified
MQDEVYYERCAGIDVHKKVIVVCLRIRRKTETRSFGTLTHQLRSMVAWLKDNGCQMAAMESTGSYWKPLYNIFEQEGLPAMVCNAHHIKNVPGRKTDVNDAQWIAKCLSQGLLNPSFIPEREQRELRELTRFRQSQIQERARNINRLQKFLEGANIKLGSWVSDVEGKSATQLLELVIGKPDFTVEDVAARMHKNIKSSAEELFLSLEGYMTPLQRELFAHIMDIIRQQTAQIEKTDAMIKRNLSDNYKAAIKALDAIPGIGEISAEQIIAEVGTDMGRFRTPQRLSKWAGVCPGNNESAGKRKSGKTPPGNKTLKSTLTQSAQSAKRKKDSFFHAQYNRLVTGRGKNKATMAVAHSLLIAVFFVLSGKTFVDLGADYYTTFNREKKINSHVKQLSKLGVSIPEDVLNTAVYDAIRSAKEASRASPKPA

SEQ ID NO: 447843 - protein, 401 aa, unidentified
MATVWAGIDAGKRAHHCVVIDPAGTVLLSQRVDNDETTLLELIAGVLGLADGDAVCWATDLNAGGAALMIALLAGHGQQLLYIPGRVIHHAAATYRGDGKTDAKDARIIADQARMRTDLQPVRGADQISVDLRLLTSRRTDLICDRVRAINRLRATMLEYFPALERAFDYSKSKAALTLLSGYQTPQGLRRIGVTRLTAWLKSRGCRNSASVAQAAVDAAATQHTSLPTQSVGSALVAKLAAEITAIDEELAGLDREITDRFHQHEAAEVLLSMPGFGPVLAATFLANIGGNLDGFDTVDRLACVAGLAPVPRDSGRISGNLHRPRRFNRRLLRTCYLAALSSLKNSPASRAFYDRKRGEGKSHKQALIALARRRLNVIWAMLRDHTPYQEPAPAPALLAA

SEQ ID NO: 447844 - protein, 404 aa, unidentified
MNNVAGIDVSKGKSVVSVLRPFGEVVAKPFSVGHTGSELKELADYLKSLDGETRVVMEHTGRYYEPVARFLHEEGIFVSAVNPKLIKDYGNNTLRKVKTDKADARKIARYGLDNWVELRQHTPMDTIRIQLKTLNRQQGLYSKTKTMMKNNLIALLDQTYPGVNALFDSPVREDGSQKWVDFAASFWHVDCVRAMSLTAFTERYRKWCKRHGYNFSQSRAVEIHTQAQDLIAMLPKDALTKTMVRQAVDALSAVSASLERLKAEMRTLAAQLPEYPVVMAMRGVGDSLGPQLMAEIGDVTRFAHRGSITAFAGVDPGADQSGTHEAKSNRTSKSGPPELRRALFLVMDCLLKTQPEDDPVYRFIDKKRAEGKPYLVYMTAGANKFLRIYYGRVKEYLASLENTD

SEQ ID NO: 447845 - protein, 342 aa, unidentified
MDHFAGLDVSVKETSVCIVDETGKIVREVKVASEPEALSSVLKNPAYRFKRIGLEAGPLSQWLFSALAEAELPVVCVETRHMQAVLKAQINKTDRNDARGIAQMMRVGLYRPVHVKTLRSQKLRMLLTHRKLLQSKAIAIENDLRGTLRNFGLKVGIVGTAKFEARIKELIENLPDLAVLIEPLLVVRRALREQFVILHRRLLALVRDDEVCWRLMTTPGVGPVVALTYRATVDVPARFRKSKAVGAVFGLTCSKYQSGEIERSGRISRCGDEMMRVMLYEAAQSMLRSKKWSWLKAWAMQIARRRGMKKAIVALARRLAVILHRIWVDGTKFRWTRETAVA

SEQ ID NO: 447846 - protein, 374 aa, unidentified
MKHYSTLYVGMDVHRDSFTLAHFALDMKQPTGIVKTDSDYRRIVTYVHRLREKYGQEARIVCGYEAGCLGYTLYHQLTKAKIESIILAPTTLPSPRGGKRVKTDGRDAANIAQCLAYGTYSPVHVPSAEDEQVKEFIRMRNDHCQMLKKLKQQILSFCLRHGYLYNGTRSNWTQAHMKWLDALQPEGLLGDTLEEYLTSFRYHQNKLERLDRRIEEISREETYRESAGKLCCLIGVKPLTALSVVSEVSDMHRFSTAEKFAAYLGLVPGEHSSGNSVQRGGITKAGNVHVRALLTEAAQSYTRGKVGYKSSALKKRQSGQSETVIAYADRANERLRRRYYQMTLQNGKRGNVAKTAIARELACFMWGLLTDHVA

SEQ ID NO: 447847 - protein, 349 aa, unidentified
MLYVGVDQHKKFSQVAVMNETGSIMDNHRLYHCDKEGIRRYFKKLGEETTAVLEATRNWYWLYDLLEEEVSKVKMAHPAKVRLIAEARTKTDKIDATVLAQLERTGFLPEAYVCSQDVRGRREIHRFRIALVRMQTMLKNRVHAVLDKLGIEHPYADLFGKEGRKFLGSLSLERPYQVEVDICLRLLERYHEELEAVRGEIRRTLREDSRAALLMSVPGIGEITAYLILHEIGDIKRFASAKKFASYCALVPRTWQSGERSWGGHIGKFGNLYLKWALVEAAHVAVRKDPALGAFYEYKNRIKGKGRAIVIVAEKLSRAIYHILSEERDYRYNSLSKRHLGKPVPQLGR

SEQ ID NO: 447848 - protein, 356 aa, unidentified
MSRDIKYIGMDVHKEAIVIAVLNDSGKLVMESIVETQASSILQFIYGLRGELHVTWEEGTWAAWLYDLLKPHVHEVLVCNPRRNALLKEGSKSDQVDARKLADLLRTGMLRPVYHGENGLRTLRELARSYQTISKDLNRVMNRLKALYRGWGIACSGTQVYAARYREEWLHKIPHAGVHRRAELLYQQLDGLQALRRTLRPELLAESRKHKAAKLLRQIPCIGPIRAARLLALMQTPHRFRSKRQLWTYSGLGIETHDSAQYRYVRGQLQRSKKPQQIRGLNQNHNHEMKEIFKGAATRASCGVGPLRDFYVALLEKGMRPEMARLTLARKIAAIALTLWKKEERFDAEQLKPQAA

SEQ ID NO: 447849 - protein, 323 aa, unidentified
MTPTFLGIDISKKDFHVVLLKEERGLKPKKFTNDTAGFENLNKWLKKSGVEELHACMEATSIYGDALAKFLYEAGYQVSVVNPARIKGFAKSELLRTKTDSVDAALIARFCAAIKPSLWKPTPLEVKELQALLRRLESLTEMYQQEENRLETATETVAKLTRAHLDYIKQQQAEIKKMISDHFDQHPHLKQQRELLTSIPGIGEQTAAVLLAEVGRIEDYKNARQLAAYAGLTPCERSSGTSVRGKTRLSCTGNVRLRKALYMPAVVAMRCNPLLKAVSERLLGRGKVKMQVIGALMRKLVHLAFGILKSQKPFDPTYLLATP

SEQ ID NO: 447850 - protein, 353 aa, unidentified
MNDTSSIAWLGLDAHSRNCVLAQLDDQGNEINDWRFPTDPQQLLKHVQAIPATIKRLMLEESNLARWLSQLLKPHVQQLIVCDARRNRLISQDAHKHDRRDAFALARLLRLNEFKSVWQPTDDQRVLFKRAAQTYEKAVLRQTRLKLQIKSLFQHWGLFPTGAIVFAKAGRSGWLKQLPYDALRAQARLLYELLDQALAGQSQARRLLCQSGQLFPEVQRLRTAPGVGLVGAHLFVAYVQDPHRFAKFSRLTRYCRLAIRDRTSDNKPLGFKQLDRQGNGVLKAISYRAFLQAAKRRSGPLWDFYQASLRQTGSTTHARLNTQRKILLVLWTLWLKREDFDPNQFSRSQPIDV

SEQ ID NO: 447851 - protein, 392 aa, unidentified
MIYAGVDIAKMDHVIGAVDETGAEAASPMKFKNSEAGFERCIAWLESVAESEDEVFVGMEATGHYWKACFAYLMAAGYRVCVVNPMQVHAMRKLKNLAGVKNDRIDSWLIAETLRQGDYDETRLATDEVQALKQLTRYHQGLKQELATVKTQAICVLDAYFPEYAVLFSDMFGAASLKVLAECPTPSEVARKRASSIAKLLSEGSRGRLGADKAAQVKAAAKSSVGIKLGEEAASFQIKTMVSQIEFLNQTIAKVEKEVASLLEKVEPNITTIPGVSTTTGAQIVAEIGDVKRFKNAASIVKYAGLNSGVDESGKFSAEGVPITKHGSPYLRRSLWLAANRARQYDPRLKEYYDKLRRKGKPHRVAVTAVARKLCHIVYAVMRDGEPYDPAK

SEQ ID NO: 447852 - protein, 327 aa, unidentified
MDKKQVIGIDVSSQKLNLHFLDNGADFEIANTQESINSFLKQKKLSAKNCIFGAESTGRCHLVCQDTLVRQNFEFKLINPILTGKRIASSIRKKKTDRNDAKFIAQLVSQGEGRVIDVKQLDVTKKTLLRTRTSIVNQRTGIKIILKELNMVKNSRDNKIKQAIKSLEKLIDNMDKCVQNVEELALDKKEITKEEELIQSFPGFGSRLAAIVSTETGGFSRFPTSTQFKAYVGIDPKVTQSGGSLKTGKITKRGNAHLRTAFYLAAQVARCHDPELKEFYQKKKAEGKPTRSAIIAVARKLCERVFAIVKRGTPYEVRKINSQPALT

SEQ ID NO: 447853 - protein, 339 aa, unidentified
MEMIGIDIHRKECQATVLDEAGNVQEQRRFESKTDAIKAFMSRHPDAKVAIEATAMFEHIYNTIRSCGNKVVVANPLKTRLIADARVKTDKVDSRILAMLMKSDMLPEAYVPDEEIREARKDVRERLLLKKTSTAFKNHIYSELLRRGIEYKDGVLGSKIGRKWAKKTLDEPRLEQTFMLLETTEEAIAEYNEERLKPAFEQNEKAQLITTIAGIGQYSSLMILAELGDISRFPDSDKVVSYCGLNPGVHQSGEHAQYNSITKTGPNSLRWILIESAHSHLLHCKDKANCKLCQFYKKISRRRGSKIATVAMAAKMVRIIYCMLKFNKPYMSQGFETGS

SEQ ID NO: 447854 - protein, 358 aa, unidentified
MQRNKISFKGQRIFIGIDVHKKNWDVAIAPEVGNVKRHTQKASAKALFDFLKKHYPDGDYLAVYESGFSGFSTYYALKEVGIDCIVIHAADVPTTQYEEVMKTDRVDSVKLVRSLKAGLLNGIYIREKENIDDRSVVRISKTIQKQLSGYKARVKHMLHCNGVLLPERFEKPGSHWSKAFIRWLKEDVTLLSSTRNSLDLLIRQVETIRMTLLEATKMMRFLSQTERYKHKFDLLMTVPGIGVAVSMCILTEVYDVKRFHNEKEFAAYLGLIPTSHSSGDKIAHGEMTFRGNKQLGPMIIEAAWITICKDAGLGSLYLRYKERMKPQKAIVRVARKLSNIIFAILKNEKEYVPYHTGK

SEQ ID NO: 447855 - protein, 368 aa, unidentified
MSEIIRIGVDTSKSVFQLHGVDAAEQPVLRRKLRRRDMLAFFERLPATKVGMEACGGTHYWARELTALGHEVKLLPPQHVKPYVRRGKNDRNDADAICEAMSRPRMSFVAIKTADQQAAQMLMTTRERLVAYRTQLINTIRGHAAEFGFAAAKGPAHVEPLLARVAEDATVPPLAKALFAIHGQELSRLKIELREIEAKLKAWHRQNEMSRRLAEVDAIGPIGGCLLAIKVQDPQAFRCGRNFAAWTGLTPRDHSTAGKMRLGVITRAGDEALRRTLVVGATSVIKQVRNGKGHPSPWLRDLVARKPPKLAAVALANKVARIAWRLMVSGERYDAARAGIVSPRPSVAPRSRRQGRCAPPAAVACGQP

SEQ ID NO: 447856 - protein, 342 aa, unidentified
MKDIMIGVDLAKNVFQLHGASMAGHLKFRKKVTRVQFRQFMSNHEPAVVVMEACGSASYWAREMVKLGHEVRLIAPQYVRPFVKRQKNDAADAEAIVVAAQRPEMRFVEPKSEDQQACAVLFRARERLLHQRTERVNALRSVLYEYGHVFPKGIAHLRRIEAVLTDPASDLPALVRDECQDLLEQISEQTARIEAKTAKTRGLAGTNDTARRLQTMPGVGPQTALAISGFAPPMDSFKRGRDFAAWLGLVPRQYSSGGKERLGRISKAGQTDIRYLLIIGAMSRLTVLARKSIQEGSWLARMLHRKPLMLVAIALANKMARAIWAMMTKKEDYRDPARAVST

SEQ ID NO: 447857 - protein, 326 aa, unidentified
MQGKVLSEQATRMQSSAGIDVGKSWLDAHILPAGQRRRVANNPEGIRQLKRWLLGFDCTIVVVEATGKWHRPLYRSLHADGLPVAVSDPYRVRMFAKAHGVAAKTDRLDARVLAQFGAVMNPAIRPPAPEAFEELGELLAARRSAVDTQTALKNQAGITTSKFLVRQIKRRLSALAKDIDALECEIQRHIAAEEPLATRYAILISIPSFGFVVAATLLASLAELGICSAKQIGMLAGLAPIADDSGQRQGIRFIGRGRSAVRNVLYLAALAATRFNPDMKAFYRRLIANGKPPKLAIIAVARKLAVLANTLITEGRNWLPQHPKHA

SEQ ID NO: 447858 - protein, 422 aa, unidentified
MRSVALDVHRDFCEVALVEDGELRSAGRIATTPERIELFAGSLGPDDRVALEVTGNAWEIARIIEPHVAQVLVVSPSDTGIRQARAKTDRLDARTLARLLAAGSLDAVWMPDRATWVMRRRLARRGQLVRARSRAKNEVHAVLMRQLVGRPPVSDLFGVKGRRWLAGLQLALEERETVDAAMRQIEFLDTEIAEVERLIARAALGSKEIKRLMSVPGVNVIVAASFLAAIGDIGRFPNARKLAGYLGLDPRVRQSGPGPATHGHISKQGSVRARHALVEACWTAVRQPGPLHAFYQRVRARRGHSVAIVAAARKLACLFWCLLTRGEDYAYAQPSLTKKKLRRLEITAGQPRYAPEAAGIWRANDAVREAERELARQAETAYQRTVRDYHASQASKAGASVTPGRASNRPSKGKAARQTTSP

SEQ ID NO: 447859 - protein, 374 aa, unidentified
MDNGITWVGLDVHKKSINVARLHPDGQRDAWQLENNAKLVKRLAKKLAREAPGEVRCCYEAGPCGYALKRQVEAAAPDVVCEVIAPSLIPSRAGDRVKTDRRDARKLAELLRADLLTEVRAPTEDEEAVRDLCRCRDDLRRDLMAARHRLSKWLLKRGIVWQRKNWTGVHVKWLQTLSFERSTERAVFATYLKGVEQILERKVAVEQRMEEFSLTSTHAQPIAWLRCFRGIDTITALTIVAEIHDFRRFHTAPQLMSYLGITPSEYSSGSRQHRGGITKCGNSHVRRLLVEAAWHYRHQHRVGPALKKRRSEQPQWVIDLADRAGRRLGRRYAGFIERKMPHPKAVTAVARELAGFIWAVMRQWEPQPKAATAV

SEQ ID NO: 447860 - protein, 377 aa, unidentified
MKKELYLGLDVHKDCIITAVAEEGRNGEVRHSGAISNDLHAVEKWIGRLRKVHGKEVLLRACYEAGPCGFGLARRLQQLGVECEVVAPSMTPKRSGDRVKTDKRDALKLARLLRAGELTAVYIPEATDEAIRDLCRARSDAVDDRRRSRHRLKGFLLRHDYHYQGKTSWSAAHERYLRELVLPHPAMKVILEEYLMSVQLASERIARTEAAMSDLLGKWRLEPAVRALMAMKGFQTVAAMIVVSELGEVDRFTHPRQVMAYLGLVPSERSSSDRRRQGAITKCGNAHARWLLVECAQHYAAPPKVSKELSRRQEGQSPEMRAISWRAQNRLHSRYTRLLGRRLQRNKAMVAIARELCGFIWELLRTQSCYHVQATSV

SEQ ID NO: 447861 - protein, 355 aa, unidentified
MIDEHPEREVFAGVDTHTDTHHAAVVDPLGRPVADQEFPATTQGYRALLTWLGTFGQVQAVGVECTGSYGAGLTTVLTASGLVVVEVNVPDRGTRHSRGKSDPIDAYVAARAAASGRAQAIPKSRTGTVEALRQLRVTRASAIKARTQAINQLIGLRVTTPEPLRQTLAGLTPAALVNSCLRLRPGPDLGNPVHASRFALRQLARRIRRLTEEIDEVDEHLSVLTAAAAPELVALFGVGTETAGQLLVTAGDNPERLRSEAAFAALCGAAPVPASSGRTDRHRLSRGDDRQANRALHMIAVVRMRYCPRTRAYVARRVQQGLTKKDIIRCLKRFIAREGYHALNQPHARHAIPTT

SEQ ID NO: 447862 - protein, 361 aa, unidentified
MRHLGAKMPVGQKPPANREPSMNEITTVGLDLAKNVFQVHGVDAEGTTVLRKQLRRAQVLAFFSRLPRCLVGMEACATAHYWARELRTLGHEVRLMPAQYVKAYVKRNKNDAADAEAICEAVARPTMRFVPAKTAEQQAAVLLHRGRERLVRQRTMLVNALRGHLAEFGVIAPQGLRNVGRLIAIIRDEEDARLPGLARQVLQVLAVQIEQLEAAIAALEKQLMGWHKSNPISQRLATIPGIGPIIATAIAAMVAEPSGFRSGREFAAWLGLVPRQNSTGGKNRLGGISKRGNQYLRRLLINGASANLLRSKATNADPWVIGLRRRRPSLVVAVALANKTARIAWAVMHRQENYQRMATAA

SEQ ID NO: 447863 - protein, 338 aa, unidentified
MEITTIGVDLAKNVFQVHGINAHGTTVVRKRLSRDKFLTFFANLPPCLVAMEACGSSNFWARHLQALGHDARLISPQFVKPYVKTNKNDLNDAEAICEAATRPQMRFVPMKSIEQQDIQAVHRVRQLLIQQRTALVNQARGLLREYGVFIPAGIRQFRQAMPGVLEDAENELTDLTRQLMADLYQRLLELDQQIADYERRIQGLSRERPVCQRMEKVEGVGVLTATALMATVGDAKVFKNGRQMSAWLGLVPRQHSSGEHNRLFGISKRGDIYVRSLLIHGARSVLLRCKHKTDPKSRWLQRLIERRGFNRACVALANKNARTLWALMAHGEDYRLAA

SEQ ID NO: 447864 - protein, 377 aa, unidentified
MAELLTKLSEKLNPQLAGSSAENGLNRDRLTVGVDLGDQWSNYCILGLEGEKLAEGKVRTEQEEITELFRAMTPARVVMEVGTHSAWVREVVVGFGHEVLVANPRQMDGPKRRRKNDRIDAHKLARVGRVDPQSLFPIEHRSIAVRQDLVALRARDALVTVRTELINTTRGLVKTLGERLPKCSSESFPRRAEGALPQSVREVLLPLVRLVETLSSCIEVYDKRIEKLATEKYEHTELLRQVKGVGPLTSLAYVLTLENPERFAKSRDVGPYLGLVPKQEDSGESQPQLRITKTGDEMVRRLLVGSAQYILGPFGPDTDLRRYGLRLCERGGKNAKKRAAVAVARKLAVLLHRLWVSGEVYEPLRHARPPATDQAAA

SEQ ID NO: 447865 - protein, 413 aa, unidentified
MRLFVGDDWAEDHHDVELMDTAGRRLAKARLPEGVAGIARLHAMIGEQLGEDADEEDAGQVVIGIETDRGPWVAALIAAGYTVFAINPLQASRYRERHGVSGAKSDAGDAHVLADMVRTDSHQLRPVAGDSAQAAAVKVVTRTHKTLIWERTRCTQRLRHALRDYFPAALEAFEDLDAPDTLELLARAPDPASAAKLTTAQISAALKRTRRRGIAQKAKRIQAVLRAGHLGQPDIVTAAYAASARALIAVLATLNEQVKVLQGQVEAYFGQHPDAEILLSQPGLGPILGARVLAESGDDPGRYASAKARKNYAGTSPITRASGKKKVVLARYVHNDRLIDALMAQAFTAISTSPGARAYYDHQRARGSEHNPALRQLANRLTGILHGCLKTRTLYDEATAWPHHAAKTEKAAA

SEQ ID NO: 447866 - protein, 449 aa, unidentified
MGKGSGITRGDRRRNAKKARLRALVPEENAVAGLDLGEKRQALAVTGADGVVLARRSPQVSVHDLGPCLDRALAQARAAGYAGLSVACEPTGSRWMAVQDLCEARGLPFVCVQPLVSHLAREQEDLTGDKTDEGDSGLIARLARELHCYEPERLEGAWAELRDEGRRRAQLITGATAAKQLIRDKLGLAAPALLETACEPFDSATWLASLEVVLERCGGDAATVTAMGYEAFAAAVAAVLPGWGGKRVGGTCRQLFSALGDSRGVARMRRAAMRRVRGALADLKYARSRRGQAEADMIALLSELGADAGRICEIPGLSPVTLAAILAETGDLHKYESSSSVVKHAGLSPARNESGSFRGQAKISRRGRPVLRLAAWRATWAVLRHCAVLAAKHAALTSRDDDSRLTPGQARVACAASLLRWIWSLTVHGTRWDARIAAGDLGHHHAMAA

SEQ ID NO: 447867 - protein, 411 aa, unidentified
MHNRQNYLYVGVDLHKEHHTAVMINCWQEKLGEIQFDNKPSAFSKFLLKVETYVCDGITVVFGLEDVGGYGRALAKYLVDHEQVVKEVNPALSFLERKSQVMIQKNDSWDAECVARILINKFNQLPDAKPNDLLWSIQQLVSRRNALVKAQSALKNQLHIQLNHHYPSYKKFFSELDGKTALAFWEQYPSPSCLEGTNIKRLTAFLLDVSNNTCSVKKASEILRLVKEDGQTMKEYQEMRNFLVRSIVREIEFKKKEMKYIERELKQLVNLLDYQLETMPGIELVTASALIAEIGDVRRFPNANKLARFAGIASVYFGSGGKGKTHKSKQGNRALHALFYNLAVQQVQVAKGSKKPRNPVFHAYYQKKLKEGKTKGQALVCIMRRLVNIVYGMMKYKTAYELPVVEEKEVV

SEQ ID NO: 447868 - protein, 401 aa, unidentified
MKRLSGGIDVGSESHHITILDEEDNVLYNQKIAHQLSEFAESIKLFKQIEKKEGGKLSFALEGKNGYSAPLDRILLDQGFTLYNVDNFKLKRFREAFAGEWRDDQRDSLMLSKMLKLKEHINSQREKVFIKIEKPSLLTESLKLLSRHQQTLIDEKVRLINRLGKKLLEVCPQILKLGKLKNKKIIAVLAKYPDFSKYKRITLCSLLKIRGIGEKGAFFLLKRLNNIEYMPGLTDIYQTIILSYAKRILELQKEIEDLDKKLDEIGEESKEVKHLKTIPGVATKLASRLIGEIGDIDRFPSEKQLAVYCGVACVDNNSGKVTKAKAVYKANKICKHTLITMAGGSIRFSFQCRDYYLKKRAEGKSHNHTLRCLARQLIRVIYKMLTEDRDYIVRKELKKVA

SEQ ID NO: 447869 - protein, 405 aa, unidentified
MPYILALDVSMGHSYSVLYKDDTCLFEDEIEHTQRGFHALLEEIQHLPERPLIVFEATGIYSRPVEKFFQDHHFSYCLLNPLEAKKQMEENTLRSWKTDKSDAHRLAQTHLKNQRQPKEVQSNFYLEMRDLARFYQEIEKKITRLRMDLHNCLQLTFPELEQFFSNRLTPYALTLIRLFPHPDFVLASTRTKIKNKLINETRKKISANRAEQKADQIIHYAQCAYPAVEKDSIHCQKTIYYAELLQDLLEQKEALATHMIKKAEGSPCFLLYQTFPGIGALTAALLLGELGDITRFKTHKQLNAFVGIDIRRYHSGKYTGQDRINKRGNPKARKIIFFTIRNMIRQQRAAPNHIVDYYYKLKKQPIPKKDKVATVACMNKLLKCMHAMVRAHTEYDYAYAVSVDH

SEQ ID NO: 447870 - protein, 398 aa, unidentified
MLYLGIDLHLKQMTVSLRNQGGDVLLRRQVSTRWPKLVEFRKQLHQSAAAEKYVAVVEVCGFHDWLVQWLRQDEYCDQVLVVQPVGRSANKTDRRDAHGLSELLWVNRERLLRGERVHGIRTVYMPNEDEQADRSLTMTRERLVRRRTQTLNQIHKILRRRNLEWERPTKTFQTVKVRQWLKTLELDPIDRSAMNQLLVQWALWDEQLLAVEGWIRERFLANQNARLLATIPGVSMFIGLAIACRIAPIARFPRGRSLANFLGLTPGCNSSGDTERVGSITKIGSRMVRYLLAQAIQHLLRRDGGIRAWFQRIKRRRGSKVARVAVMRRLAVIMWRMLSTGESWRRSSEIPVADSEPRQADAPQNKQVEDQPGDTGLAGLSTGASSLLAGEEVTPCLA

SEQ ID NO: 447871 - protein, 385 aa, unidentified
MAPPRMPEAVIGLDVGKLSHWACVATRDGEILLSAPVANREGDLDSLFGRFPDALVVVDQSRNIGALALARAKAAGMSAAYLPGLAAHGAARLFAGDAKTDERDAMVIAKTALGIPDALLPVGDPGPTVAAARALAAQRNFLTCENTRSKNRLRSILLESCPAFEALVDLSDGPQLRLMASLGGAWSVADAGPRRAAALTRGAARGKIEALVRSTASSTRPDAAAIAAEDRAVRLLARRISENSAEIDVITAEISALLEGDDTYRCLLTVPGIGPKTASELAISIDIEDFPSHDRLASYCGLAPRNRQSGTSISSVTASRQGNKRLKNLLIFSCNCLTRTEGRWGDYYARCRERGMPHGKALKALARKRLKVIYAIMRDRLPYAA

SEQ ID NO: 447872 - protein, 312 aa, unidentified
METKYVGIDVSKLTLDFDCLPVSTPQPFANDSLGIEALVALLKDSGVERIVIEATGGYETAVVSALAIAQLPVVVVNPRQVRDFAKAMGHFAKTDRLDAKVLALFGERMKPALRRLPGEAQRALADLLARRSQLVFMRAQEKARLATVPAVARKDVEQHIAWLDKRILKLETDLGDRLKRSPVWCHKAALLDSVPGVGDVTTFSLIADLPELGTMNRQRIAALVGLAPFPDDSGKRIGARYVRGGRADVRNVLYMATLTAIKHNPPIKAMYERLIAAGKPFKLAMTACMRKLLTILNAIIKKDQSWRLQPSA

SEQ ID NO: 447873 - protein, 324 aa, unidentified
MSKIKEFFGIDISKDVFDVVDASDKHHQFKNDQSGFKAFGKLLNENSHCVMEATGSYYQQLATWLYDSSILVSVVNPLSVKRFIQMRLKTSKTDKLDAQMIRMYGESEHPKLWSPPSKLIIEATELHKLIELLVRQRAGLKNRLHALESKGITKSLVLTSVRRQIRNLSHEITDLELKLESVIKEYEPDLLTRLCSIPGIGKRTSIYLIVLTQSFEKFESSRQLISYLGLNPTIRESGSSVRGKSRISKTGDKQVRKLLFMCAFTACEHNKACHEIYQRLTAKGKSKKLALIAVANKLLKQSLAIAKSGLYYDENYRSVNVNLG

SEQ ID NO: 447874 - protein, 403 aa, unidentified
MNSVGIDISKGRSTVAVMRPFGEVVISPFEVRHTDSELSELARQLKSLDGETRVVMEATGNYHAPVAKLLHDAGLYVSVINAKLVHGYGNNDLRRVKTDKKDAVKLANYGLDRWLTLPRYVPEEDTRLLLKNCYRQYRQYSKVQTILKNNLISLLDTVFPNANRLFSSPIRVDGSEKWVDFVAEFWHCRCASEKSERAFTSKYLRWCRKHGYNFREAKAHTIYAEASGHIGVMPKSETTKLLVKQAVSQLRATSTALAALKQEMQSLASVLPEYPVVMDLFDVGPTLGPQLIAEIGDVRRFYSKKALVAYAGLDAPPNDSGDVTGRHKSMSKIGASSLRRTLFLVMSVYLQTAPLDEPVYQFMDRKRAEGKPYRVYMMASANKFLRIYYATVKAYLESLEHTA

SEQ ID NO: 447875 - protein, 347 aa, unidentified
MRFYTGQHRYYCGIDLHARTMYLCILDHESGKVLLHRNLRCEPELFLRTIEPYRDGLVVGVECIFCWYWLADLCSRESIPFVLGHALYMKAIHGGKAKNDKIDSHKIAVLLRAGAIPVGYVYPQGMRATRDLLRRRLFFVRKRSELYTHIRTTFHQLNLPAPAGKLRHPCNRVGVAESIPDPVVRASVEADLALAAHLDVVIRSLEGTLRDQAAVEDPDTLELLRTIPGVGPILSLTLLYELHDIARFPRVQDFLSYARLVKSQKSSAGKITGTSGAKIGNAHLKWAYSEAAVHFLQKNPPGQRLIQRIRSKHGKGKALSILAARLGRASYYMLRRSATFDMDRFMN

SEQ ID NO: 447876 - protein, 413 aa, unidentified
MSPGLLLREVPGDRLVVAIDPGKVSNRVWLTTGDRGLIGEPVSLPVLRDGVEELDRLIASSGVVGVPVIGIEATGALHRAWAAEVERRWPGSLRLFAPSETQAARAQLGSRRFKTDDRDCAALVWLLRQGAGRPSAPSAVEALLGAVRHRRQLVDARRVAQQRLHDQLNALCPGLSAPVGHGRALKLEDASGGAVLACAAAFAGRAPSMRSLLARSPGRLSEANARFWIARWKRLLAPPPDAELRAQRLGRDVERWLGLREDITALESQLAELLAGTDGQILTTLPGVAVVRAGAFAAHTLPIERWPDPDQLYSATGLAPASYQSASVTRRGRISRQGLAEHRDALMAIAWGLSQHSAAFAARDCEYRARGFRPIQARVALARHACRPAWRLMISQQPYDDRRYDQARHRRGR

SEQ ID NO: 447877 - protein, 335 aa, unidentified
MNYRLFAGIDVSKFKIDVVFFLSEDPDRQFHGCFQNSDEGCSKMVSWINEITGLSISDMFFCVEDTGLYTLPICTFFDEQGGNLWVENALRLKRSLGLKRGKSDKADAAEIANYGFLHRRKATLFKLPSNTISKLKHLLSCRKQLVKQQTALKNATGELGVFDKESAAFTLDIRKSLITEYDNKIKMLEEKLLVCIKEDSILEKQYNLVKTVHGIGAQTAMFIVVLTQGFTLFENPRKFACYCGLAPFGNESGTTLKGRPKVSHLANKRIKTLLTMCALNTIKKDNEFKRYYDRKIKEGKHHSSVLNVLRNKLISRAFAAVLKDRPYEKELSSAA

SEQ ID NO: 447878 - protein, 346 aa, unidentified
MDHYAGIDVSLECSSVCVVDANGKIVREAKVASEPEALIDWFRSLGFDLARIGLEAGPLSQWLYAAMKKACLAVELLETRHVSDAFKAMPVKSDRNDARNIAQLIRLGWFRPVHCKSMSAQETRAMLTARKLVQNKLQDVENSLRGILRGFGLKVGKTTKRSFAPRIRELVAGHPALETIAEALLAAHTVLVREFNGFEKRVRAMSRLDAKARLLMSTPGVGPVTSLTYASAIDDTSRFISSKRAGPLFGLTPKKYQSGETDYSGRISKNGDAAVREALYEAAHSILSKPIKGCAQLKSWAMRIARRAGISKAKVALARKLAVIMLRMLKDNVPFNATAKVTAMAA

SEQ ID NO: 447879 - protein, 400 aa, unidentified
MNPVIGLDVSKGESQVQAFLDKGKPFGKSFSVSHTTEGLDALLHYLKVVENETGIKPSVILESTGHYHTPVIQFLEEQNYLYIMINPLLSYQAKKSSLRNVKTDEIDAFRLCELYYKEELEPYKKRGIQRLNLRHLTRQHETLTGLYVQAKLQFHAILDQVFSEYKGVFGDLYSKVSLNILLEFSTSESVVQAGENKVTDKIASLCMSRSERWAQERAKKLYEAAQRNPFKSIVYQSHLISLEMYIQLLLQYQEHLAKLDDQIDALAGEIEEYKIIQSIPGIGEKIAATIISEIGEIERFNHPKKLVAFSGIDPSVHSSGKFTATINRITKRGSSRLRHALYMAVLCGIRSSRNKKLKEFYDRKREEGKPFKVAMIACVNKLIHWIYALLKRKEAFLDLA

SEQ ID NO: 447880 - protein, 324 aa, unidentified
MPIVVGVDIAKRTFDIALLQANGKYRTKGNLSNDPAGFREFTQWLEKYAEPGAWVVMEATNVYHEALADHLVGLGYRLCVVNPARIASYAQSQLQRVKTDKVDAKLMALFGTRHIDELQPWQPEPPARRRLRALVRRYEELKELYRMESNRLDTAESSVKESILSVMTHLERQIDQTLKAIQEQIDDDPDLRGKRDLLVSIDGISDKTAALLLAELGDLSRFDNARAVVAFAGLNPRLQQSGSHQGQVRISRMGSARLRAGLYMPAMCAMLHNAAVKALRLRLQENGKTGKQIICAAMRKLLHIAYGVLKSGQPFKAELALPAR

SEQ ID NO: 447881 - protein, 423 aa, unidentified
MNRLHYELHVGIDLGQWLHQACVVDANGELLEERGFEHSVDGLGTTLAWLLSLAGKDAERIAVAIEKPHGAVVETLLESGVAVFAINPKQVDRFRDRHSMSGAKDDRRDAFVLADALRTDGHRFQRLQLPPPEMVALRELLRTRDQLVKNHVALSSQIRDLLARCWPHLVTLAPKDKALDAFFCELLQLFFDHHPTAELSLQNIQKLVHQHHIRRLQPEHILEVLRKTPLRVAPGTTEATSAHLNLLLHQLLLVRQHRRDSDQHLERWFKQLQPTSDQPYSDAAILASLPGVGAVVLASVLSYAHDPVRLRNLDAFRSLGGIAPVTKKSGKRGQQRPQILMRRARSLPLNNALHHWARIAVLTDPHFKDHYDRLRAKGHNYARALRGVMDRILAIAVAMLRDQTLYDPSKRANFNEGAKKVSS

SEQ ID NO: 447882 - protein, 338 aa, unidentified
MTIVAVGIDLAKNVFAVHGAGASGKPELVKPDVKRKKLLELIASLPPCLIGMEACSGAHYWAREFQKFGHTVRIMAPKFVAPYRLGGKHTKNDAADAAAICEAVTRPQMRFVPIKTLDQQSHLFIHRAHQGYVAERTALINRARGLLSELGIVLPQAYKAFKQGVHQVLEDLPGYCNQVIGDMLSEIAHLDERIEQDAKLIAKLAKEDEQSRRLMQLSGVGPTTATAIVASIGKGHDFKNGRQFSAWLGLVPRQNSSGGKTKLGSITKAGDSYLRMLLVLGARALLLSAPNKTDPVSRWALQLKERRGYGKAVVAIAAKNARMCWAVLSLGEGFRVPA

SEQ ID NO: 447883 - protein, 342 aa, unidentified
MLRVNVRQRSATVKDAVRYDHFVAIDWSLKVMAIAHASRRDQIPRVFERPTDLKELKTYLGSLRGRTIITFEESGPAHWLYLELLDYADRILICDPFQNRLLFHGAKTDKIDARKLCELLCARLLKEVYHSDSALYELRLLASAYDDVVRSGIRLLNQKAALTLGHRDEGKSAAFIDVILRENIELYRRSKEQYERRFHELARHNKLVRWQREIDGIGTIGAVKIVASVVDARRFPSIGKYLSYCGLVKHEKLSGGRSYGRRKPRYSRVLKSVYKTATLAVLKGHNPIRTYYDVLLAQGVAEHNARHAVARYIARISYGMLKNGTRYDPDIIARRDTNGKRV

SEQ ID NO: 447884 - protein, 283 aa, unidentified
MTSTKYIGMDVHKESISIAVLNFAGKVVMECVIETKASTILQFIHGLRGDLHVTFEEGTWAGWLYDLLKPHVTELVVCNPRKITLLKDGSKSDRIDAHKLAELLYMNKIKPVYHGEHGLRMLKELSRSYLTISKDLGRVMNRVKALYRGWAIPCAGTQVYAPHYRSEWLSKIREAGVRRRAELYYQQLDALRLVRQQVRKELLAEARKHRATKLLRQIPGIGPLRAAHLVALMQTPHRFRTKRQLWTYSGLGLETHDSAQYRVVEGQLQRSKLEETRHTAWSQ

SEQ ID NO: 447885 - protein, 366 aa, unidentified
MKKNSTIATRRKQIFKEKQLTIGMDLGDQFTYYCVLDEAGEVMVEQKLATTKQAMKQVFSRIPRSRVALETGAHSPWVSRQLTQLGHDVIVAHARSVRLIGESSRKDDRLDARMLARLARLDPRLLSPVQHRSAEAQIHLTVIRARAALVGARTALVNSARGLAKSYGERLRKCGTQQVSKDLAAGLSAELRSALEPLLAEVASLNQRLAEYDRRIEQIATQVHPEVALLKQIKGVGTLIALTYVLTVGDPHRFRRSRDVGCYLGLRPGRRNSGHSQPQLHISKEGDRYLRTLLVQGAHYILGPFGQDSDLRRWGLKLCERGGSNAKKRAVVAVARKLSVLLHKLWVSGEVYEPSRNHSTVESAVA

SEQ ID NO: 447886 - protein, 400 aa, unidentified
MLHTPTLFVGIDVAKKDFFVCVLDDQRQVLHSSALPMEREGFDKLLTLLSIYPKESLVVGLESTGGYHHHLFRFLTSQSFRTFVLNPLQTRTFSRLSLRKTKTDSIDAHHIALFLLSQYHSLEKPFRHPCPELRSLTRYREKVVTLIAMVKNLLEDAIFDCFPEILEYTTGYPKSLLSLLLAFPGATAIQKASESSLEAFFPPNKRGRKSRLSITKIKELASSSIASPDSAEENVLQNIISQLFFLQEHLEKLDAHIQSLALQAFPTEIQILTSVPGIGLVGAATFLAEIGSISRFENYKKLIAYAGLDPAIYQSGQSSTTGHISRRGNRHLRRILFLLARSVRRFVPASVSILTSNLLNPVLLKRPISAWLTNSFASSTPCSLIKLPSTPFALPPSLRR

SEQ ID NO: 447887 - protein, 355 aa, unidentified
MNSEKYIGLDVHQATISVAVLDSTGKLVMESILETKATTILDFFAGLRGTLSVTFEEGTWAAWLYDLLKPHVAKLVVCNPRKNALVKDGNKSDRIDAHKLAELLYLNKLSSVYHGETGVRMLRELARSYLTIVKDTTRVMSRLKAVYRSWAIPCAGRDVYYRRHRDQWLGKITEAGVRRRAERLYLQLDMLQHLRQQARRELLAESRRHPITAKLRQIPSFGPIRSALAVALIQTPNRFRTKRQLWAYSGLALETRTSAEHRFVNGQLQRSKKQTCIRGLNKDHNHDLKGLFKGAATTASVRPGPFQDFYQRSLAKGIKPTMVRLTLARKIAAITLTLWKKGENFDADKLKSQAA

SEQ ID NO: 447888 - protein, 340 aa, unidentified
MDATTYGLDVAKRVFQLHWVDAHTGEIVNRRFGRDELIGFLAQRPAGRVALEACGSGHWWARKIRALGHEVVLLHAKFIRPFVQTNKTDAADARAIWTAVQQPEMRTVAAKTEEQQAMLALHRMRALLVKFRTMQINQLRGLLYEFGATFKAGRVAGLAAIRARMAELEDALPAMLFGSLRDQLQRIDGLEQDIDQFEKRIGTWQKQEAACRAIAEVPGVGRLTATALVAMIGDPKTFKSGREFASFLGLVPRQSGTGGRIRLGSISKRGDPYLRTLLIHGARSVMYHSKAPTPWQTEIQARRPANVAVVAMAHKMARTAWAILAHGRPYQKDYVSVKPA

SEQ ID NO: 447889 - protein, 427 aa, unidentified
MSYRIAAIDVHKRMLAVVVTDVEGTGEYQFERRKFGATPGELHVLAQWLVQLEVEEVVMESTAQYWRPVWGTLELFWRPARQQREGANQKSGTLHLCQAKSNHGPRGRKNDFLDAERMVKRLVAEELVLSFVPDEEQRLLRTVTRRKYQLTRAKIGFKNQLESLLEQGHIKLSSLVSDLLGVSARRMLKALAEGETDPGVLAAMADHQLRATPEQLRDALGASSHLSGAFRRLLKLSLEELELIEAHIEQLGREAMELLKGHEDVIQRVAEVPGFGPDCAVQMIAEVGLEAAKFLTAKKLSSWVGVCPGNEESAGESQSTRSPKGNRHMRRLLNQAAQSAVKVKGSIFEVTFHRLLPRLGYKQAIWAIAHRLCQLLWLILHKGVRYEERGPAVSAKSKRTRAARMIRELKKLGYRVEGGPLPAVVRA

SEQ ID NO: 447890 - protein, 434 aa, unidentified
MITHPNAAGIDIGSASHFVAVPPDREDDPVREFPSFTTDLSAIADWLSACGVDVVAMESTGVYWIPLFELLESRGFKVLLVNARHVKNVSGRKSDVLDCQWLQQLVTYGLLSGAFRPDEQVCVLRSFMRQRTMLLKSQATHVQHMQKALTQMNIQLANVISDVVGETGQKILRAILAGERDGRVLAAMKNSRIHASDDEIAKSLQGNWRTEHLFALKQAVAGFDFTGSQLAEVDQEIERQLQTLESHEGDPPQGKKRGRARNAPRFDLRSLLFRMCGVDLTRIDGIDVSTALAVISEIGTDMSRFPTEKNFTSWLGLCPGTRITGGKVMSGRTKRCANRAAQALRLAAAALRTSKSALGAYFRRMCSRMEKAKAVTAAAHKLARLIYILLTKGQEYTDQGQEYYETRYRQRVVNHLAQRVAKIGMKMVPIEDAL

SEQ ID NO: 447891 - protein, 346 aa, unidentified
MNSMNYIGLDIHKKSISCCVRQADGTIIQESTITATRHALDEWMRQLPDPWIAGMEATLFTGWIYDHLVLGGAVVKVAHPAMLQAIAVGKKKNDRVDARKIADLLRCDYFPECHMAPREIRDRRRVLRYRNLLVRQAVQMKNKVSGLLMEAGVPYNQQKVHQKKYFAELLQKQKKDMPPSMPELLRLSRSTVEALTGMQRQLIRALESDAMLAARVERLASIPGVGRVVALTWALEMGDISRFASVKKAVSYCGLCGAEKSSGGKTERTPISKQRNKHLQTMLIEAAKLAPRWNAELALVYDREKQRGNRNRATLAVARKLVAYLMAVDREERLFDTQVRVAGNAA

SEQ ID NO: 447892 - protein, 318 aa, unidentified
MLNESFVGIDVSKDWLDVGWEPAQRSERLAHEEVAMVGLCERLTQERPCLIVLEATGGLETHLASALAAAGLPVAVVNPRQVRDYARACGRLAKTDRIDALVLAAFARAIRPQVRAPKDDETLELGALLARRRQLIDMRVQEKLRLERASPVQRDSIKEHIAWLTERIARLDTDLTHRLRASSLWRDKEDLLKAIPGVGTITRVTLIALLPELGKLNRREIAALVGLAPFNRDSGQHRGERVIWGGRAQVRRVLYMASIAAIRSNPVIRVFYQHLRAQGKPGKVALVACMRKLLTIMNAMLKHNTPWNPSTLDLEHSC

SEQ ID NO: 447893 - protein, 310 aa, unidentified
MERMYVGIDVAKARLDVHVRPSGEAFAVARDGEGLAALVERLRAVAPALIVMEATGGYEQVVAGALGAAGLPIVVVNPRQIRDFARAIGRLAKTDRIDAEVIALFAERVQPELRALPDEQARLLGELVGRRRQVIEMLVAEGNRARLLESKRLKSRIECHRRALQAELSELEAELDDTIRGTAIWRATGDLLKTVPGVGDALARTLIAELPELGTLDRRKIAALVGIAPFNRDSATLRGKRTIWGGRASIRATLYMAALAATRANPLIARFYRRLLAAGKAKKLALIACMRKLLTILNAILRDHKPWQPT

SEQ ID NO: 447894 - protein, 430 aa, unidentified
MKSNTQNAKIEAITEKTLVLGIDVGSEMHYARAFDYRGIEYSKKPFKFSNTEAGFLTFKEWIRDIKERHEKDKVVSGMEPTGHYWFNLGKFLQDNEMKPVLVNPHHVKKSKELDDNNPTKNDRKDPKVIAGLVREGRYMIPYLPDSVYADLRTASNIRFQLQAELTRIQNRISRWFNIYFPEYKTVYGKPDAKSGMLILKAAPLPEDILTLGIDGVNQIWRDAKLRAVGKARAKTLIEAAEHSVGSKEGAVSARMEIRMLLEDYESRNIRLQEVMTLIEGLVKQIPMAEKLLEIKGVGIKTVSGFLAEVGDISRFNTPKELQKLAGLALVESSSGKHKGETTISRRGRKRLRYLLFEVAMSLVAKNPEFRELHNYYTTRRLNPLKKMQSLMAIAAKLIRVFYAMLTKGVDYDPKKMVSDIKRPVVYLQAV

SEQ ID NO: 447895 - protein, 385 aa, unidentified
MQKLNDLSQSRIVLRRDNTLIAVIEMSLSSWLVAGIVPGVERQPLKKLAVDESVLLKLLHRWRGEAEKAGRRIERIAVAFEAGRDGFWLARWLRARGIEAHVIHASSVAVSREHRRAKTDRLDTELLKRVFLGWLRGERDHCKMVTIPTIQDEDAKRPNRERESLVGEQTRIVNRMKAALSRLGIRGFNPKLKKATARLQDLRTPEDEPIPPNTLAELRRDMERRRLISDQIRQIEDARLERMERMTNDGPHAMVRLLARVIGVGIETADMLVQEVLSRTMRDRRAVARYAGLTGAPDESGAKRREKGLARSGNARVRRGMIQLAWRFLMFQKDSALAQWFQARTENARGTRKTMIVALARKLLIALWRLVTTGEVPAGVVLRAA

SEQ ID NO: 447896 - protein, 407 aa, unidentified
MRNYIGVDWADEEDAVWVVNDAGDKMLSRRVAHTVAARSEWARWLRERQAEGVELWAAIERPHGRIVDFLLDHGVVVYPINPKSLDRARDRFRVSGAKSDPFDAQVLALFLRSDHLQLHPLRPNSEAAQELKGLTRDYRRQVHLQTRLLNQLTATLKEYYPRALELCEDLTAGWAQAFLARYPTPAAAATLTEADWRAFARAHRLGSPRIAALWETLQQPQLPLPAHVVRLKARLLQALLRELAATLSGVAEYRQAIADFFSTMPMAEIARSLPVGKSGTTVPAIWAELGDNLDRWDSFRHVQGYAGSVPETERSGKHLVVKFRFACNTSLRDVLHQLAFLSLSHSVWARAYYDSYRARNHTHHEALRALGAKWLKIIFVMWKHHVPYSETHHLATMARQHLRQTAA

SEQ ID NO: 447897 - protein, 351 aa, unidentified
MLIIGCDFHPGFQQVAMFDNQTGEIEAKRLKHREEAEQFYRSLTAGARVGMEACGHYPWFERLLEECGHELWLGDAGAIRASVVRQQKTDRRDAEHLLELLRQERFPRIWVPSLEERDVRQLLVHRHKQVQARTRIKNQLQALALSQGVQKRRKLWTAVGRAELEKLELLPYAAQRRQQLVQSLEGLEAEIAGLNRQVEEEVGRRRAASRLMTHPGVGPVTALAMVLTLGPAERFGSGRKVGSYLGLIPSEHSSGGRQQLGRISKQGNSFLRFLLVEAGQSAARYDAELGRFYRRLAMRKHRALAKVAVARKLATRLYLMLREDWTYAQLCQAVMQARPSHSVVAKQKPAL

SEQ ID NO: 447898 - protein, 338 aa, unidentified
MVLIGIDPHKASHTAVVIDRDEQELARVTVRASRGQVGELLAFAAPFTERRWAIESAGGLGFLLAQQLVRAGEDVIDVPATLAAKARLLGSGRGSKNDPNDALSTAVAALRDPRLRTVVVEDPAMVLRLLADRHQDLTSLRTQAVCRLHALLAALTPGGVQKRLSATAAAAFLARVHPDSVAGATRRAMAADLVADVRRLDKAIADVKARTAVAVAASGTTVTDLYGVGPIVAALLIGHTGDVRRFPNPETYASYNGTAPIEASSGPKVRHRLNPRGNRQLNHALHMIAVTQIRRDNPGRDYYPKKITEGKTTREARRALKQKISDAVYRQLKADATG

SEQ ID NO: 447899 - protein, 424 aa, unidentified
MFSRVNIACGLDVHYSKIVGSIVTSDGTHETRTFTTYIDDTLKLRDWILTHKCERVAMEATGIYWYPIYDLLEKHVTVQVANPLFIKGIPGRKTDQIDADWIGMLCLNGLIKPSIVPTREVRNIRDLVRTLTSFTHERTRHKNRIHKIMVRAGIRIGAHLSNQYGPSGLKILYGLLDGKSIDTILLDLKSAKIAKKRDELVRSICGTLDENDVFLIRLELDSIEFINQQIEKLKQRLTNLMTPMNEDINILTTIPGIGQYSAMKILAEIGNIDMFPSGKHLVSWAGIAPGMNESAGKKSPGHITKRGSKYLRTFLIEPAHAIAVMKTDNQLTQYFIRMSGKIGYKPAIIALARKLLMIIYHLLTNHEPYFEEKFSKKKPIKLPVASPQSMTADQIFNVMSDAFANMSEVDRAKFVRKLNRIRTH

SEQ ID NO: 447900 - protein, 421 aa, unidentified
MGKLIERCAGIDIGKRFLVCCVMTGAAHEEPRSETRRFDTTVPGLKRLRNWLNEERVTDVVMESTGSYWIPVFNLLEGHVTVVLANPEEVKNRKGHKTDRKDAGHLADLLRHNHVKSSYIPAEPVRQLRDLTRRRVQLTQDATRERNRVQKLLEQVNVKIGSVLTDVFGVSGLHMLWALLDGRATPEEIAGLARGSAKRKTPQLIEALEGNRMSDHVRFVIRGCLRHLACLEEEVEELDAEILRRMQLSTFQKAFTLLQTIPGVGQLSAATILAETGPDLDSFPTIEQMASWAGLCPGNRESGGIQKGPQTTHGNPYLCTALVQCAWAATRKRDSVFRSRFQRLAPRRGEKRAIIAVAHHMLIILYYMLKRGVPFLGAEHAPKQRRRERRAHHHLRCLRRLGFSVEIRLSSESTPPDTISR

SEQ ID NO: 447901 - protein, 307 aa, unidentified
MWAGIDVSKQTIEACFQNNGKTNTWDRTEKDIKRLGKAMVKHGTEGVVVEATGGYERLVATCLRSVGLQVSLVNPRQVRDFARATGALAKTDAIDAKIIRLYGEKLEPRTTKALTKNEQRCVDLVTYRSQLTEGRAAEKTRMQQTAPADVKRSRKALIRAFDVQIAKIDQKLDKLLADDADLKARVDRLSSVPGIGRIVALSLVALLPELGKIDNKQISKLAGLAPLNNDSGARRGRRSTWGGRGRVRQLLFMSILSGIRYNPAIKSHYESLLARGKPKKLAMTAEMRRLLVMLNAMERDEKSWNPA

SEQ ID NO: 447902 - protein, 284 aa, unidentified
MSIVGAFDVHRRQLTFEYLDTATGELRRGRVVPADREHLRQWLARFAGHGEVEFALEGCTGWRYVVEELCRAGIRPHLAEPADTAALRGKKRHAKTDKTDCRHLRVHLMAGDLPESWVPPEHVLEARAVVRLYKDLLDERGAWHQRIAATLFHQGVPAIGTMAKPEGRAAVAEVELSPAGRQAAEAGLRQIDRLTGELDPLRRQLDMLSRRQPGCAALRATQFGIGAVTSVAIWAELGDVRRFASSDNVVRHTGLDITVYSSDTKRSAGHLSPARTRAAALGAV

SEQ ID NO: 447903 - protein, 338 aa, unidentified
MKLYAGIDLHSNNNYLAIIDEHSQKVFGKKLKNSMPLILTILEPYKKELAGIVVESTYNWYWLVDGLQEHGYKLHLANPSAIKQYEGLKHTDDKWDSLWLAHLLKLGILAEGYIYPKKTRPLRDMLRRRMLFVNHRTADILSFQSMVTRTTSNQISGNDIKKLKESDAEQIFTDPDLIFTAKRYINIIASLTVQIKIIEKHVKDRLKLSENFKCLLTIPGIGNILGMVIMLEAGDIARFKKVGNYSSYCRCVKSERFSNGKKKGSGNSKNGNRYLSWAYVEAATFATRFCDPARKFYQRKSAKSNETIAKKALSAKLARASYYMMRDQVPFNSDMLFA

SEQ ID NO: 447904 - protein, 325 aa, unidentified
MSSYEVVGIDVAARTLKAIGEQVVLASHYQNSRPGRETLVAALRRSQRPVRVVLEATGIYFLDIACELVTAGLEVMVLNPKASHHFAEAMMQRRKDDPVDAAMLREYGRRMDFVPWTPPAPKLLAVRALSREIAALGKAVAAAKNRGHAVAASEHGSAVVRRALKRQIAMNEKLITELVAEAVKQIKADAKLKRLFELTDGIPGFAAKSVVSVMGELVVLPPMKAKQWVAQAGLDVREETSGSSVQRKPRISKRGNKRLRVALHYPAMTAARCCREAQTFHDRLVARGKTPLQATVALMRKLLHAIHAMWRNNQEFDAKKLFASA

SEQ ID NO: 447905 - protein, 331 aa, unidentified
MDNQIDLKYYIWRYSHALCGIDVAKNKHDVTALNVSGKTVLKPLTFSNNKAGFELLDLSLRQLNQDYLIALEDTGHYAFNLLNFLHEQGYKVYTYNPLLIKKFAKSLLLRKTKTDKKDAHGIALKLLSDPNREQFQHDNRQVELKILARHIHRLKKKQSDWKVQYTRCLDIIFPELDKIVGKHSEYTYQLLTCYPNPQKRLEAGFDKLIEIKRLTASKIQDILSVAPRSIGTTSPAREFEIIENIKHYKRLIDKAEKCVNDLMAELNSVITTVTGIGNRLGAVILAEIRNIHAFDNPAQLQAFAGLDSSIYQSGQIDLAGRMVKRGSPHLR

SEQ ID NO: 447906 - protein, 398 aa, unidentified
MTESSDYESVQVFIGVDVGKDTHHAVAINRSGKRLFDKALPNDENKLRSLISDLKQHGQILLVVDQPATIGALPVAVARSEGVLVGYLPGLAMRRIADLHAGEAKTDARDAAIIAEAARTLPHALRTLKLADEQIAELSMLCGFDDDLAAQTTQACNRIRGLLTQIHPALERVLGPRLDHPAVLDLLQRYPSPEKLASLGEKKLAAQLCKLAPRLGKRLAADIAQALAEQTVVVPGTNAAAVVLPRLALQLITLRKQRDEVALAVEQRVLAHPLYPVLTSMPGVGVRTAARLLTEVACRAFASVAHLAAYAGLAPVTRRSGSSIRGEHPSRRGNKALKRALFLSAFAALRDPLSRAYYTRKMSQGKRHNQALIALARRRCDVLFAMMRDGTFYTPQAS

SEQ ID NO: 447907 - protein, 425 aa, unidentified
MTEKTAVGFAALVGIDWADRKHDICLQVAGEDEREFSVLEHRPEAIDEWANGLRVRFDNRPIAVCLEQRKGALITALRKYEHLVLFPVNPKLLAGLRRAFHPSGAKDDPRDAEIAVEILLHHRDKLTAWRPDDPRTRQLQALVEARRRLVGQRVRVTNRLSANLKGYFPQALECCESLDSTMACDFLTRWPSLGEARRAREERLRAFFHRHNVRGRELVEERVALLKSALSLTSDAGVILPSLVATATLVAELRVLIDGIEQYDDAIATLFKRHPDAFIFASLPGAGPTFAPRLLAALGSDRDRFDSPEALQEYLGIAPVTERSGKSTWVHWRWACPKFLRQSIVEWAGLSIRYSCWANAFYRQQREKGKNHHAAIRALSFKWLRILYRCWKDRRPYDEAKYLFALQQRKSPLLQYIAEPLATVA

SEQ ID NO: 447908 - protein, 370 aa, unidentified
MAQSSTLFIGMDVHKETIAVAYVAQEHGAEVTYLGTIGTRQCDIDHLVRKMQSKAKHLIFVYEAGPCGYWLYRYLTKKDYDCWVVAPSLIPKKAGDRVKTNRRDAMQLARLARSGDLTAVYVPKVEDEAIRDLTRAREDTLSDCKDAKFRLKAFLLRHDIRYTGQANWGPAHLRWLSEVVCPTPAQQIVFQEYVRAVTEHTERLQRLDQELHEHVQAWRLHPVVEALQALRGVQFTVAVTMVAEIGDLTRFDTPRELMRFWGLIPSEYSSGERRQQGAITKAGNTHARRALVEGAWAYRYPAKVSRHLQLRLEKQPQIIQDISWKAQVRLCKRYRHLVARGKHANIVTVAIARELAGFMWAIAKQLPAAA

SEQ ID NO: 447909 - protein, 344 aa, unidentified
MLYIGMDVHQMSTTFCIFDPKAAKAGQYRTLTRPTTAATFAEVLGVFRRRCKVAFEVGTQSQWIAGIVRPLACEVQVANPSRLPWLFRDGRKNDRLDARKLVTLLYLDQLPTVHLPPADISAWRALINHRRTLVKRQTMIKNQIHSLRRAFGYRCPFRSCWTRAGMGWLCWLTFDEARRLMLTTLLDELTFVGGKLARVEQHLDAIAAGQANVALLQTIPGVGPRTAESIVAFGDQVDRFGNCKQFASYFGMTPTEDSSGLVQRYGHISKRGPSVVRWVLTEAAHRVIAGCPALRTFFDRIHRGKKDRYKKAIIATGRKVLTISYGMMRDQTPFDAAKVSRSAA

SEQ ID NO: 447910 - protein, 343 aa, unidentified
MLAITTVGLDIAKSVFQVHGIGARGSVVVRRQLKRRYVLAFFKKLPHCLVGIEACATSHHWSRELQALGHTVRLIPPAYVKPYVKRQKNDAADAEAICEAVQRPSMRFVPTKTSEQQSCLTLHRTRHLFIRQQTAVINTIRAHLAEFGIVAPVGRNGVEDLLYAVADQRDERIPEVARACLEALGALLGKLKAQILEFDRQINAWHRSNETCRRLDELPGVGPALATALVASVADPKAFRSGRDFSAWIGLVPKQNSSGGREKLGSITKQGDRYLRSLFCAGALAVIRYAKIHGTKHRPWLARLLERRPTKVAAIALANKIARMAWAMMAKGERYREPLALAR

SEQ ID NO: 447911 - protein, 330 aa, unidentified
MNYIGMDVHKRFTYAVVKNEQGMELAKEKFDNAKANFESFLQPYKPEETKIVMESTGVWEYIYEILDEKHFEVKLANPVKTKAIAWAKVKTDAVDASTLADLLRANLVAESYIPSKEVRMLRELTRMRKIFTKQRTQSENRLHALLTKKGIFIPNRTLCSKSIKFLSEIENEPLIKEYLEIIAFQRDREANIKNKVEEASSSNRDAEILMSFPGIGALRAMEIIAEIGEISRFPNAEKLCNYAGLVPSIKQSGTSLHFGGLVKQSSKTLKHTLVQTAWCLIRIRENYALQEFYKKLAKKKGKQKAICATARKICCIIYAMLKKGKKFQQS

SEQ ID NO: 447912 - protein, 340 aa, unidentified
MRFIGVDLHKNTFTTAYRTPGEEEPVIKTYKMNSLGLKDFIESLQSTDMVALETLCNTYYFVDEIKAYVKEVQIVNTRKFKIIKQSGKKTDKNDAKLIALYLEKGLLPTVRYQDKESRDLKSLITTRDKLVSIRSGIKNKIHALFMSNGINSQKKDIYNQKNIEAILTNYDISESNRFEITVLLQQIDILNENIKTLTKRVEQCGSKLENNENLISITGIGKLSSAILINGIGNIKDFQSEKALFSYFGIVPFVSDSGESVRHGHITKWGNRLLRKTLVQITFTAIRYNQFLSNYYKRKKTEKGAGKAIIATSRKVLKIIYDTLKNNWIFEDFNNFVLAS

SEQ ID NO: 447913 - protein, 416 aa, unidentified
MNEVKCWFVGVDWASESHRVRIADCCGKRLGERDFAHGGAGLAEMAAWLTSVAGAEPSAIYVAIEIPHGPIVETLLERGFNVYAINPKQLDRFRDRFSPAGAKDDSRDAEVLCDALRTDMRAFRRLALAEPLVIELREWSRMTDDLNGERNRLCNRLREQLWRYFPAMLELEQDLGAEWFLDLWELVPTPDKAMRIRETSIARILKSRRIRRVSAPEVLTVLRKPPVTVAPGTIEAASAHIRVLSERLRVVNRQLKDAHRQLDRLCGLLAEPTESEPGQANEQRDAAILASLPGNGRIVLATLLAEGWEALQRRDYHALRTLCGAAPVTKRSGKSCIVTRRLACNPRLQNALYHWARVAVQHDPRSRAKYAALRLRGHGHARALRSVGDRLLNVACAMLRNGTQFNPSLESQKSAC

SEQ ID NO: 447914 - protein, 374 aa, unidentified
MTMMQHRQIRYIGLDVHKLSIAVAIAEESGAPTSYGSIVNDPSAIRKLATRLGGPAVALRVAYEAGPTGYALHRQLTALGIDCIVVAPSLIPKRSGDKVKTDRRDALKLARLLRSGDLTAVWVPDEAHEALRNLVRARADAKADQLRAKHRLSKFVLRQGCWPPIGVRNWSQRYFVWLRQLEFEHLPDRVVFADYLAEVTAAGERIKRLEAALHQSAQSSSQVALIRALQAFRGIGFLSAVTLVAETGDLRRFRTAPQLMAYAGVVPAESSSGGKQQRGSITKTGNSLLRHVLGEAAHHARHAPRVSATLKARQANLPAEVIELAWRAQLRLHARYRHLSLRIGARKALTAIARELAGFIWAAGYVLEGLPAAT

SEQ ID NO: 447915 - protein, 361 aa, unidentified
MADITHTTTKPHLLAIDIARRFNAVFIELASGEQRRFKMTNSAQDFDRLVHFINATAGVWRAALEPTGDYHRPIAHRLIQAGVEVVIVSSVAQSRYREAKFNSWDKNDPKDASIILDMLKHGMVMRYVDPMVTGHHDLQELSKTYYQVTRARTKVLHAIVNHHLPLYFPEMQRYWQTTRIEWWLRFMLEFPTPAHVRRLSKEAFIKQAWELVGRKVEKTAKLTEIWQMAEHSAALPHAPDCLAVETFRVSLRQAQHLNELRRSLEQCAQEVLTSNKDYEQLISLPGIGPIIALTVLAEVGDIRRFAHHRQFLKYCGFDLAKLQSGSQRGREQLSKRGNARLRLAFWMAGQVAGRFKNRPEV

SEQ ID NO: 447916 - protein, 427 aa, unidentified
MYRIAGIDVHKKKLAVVVVDVEVHGEYQFERCWFAANPEQLRRLSQWLAEHQVEEVVMESTALYWKPVWGALERYWQPICQKREGAGPTSGILHLAQAQSNRGPRGRKKDFRDAERLVKRLVADELKLSFVPDTEQRLWRTLTRRRYQLTRARVQLQNQLEALLEEAHLKLSSLVSDLLGVSAGRMLQAIADGENNPEALAGLADRRLRATPAQLSDALGACTELHPVYRRLIKMMLEEWKVIEEHTEELNQELATLLRPHQDAVERLAEVPGLGVDSAQQILAEVGATAAVFASDKNLCSWVGVCPGDEESAGESSSHRCPQGNRQMRRLLNQAANAAVKTKGSIFEIVYRRLVPRLGHNQTIGAVAHRLCRLIWLILRKDVRYEERGPAVSQRSRQNRTSKMIRELRTLGYRVEFLNAVPSNPMP

SEQ ID NO: 447917 - protein, 384 aa, unidentified
MLYVGLDVHQKRSSMCILNDDGKVVKQELIKGPWPGVIDRLKRIDEPFRVCYEASCGYGHLHDRIAPLPRASQVSVAHPGQLRLIFKSKKKYDRIDANKIAKLLYLDEVPAVHVPNIDVRGWRKLIEFRQTLLRRRVALKNQVRAILRGEGLTAPRGLWGKKGMTWLGQVELPAGSKLALDLAAEDIAQVNEKMKRVEKELAKIAQKHAGVQLLMTIRGVGIRTAEAFCAYVDDVRRFARTHQVGSYFGLVPCQDSSAGKDRFGHITRDGPPTVRKLLCEATWMGIRHNPQLREFFERVMNDDPDRKKIALVATAHYLCRIMAAMLRSGEVWRDPRKQEPQQEQEQEQKQEQKQEQKQEQQDGLRPAVEGAPPRKTPRQKAVVF

SEQ ID NO: 447918 - protein, 320 aa, unidentified
MSEPYYVGIDVSIDRLDVAIRPGGRGFCVTNDAAGWAELVARLPRGAIAAIGLEPSGGYERGIVRVLLAAGFSVRRINPNKLRQFARAAGALAKNDRIDARLIADYVAVMPTRVVERNPALERLAETVTMRRQLCDEHIAVESQASHLEDALLKRIAKRRLTRIEADIAMLDKRLAELVAAQPDLARRFRLLCSMPGVGATLAYTLLALMPELGQIGRKQIAALVGLAPYAFDSGRFRGQRHIYGGRTAVRNTLYMPALAAFRFNPALRTFHHRLVAAGKKPKVAIVAVMRKMLTTLNAMLRDGNSWTDRHTGRHTVPAI

SEQ ID NO: 447919 - protein, 399 aa, unidentified
MLHDHPCVGPTAIRTQFGAIFVSLELSRSKWVLTSLSPGNGEKMSQYSLTAGDIGGLLGRFADLKRKAKERTGSDYPIITIHEAGLDGFWVHRVLQNEGIESHVVDAASIATSRRRRRAKTDKIDGEALLRALLAFKRGEPRVCAMVVAPSPEAEDRRRICRERQTLIEERIIHVNRIKGLLFAQGISDYAPLRRDRRKRLEGLSTGDGRPLPVHLKAQISRELDRLELLIDQTRSVEAEQEALLAAESKAGIEKVGPEKAGPEEEPRNAVAMLLAVKGIGEHSAAILWSEGLCRQFSNRRQVAAYAGLAATPWRSGAVIHEQGLSKAGNPRLRTLMVQLAWLWLRHQPQSALACWFRARGERGRKGSIVALARKLLVALWKYVAHGVVIEGAAMKPAA

SEQ ID NO: 447920 - protein, 355 aa, unidentified
MREYIAFDSHKRYTLAEREDVRTGRVHQERIEHRPGAIRQYLQDAAAGTLVAVEALGSWYWIVEEIEASGCRARLVHPRKAKLMMGMINKTDKLDVHGLNRLQRNGTLPAVWIPPGALRDQRELTRTRMALSGERTRLKNRITSSLAKHGLAVTGASDAFGVCGRRELEGLLPRLPEQTAWATRSLLTLLDAVMEQIAAHEKRLASLLEPTEAMVLQQTLPGFGPILSAVVLLEMGEVSRFPDAGHFASYAGTTPRVHSSGGRTRYGRLRSDVNRYLKWAFVEASNVMVRHHRRNPQRHVSRLYDRLQPRKGHAKAVGAVARHLAEATYWVHRRRQAYRDPALHGVKEGLSANMA

SEQ ID NO: 447921 - protein, 370 aa, unidentified
MEQYTEAFVGIDTAKNKHALAIADPGRDGEIRYLGEIDSAPAAVQRMIRKLAGRYEKLYFCYEAGPTGYGLYRQVRALGHDCIVVAPSLVPKRPGERVKTNRRDAVTLARLLRAGDLTPVWVPDAVHEAVRDLVRARTAASEDLRRKRQQLLSFLLRHGRIYSGRKHWTKMHLHWLAQQKFDHPAQQIVFQDAVDAIEDAATRLRRLDQQVAEIVPSWSMAPVVEAYQAMRGVSFGVAATFVAEIGDLRRFDNPRQLMAFLGLVPSERSTGERVRRAGLTLAGNKRARRVLIEGAWSYRYPARVSQALQTRLKGLPKTVRAIAWKAQIRLCARYRRLTAAGKKRPLVIAAIAREMAAFLWAIAQHVAPAA

SEQ ID NO: 447922 - protein, 355 aa, unidentified
MKRTAKYVGLDVHQATTVAAVREESGRVIARTVVATDATALTELVRGMRGTIAVAFEEGTQAQWLHDLLVPLVRRVVVCNRRDERRQGTKSDWHDAEALADLLRRDALRPVYHATAPDGAELKELARTYVNLVEDSTRVMARVKALYRARAIRTRGQAVYSARQRATWLAQLPGGAVRARAEALYAELAVLQTLRTKAKAALVTAARRNPAWSVLRAIPFLGPIRVALMLAVLQTPWRFRTKRNLWAYAGLAVTTRATAQYELAGRTPVRRRRAPLTRGLNRNHHRLVKAIFKSAATAATARPGALHDFYEQLVARGMREDLARVTLTRKLAALTLRLWKTGEAYDPAKLTRQVC

SEQ ID NO: 447923 - protein, 374 aa, unidentified
MTHDSIFIGMDVHKNSIDIAIANIGRNGQVLHYGKIDGSLAALDKVIRNLGRNNKGHQLHFVYEAGPCGYQIYRHLTSQGHACSVVAPSRVPKHSGNRIKNDRRDALMLARLHRAGELSAVYVPHTEDEAMRDLTRAREDAKIDEKKCKQRLLAFLLRSGHRYTGSSLWSKAHIGWLSDIKMPHRSQQIVFQEYIEALNQCKTRVQRLTDQIRQLLPDWRLAPLVYALQSLRGVSLIVASTTVAELGDLKRFDSPVELMSYLGLVPSEHSSGQKTRRGSITKAGNAHVRRMLVEAAWTYRFRARITRALLKRQEGLPQHIRDIAWKAQLRLCARYRYLWARGKARQVVVTAIARELCAFMWAIANEVEVPATSM

SEQ ID NO: 447924 - protein, 379 aa, unidentified
MRRVCGLDVHKDSIYMCILYENGSKIESVFGVLTPELDKLRDLLVSHHVCEVALESTSIYWIPIWNILSVDFSLKLVNPYFIKQLPGRKSDVKDAEWIAIVLQKGLIRGSYVPDRMIQCLRQYERRNHELSKNIVHAEQRMDMILQRCNIRISNYVSCISCKGYQKVVNAIISGESNPKVLVTLIHKRTLNKHGRQVVEDSLNGFVSDTDRDILRQYRDERMQMEQHKSENKAKMQAICEAHYCEELELLQTLPGIKEESAANIIAEIGVDMKMFLTASAIVGWAGLKPRNDQSAGKIKSRKITHGNKYLRKILVEAAWSAARTKDSRFMKMYQRLLARGKSKQKALIAVARKLLVLIWNMLSKKEAFNPEYKRRIQAA

SEQ ID NO: 447925 - protein, 412 aa, unidentified
MEVVYPCCCGLDVHKKSITACVLWAEAKGKSRKEKKRFGTFTHDLLQLADWLEQCGVTHAAMESTGVYWKPVWNILAEQFEVLLVNAQHIKAVPGRKTDQKDSEWIADLLQHGLLRGSFVPPQPIRELRDLTRYRVSLVQEINRIANRIQKVLEDANIKLASVATDALGASGRAILGAMLAGEQDAARLAEMSKGLLRNKIPELKLALEGRMTEHHRFLLRQLFEHLRFTESKRSEIEQEIDKRMRPFEDKVTRLCTIPGVDRVTAWGMLAEIGMNMNQFPSSGHLSSWACLCPGSFESAGKRLSGKMRKGNVSLRRCLSQAAWAISMMKNNYLSALYRRIAARRGAKRAVMAVAHALLEIAYHMLKRKEDYRELGADHFDRIDANRTRRSLVRRLERLGHKVTLEPLAQTA

SEQ ID NO: 447926 - protein, 315 aa, unidentified
MKESQLFIGIDVSKERLDVAVRPTGEIWQVAYDADGINSLTGYLKELTPHLVVVEATGGMELVLAGELAAAHLAVAVVNPRHVRDFARAAGKLAKTDALDAQVLAHFAEAMDPEPRPLPDASTQELGALVARRRQLVGMITAEKNRVRTATRRIRPKVQEHIHWLEENLEDLDQDLGDFMRSSPMWRDKDELLRSTPGVGPVLSMTLLSGLPELGALNRGEIAALVGVAPFNRDSGTMRGKRKVWGGRGQVRAALYMAALVATRYNSVIRDFYQRLCAAGKPKKVALTACMRKLLTILNMMVKHHRHWNPIVQNS

SEQ ID NO: 447927 - protein, 339 aa, unidentified
MTTKLQGGFWVGVDVGKRTVDACVASVHARPGQWAKLPVGHFATDEQGIAALGQWLRSALEHGPCVGVCIESTGAYSHRFVRAIEHLGLPEVSMVNPALPVAFRKSLGLRDKCDRVDAAVLALYGIVHRPAPNTNKDKTYEQLRTLKRLHDDYDTDVQRWENRLEQCLDDTMRAPIMETIAYLKRCRKDIWRTIQQRIKEQDALGRDVALLCSIPGVGEKTAVLVLAEFGNLRSWSRTQLVSYAGLYPKVYSSGTSVHLKPRLARGGGARIRKGLYMPACGQLRTNTRVACWARELIARGKTKMEAIGAIMRKQLQLMRGVLVSGVPYQDKHPKAFLTH

SEQ ID NO: 447928 - protein, 434 aa, unidentified
MRILYERCCGLDIHKCSIAVCVVITRDGKTEEETRRFGTMTADLLELAAWLKARGIEHVAMESTGVYWKPVWNILEAEGFDLLLANAREVKIVPGRKTDQKDSQWIADLHQHGLLRKSFVPPRQIRDLRDLTRSRATLAQEHSSMCNRIQKVLEDANIKLSSVASDVFGASGRAMLLALMKGENDAEALAELSKGRLRNKIPELRRALEGRVTGHHRFLIDRHWRQMESLENQMRQFEEEIAERMKPTAEEIARRGESLPADAPLPLSPREEAILLWMELPGVGLTTACSMVAELGVNMEQFPTSAHVASWAALCPGNNESAGKRMSGKTRKGNVWLRRAMCEAAWAAAHSKNTYFAAQFGRIAARRGKKRALLAVAHSLLVVAYEMLKHKGHYRELGADFFDGLNKEQVKRRLVQRLAKLGFQVTVTKTPTAE

SEQ ID NO: 447929 - protein, 316 aa, unidentified
MYLGIDVSKLTIDCCLIADGQNHQKKFQNNKGGFEQLIKWLQSHKVTDKLHCVCEATGTYYEALAEYLYSRYTITVENPRKIKGYAIAELQRSKTDTQDAKLIAQYCQDRKHKLKAWQPPAKEQKQLQEIARYLDHLKQQRATEKAKQHEAPDYIKSHIQTTISNLTAQIKTVKKQLLQFYKDNPSYNNLRKRLKTITGIGEQATAVLLSTYKRHEFKNAKQFTAYLGLDPRKYQSGTSVNGKSRISKIGSSEIRKSLYMPAVVAYRCNAFPEFVGRLKNKGKHIKLILIAIMRKLAVIAFTLLKNGQDFQVERYK

SEQ ID NO: 447930 - protein, 346 aa, unidentified
MPAIVEAPAVTAGVDTHLDTHVAAALDRIGGLLGVESFEAGRAGEDKLIAWLCSFGTVARVGVEGTGSYGAGLARRLSRAGIEVVEVDRPNRQARRRQGKTDPLDAIEAARAAQAGRALGVAKSRDGQVEAIRALLVTKRSCRSVRTKTLNQIRHLGFCGPDELRERLAGRSPDEVAAEAASLRPRPGTDPVLHANKVALRVLGRRVLALAEEKAEIDALLGELVTAAGPHLLALNGVGVDTAALLLVAAGDNPERLRSEAAWAHLCGVAPIQASSGKVTRYRLNRSGDRQANHALWRIALCRMGNDPRTRAYVERKVSEGRSKPEIMRILKRYIAREVYRILRTS

SEQ ID NO: 447931 - protein, 356 aa, unidentified
MLYLGIDQHARQITISLRDDHGDVRLARQVSTQPEKITAFFQQLTRERLRDGERFVAVLEVCGFNDWLIRLLLDYRCHKVILIQPEDRKKCKTDRRDAAALSELLWVNRERLLQGQPVRGLRQVEIASTADREDRRLTTLRKEAGGARTRLINKVKQILRRHNLQWQMPTKTFPTVAAVAWLKGLALPEIDRLEMDHLLADLEQAEKRLKDLERVIARRCAASAGGKVLSSMPGVGGGFTALSLACRVGQVERFPRARSLANYWGLTPGCRNSGESDQRLGRITKAGSPTARWLLAQLVHKVLRRDARLRDWFRRVKRRRGPTVARVAVMRKLATIIWHVLSKRKTYAECRAPAAA

SEQ ID NO: 447932 - protein, 384 aa, unidentified
MAKVVIGVDPHKASNTLVVIDARERVLSQQRFANDRAGYRSMKAFAGGHRDRVWAVEGARGVGAGLAQRLVAEGVPVLDVPAKLSARVRALGGGSGRKTDDADALAVAVAGLRAHDLPVVRPDDTTEILRLLTGRRQEVVEARIATVNRLHEALCQLIPGGAKRHLSATKARTLLSSVRPRDVVGKARKQLALDYLGELARLDARLKELKKNITEVLAEHPTTLLEVNGIGPSNAAKILAEVGDVRRFASRHHFASYTGTAPIDVSSGENNRHRLNRGGNRRLNHAIHIAAVVQSRMPGAGRQYYQRKRDAGKTRNEALRCLKRRISDTVYRALIDDLAARSPGGQLGATLQSSAADLIPIASTSEQPLPGLTSDPTPIPEVAS

SEQ ID NO: 447933 - protein, 343 aa, unidentified
MQIRSVGIDLGKTTFHLVALGDNGKVLLKKKFTQKQLIAFTANMQTCLIGMEACSGSHFLGRALREQGHDVKLIPAQFVKPFVKSNKNDFIDAEAIAEAVERENMRFVPIKTDDQLDLQALHRVRDRLMTRRTALINQIRAFLLERGIVFAKSPIRLREALPEVLENVNENLTPRMRNLVAMLWSEWKDLELQIVQMNDEVERIASSDAACRRLRQIPGIGPLVATAIVASIGNGAAFRKGREFAAWMGLLPKQHSTGGKARLYGISKRGNSYLRKILIHGARAVVLRSKRDRIAMGAWMTSLETRAPRNVLIVATAHKLARIAWAVLSTGQDYRAVPEALKV

SEQ ID NO: 447934 - protein, 376 aa, unidentified
MEHDSTLYVGCDVHKDSITVAYALDAGDVELLGKTGTTQADIDRLCKRLQSKARRIRFVYEAGPCGYGLYRQLVNKGFDCMVCAPSLIPNKPGERVKTDRRDVIKLARSLRASDLSAVYVPSVNDEAFRDLARTWVSAKDDLKRARQRLKAFLLSHGVRYTGRADWGAAHRRWLAAYAFDSAWQQPAFEEHRRTIEDRLAQCARLEAALREAVPNWRFYPAVLGLQSMRGVQFTTAVGMLAGLGDLSRFTHPRQLMAWLGVTPSEHSSGEKRRQGSITKNGNSYARKLLVEAAWSYRHPARVSPDIQRRHEGIPKPIVDRAWDAQLRLCRRYRKLVARGKQKNIAVVAIARELAGFIWDVSRLAMSLAVSRETSSA

SEQ ID NO: 447935 - protein, 348 aa, unidentified
MIVIGVDSHKRTHTAVAVDGTGRKLAERTVAAKSTGHLELVRWAGRFADRTWALEDCRHLSRRLSTDLLVAGEAVVRVPPKLMAGARRSGREPGKSDPIDARAVARAALREDLPVATLDGPDRDIRLLVDHREDLVAERTRAQNRLRWHLHELDPGSEPPIRSLNRAVVLAGLERDLANAPGIVGRIARELVERIRELTATINGLEREIERLVADLAPSLLALVGCGPLTAAKLVGETAGIGRFRSRAAFARHNGSAPLPVWSGNTERHRLSRTGNRQLNVALHRIAITQLQREGPGKMYLEHRRALGNTKTEAIRALRRRISDEVFRRMRHDEAVRAASPSGLATAA

SEQ ID NO: 447936 - protein, 339 aa, unidentified
MRCYTGIDLHSNNNTVVVINEQDQVIYRKQLSNVLTVVLQALEPFRAELAGVVVKSTYNWYWLVDGLEGAGYRVHLANTAAIQQYSGLKYSDDNSDAAWLAHLLRLELLPEGHIYPKETRAVRDLLRKRGQLVRQRTCNILSVENLTSRNQGIRIKGNVVKQLSTEEVETQYENQDLALAVTSTLSIVEALNQQIGKIEKRVKETVRLAPSFERLKTVSGIGDTLALTIMLEAGPISRFPSVGDFSSYCRCVSSEKLSNGKRKGSGNVKNGNAYLSWAFIEAAHFAIRHNPAIRRFYQRKKAKTLSVVALKAVAHKLARACYYVMRDQVPFEVEKCFGQ

SEQ ID NO: 447937 - protein, 403 aa, unidentified
MNAVGIDVSKGKSMVAALRPFGEIVAKPFEVPHTSSGFHQLVDQLNSLDGSTRIIMEHTGRYYEPMARWLSDSGFFVSTVNPKLIKDYGNNTLRKVKTDKADSVKIARYALDNWQDLRQYTSMDIIRNQLKTMNHQFSFYMKQKTSYKNNLISLLDQTYPGINDFFDSPARSDGSQKWVDFVSSFWHVDCVRSLGLATFTERYQKWCKRHGYNFQPEKPAQIYSFSKELISVFTKDPVTKFLVKQAVEQLNTVSFTVEQLRLEMNRLAAQLPEYQVVMAMKGVGPSLGPQLMAEIGDLSRFSHREALTAFAGVDPGVNQSGTYEARSVRTSKRGSPQLRKTLFQIMDVLIKSAPSDDAVYRFLDKKRSEGKPYYVYMTAGANKFLRIYYGRVKEYLAALPKPE

SEQ ID NO: 447938 - protein, 418 aa, unidentified
MADTYAWQVGIDWGSVEHAVCLLDASGQVCGERRVAHTAAAVHEAIAWIRARTGAPPDAIAVAIETPRGVLVDTMIDQGFPVFAINPKQLDRFRDRFTASGAKDDRRDGHVLADGLRTDARAFRRVQPDDPAIIQLRERCRIVEDLQEQEQRLANRLRDQLFRIDAAWLALSPAADDPWLWTLLRETPDPAAWPRLARRRVAAALRAHRIRRLTVDDVMAGLRQPRLTGAPGVADAVALRVASLVPQLLLVHEQRTAAERCIAQALDALAAAPAPEAESREHRDVEILRSLPGVGRMVAATMLTEATAAVAGRDYAMLRTHGGTAPVTKRSGKRLYAVHMRYACKPRLRHALYHWARCSLPLDPATRAYYDALRARGHHHARALRSVADRWLRILVAMLNAGQLYDPSRPRCAMAAAA

SEQ ID NO: 447939 - protein, 342 aa, unidentified
MQSVTTIGLDIAKSVFQVHGVDAAGKVVIRRQLKRRYVLAFFEKLAPCLVGIEACASSHHWSRALQALGHTVRLMPPAYVKPYVKRQKNDAADAEAICEAVTRANMRFVATKTPEQQSCLMLHRTRHLFIRQQTAVINAIRAHLAEFGVVAPVGRRGVEELLDVVATSSEERVPEVARACVSALGVQLRMLRAQILEFDRQVMTWHRSNETSKRLDEIPGVGPALATALVASVADPKAFRSGRNFSAWIGLVPKQHSSGGKDRLGSISKQGDRYLRSLFTAGALAVIRYAKIHGTKRPWLTALLARRPTKVAAIALANKIARMAWAMMVKGERYKEPAALAA

SEQ ID NO: 447940 - protein, 361 aa, unidentified
MEVGKESVEHRVVIGGVDTHKDLHVASVVNEHDQVLGTQCFATTRQGYRQMLTWMRSFGQVQRIGIESTGTYGAGLLRFMQKAGVEILEVTAPDKQDRRRRGKSDDLDAQNAAHAAFAGKRTVTPKSRDGMIESLRVLKACRKTAVTARRIALQMIQNTIVCAPDSLRETLRKMTRMQLIRTLAAWRPDLTDYRTVETAYRISLKSLGRRYLELHDEIADLDAMIGAIVDELAPNLVARNSIGHASAAQLLLTAGDNPERLRSEASFAALCGVSPVPASSGKTTRHRLNRGGDRAANSALHIIAIGRLRTDQKTQAYMARRITEGHSKLEVIRCLKRYIAREVFTLIGQRYKEINQARIAA

SEQ ID NO: 447941 - protein, 388 aa, unidentified
MQVIGNRRETPNAIRNDLGAIFVSMELSRSTWLITSLSPGGGEKMSKHTVPAGDVGALLARFSELGRKALTRTGRSFPIIVIQEAGLAGFWIHRVLENEGIESHVVDPASIATSRRRGRAKTDRIDGEALLRALLAHKRGEPRVCAMVKAPTPEEEDRRRLCRERKVLANERVLHVNRIKGLLFSQGAAGYEPLRRDRRQRLEALRTGDGRPLPPHLKGQIGGELDRLELLLEQIKSVEAERDALRAAPQTAAPKPAAMLLAIKGIGPESAAILWSEGLCRHFDNRRQVASYAGLAPTPWQSGAIDREQGVSKAGNPRLRTTLIQLAWLWLRHQPQSALAIWFKERVNRNGGRLKKTTIVALARKLLVALWKYVAAGVIIEGATRMSA

SEQ ID NO: 447942 - protein, 415 aa, unidentified
MSLKIVYKICCGIDVHKTFVVACIASTNDKGITSYESHRFSTYTSGLKTLLQWLLNRNCKDVCMESTGKYWIPVYNILENDCSIVLAHPKYVKAIRGKKTDKKDAKWIADLFKHDLVAGSFMPPADIRQLRDLMRYRFKLTCFQSSEKNRLQNCLTVSNIQLGNVVSDTFGKSAQAILDKLLENPADTSFDLEPLVYKSLKKKLPQLRDAIDGYITPEQAGKLKVIKAHYESLESRKAELEELILALAAPYQQELAILQTAPGIRSDFTAIGIISEIGTNMEAFPSAKHLCSWAGLTPTNNESAGKKKSVRVSKAGCYIKPLLVQCANAVVTSKKHPEIRNRYLRLKKRRGHKKAIIAIARMLLTALYHMLKNGENYNAELYRKSYLPPVDREITVEQAIIIARNQGYKIKSATA

SEQ ID NO: 447943 - protein, 351 aa, unidentified
MNTQITASPKLFIGIDIHKRSWKVHCATDLSSGKTFSMPPDAELLYEYVAKHYTGYEVSTAYEAGCCGYRAHRCFVGYGWRSLVVNPADIFRRGKERHTKTDRIDAQLIARELKDGRLSGICVPDECREQLRSLFRRRNDLVKDMRQIKSYIKMQLLYYGIRIPQEFDNDHWSHKFRDWLDELDFGYDTGNEALRSRMRSFRFIDREFREVSTLLRRYTKIHFKKDYMLLRSIPGIGPIVASGILSELGDLRRFGNIKHLAGYVGLAPGIYQSGDTIRHTGVSMRAHRLIRSYFIEASWQAIRTDPVMQGYYRKHHGKNVKSVIVKVARKLLSRTLAVIKTETPYEIGVLE

SEQ ID NO: 447944 - protein, 398 aa, unidentified
MLRAAKTLITNKEETSMRFYPTQHPFYCGIDLHARTMYVCLLDQAGATLLHRNMTATPEALLKTIAPSREQIVLAAECLFPWYWLADLCAEHGIPFVLGHALSMKAIHGGKAKNDTIDAHTIAVLLRGGMLPQASVYPAERRATRDLLRRRMPLARQRGELLAHVQNTTSPYNLPAIGKKIAYKANRDGVAERFADPAVPKSIEIDLARIGYYDDLLRDVERTLVKTAKHHDANTLYLLQTVPGIGKILSLVLLYEIHDIARFPRVQDFASYCRLVKCAKESAGKRSGTSGTTIGNAHLKGAFSEAAVFFLRDNPAGQTLLTRLEKKPSTGTAFTILAHKLARAVYYMLTRQTAFDLDTFLQGYGRGAGELKASLDSHGMNLIRHARHAVKNCVCERL

SEQ ID NO: 447945 - protein, 436 aa, unidentified
MNTPNVPSTPRTTTPTPRVFAAYVGLDWGDEKHAVSLAAAGSDQIERSTLEQSPEALVAWASELRQRFPGGKIAVCLEQARGPLIYGLQCYEHLVLYPINPKSLARLREALYPSHAKDDPLDANLALELVRKHREHFRPWQPDTVPTRQLALLTEGRRGFVDQHTAGTNALQTHLKSIFPQALELIGQDLGSPLATDFLKKWPTLQHVQKVKPAVLRQFYYGHNSRREELIQQRLELVQEAQPLTDDPALLAAHGLAIQCLAAQLAVLHQTITHYDRQITAVFASHPDATIFQSLPGAGPALAPRLLAALGTDRSRYPSALAVHCASGIAPVTEKSGKTQYWVHLRWSCPKFQRQSWHEFAGCSIKLCAWARCCYDQLRLRMGHHEALRKLAYKWQRIVWRMWQERQTYDESRYVKSLQRYGLKTYAELVPATLCE

SEQ ID NO: 447946 - protein, 386 aa, unidentified
MTLFVGIDVSKYKHDLAILDEHGEILSKHFRFANTYQGFQKLKEHLETLELPTYELHIALEDTGHYADNLIAFLQNIGYPTFTYNPLLIKEFVKSLTLRKSKTDKKDALSIARKLLADPTPERYIVEPQLQELKELTRYQNRLIHERSKNKTLYVRTLDIAFPEFAKIVKNVHNQFVYDLLSKYPSPQKIKRTHFQSLLTIKRLTADKIKQIQEAAHLTIGNSSLALQLELTQLIDMIRIQTIQINKVQEQINHLMTEIDSPITSITGIGQRLGAIILAEIKNIHNFKTPSQLQAFAGLEPSIYQSGTMDITGHMVKRSSSYLRYALIQAAKLLANYSPHFRAYLRLKISQGKHYNVAVSHVAKKLIRIVYYLLKTNQSFDESKLR

SEQ ID NO: 447947 - protein, 411 aa, unidentified
METLYPRCAGLDVHKKTVVACVRCADGPGKPRQEVRTFGTMTADLLALSDWLAERGVSHAALESTGVYWKPVYHVLEGRFALVLVNAQHIKQVPGRKTDVKDCQWIAELLQHGLLKASFVPPPPLRELRDLTRQRTQLVGEKAAVANRIQKVLEDANVKLAGVASDVLGASGRDMLEALCAGETDPVKLADLARKRLREKIPQLRLALAGRVTEHHRFLLRMHLDHLAHLEGLIGRLGARVEEVLAPFAQAAERLQTIPGVSQRVADVVLAEIGTDMKPFPTAGHLASWAGLCPGNHESAGKRKTGRTTKGDRWLRTALVQAAWAASRAKGTYLQAQYRQLARRRGRKRALVAVAHTLLGIIYRVLKDGTTYRELGPDHLDRQDPERLTRQLVKRLERLGHKVTLEPRPAA

SEQ ID NO: 447948 - protein, 320 aa, unidentified
MTVMEQTRHVVGIDISKDRLDVACLPPAVHPAAFDNDAKGHAALTAWLKEVNPRLIVLESTGGYQRTLVAALAAAALPVVVVNPRQVRDFARALGILAKTDAIDAMVLARFAERVNPTLRPLPDAESSALIDLLARRRQLVELRTAETNRLAQAPSPRIKASIRAVLATIEEQIAAIDDDLDDRIEHSPVWKEKQDLLTSVPGIGPLTARTLLACLPELGTVSRQGIAALVGVAPINRDSGRRRGRRTTWGGRAVVRSALYMAALVATRHNPALKSHYEKLVAAGKAKKLALIACLRKLLVMLNAMLRTRTPWRNALEPA

SEQ ID NO: 447949 - protein, 317 aa, unidentified
MDCTSHAFVGIDVAKHSLDVCLLPSERTFGVPNDAAGFRRLVRQLPAPESCRVVLEATGGYKRLVVAALVAAGHTVAVVNPRQVRDFARGLGILAKTDRLDARVIARFGQQAQPRSVAIRSEKQAELQELVTRRRQLVELRTAEKNRLETTTTKTVRQSIRRHVDGLDKQIQQLEEAIGKLIQSDQELSTKATLLETVPGVGTVTVTSLLVDLPELGHLNRQQIAALVGVAPFNRDSGKWHGRRAIWGGRSAVRSVLYMAALTARRSNPIIRAFAERLEATGKPFKVVLTACMRKLLVILNTMVQQNIPWNPNLPPT

SEQ ID NO: 447950 - protein, 284 aa, unidentified
MRYIGVDLHTNSFTACYLEQEKPEYIRTFRLQDINNFIENLQPTDEVALEATGNSCFFYDEVLPYVKRVVIIAPLQFEVIRRSVHKTDKHDARAIAFFLSKDMLPEARCKNTQYQQLVSLLKTREQLVKSRISLINKMHSLFNYHGIKIKKEALTTKTGFKRAIQKHNWCHLEKVEIEVISYHLEAIRESLKKLEKEIETFVKQLPGFYNLISIKGIGVISAAVFITTIGDINDFRDPEKLTAYFGVVPYVSQSNQQCTIGRITKRGSKMARTALIQCTWVAHG

SEQ ID NO: 447951 - protein, 385 aa, unidentified
MMLIGIDPHKTTHTATAVEPHTNQEVASIRIDATLREYRRMLAWANQWPQRRWAVENVEGLGRHLTSWLLARGEQVVDVSTTATARVRQLSRGGGRKDDRIDASAAACVAALQGDGRPLQAEGHADALAVLDERRVNLSQSRVRAVNQLHALLRALIAGGAAKDLSAAAASALLRTVRPHGAVEQARKAVAKDLVADIRSLDTQLKLNARTIAELVAAAGSTLTQTVGVGPIMAGRLISRTGRASRFPTSSAFANYAGAAPVEIASADKSRDRLSRHGDRQLNSALHTIAITQIRMSDSSGHRYYTTKLEQGKTPREAARCLKRRLADHLWRTMITDERRAAGPGGQLGTTLQSSVAGPTPMTNSSDKSLPGPANHDSTTAKPAA

SEQ ID NO: 447952 - protein, 360 aa, unidentified
MPTIADTDLPVTGGVDTHAEVHVAGMAGQAGRVLGTTEFPATAAGYAAALAWMRGHGELVKAGVEGTGSYGAGLARYLAAHGIEVAEVIRPNRQARRRRGKSDPADAVAAALAALNGEASGQPKSGDGAVESIRALQVARRGAVKARTQAGNQLRDLIITAPQVLREKLAALPAPKRVKLAARFRPGDLTSPAEAAKAAMATVARRHQALTAEIAQLDTALETLLGHAAPAGFPARTGMGAKSAASLLVTAGDNPGRLRTEASFAALCGASPADASSGKQRRHRLNRGGDRQANSAPWRIVFTRMATDPRTQAYLARRTAEGKTTREIIRCLKRYVAREIYKALTHSGNPANINHLKEIP

SEQ ID NO: 447953 - protein, 352 aa, unidentified
MIIGVDAHKRVHVAVAIDGTGQEIESWRGPNSPEGWDRLREWSLPLGGDRTWGVEGSGNYGRGLAQRLVEAGETVYEVNSRWTALRRRGARRRGKSDRLDAHAVAHFVRQEAPQLPRVLADDPTVILDLLVRERAATLSEVGRVRNQIHALLMQLDPQYKEHLPDLRSKAGLDALVGYEAARIGPLQQTRAASVRRLAQRLRLAVDQVADLGQQIRTRTVEAGFAPLTRICGINLLTAGTLAGILGPGQRFASDAALAAYAGAAPLEASSAGLVRHRLNRGGNRQLNAVLHMMSVTQMRSWPPARAYVARRVSEGKTQREARRALKRYLIRAIWQAWKSCTPVKARADARAA

SEQ ID NO: 447954 - protein, 344 aa, unidentified
MNYYAALDVSLRTVNICVIDEQGEISAETKLASEVEDIVAYLNDLDLNIVSVGLEAGTLTQYLTYGLQAAGYEAVCMEARQVKAALSAMRNKTDKKDARGIAQILRSGWYSRVHVKSIASHQVRALLSSRKAVLNKCIDLEQEVRGLFKVFGIKLPPKLGHGAFDTAVRATIEADPALSHALLPLLDARLVLYQTFRELDNRTRKLAMQDTVCQRLMSAPGVGYVTALTFKAAVDDPTRFKRSRTVAAHFGLTPRRFQSGEMDNPGRISRAGDANVRCALYTAANAMMTRSSKWSSLKVWGMQLAKQRGHRRAVIAVARKLAVILHRMWLDDTQFRWGTEVARS

SEQ ID NO: 447955 - protein, 377 aa, unidentified
MARKRKNSKKKIGAPVLHCLNPNAAGVDVGATEIYIAVPVDRDPQPVRHFSTFTEDLHAVAAWLKACKIETVAMESTGVYWIPLFQVRGFTVFLVNARHVKNVPGRKSDVSDCQWLQYLHTVGLLRGSFRPEQAVCTVRSILRHRDSLVQMASTHVQHMQKALDQMNLQLHHVINDITGVTGLTIIKAILAGERNPHTLAALRDRRVKATEDTIAKSLVGDYRREHLFTLGQSLTAFRHYQQLIGACDHEIERYLEAFESKVDAREGSSPESKNEQEPSYGMPRFDLKTHLHRIFGVDLTRIPGINILTTQTLLAEIGPDPSRFGSAPAFTSWLGLSNSAGICARCGRDSTGGWRSWRHSTTSWKDDFRNREGRPTT

SEQ ID NO: 447956 - protein, 403 aa, unidentified
MQITTIGFDIAKNVFQVHGIDAAERVVVRKQIRRGQLMKFFEALPPCLVGLEACATAHYWARELTKLGHEVRLMPAKDVKAYVKRNKNDAADAEAICEAVRRPSMRFVPVKSAEQQGQLMQHRTRDLLMRQRTQVINALRAHLAELGITAAQGREGIRDLLAIIADDGDARLPIDARASLIVLAAQLQAIQTLIGSMEKRIIARHRSSEASKRLQTIPGIGILGASTIATMVTDPKAFRSGRDFAAWVGLVPRQDSTGGKRKLGPISKQGDRYLRRILVVGAHAVLKRARLHPKNIPGLHSCWHGVRSRSSRSRWPIKWHASLGHCWRKVRPTGCRGSRRPDKASRWEAEGCVRALMNCRGDDDVDAKRSRPSIGKTREVPREERARANGWDLISESHQGQQP

SEQ ID NO: 447957 - protein, 384 aa, unidentified
MSIYIGIDWSQDKHDVAFMNAAGAIIARLTIPHQPDGFRKLETTRQQLAVTAVDCLVGLETAHNLLLDFLWDHGYQHIYVIPPWVVKSSRGRYGHSGARDDTLDAQLLADLLRTDRARLHPWRPDSQLTRQIRARVGFISYLTHSANRTHNRLRAALLRYYPQALELFSGLMVPTALAYIAAYNTPQALAALSYEAFVAFAHQQGYWNRQVLLDCYARLQHTPLQASPATVAVYQDETRLLAQHPDQAIFASLPGVGDFLAPALLAKLGDDRDRFPSAASLQALAGTCPVTVASGKHKRVIFRQACDLEFRQIAQQWARSSLRKSVWAVAYWQQIRPRCASDHVAYRRLANRWLAVLWKLWQSRELYDEAYHLQQRRLPSQPLA

SEQ ID NO: 447958 - protein, 464 aa, unidentified
MNSLFFGIDVSKGYADFCCINQAGSRIGEMAKFDDTPSGHTAVKRLVEGLKTRHPDAQMVFGLENSGGLERNWAVFLKDLVTPFNGKVFTLNPLAVKKFLERDLHRNITDAISAQGIANYLRQGMRPAEVPFEDSLSGPISLYRCLRNAISRCAQMQNELQSLLPRVQPELVQFCRQGLPDWVLEVLQRWPTAPKLATAKMTQLVKVPHVTEKRAENLIAAAKESVASQGDSFTEISVSFLAKTIIQAQDIIGTLKEQTIESVAKDEGVKIMQSIPGIGAWGATCLRLEIGDIERFPTPEALVAFAGLDPRIKQSGDSTRHIGISRRGRRQIRAILYPLILASIRFNPAIKEFYVRLRGKGKRHLVSATACMRKMLHIIYGCWISGKAFDPNHEKTRKSIQPETTQIPAQTKEPLSKEKIYILNIAAPVSRREANKRRKAATMPQTGISRRERGQVTASEKNVT

SEQ ID NO: 447959 - protein, 357 aa, unidentified
MGKVTGNLARVTRIGLDLAKTVFQVHGVDAKGEVVIARKLRRGTMLEFFGRLAPCMVAMEACGSAHHWGRQLVALGHAVNLIPPAHVKPYVRRNKTDAAVAAAICEAAMRPGQRFVALRSIDNQAAVMRHRVREQLVGQRTALLNALRGHLSEIGLVAAHGAQHAYRLKRMLADGADENGEIVIPERVRVVLAPLAAQIDSLDQAIAAIDDELIETVKADEKARRLMTIPGVGPVIATAVVATVGEVASFASGREFAAFLGLTPRQHSSGGKKRLGRITKMGDRYLRKLLVVGATTVLHHAIGHNDSLRCWARQTLERKGGRAGFKLTAVALANKLARIVFAILRSGEVYDDRPVVA

SEQ ID NO: 447960 - protein, 360 aa, unidentified
MRAAVAGGRPMRPGSLKTVGERGAPPVNPSNPNSRRGRKARSPIRQGRVAMENITVGIDVSKDRLDVAVRPSGEVFAVERNAAGLEQLTIRLRGLAPQVIALEATGGFETIAAAALAAASLPVVVVNPAQIRAFAKAIGQRAKTDPIDAATIAHFAEATKPEPRPLPDEATRLLGDLVARRRQIIEMIGAERQREQRVTIPHLRRSITRLLKALEKELASLNTDIDDAVRGSPAWREKEDLLTSVPGVGRVISSIMIAELPELGQLGRREIAALAGLAPFTRRSGKWRGKSFIGGGRTVVRTALFMGAFVAKRHNPVLKAFFDRLVAAGKPKMVALIAVARKLLTILNAIIRDNRPWQTA

SEQ ID NO: 447961 - protein, 348 aa, unidentified
MEISIVGLDLAKRIFQVHAVNAAGHVALRQKLQRSEVEAFFARLPPCLVGLEACSTAHHWARTIRRYGHDVRLVPPAYVKPYVRRGKTDAADAAAICEAVSRPHMRFVPVKSEEQQAALLHHRTRDLLVRQRTMLISALRGHFAEFGIVVPSGQHRVAQLVALLQDDEALDIPSLAREGLRSLAGALQQTEDRIEAIEKVLMREHKANTVSRKLATVPGIGPITASAIAATIPDPTLFRSGRDLAAWIGLVPKPHSSGGKEKLGAISKQGDRYLRRLLTVGATAVMRHLKGKTDRLSAWARALLERRPFRLVSLALANKMARIAWAIMTRGEAYRPALPAVPTAPATA

SEQ ID NO: 447962 - protein, 323 aa, unidentified
MIEAVKKSVAGLDVHKKTVMCTILTEKKGGILKKATREFSTFRDDLSHMAKLLYSSEVELAVMESTGIYWKCVYEEMEEKGRPCYVVNARHIKNVPGRKTDVSDSEWLAELARCGLLKPSFVPPKDFREIRMLTRYRKKVIGMLGSEKNRLHKILESAGIKLGAVVSDIDGVSAREMIAAIIKESHTPEQIAQMARGRLRSKEDDLIKSLKGRLSDRHLFLLKKIQDHMKWLENHINGIDGQVEKAMIPYKEEWQLLQTIPGVDKISAAMLLSEIGVNMDCFGNKDRLSSWAGMCPGNNQSASKKKVVAQGTATNLSNRCCVK

SEQ ID NO: 447963 - protein, 392 aa, unidentified
MIYVGIDVAKDKHDCFAMNSDGEILIENFSFLNNSDGFNLFFNSISQFNESFENIKVGLEATGHYSNNILNFLTSKGFNVFVINPLQTNLFRKGQSLRKTKTDKLDARFIATMLITDNLKPYSNLSYHISELKSLVRHRFRLVEERSKFKVSFSRLVTIIFPELEKIVWSISQNSMLYLLYELPSVKDISECNLKHLTYLLEKYSKGKYRRDKAIQIRELSRKSIGTISRSLSFELRQVIQTILFLQSQIDDIDKELKNLIGELNSPIMSIPGISYVTAAYILAEIGDINNFDSPAKLQAFAGLDPSTYQSGKFTSSNSKMVKRGSKYLRWALLTATRLVCMRDKTFNNYKNKKIAEGKHYFVALSHTSKKLIRVIYYLLKTNQSYQLSKVA

SEQ ID NO: 447964 - protein, 344 aa, unidentified
MQITTIGLDLAKSVFQVHGVDATGQVVVRKSLRRAQMLPFFAKLPPCLVGIEACGTSHHWARELIKLGHEVRLMPPAYVKPYVKRGKTDAADAEAVCEAVTRPTMRFVPVKSPEQQAALSMHRTRDLLVKQRTQLINMIRGLLAEFGVDIPKGLERALLMARQIVDGKAPDVPLEAAKIVSTLSQQALDTHVRLREIDRDLAVWLRGNDVARRLTTIPGIGPVGATALAASVTDPHQFRSGRQFAAWLGLTPLQKSSGGKERLGRITKMGDKYLRKLLIVGMTSLVRRAKQNPGKIDPRLADLLARKPARVATVAMANKTARVIWAIMARGETYRTGHQPALAA

SEQ ID NO: 447965 - protein, 350 aa, unidentified
MTTIAEVRPPVTGGVDTHLDVHVAAVVTAVGGVLGTAEFSATAAGYRQLVAWMRGFGELDRIGVEGTGTYGASLARHLRTEQVTVVEVMRPNRQVRRRHGKTDVVDAIAAARAVLSGEANAIPKTHDGPVEALRTLKVLQRSATKARTQALNQLPALLVTAADELRARLRDLSQRELLATCVAFRIGADDDSLAAVTRFALRKLAQRALFLAERLEQLKLRLKRITEQVAPALTALKGVGPDVASTLLLTAGDNPERLVSERSFASLCGVSPVQASSGKTRRHRLNRGGDRHANAALWRITLVRLNCDPRTKDYLAKRITDGKSKTEAIRCLKRYIAREVFSALPIPDRA

SEQ ID NO: 447966 - protein, 406 aa, unidentified
MQFCGIDWANDHHDALSIDEQGHQLGSIRVAHSPEGLSQLDTYLERMAGPGGREQIACIVETTQGLLIAHLLEQGWPVYPVNPRTVERRRAPSGAKTDTIDAYLLAKTGRADFQDLRRLNPDSEQIQELKTLTRDQDALIQMQTRLVNQLTACLKAYYPVVLDLFGKLHQPSTLKFLRAYPTLQAARAATAEELADLLKQARYPGAKLAAQRMAAQLQQPCLQANEVTTRTKARLLLALVDQLEPLLKQIADYDKEIERLFLRHADSELFQALPGAGARLAPRLLAEMGEDRSRYESACSLQALAGTSPVLFQSGTYQKAHRRLGCIKPWRNALQQFAWESTRQEAWAKEYYQRKRTEGKSHTVAVRALANVWARILYAIWKKKEPYQTTTFEQARLAHAPGPHAA

SEQ ID NO: 447967 - protein, 457 aa, unidentified
MPQPKRSRSRTGLSAVHPAAAAIDIGATMHVAAVGPDRDTEPVRTFGTFTEDLHRLADWFARCGVKTVAMESTGVYWIPVFEILEQRGFEVMVVNARDAKHVPGRKTDVSDAEWLQRLHEYGLLRPSFRPQAEIAGLRAYLRQRERLLDYAAAHIQHMQKALMQMNLQLHHVVSDITGVTGMNIIRAIVAGERDPNVLASHRERGCHASVETICQALVGNYREEHVFALSQAIELYDVYQTKVAACDKQIEVILKRLKKSATPPASKLLPPKHRSRQPNAPSFDARAALHAILGVDLTQIHGLGPYLALKLVGECGINLTAWPTAKNFTSWLGLAPRNKISGGKVLSSKTPRTSNRAASLLRLAAVSVGRTDTALGAFYRRLAARAGKAKAITATARKIAVLFYNTLRHGMSYADPGATYYEERYRRRVLGNLQRRAKSLGYVLQQADRDPTQVVVS

SEQ ID NO: 447968 - protein, 361 aa, unidentified
MELHVGLDVALESTSVCIVDGTGGKVLETTALSEPEAICIAIRPHVADIVRIGIEASAIGMWLARELKAEGLPVTVVETRHMRSALSAMRNKTDRNDAHGIAQMMRMGWFRSVHVKPVETQRLKTFLANRRLLKRKLIDLQNHIRGALRVHGLKVGTVAAGRFDGRVRELIEDHGDYLFRTMIESMLEVRAVLFESFGKLHRMLLLIVKHDEVCRRLMTVPGVGPVAALSFRVSIDDPHRFSRSRTVGAHLGLTPRRYQSGTSVDWGGRILRMGDVDARAALCEAAASLLLRVQRYSALKAWGMRIAKRSGMMCAIVAVARKLAVILHRMWIDETEFSWKSGATITEKRRRDPATGQLLPC

SEQ ID NO: 447969 - protein, 364 aa, unidentified
MSSMTLDRGDVIVGVDTHKDGHVAVTIDGIGGRLDELFIPVTSNGYQQLLAWAGDQGNVVAFGVEGTGSYGIGLTRFLRRHGIKVIEVSRPPRKGERRAAGKSDTVDAEHAARQVLSGEATAVPKTSDGDIEVLRLVKIARDTAVKAHTAAMITLKATLVTACDQLRSELEPLTDSKLITACAAFNEPGNLADPDAAMRHVLGSLARRWLELHEEIKIHTRHLKQHTKAAAPQLVEAFGIGFDSAAELLIAAGDNTDRIRTDAAFAKLCGVCPIPASSGKTSGRHRLNRGGNRHANAALHRIVIVRMRWHQPTTAYVERRLAEGLSKKDIIRCLKRYVARQVYNLMPPATQTAPTQPHQTPQTT

SEQ ID NO: 447970 - protein, 313 aa, unidentified
MSPANVYVGIDVAKDWLDVAQRPGGEAWRVSSDETGVAALVERLKDVRPMLVVLEATGGLQIPAVAALAAAGLRTVVVNPRQVRQFAGATGRLAKTDAIDAQVLAQFGEAVRPEVRPLPDADSQELSALVNRRRQLIEMLTAEKNRLRLAAKKVRPNIEAHIRWLEGELLDLEGGLGDAIRSSPVWRERDNLLRSVPGVGPVLSSVLLAELPELGRLNRKEIAALAGVAPLNRDSGQFRGRRTVWGGRSHVRTALYMATLVASRYNPTIKSFYQRLLSVGKPKKVALTACMRKLLTILNAMMRHQAPWEISAS

SEQ ID NO: 447971 - protein, 321 aa, unidentified
MTQPLLFVGIDVSKAQLDVAQRPGGRFTVPNTEAGVTQLLARLAAEPPTLIVLEATGGVELPLTGALATAGLPVVVVNPRQIRDFAKATGQLAKTDALDAQVLAHFADVVRPEPRRLPDAQTQELAALVTRRRQLIEMLTAEKNRLASARTVVRKQLRAHITWLERALDQADTDLAEAIRQSPLWREKEELLRSVPGIGPVLTTTLLANLPELGTLTHKQIAALVGVAPLNRDSGTLRGKRAVWGGRAQVRAALYMAAIVAARFNPVIRGFYQRLCAAGKAKKVALVACMRKLLTIVNAMLKHRTPWREGMDPAGTGVYGV

SEQ ID NO: 447972 - protein, 452 aa, unidentified
MSCHSMACLSWSPSSLPGRVIGTRDQPRRGPNNEEPTIGPAPAARSDLEVNNVFCGWDWGSTRHGVCVIDDQGTVIKQWLVQHTHEELASLFVELAELADPADLPVAIERSEGLVVGLITAAGHPVLMTEPAGFCAARPRWGSAGTKSDTGDAFMLADYARTDGHRLRRIAPVEDATRELGVLVRARTCLVEARTAASNQLWAVLAEHWPGAAMLFQKLTSKITLAFLTDYPTPQAAARLGEGRMGQFCRRHAYRGGKPPAELIRRLRAAPAAASPITASILAAIVAGSVAQIRVLNAEIARLEHTIEETLSEHPKAALLENLPRAATVSLAQLIAEVGPLLDRCQSPDQVAAICGAAPITRASGKTRTVGFRYAANKPARVAITGFADNSRHSSVWAAQRYSQARARGARHPHAVRILARAWLRVIWVCWHTGNAYDPSRHRAEQLAAQPT

SEQ ID NO: 447973 - protein, 446 aa, unidentified
MADMDDSDGIEEIEQAEEFVARVAAIDIAKASGMVCVRVPHEDKPGKRVQRVFNTVATSGAILDLADHLICQGVTRVVMEATSTYWKPFFFLLESRGLECWLVNARDVKNVPGRPKTDRLDAVWLAKLTERGMLRPSFVPPKPVRELRDLTRARAVMTHERTRHKQRTEKLLEDAQIKLSSVISDIFGVSGRAMLEALIAGERSPKALADLAHGTIKASHATLAESLTGRFEEHHGFMCRMLLDTVDYLTVQIDKLTARITVRLAELSTTEDDEGPGQGTLMPVTDTERLDEIPGVGPGTAQVILAEIGLDMSVFPTAGHLVSWAKLSPRTLQSGNKNTSGPTGKGNPWLRGALGEAAISAARTNTFLGARYRRIVKRRGHMKALVAVARSILVSVWHLMNDPTARYRDLGADFHTRNLDPHRKSRDLVRQLKALGHDVTLTPATA

SEQ ID NO: 447974 - protein, 368 aa, unidentified
MSTSIIKLNTGIDVDAKTFKVKCRVLQMNQHQVVKGSRAFKNNAKGFTEFWVWIQKRKVDGVALHFTMEATGVYYENLAYFLESKGAIVHVVLPNQSQAFINSLNIKTRTDEIDADALSIMGLERQLTEWKPASSQMRLLKKLGRERLRLMKLKTMISNQLHAELHAYDYCKESIKRMQQLIAVIKKKMEAVEKQLKEETAKDPDLQTKIEEICKVKGLRFITVITVVAEMNGFVLFNNRNQVVSFVGYDVVEKQSGSSVQSKRKISKKGNSYIRRALYFPAMTAVKHNEQYRKLYDRIFDRTKIKMKGYVAVQRKLLLLIYTLFTTGATYNQKHYLELQKLHRVQAEVPVGLTNSLLDAVDKMLQKV

SEQ ID NO: 447975 - protein, 376 aa, unidentified
MAQTDVQYPTIHLAIELSRSAWLVAARLPGVEKPSLHRIEGGDTAALLALAAALRARAAARLGTPVRVACCFEAGRDGFWLHRLLTAEGVAAYVLEPTSILVNRRARRAKTDRLDALGMLRVLAAYLGGDRQACSMVRVPTPEEEDAKRPHREREELVRERVRLENRIAGLLATQGVRERPSLRSWERDLAALRTGDGRPLPPHLRAELDRLRRRLVLTLGLIRELEAERDAALAAGPRDAAGRKIAALCRLRGVGANFAAVLTREVFYRAFDNRRQLAGYVGLAPVPHQSGEADRDRRISRAGNARARTTLIQLAWLWLRYQPDSAPARWFRDRVGALRGRTRRIAIVAMARKLLIALWRYAETGLVPEGVEVAA

SEQ ID NO: 447976 - protein, 331 aa, unidentified
MTTTTPLASQTLCSSCVFAGIDVAKHKLDLARSDSGELITVCNDAEGIACILELLGQAKPKCIVVESTGGLERPLLEALLEANLPVALVNPGRVRYFAIGCGILAKTDPIDAAVLVKFAQLAEPRLSQKRSANQSELDALITCRRQLSLMRSQQTDCRLATRSKNAIKSIDAVLATLDKQIQQLDKKIRQLIDSDDDFKHLDQQLQSVPGVGPILSATLIAELRELGDANRRSIGALVGVAPFNHDSGAFKGKRSIRGGRTQVRCVLYMAALAAMRFNPVLRRFAQRLSRCGKSPKVVIVACMRKLLTLLNAMIRNNLMWHDLNVVKMLDT

SEQ ID NO: 447977 - protein, 343 aa, unidentified
MECYVGLDVSLKKTAICVVDGTGLILSEGSVDSDPEAIAEFIKAKAANVVRIGLESGPTSTWLWTDLDARGLPVICIDARHAKAALKMQINKSDRNDAFGIARIMQCGWFKQVHIKSADSHAIKALLSSRALLVKIKRDLENQIRGLLKNVGLFLGKGKGNVYSSRAWELVADRPELSLAVRPLLEARKEVERQVADMDRKVLALARQDAQTRLFMTVPGVGPMTALSFKAIIDDPTRFSRSRSVGAYVGLTTRRFASGEIDWTGRISKCGDRMLRSYLFEAAGVLLTRVPQWCALKAWGLRLAKRSGLTKAKVAVARKLAVILHCMWIEGTAFRWSQQDVVA

SEQ ID NO: 447978 - protein, 413 aa, unidentified
MHPKMQYTYVGIDSHKHSHTAVFLDCFFEKLGEITFENLPSKFGAFLAKAEKLKADGTTLLFGLEDVSMYGRLLAIFFRDNGQKMKHINALLVAKERKNRNVTQKTDSIDAECAARVLLSKLSELPDAQPDDKYWILQSLVTRREFIVKNNTSLKNHLHSLITQHYPNYRQWFPDISTQTSLAFLMRYPSPSTLAGVTHESLAEFIREASNNRVGAGLHSNARAQMILDTLQDTTVPFQEIRDRSVQSTLRQICANTQEIKQLEHDIADFMENFACTLTSMTGIETTTAAQLLTLIGDIRQFSTPAKLARYAGIAPVTYASGQSGKQYADNRGNRALNSIIYLLAVRLIGSSANKIINPFMYSYYHKKLSEGKTKRQGLKCVQRRLINIIWRMLTYNEPYTNPPIADKVITEI

SEQ ID NO: 447979 - protein, 369 aa, unidentified
MRDNITYVGLDVHKSSIDVALADGEKMGEVRYYGAIGGDLGSLEKVIRKQVSRGRELRFVYEAGPCGYEIYRYLSQQGFDCIVVAPSLIPKKTGSRIKNDRRDSEMLARLHRAGELTAVYVPRLEDEAMRDLCRSREDAKSAERKAKQQLGAFLLRSGFRYSGKTNWSLAHWRWLSDIKMPHPVQQIVLQEYINAVRVCTERVEGLAEQIRILVPVWRLAPVVEAIQALRGVSLIVATTVIAEIGDIGRFDNPRQLMAYLGLVPSEHSSGETIKRGSLTKTGNGHARRVLVEAAWAYRLPARVSRRLLERNQGVPEEIRTIAWKAQLRLCSRYRRLVAKGKQTQIAIIAIARELAAFIWAIVRNVPVTA

SEQ ID NO: 447980 - protein, 340 aa, unidentified
MKKVSTIGLDLAKNVFQAHGADASGAVIFRKKLRRAQVLEFFATQPACTVAMEACGGSHFWGREIGNYGHRVRLIPPAYVKPFVKRQKNDAADAEAICEAAQRPTMRFVAVKSEAAQGAAVVFRTRDMLVRQRTQIINALRGHLAEFGLIVAQGPAHVAKLIMAMQDPKQPLPEAARPILCVLVDMLGLLDQRIKLLDIAIARRAKEDEVARRLMSIPGVGPVIATAVAALAPPAETFKRGRDFAAWLGLTPLQHSTGGKQRLGATSKMGERTLRRLLIIGASSVVRWAARKGAPAGSWLASMIARKPAMLVRVALANKMARVIWALMAKGGTYRAPVVA

SEQ ID NO: 447981 - protein, 521 aa, unidentified
MTTTKNSTRNKGKKGTTRRYIGKPSGVIQQRVQEVGPQRFGIVSVDCAKRRSKWMFCDFFGRVIIEPTIVEHHAGALKAMTQQVAAACEAEGIGDSIAAVEMTGIYHKPVQAAFRKAGFDTRTVHPFASSHYRGALHPNDKTDDNDLEAIFHAAINGYGLATLPVSEIYLSLQRLIRHRRNLVKQRARLQVQIRALLHQSMPGFADLFEDDKLFNKSIAMTIAQEFSSADSIKKIKADGMATFLRNSKVRFQERTLDKIYAWSLQAADADPLHRLLTEHWKQLLQLRSLMTEQILDTERKTANSLAKTPYILLLSVKGINIVSAGELAGEAGPPEHYASATAINGRAGLYPSRYQSDEVDRSGSVAKSCNRRLRAACILVAKNLIKCHPYYRGLSAVWEKRGIVTVDRQCRMANRANRMIFQIVSGRQVWRGKSIDQEYILLKLREFHRTHKTTLEQTVVDLNEAFTWLPKSTHAAEAKPLAELARKKNRRTASIGDLLIPLLIRLGVRTENPVESRSSEA

SEQ ID NO: 447982 - protein, 379 aa, unidentified
MGDYSEAFVALDTSKLRNAVAIAETGRSGEVRFLGEIENTAAATGKLVRKLAGKYDRLAFCYEAGPTGYGLYRQITELGHECLVAAPALIPKKAGDRVKTNRRDALGMVKQFRAGELTAVWVPDPRHEAMRDLTRARGAAVEDLRAKRQQVLSFLLRLGLHYPGAKTWTRAHMNWLAAQKLAHPEQRIAFEEMLLAVRQAQERIARLEAAIGDAVPDWSLAAAVEGLMAMRGIDLVTATALLAEIGDLSRFRTPRELMAYLGLVPSEHSTGDKVRRGPITKAGNRRARRLVVESAWSYRHPPRVGKKKQDRVAAAPQPVREIAWKAQHRLYRRYRALIRKGKHKSVVVTAIARELCGFIWAVHSEITTTDPVARQHGIR

SEQ ID NO: 447983 - protein, 342 aa, unidentified
MTIQTIGLDLAKHIFHVHGVDATGQVAVSRALKRIDVSGFFANLPPCLVGMEACGGTHHWARTLMALGHTVRLISPQFVRPYVKSNKSDKNDAEAICEAVSRPSMRFVPVKTDQQLDILAVHRLRSRLVANKIALVNQIRGLLAERGIIMAREVASLHRRVPEILETVDNGLSDRFRALLADLYRQLPELETQIHQYDRQIRCIYTQHEACQRLGAIEGIGPLTATALYAAAGDARVFKNGRQFAAWLGLVPKQHSSGGKPRLLGISKRGDAYLRTLLIHGGRAALAHAGHKSNSRSQWVCALRARRLHNIAAVALANKNARIAWALLARGDTYRPAATFAT

SEQ ID NO: 447984 - protein, 341 aa, unidentified
MRKTLFCGVDLHSNNAMYVITDQRDQQLLRQRLPNELPVVLKTLAPFRPRLKVVAVESTYNWYWLVDALLEKKYPVVLAHPSEMEQYNGIKEADDLTDAAFLACLARLEILPTGYIYPKEDRPVRDLLRRRMLVVQHRTGVILSLQNMAERQTGQKVGGRALRKLSAEERAELLGNHDCLTFVTAEQVELIELLSQKIRRFEQKVLEHAQVRPAYACLQTLPGVGPILALTIMLETGDIGWFPTVGDYTSYCRCVRATHTSNGKKKAHHNGKNGNPYLAWAFVEAVHHALRTCPQAQSFYEKKRAKRNGALATKALAAQWSKAAYYMMKRQETFDLTRVFG

SEQ ID NO: 447985 - protein, 319 aa, unidentified
MNSQLGIDIAKRKFDVALLNDGKYKTRVFDNTQAGFGQLMEWLEKHGAINTHACVEATGDYGTELATFLHDHAVTVSVVNPAQIKGFAQSELARTKTDKADAKLIARFCQAHVPAAWQPPPASVRQLQALARRLDALNEMQRMEANRLDTAHALVVPSIQEVMAQLEQQINIIRETIKQHIDSHPDLRSKRELLESIPGIGETTVTQILTFLVGAQFSHAKQVAAFLGLNPQQHDSGTSVRRKVRLSKTGDARLRVAFYMPAIVAMRYNPIIRAFSQRLLAAGKPKMLVVGAAMRKLAHMVYGVLKSGKPFDPALALIK

SEQ ID NO: 447986 - protein, 402 aa, unidentified
MATNQLWAGVDVGKEHHWVCVVDDTGTAVLSRKLVNDEQAIRAMIAEIDTLGKKASWTVDLTMAYAALLLTVLADAGKPVRYLAGRAVWQASAVYRGGEAKTDAKDARIIADQSRMRGPDLPVLHPDDDLIAELRILTAHRTDLVADRTRTINRLRQQLVAVCPALERAAQLSSDRGWVVLLARYQRPKAIRQSGITRVAKILTDAGVRNAPTIAAAAVAAAKSQTVRLPGEEVAAGLIARLAKEVIALDDRIKATDADIEGRFRRHPLAEVITSMPGIGFRLGAEFLAAVGDPTRIGSADQLAAWAGLAPVPRDSGKRTGRLHTPKRYSRRLRRVMYMSALTAIRCDPQSQAYYQSKRDEGKQSIQATICLARRRTNVLYALIRDNRTWQPDSPPINQTAA

SEQ ID NO: 447987 - protein, 338 aa, unidentified
MTIVFLGIDLAKNVFALHGVDATGRACLVRPSVRRDQLLEMVAKLPPCTIGMEACSGAHHWARQFANFGHTIRLMAPKFVVPYRLSGRRGKNDAADAAAICEAVQRPSMRFVPVKSELSQCRLAIHNVRQGWVTARTATINRLRGLMSEFGIVLPLKAQTVRRQAAEHADRLPGWMKTACMDLLDELRRLDERVAEYDEHIRVMAQADDRSKALMQVPGIGPTTASALLASIGHGHDFANGRQLAAWLGLVPGQYSSGGKQRLGSITRAGNPYLRSLLILGARATLAAATKKKDRISRWAVALSERRGYWKAVVAIAAKNARMAWAMLAKGEAFKPVT

SEQ ID NO: 447988 - protein, 336 aa, unidentified
MKVKFAHFAGIDVSKSKIDVCIIVNKESSEILHNCYDQSKQGFNGLKKWFEKVTDKQTDRLLICVENTGLYDDALLYYLDASALSVSLENATNIKRSVRDNRGKNDKLDARNIALYALKHQDELSLWEKPREQVANLQQLLGERSRVVNALKMLKHTQQERQVFSWSPGVRSKIYQSGIKGLQKDLEHIEMDIWKLVKSDKELLQMFILITSIPSVGKITAYHFICYTNEFKQVKSGKQLASYCGVVPFERSSGSSLKKKPRLSHQANKILKTLLHLCAVTAIKMKGSFAAYYRRKIEEGKNGLIAINGIRNKLALTIAAVIRNNEPYNENYIYQP

SEQ ID NO: 447989 - protein, 352 aa, unidentified
MSSQSTTSTRSTITVGLDLGDRFSRYSEMDLETGVIAEGRLRTTPEAVRRQFAGREPLRIVMEVGTHSPWVSRLLENLGHEVLVANARRVRLIYANDSKTDRVDAETLARIGRLDPKLLSPIRHRGETAQADLARLRARDCLVRARTQLVNHVRGAVKALGGRLPSSSTPAFVRRAVPHIPEALQPALQPLLDMIETLSRQIRAADRELEALAQERYPETVRLRQVAGVGVITALCYLLTLEDPTRFKNGRSVGAYLGLRPRQRDSGAQSPQLRITKRGDVMLRRLLVGSAQYILGPFGPDCDLKRWGLRLAERGGKNAKKRAVVAVARKLAALLYALWVRDAKYEPLRQAA

SEQ ID NO: 447990 - protein, 419 aa, unidentified
MSFKILKNNCCGLDVHKTWIFACIGITDSNKRTVYKQARFSSFTKGLQELCHWLAKYDCTDVCMESTGKYWIPVFNILEKNNIWVTLSHPKYTKPQKGNKTDRKDAKWICDLYMCGMVKPSFIPPADIRELRDLVRYRFKLTCMITGEKNRAHNCLTVSNLKLDDVFSDIFGRSSRSITEQILQHPGETFDVAPFVHGRCKTPIEEIQAAVDGAVSKEQAVKLRQCLNHIDELEMHKSEIEREIFRLSDKYEDILTLIRTVPGFDKNPMTAIQVLSEIGGDMSVFPTAKNLVSWAGCCPHNDQSNHKIKSTRISRAGSYFKPVLVQVANALIKSKKHPEFSTRYRRIKARRGHKKAIIAICRMILTAIWHILTDLKPYTTEGFLESRPVNDSKILTTSQALNLLKQRGYVIKDDIVSVP

SEQ ID NO: 447991 - protein, 491 aa, unidentified
MINTSIFSAQSKDLRKLFEQAGHRSKVLCAPLDYAKKQHTVLFCNGHGDILKKPFSVDNSPAGLKFLLDQLQHTLTGRHLQAKHVFFGGEDIPAYAENFITQLRQKGYLVAQVNAWEAKKRRENFQASNDHLDLTAIAKLLLDWRGNVAPAAHGTYRSLRELSRTRRRVVRDKTALSNRIHTYVDRLFPGFLDVAQSGLAPFSKASLALMSERFSAPQIRRRRRPSLSHQLQRHGVEKADEAASLLQQLAAQVLEPASEHVSVWQVSLQQQVLLYNATQAACHALEAEVAHWLALTPGAFLTSIRGIGVTLAAGLSAELGDPNRLRRLACLCSYAGIIPGSKQTGGPQSPAHTTGVKPRCNRILKDWAVQASVKIGQCGPPELKAAYLALEAQEQHAQFIMAKRLLRLCKCLLRTQSIYRPSHLLAADTPRGKLAAYYLELWPALLTKWKGTCDLRHVFAAQHPLGGWRLMVQDLYGLALPLPKETTMTPD

SEQ ID NO: 447992 - protein, 406 aa, unidentified
MNAVGIDVSKGKSTVAIMQPFGVVVQSPFEVAHTDSELIALAKRLKKLPGETKVIMEYTGAYYQPIAYILHEEGLFISAVHAQIIHDYGNDTIRRVKTDKADAVKIANYGISAWLKLRQWAPEEDVRRQLKFYSRQYSKYGKLRIMLVNNFIALTDQTFPGVNELFSSPPRKSAGHQKWLDFAMEFWHCECVCGGTPAAFEKRYQKWCKKAGYRFNKEKAWDVFVSACGHCCVLPNDAATKLLVQQAIRQLNAVSETIAVIAREMKVIAEQLPEWPVVSAFYGVGDVLGPQIMAEIGDVYRFKKKGSLVCFAGLEAPPYSSGKFESKEREISKQGSPHLRKTLFQVMGVVLQNKPADDPFYQFLDRKRAEKKHYYSYMTAGCAKFLRIYYARVKEFLDKQEAEAEG

SEQ ID NO: 447993 - protein, 416 aa, unidentified
MKIVRPICCGMDVHKNIIVATIGITNKKTRITEYIQETFSTLNPDLLNLKQWLINHKCFDACMESTGKYWIPIFNILEDEINIYLTHPKYVKAIKGKKTDKKDSKWICDLFKHDLIKFSFIPPKEIRALREISRYRYKLVGMRSSERNRYQNCMTVSNIGIGSVFSDPFGKSAQAIMKEVLESDIIEDEKILKCIHGSCKNKDKILDSIKHCNIETDQRFKMNESMTHMEELQVHIDNCEIEIMKRAAPMFDQFMHITQLPGISTLSAILIISEIGVDMKQFESDKQLTCWAGLAPANNESANKKKSVRISKAGQYLKPLLVQCALGAIKDKEGYFGIKYSRIKKRRGHKKAIIAIARMMLVSIYHMILTGETFNPSDYESFRNPKPPIKQQDLTEESAIEFLKKSGFDVSKLTKP

SEQ ID NO: 447994 - protein, 426 aa, unidentified
MISASIERCAGIDVGKKFLAVCVMVGPLEGEPRVEIRKFGTIRAELEGLRDWLKQQGVTHAVMESTGSYWKPVFNVLEDAVKVYLANPQEVKNRKGHKTDNKDGWWLAHLLRHAMIRPSFIPPRAIRELRDLTRRRKRLLGAGTSERNRVQKILEDANVKLGNVLTDLFGVSGQLMLEALLRGQAKPEEIAQFAKGRAKKKIPAMIAALKGHQMSDHHRRMIRYSVDHMRFLEEQIAQLDKDIAATIQQAGLELQWQLLQSVPGVQETSAAAILAETGTDMSQFPSEKHISSWAGICPGNNRSAGKNRSSHTTGGNRWLRGTLTECAWAAAAKKNCFIKDKFWRITSKSGGKKAPAIVAIAHTLLSLIYQALKTGQTYQDKRVPVLDQHQRQRMIRHHIRRLGKLGIAVSSARPSSSATASPPTST

SEQ ID NO: 447995 - protein, 366 aa, unidentified
MKKSSTQKKTVASKKRGSESFTIGLDLGDRSCRYCVLDERGEVVLERSCATTRKGLDQAFGSMARCRVALEVGTHSPWVSRHLATLGHEVIIANARRVRLISDSTRKDDKLDAKTLARLARVDPQLLSPIRHRSEEAQGDLIMIRARSTLVETRTALINAVRGLTKSFGERLPSCASYQVCEELSDPLSAPLQAALAPLLSEIESITERIQDYDRKLDEIAKQRYPEVELLKQVQGVGTLIALTFVLTVEDPHRFRSSRQAGCYAGLRPKRRESGQSRPQLGISKEGDPYLRKLLVQGAHYILGRFGQDSDLRRWGLNLAARGGKNAKKRALIAVARKLAVLLHKLWVSEEKYDPLRNANLKADAA

SEQ ID NO: 447996 - protein, 296 aa, unidentified
MWLYYLNSGDNKVKTKRFANNQSGFLELSAWLHRHETSKSHACLEATGYYGEALALYLFEAGYTVSVVNPAQIKGFGQCELVRTKTDKADAQLIARFCRAMHPKTWQPKPLHIRELQALVHRLASLQDMYRQEANRLEAAPASIQSSIKAIKKRLEKEIASVQKKIQTHIDQHPDLQGKKKLLETIPGVGEATIAQVLAFIGNVEDFKHAKQLAAFVGLNPKHRQSGTSVQGRSRLSKMGSAALRTAFYMPAIVAKRYNPVIKAFCERLKAAGKPNMLIVGAAMRKLIHIIYGVLK

SEQ ID NO: 447997 - protein, 468 aa, unidentified
MGTCHAKKGLARGQAKEGLFEVINPSAAGIDVGASEMWVCVPGENEQERVRKFGTDTVELEAISTWLLERGVRTVAMESTGVYWIPLFQVLENHGLEACLVNARHVKNVPGRRKTDHLDCRWLQKLHACGLLSSSFRPSAEICRLRTCMRHRTNLVREQAAQIQRMQKAMREMNVQLDAAVSDVTGVSGVRIMDAIVAGQHDPARLARMADPRVHKSAEQIARCLQGDYRPEHLFVLRQALAAYRFFLEQIRDCDGEVERYTGELEQAAGRADTALPPAAAETRKRKAGNVPQYDVRTHLYRLAGVDLTRIPGIGELTAQGLISETGLDMSRWQTPKHFASWLDLCPSPKVSGGRVIGQGRRHASNRAAQMFRQAASALSNSQSWLGSFYRRMRVRLGAAPAVKATAHKLALIYYHVLSTHTEYRQIEAQQYDERLRERTIRNLQRRARQLGMDLVPAEACSEAPAVT

SEQ ID NO: 447998 - protein, 344 aa, unidentified
MGTIIRVGVDLAKNVFHIHAVDENEKTTWQGKYARNTWLKAIMKRVPFTAIIGMEACGSSHYWARELIKAGYTVKLVAGQFVKPYVKTNKNDKVDAEAICEAINRPNMRFVSVKTSEQQDIQSMHRVREELIAQRTARANQIRGLTAEYGIVAPVGISNLRKHIPYWLEDVENSLSFQFRELLQVLYEDLITLDERIDKVTNKIKLSLSDNPVAQRLMKIIGIGPLVCSALLIDLGDGMSFKRGRDFSASLGLVPRQYSTGGRERLLGISKRGNGYLRKLLVHGARAAFRYVKDKTDALSLWIKKLSITKHPNVAIIALANKLARISWAIVAKDVEYDASRAAA

SEQ ID NO: 447999 - protein, 359 aa, unidentified
MPVTMTYVGLDVHARSIHAAAIDVRSGELRRARFGGGGDEAIAWLEGLPQPLRGCYEAGPTGFGLYRACEAAGVAVEVIAPSKTPRASGDRIKSDRKDAELLARLLLAGQLTAVSVPPPAFEAARHLARAREQVRGDLMRCRHRVSKLLLLHGRVYEGSGWTKAHRGWLEKQRFDQAATELAYLDTLSAVDGLVARKTALDERLSRLALEGEWWPTVARLRCFRGIDTLTAFVLALEIGDFARFQRPAQLASWLGLVPSLDQSGESRRQGAITKTGSGYARRLLVEAAWHYLPQPGPGVALTERRTGQPDHVIQIALRAQRRLHRVHQRLRERRKPGNVTTVAVARELACFLWAAATAD

SEQ ID NO: 448000 - protein, 374 aa, unidentified
MTTTTTNHDKETIVMAIEVSNSNWLLGFSNGEKKSIRNVKAWDIEHFEKEVEKAKTKLKVDGKAVIHCCYEAGRDGFGIHRYLESVGIHNNVIDPSSIDRDRRWKHKKTDRIDVKKMIELQEMRYYMDNKKYRVVRVPSVEAEDERRLHREWDRLKKERTGHINRIKSLLVMHGIKVKSVQSLDIVEIRDWANNPLPPMLREEIVREQERLDLIEKQIKTIRQKREQRIKHPENRSDEIVCRLLMLKSIGPQISWTLVKEFFGWRTFKNRKQVGSLAGLTGCPYNSGTMNHEQGISKAGNCQVRTLAIELAWLWLRWQPNSKLSKWYNERFGDSGDRLRRIGIVALARKLLVALWKYIEFGIVPDGAVFKTVAK

SEQ ID NO: 448001 - protein, 395 aa, unidentified
MFIVGIDVAKRNHEVTVITSEGQVVCKAFRISNTCTGYNRMMERLGKLTNLKGEFIFAMESTAHCWLALYTRLKKEGYQVVVLNPIQTHAMREMFLRKSKTDAKDSLVIAEVIRFGRYAASDIPQEKLLALKELCRNRSYLMDLASDLKRKTVALLDRVFPEYETQFDSVFCKSSLAVLTKYPTPQKLANAHLSKLTEILWTSSNGHFGEWKAQEMKALARNSFGVADCEGAYSTLILLMLEHIHTLQEKCGALEAQIRVLLQQFDTTLTTIPGIGPILAAIILSEIGDISRFSSADKLAAYIGVDPSVNQSGEFVGTHVHMSKRGSPYLRRAVWMASVGAVQRDPMFKAYFEKKAAEGLRYMNIIGHVTKKMTAVIYAIMRDNKTYTPIMPSAA

SEQ ID NO: 448002 - protein, 304 aa, unidentified
MFGIGIDVSKDTLDVAVHKQEFRQFRNDKRGFAALIKWLGSMPIKQVVLEASGGYEQKALDALHQAGLPMVRINPARARSFAKASGRMAKTDRIDAQMLAEMAEAFELTAYAPAAPWQRELAALSRRRRQLVQMRASERQRVRGFDEASLVAMVNRSVKRLDKDIQQLDQAMAALLKAQPGWSDYAALKGAGPVLLATLACELPELGRLGAKAISALVGVAPMNRESGAWKGRRQITGGRVVVREALYMAALSAIRYEPRLKDFFTSLKAKGKPGKVALVAVMRKMLVILNARKRDAEAQMASA

SEQ ID NO: 448003 - protein, 320 aa, unidentified
MLSFCGIDVSKDRLDAMVLPDEQCSSVPNDAAGWAALVEQLRGCSVTAIGIEASGGYERGVIRSLHTAGMPVRQVNPFKLRQFARASGVLAKSDPLDARMIASFVAIMPTRPAQPHVPAIERLTEMLAVRRQLSAEKVAAENGSRLLEDAMLQRLSRRRIARLAADIDLLDKRLVEIVMADAGLAQRYRLLTSMPGVGPVLACTLIALLPELGQMSRKQVAALVGVAPYAFDSGKLKGRRCIWGGRAHVRDVLYMAAMSASNWNPGLKAFHDRLRAAGKLPKVAIVAVMRKMITTLNAMVRDGVVWADRHSDRHNVPTAR

SEQ ID NO: 448004 - protein, 319 aa, unidentified
MSSQAIFVGLDVGKATLDVAVRPTGECWQVPNDEAGGAELTARMRGLKPALLVCEATGGFERSVVAALAAAGVPIVVANPRQVRDFAKSTGQLAKTDRLDAGMLALFAERVRPTPRPLEDAATQLLDALLTRRRQVLEMLVAEKNRLGFAPRPLHRGIRQHIRWLERQLDDVTGEVARMIEASPVWRAKDDLLQSAPGVGPVVSATLLGELPELGTLTHKQVAALVGIAPLARDSGQWRGKRMVYGGRASVRTALFLAALCGRRWNPQLKVFYERLIATGKPKKVALIACARKLLTILNAMVRDNAAWRAPDLTAQHSC

SEQ ID NO: 448005 - protein, 352 aa, unidentified
MMIIGCDFHPRFQQIACVDTETGEGVERRLHHPAEAESFYRSVAGRGVRIGMEATGSFGWFRRLLNELGHELLLGDATAIRASNPRKQKTDKRDARHLLTLLLEERFPAVWQPTEENAGLRQLLLHRSSLVRMRTRVENQLDSLGKNEGMVASRRWTGKRRREVEGLALQGWYCERRRDLLLFLDQLEERIGPLDQAVRAAAEADAQARLLMTHPGVGPVVSLAFVLTIGDWQRFQRGKQVASYLGLIPCEDSSADKRRLGHISKQGNPMLRWLLVQAATTAQRYDGPWHRQYVRLSMQKHHGVAKLAIAHKLAVRLYWMLRSGQDYRQVMERGSHAGQSACPNGCGTTPRT

SEQ ID NO: 448006 - protein, 345 aa, unidentified
MSDITRIGIDTSKAVFTLHCVDAAGRAVLRTNLRRAQMAPFFRKLPPTEIIMEACGSSHHWRRELSALGHDVRLIPPQYVKPFVKRAKNDRNDAEAICEAGGRPGMRFVPVKSADQQAQAMVLKVRETLVGQRTQLANSLRGHAAEFGVVAGKGIKRIVPLLEAIEAETAIPAEAREMLALLGREIEHLDTRLAELDVKLIAMHKASPLSQLLATIPGIGVIIALTFALEIDPAAFKSGRHLAAWIGLTPKEHSTGGKQRMGGISRAGNERLRRLLVTGATAVIRFATRPGNKPANEWLLKLLERKPRKLVAVALANKMARTVWAMMRSGEVYRRQSSVGGAASA

SEQ ID NO: 448007 - protein, 341 aa, unidentified
MQKNFYFIGLDIAKETFVASIYHKPNEPVLTKEEIPNNPKGYDHLLLWLGENRINKDNCQICMEATGVYSQGISYYLLVQGYQVSVESPLKVKRAFHPAGHKTDPVDSRQIAEYAYRFCDQLIPWQPKGELLEKIRQLLSVREQFTKQKVAIKNAMRAYSQQKVQVRLINKAHKETLAQLEKQIARIDKELDKMIKQDPDISRKFDHLKSIPGFGMLLSAHLLVMTESFSKISEYKRLAAFIGIVPYQYQSGTSIRRKDSIRHYGPMASRKLLRLAAQSVATHDKTFRQYYLRKLAQGKAKALVLNNIANKLLKVSCAMIRNNTGYIKEHRSVHPMYVKSA

SEQ ID NO: 448008 - protein, 436 aa, unidentified
MTLIKYGYELDTAFNDWSFPIRLHRLKPTVLSLYINHRKVGFIMILVGIDVASKKHDIVITNHLGEIFNKHFTIENSRLGYKKLLSEISLAKEFFKDSNVRIGLESTGHYSRNILHFLILEGYDVMFINPLLTNMDRKASSVRKTKTDSIDAKAICMFLIRNQNDFKPYTLSSYHIDELKILVRQRKSLKKQLNQITNQLHAFLDQAFPEYHTVFKNILSNASLTLLSSYASLSELKRVRVNTLSELLKKSSKGRHGLAKVELIKTLVKDSIGIDSASLSLSIKQSVQTIRTIQSQIDQINQLLEHHITESKTTLLSIPGIGTQTGAIILAEIGDINRFKSDDALLAYAGFDPSVYQSGNYEGSFKISKRGSSILRWAIFQAAKIAVIHDPVFNAYYEKKKSEGKHYLTIIGHVTKKLLRVIRSILKNNSVYTVSH

SEQ ID NO: 448009 - protein, 387 aa, unidentified
MAQVDDLSHSLVPFEQHGTLVAVLEMSQSSWLAAAVVPSVERRPLKKLEPDPAALLRLVEKWRDQAAAAGGCVTRVVLAFEAGRDGFWLARWLRARGIEAYVIHSTSVAVSREHRRAKTDRLDTEMLIRVFLGWLRGEPRHCKMVAVPSLEEEDAKRPSRERENLVGERTRIVNRMKAALIRLGVRGFKPELLKAPERLEALRTPEGVPIPPNLLAEMRRDMARLAWVREQIELVERSRRERLEQAPADGPHAMVRLLARVVGLGLETADMLVHEVLSRNLRDRRAVARYAGLTGSPDESGAKRRERGLAKAGNARVRRGLMQLAWRFLRFQSESALAKWYRERTEGGGKRKTTMIVGLARKLLIALWRLVRLGEIPPGVRLRTALA

SEQ ID NO: 448010 - protein, 313 aa, unidentified
MAQMTPSVGIDVSQDRLDVAVHPDGPQFSVSNDAAGWRELCRRLKPLGVRAIGIEPSGGYERDVIYALLKAGLPVRSVTAWKLRQFARAAGLLAKNDRLDARMIALFVATLPCREVRRDPAREHLGELVGTRRQLVDLQLEQQNQLRQTRDRGLREMRQRQIRQFDADIARLDRRIAQAVAAVPAFAERYTLLCSVPGVGPVLAATLLAWLPELGSISRHAVGALVGVVPYDFDSGTKKGLRRIFGGRANIRHVLFMAAQSGATHNPVLHAFKQRLLAKGKEAKVAIVAVMRKLLTILNAMVRDGQPWRAVAA

SEQ ID NO: 448011 - protein, 312 aa, unidentified
MTTKPTIGIDISKDHLDAHRWPDGETCRVGNDAKGRRQLIAWIGAEVARVAFEPTGAYHGALERALHRAGVPYAKLNPARVRRFAEAIGTQAKTDRVDAGLIARMAALIEPPAQAPRPQVLADLHQLQLARAALIEARTATRNRAERVGLALLERQAARRLKAIERDLAEVDAAIAALVAGDDGLARNAHILSSIPSVSDVSATAILVWMPEIGTLEPGAVASLAGLAPFTRQSGRWKGAAKIGGGRAELRRALYMPALTAARFNPDLKAVYDRLRAAGKPAKVALVAVMRKLLILANTLIRDDREWSPNAP

SEQ ID NO: 448012 - protein, 343 aa, unidentified
MMTDTMIGIDLAKNVFQVHGASLTGQIRFRRKLSRLQFRRFMAEQPVAVVVMEACGSAHYWAREMAKYGHEVKLIAPQYVRPFVKRQKNDAADAEAIVIAAQRPEMRFVAPKAEAQQARALLFRGRERLVHQRTELVNALRSHLYEFGHTTPQGIGNMKRVEAIIENENCDLPELVREECRDLLLQISEKTQRIQTKTKQISSLAAQTDATRRLQTMPGIGPMSALAVEAFAPPMESFRRGRDFAAWLGLVPRQHSSGGKERLGRVSKAGQADIRRLLIIGAMSRLNWLGRKTIPAGSWLARMLDRKPRMLVAIALANKMARAIWAMLTKKEDYRYPVQTVAA

SEQ ID NO: 448013 - protein, 346 aa, unidentified
MKRTTIGLDLAKRIFQVHSVDPDSGEISRQTLKRSQVLRYFANRAASVVAMEACGSAQYWARELVKLGHEVRLISAQFVRPFVKTNKTDAADAEAIWEAAQRPGMRFVALKSEEQQAVLGLHRLREQRVGMRSALVNQLHGLMAEFGIALSPGWREMLHQAGELLAEECAVPELLRGALREQIEQIRALSEQIKALERQISSWQRRAEDCQRIGEIPGVGLLTATATVATIGDARSFRSGREFAAFLGLVPRQSGTGGKIRLLGISKRGDRYLRTLLIHGARAVLRWQSRPGRELDPWLKNLMSRRARNVVIVALANKMARMIWALLAHGRTYQRGYGGRIAATVA

SEQ ID NO: 448014 - protein, 342 aa, unidentified
MSIVGVTGGVDTHADTHVAAAIDHNGGLLGIESFPADPAGYESLLGWLVGFGPLEQVGVEGTGSWGVGLTRFLHSQEIVVVEVDRPNRQKRRKVGKSDPTDALAAARAALSGEASVTPKRRNGPVEQIRVLMVARRSARQQRIQTLNQLRHLVFTAPEEIRVRFKDRYKTGLVTEAANMRPRKGSDPVIFTTNLMIRNLARRIRGLNTEIREIDVMLTGLIAQTAPSLLELHGVGTDTAASLLVTAGDNPERLGSEGSWAHLCGTSPLPANSGKVTNRYRLNRGGDRQANAALYRIVLTRMSSDPETRRYVARRRAQGLNTAEIMRCLKRYVARQTYKHLHA

SEQ ID NO: 448015 - protein, 347 aa, unidentified
MRFYTKQHQFYCGIDLHARTMYVCILDQHGTILVHRNMKASPEMFLKAIAPYRADLVVCVECIFTWYWLADLCAQEGIPFVLGHALYMKAIHGGKAKNDKIDSQKIAALLRGGMLPEAYVYPAEMRATRDLLRRRTHLMRKRAELLAHVQNTNSQYNLPEIGKKITYKANRDGVAERFEDVAVQKTIEVDLVLITYYDDLLKDLELYILKTAKQHDANTLYLLQTIPGIGKILSLVLLYEIHDIRRFPRVQDFASYARLVICSKESAGKRLGTSGKKIGNAHLKWAFSEAATLFLRQNPAGQKLLGRLEKKHDKGKALSILAHKLGRAVYHMLKRKVAFDMDLFLRP

SEQ ID NO: 448016 - protein, 405 aa, unidentified
MDITPIHRRVIGLDVHQNKITACALIEQADGRVAVQQREFGGFKRDRRALAAWVHGLAPDIVVMESTGIYWKSPYAALENVGIAAWVVNARHVKNVPGRKTDISDAQWLATLARAGLVRASFIPPAEIRHLRLIARQRQKLGGMLAAEKNRLHKVLADAGIRLNVLLSDLHGQCARAMVKALLGDEPIHAILARAGRLRASREDLFEALQPEELSAKHRFVLNEIMAHIDYLEATMARFEQQLLVGLAPWEPQMRLLETVPGIDRLGAARLLVEIGTDMDSFGSAQRLASWVGICPGNNESAGKRKSARTRKGNAWVRRLLCEFAQAASRTRCALKDKFSALAIRKGHKRSIVALAHKMLRIVYAMLANTTPYQDRTVDYEALMVGRNAPRWLKMLAKHGYIATA

SEQ ID NO: 448017 - protein, 426 aa, unidentified
MGENPFEEAALGAAREGDRMGMKVLYERCAGCDVHKDGITVHIVIPEGQETRTFGTTTNALLTLVEWLLERQVTHVAMESTGVYWKPVYNLLEAAELKVFVVNAAHMKAVPGRKTDVRDAAWICDLMRHGLLRPSFIPPRPQRELRELVRYRISLIAERGDEANRIQKVLEGGNIKLGSVVSDILGKSGRAMLQAMAAGTTDPETLAGMAQGKLCAKRDQLMEALRGRLDAHQQKMLRMQLDHVRSLDQLIEALDAEVVVRLDPFHKEIERLDTIPGVNQRGAEVILAEVGTDMTRFQNTAHLASWAGMCPGNNESAGKRRSGRTRKGNPTLRRTLTEAGWAAGKTKNTYLGTAYRRIKARRGGKKAAIAIGHKILEIAYVILRDGVEYRDLGVNYYDERKKDMVVRNAIKRLEQLGYKVAVQPVA

SEQ ID NO: 448018 - protein, 355 aa, unidentified
MDNLRYIGLDVHRDTISAAVLNREGQLIMQSVVPTRAPAILDLLDGIRGTLHVTFEEGIHSAWLYDLLQRRVARVLVCDPRKTSLLKSGNKGDLIDARKLAELLRNDALSPVYHGELSSLEVQRRTRSYTMLTEDTTRIMSRVKAVFRGLAIPYHGKSIYRPDRRESYLAQLPTEGLRQRVELLYQELDAVHRLRLRAKREMLAECRKHPAMKWLQSVPFLGKVRTAVLIGRVQTPHRFRTKRQFWSYCGLALETHDSAQYHVVHGQVERKLRFVQVRGLNWNHNHDLKDVFKSAATMAAVREGVFRDYYCGLLAKGIRPEMARLTLARKIAAITLKIWKEGETFNAEQVKPQAA

SEQ ID NO: 448019 - protein, 385 aa, unidentified
MELKPLYRCVAALDVHQAKLTVCVLQEDAEGELQVELREFGGFKRDRQAMAEWVASFHPEEVVMESTGIYWKSPYAALERCGICASVVNARHVKQVPGRKTDIGDAQWLAILARSGLLRGGFVPPANFRELRLTSRQMQKLTGILAAEKNRLHKVLTDAGIRLPVVVSDIHGQSARAMVKGLIAGQSPEQVLTYASKRLKASEEELLDALAGELTDEHRFVLGELMDHIEDLQRRIARFSEHLLQGLAPQQGLLQALQTIPGLDERGAAMLLVEIGDDMDAFGSGEKLASWAGVCPGNHESAGKRKSGKKRKGNPYVRRILCEAANAAARTRSALAKLFKSLLIRRGRKRAIFALAHKILKIVFVLISRGDYYPYHYPQLSPMLR

SEQ ID NO: 448020 - protein, 428 aa, unidentified
MVGSMSLVGLDVHASQTHAAVLNTATGELSGTRLRMAPAQVVEFLATLPAPVRAVYEAGPTGFGLARAASARGIDVRVVAAGKVPRASGDRVKTDRRDAERLARLLAAGELRFAFVPAVADEQFRDVIRAIEDCRGDLMRGRHRLSKFLLRREVRWPGPGSTWTQRHMSWLRGLHFDDLCSQATLVDYLWGVEMLVARRAALIAALEQAIPDGHHAPTIAALRCFRGIDTLSAAGLCAEVGDWRRFRPKQLSGFLGIVPTEHTSDRKRRQGSITKAGSVHARRLLVEAAHHYRHRPAIGDGLARRQHGQDPRVIEIAWRAQRRLHQRWEVLADQRRKPAGVVAIARARELAAFCWEAATPTRATNRHPARPVLPGRARDHRASGSSRRADREPAMGNHRPPSRWRRPLLDRGPRRTQGHEVASPRISA

SEQ ID NO: 448021 - protein, 372 aa, unidentified
MEQRSKIHLGLDVHKDSITIARADPGRDPGRIVGKVAHDVNKLMKVLLKIGPADQLHLVYEAGPTGFGLQRWLGESGYSCEVIAPSKTPRKPGSRIKTDGRDAIGLAQASRAGELHAVWIPDPADDAMRDLSRAREDAVKACTRAKQQLGGFLLRHDLRFGGRTSWSKAHFVWLAELSLDTSAAQTALTEYLLAVQAAMQRVARLDQALQDNVQGWRFEAVVGALQALRGVALVTAIGLVAEIGDLSRFEHPRKLMGYLGLVPSEQSSGQRVRRGSITKTGNSHARRLLTEAAWSYRHRARIGAEALQRQEALSETVRATAWKAQLRLTKRFTALNARGVQRNKICVAVARELTGFVWAVGTQALRESRTAH

SEQ ID NO: 448022 - protein, 348 aa, unidentified
MSKQCTPVVPVKYCLGNDISKDEMSVCFSQVDAQQHVSIKASRKFENNIRGWKGLHTWIKRFRKYEQTPLVIVVEATGVYYESFAYYFKSQGFDLHVVLPTKSKHYAKSLNIKTKNDQEDACLLAQMGLERKLSVWKGMSPHMQRIKQLCRQRAALKEMHIVVSNQLHAHTHSYCTQKAIVKSMQQHLKFLDKQIKAIENELQKSYSQDLELKEKVDNVCTIKGVGLITALVVISETNGFDLIENKAQLVSYAGYDVVENQSGSSIIGKTRISKKGNSHIRRALHFPALTAARYEPLLEALYKRVHERNPKIKMIGAVAVQRKLLVLIYTLFKKNEAYDPNFEDKKAA

SEQ ID NO: 448023 - protein, 542 aa, unidentified
MSRSHTRQRPRSRRPDVLQKPRGTFHPRVQKVGPEHFGIVAVDCAKARSKWMLADFYGNVLVRPTPLAHNRPALDAAIDRLRQAVHDHDLKDLLVAIERTGRYHRTVQHAFAAAGFEARIVHPFATKQFRQPADPGYKTDDTDLAALHRAAVSGFALVELGRDEAWTTFQLLIRHRRELVRKSAALRTQIREHLDAAFPGFTASFADLWQRDCAWHLVRHFADAAELRAAGLDGLCQSLDAASVRYQRRTLETILEWAAQAAPADLAAPARRRFALALHDDLVRKAREIQAIERDIAAALVRTPYVLLLSFPGVNVVSAADFAGEMGPIEHYANARAITGRAGLRPSRYQSDEVDRPNGPLVRCCNRKLRAAILRVADNLIQCNHHFNVLAHAWAAQKKDARHTRVKVGLRFCRIAYQIVAGRQVFHHPCLQGRHYVLAKLMAFQREHETGSVESLRDLQAALEHVPPREHRAEAKPLHEELQRIQRGGRRGPQLLGDILPIVLARLGVGEVQSTASGEEDPTGSCRADGPRTPCDPKGRTL

SEQ ID NO: 448024 - protein, 338 aa, unidentified
MNIVFLGIDLAKNVFQLCGLNQAGKPVYTKRTGRKELLQTLANIPACLIGVEASTGAFYWQREFEKLGHKVKVISPQYVKPFVRGQKNDGNDAQAIAVALMQPTMQFVPPKSPEQQDIQALHRARQRIVNHRTATVCQIRGLLLDRGIPIGSAVSRVRRAIPLILEDAENGLSSRMRRTIAELYELFNDLGRRIHFFDKEIETVFRQSEACQRIARVKGIGPKTATAVVAAIGKGTEFKNGRHFAAWLGLVPRQHSSGDRQVLMNMTKKGDKHLRTLFIHGARAVVRVATNNDDGHMNQWVNQLKGRRGFNKTTVAVANKNAQIIWSMLRNETEYQVV

SEQ ID NO: 448025 - protein, 395 aa, unidentified
MLATNEAVAPAGAERSTLYVAVEISAKSWVVGIKSPTNERIGLHSLGAADVDGLRDLVERQRAKAERALGGDVRVLCCYEAGYEGFWLARWLDRSMSVETVVLDPASILVNRKAKQRKTDRIDAKKMVRALLAHDRGDAAVLSRVRVPSVEEEDRKRLLRERQRLVKERTSLTNSIKGLLRLHGIFDLQPRTNGFEMNFAKAMTAYESPFPPRARQEVLRLTERLSLVERQITQVEAERDTVARSGAKLSIAEVPEGSDAQAAAKIASLTRLRGIGENDATLLTHEVFYRKFSNRRELASWVGMTPTPWASGAKERDQGIGRDGPAWIRAQLIQMAWRWLRHQPDSALSEWFDQRTAGARGRIRRVMIVALARKLLVALWRFCETGLVPAGAKLA

SEQ ID NO: 448026 - protein, 359 aa, unidentified
MGLERTFVGLDVHARSVVGCALDTVTGEVSQRRLGTSAEEIRRWLAGLHGPVAVTYEAGPTGFGLARDLRLHRISCVVAAPSKITRAAGDRVKTDGRDALLLARLLKLDEIVEVTVPSVAAEAARDLVRAREDCRADLMRERHRLSKLLLRNGIVFSGGQAWSGAHDAWLRRQSFDQPARQVAFESAYEAVVLTTGRRGRLDAAIEAMAADSEFTSVVTRLGCLRGVSTLTAFGLAVEIGDWHRFTGSSIGAFVGLTPTESSSGQSRSLGSITKTGNTHARRLLVEAAWHHRRRYVVGATMTRRWERADAEARSRGHQGNQRLHARWRTFDARSKRPSVANVAIARELAGWCWSLAVMT

SEQ ID NO: 448027 - protein, 416 aa, unidentified
MKIVRPICCGMDVHKNIIVATIGITNKKTRITEYIQETFSTLNPDLLNLKQWLINHKCFDACMESTGKYWIPVFNILEDEINIYLTHPKYVKAIKGKKTDKKDSKWICDLFKHDLIKFSFIPPKEIRALREISRYRYKLVGMRSSERNRYQNCMTVSNIGIGSVFSDPFGKSAQAIMKEVLESDIIEDEKILKCIHGSCKNKDKILDSIKHCNIETDQRFKMNESMIHMEELQVHINNCEIEIMKRAAPMFDQFMHITQLPGISTLSAILIISEIGVDMKQFESDKQLTCWAGLAPANNESANKKKSVRISKAGQYLKPLLVQCALGAIKDKEGYFGIKYSRIKKRRGHKKAIIAIARMMLVSIYHMILTGETFNPSDYESFRNPKPPIKQQDLTEESAIEFLKKSGFDVSKLTKP

SEQ ID NO: 448028 - protein, 400 aa, unidentified
MDPQIRVGVDVGCRTHHVAIADPEGRILDEFAIPHAQEGFAKFFTRVEQRRCERGLPVAVAMEGLNGYGRPLDRMIQEKGYRLYNVNNLKLARFREIFPGAAKTDRLDTRRILELFHLKDHLSLAKDVLQEVPRVPPENERLKRLSRRRRQVVNEKVRVVNRMQADLQAVCPELLSITNNVGNLWFLRFLSSRDDLRKLVRMQKKTVLKIPGIGKKYAGIIEEWQKKAQFSPEVAYVGPMIVSDARRILELLREIAALDEAMEALVGESEIAQRLLSIPGFGTTSAAELAGEIGTLGRFESEASLALYLGMCPLDRQSGQSHGTKSPRQVNWRAKAAMMTAVARHIEKVPESRAYYEKKRAEGKKHNQAVRALGRHLVRVMRSMIEQQRAYELREVSCAS

SEQ ID NO: 448029 - protein, 391 aa, unidentified
MNQTKGKRIIGLDLHPDVFAAAALVGPDAGQARAEWVQDRQATAGLEAWAKKWLQPGDVVVLEASGNSFAVAGRLHACGHTALVLESAQAGKLRDNFCNDDRHSAVKLARVYLSGLAKTVWQPDVQTREYREVFFAHRNAVKDATRCRNRIHSFLNEHCVRLPSGVRLTTASGEATARAAKAWTPLQADLVAQKFAQLREVEGRRQQLERTMVRELAAQPRRASLWRLMGIRHRVAFALMAMVGDIHRFPTPKKLVGYFGLAPRKDQSGNDRAGTDQGVGRFGRGDVRGLLLQSAHNALIQRDSPLHKWGWKLLIRNHRNQAAVAVARKLTVSIWHLLMGHFTPLVETTAHLHAKLLKLATILGKSMLLSLGFADRDAFVTAQIKSLQLST

SEQ ID NO: 448030 - protein, 315 aa, unidentified
MSPQVFVGIDVSKAHLDVAVLPPERRRRFPNDSPGFEELIAWLGEPEATLIVLEATGGYQVAVTAALSLAGFAVVVANPRQIRDHARSQGRLAKTDKLDADCLADYAAKNKPPVRPLPDEQTRLLQALMARRHQLVEMLTMEKNHLQQASAPLAKPIRKHIQWLEKQLQQLDDELDHQVRGSELWRQNDELLRTVPGVGQVTSYTLLADLPELGQVNNKQVAALVGVAPLNRDSGKRKGHRVIWGGRAAVRTALYMATLSALRYNPVIKAFYQRLKKAGKASKVAIVACMRKLLTILNTMLKERQPWQPRLLKTA

SEQ ID NO: 448031 - protein, 348 aa, unidentified
MKATTIGFDLAKNEFQVHGVDAAGKPVVRKKLSRAQVLPFFAKLVPCTIGIEACGSAHHWARKLTALGHTVKLMAPHFVKPYVKANKTDAADAEAICEAVARPNMRFVPVKSVEQQAILAVHRVRSGLVAERTAQLNRLRALLAEFGLIAPRGRRALMERLPRLLADEALPGVARTLFERQSTRIRELEAEISAEEAVILDWHRNNELSKRLDAVAGVGPITATALVASFGQGREFDNGRQMAACVGLVPRQHSSGGKTRLLGISKRGDGYLRMLLIHGARAVIRTLERRAKGAGNPTDRWLTKLLARRNPNVAAVALANKTVRVIWALLAHDRTYDRNWAGQRAATV

SEQ ID NO: 448032 - protein, 347 aa, unidentified
MRFYTQQHKFYCGIDLHARTMYLCVLNQDGEVLLHRDMKAAPGPFLQAIAPYREDVVVCVECIFTWYWLADLCTHEGIPFVLGHALYMKAIHGGKAKNDRIDAHKIAVLLRGGMIPQAYVYPAEMRATRDLLRRRMSLARKRAELLPHVQNTNSQYNLPAIGKKIAYKANRDGIAERFPDPAVQKSIDVDLTLIGHYDELLRDLELDLVTAAKQHSANALYLLRTVPGIGKILSLVLLYEIHDIQRFPRVQDFVSYCRLVKCAKESAGKRYGTSGAKIGNAYLKWAFSEAAVLFLRNNPAGQKYLARLVKKYGKGKALTVLAHKLARAVYYMLKRRMAFDLDKFLNE

SEQ ID NO: 448033 - protein, 340 aa, unidentified
MEGLYAGSDLHGNSNFLGIIDAQGKRVFKKKMPNELALIRETLQPFQGELLGIAVESTYNWYWLVDGLMEEGYRVHLANPSAIQQYSGMKHSDDRHDAFWLAEMLRLGILPEGYIYPKEERPVRDLLRKRGHLVRLRTSLIISLQNILSRNLGRKVNVNDVKAVKEDRISVLLEMDEDLALAGRVSKEAIDHLTRQIHKIEWVVQKRIVLKEPYRYLLTLPGVGKILSLTIMLETGPIRRFETVGDYVSYCRKVPSQWMSNGKWKGAGNRKNGNKYLAWAYSEASEFARQLHPEPRAYYNRKMQKTNVACAHSALAHKLARAAYYIMKDHVPFRPEKLFG

SEQ ID NO: 448034 - protein, 443 aa, unidentified
MSRKKQTHLRGERGQAFADKIRGISMEQILCVSLDIHKYFHVVIIHNALGEIVTPTFEIDIFQTGFEQLCQAVAEAIARTDAQVILTGMEPSSHYFENLARHLNERPQPVTLINSFSVKENRDQQMMLYEKDDEIDVAAIGDLLKRGEGSPFNPPQGIYLQLQHLARVRTSKVKMRTMLQNQIIGHLDRIFPGLVIIGKEAKKRCKPMFATDFWKCQTLQHLIRVCPNPHQLTAMSSQDLIDAFHAHGYAMGPVRAAKIITHAQRVLLPDRALVAVRCRLLPHDLALFEEVELHIAQMEADLCTLLAETPYQIWSKIKGLSDVQAVDLAAAIGDPGNYRHAKQVFRRSGLVPGRNDSGTRQRKGRGSKVVKVGDVYLRRALMNAVATLILHQPILWAYYSKLKASKPAGVARVATARRAIGILWAIQRDKRSNTLILKKETLM

SEQ ID NO: 448035 - protein, 317 aa, unidentified
MNTNSLTCHVGVDVGKDHLDFFCHESAVHFTVTNTPAGIRQAFRQLPLRAIACRVVEATGRFERALVDAAQRAGLPVVVAQPIAIRRFAGALGILAKTDQLDSRVIAHYAATLQPPVRALPDAKTRQLKDLTVRRKQVIGMLTMEKNRLQIMPAFLRAEIRRSIAGLQRQLARLDERLRQLSEEVAAWRERRRILESMPGVGVTLATTLISDLQELGTLNPKQIAALVGVAPMNRDSGRLRGKRRIRGGRAQVRTVLFMATLCAVQHNPVIRGFYRRLLAAGKHKKVALVACMRKMIVLLNAMVRDGTCWEGTRIMA

SEQ ID NO: 448036 - protein, 341 aa, unidentified
MNAVTLIGLDLGKHSFHLHGQDAAGRMVFRKKLTRGQMFTLLGNMPACTVAMEACAGAHWVARRVQELGHQAKLISPQFVKPFVQGNKNDFADAQAICEAASRPSMRFVSPRNQAQQTVSMLHRMRESLVRDRTGTINQIHAFLLEFGVSLAKGSAIIRKLPAVLAAQELPPRLVALLERLQAHFKYLDEQIVQVERELSAQLREDERSQRLLEIPGVGPITASVLMAELGDARQFGSARQFAASVGLVPRQYSTGGKPTLLGISKRGDKNLRRLLVQCARVIMQRIEHRSDTLGAWVRGLLARRHSNVVACALANKLARIAWAILARGTTYRSEQAVATA

SEQ ID NO: 448037 - protein, 349 aa, unidentified
MGEVSTIGVDIAKSVFQVHGVDADGAVVIRRRVGRAKVLEFFAELPPCLVGMEACATAHQWARELKKLGHDTRLMPPTYVKAYVKRGKNDAADAAAICEAVTRPSMRFVPIKSVEQQSALMLHRTRDLLIRQRTQLINALRAHLAELGLVAAKGREGLQQLVTAVTESSDERLPSNARFACHAIVAQLHAVQTQINGLDKRITQAHRANADSKRLDAIPGFGVILSTAVVATMTDPKAFKTGREFAAWIGLVPRQNSTGGKERLGSISKQGDRYLRRLLVVGAISIVRTARMRPAKYPWVIELLGRRPAKVVAVALANKMARIAWAVLAKGETYRAPTRSSSAAVAAAA

SEQ ID NO: 448038 - protein, 313 aa, unidentified
MKHIPSNVFIGVDVSKDRLDVAVAPSGESMRFANSEDGIALLADFLKPRNPELVLFEATGGWEMNAVNHLVAQRLPLVVLNPRQVRDFAKATGQLAKTDAIDARILARFGQAVRPEVRSLKPLELRKLDDLNTRRRQIVEMLTAEQNRLVSAPEWVRPDIEELIAILKKRLAAINRDLNKLIRKSPLWREKDKILQSFPGVGPITASTIIAALPELGTLTRRQIAALVGVANLNCDSGTHKGKRKIWGGRADIRSVLYMCAMTAARCNPVIRPFYQKLLRAGKPNKVARTACMRRVLVILNAMMRSNTCWQPT

SEQ ID NO: 448039 - protein, 431 aa, unidentified
MSKFFYRPTVGIDVSADFSAAAILAPDGEVHRKPFKINHNRNGFDYLVDQIKKAEKEFNMKTAIFMESTGVYHLTLFHFLKDTFETCILNPLITNCNKNVDIRKVKNDKKDALTIAKIGKFQDVKYSSNFDIEIYTLKSLCRDYYKFTDSKSTFKKKLSTDLRGIFPTYNTVFSNITSKTSIAILKTYSSPEAILNADKNKLIKLIYAHSRKGQVYSENTYKKLIDAAGEAVYIGLNSPSLFVKIINTISIMEALEIQIENLLKEIHLLMCSNRISAEFKKNVQLIYSIPGVGELTATTIMSEIGNIKSFVKPKHLVAYFGIDPSVSQSGKFNSNKNVMSKHGTRIGRRALYAVALASIRKIRNDEPINKVLLNFYKENMKGKSKKVDLVAIMHKLINYIFSVLKNQKEYELRDPKIHVKMHFNKQSNSTA

SEQ ID NO: 448040 - protein, 386 aa, unidentified
MYFVGIDISKYKHDCFICTETGEVIEENLSFTNTNEGFQQLLNLLNSLDNSQEIKIGFEATGHYGMNLKLFLEKNNYSFMEFNPNLVKQFIKSQTLRKTKTDKKDAVWITKHLISVDYKPHPQQFYHKFALKSLSRKRDKLFFQRSYYLVQLTNILDLIFPEFKPLFNNEFTVTSLYILSKYKTVEKIKNMKDFDSIRKVSRGKFSYSKFLQIKEAAKNTVGCSDEYLEFDLENMIELHNNINNKIKKYDDKIETIIKELEPPTLSIKGIGPISCAGIISEFGDISRFKSANAMVAFAGIEPSISESGTESHTGKMVKHGSGHLRYHLLNAADYIFMHEPIFTEFYYKKRNEGKTHRVALSHVAKKLVRIIYKLESENIKFKSDIK

SEQ ID NO: 448041 - protein, 344 aa, unidentified
MHYKLITIDLAKTVFQVAAFRDDNTIAFNKRVKRAQLLDTLRQCEPTRVVMEACYSANYWGREIAKLGHDTRLVSARVVKAMLVGNKNDSNDAVAIGEAAQRPRVQLLRVKGLHQQDIQSLLRARELLIKERTALINQTRGFLAEYGIIVAQGLAQLQQALPALLEDAENGLTTTIRSLLKRWHERWLQQNQELETLTHELIALISHDEVFKLLQSIPGVGPIVAAAIMASVNEITDFRNGRQFAAWLGLTPTQYSSGLVNRLGSISKRGNEGLRRLLIHGARAVLNWCEKKEDGLSKWLQQLKARKHSCKVTVALANKLARIVWAVLTTGQEFDITKACQAMK

SEQ ID NO: 448042 - protein, 309 aa, unidentified
MTLPRNVLGVDVAKDWIDICDPASGSTRRIVMTPRRLKAFAAQALASDAFVVFEASGGYERPLETQLAAAGVRYARVNPRQAREFARASGRLAKTDAIDAAVLAEMGRAFDLAPTPPVSPARRRLADLVARRSDIVAAITAETNRLAQAHEPFVRRDIQGHLAGLRRRKVTIEKEIEAQVRACDELDQLDRRLRTAPGVGPIVAATLIAFLPEIGALGHKPLAALAGLAPHASDSGQRKGRRKVWGGRRQPRQALYIAALVASRFDPDLKAFRDRLISAGKPFKVALTAVARKLLTILNAMARDARTYA

SEQ ID NO: 448043 - protein, 438 aa, unidentified
MSNKVIFNLDELFISVGIDVGADFSWMSIALPNQQFVGKPYKILHNSIDSLTTAVSKIKEAEELYSLESRIFLESTGIYHYPLFCYLRDKGFNCSVINPIITKNSTNINIRKVHNDRFDSKKAALVGLKPDLKVSLMPSDLALNCRNLCREYYDLMDNRSAYVNKLQGELRMAFPQYLGIFSKVTINTSLTLLETYTSPSAFLKADKQEIIDIINSTARFGLTYAQNKYNAIIQAATDANQFGYIIDSNIKRIRLYISFIRKYDEEINSILESLHELVDANEDSDFVKQIHLIETFKGAGFLSAVSIMGEIGDFSAFSKPKQLFAYFGLDPAVKQSGKFEGTKVQMSKRGSAIARRVIHTLTLQSISISRNREAKNPVLREYYLKKCDSKPKLVAMGAVSHKVCNMIFAILRDNKPFKIIAPQEHIKQYNSAKCDIAA

SEQ ID NO: 448044 - protein, 355 aa, unidentified
MVLHVGLDLSRRRVDVCAIGETGELVGQFRSRVDRDGLFGLARRLEPYGEQVRAVVESMNGARFVHDELTAYGWRVLVADAQRVKGLAPLACKTDKVDARVLAELSWRDLVPAIWLPTAGVRCERERARYRMHLVKHRTTLKNRVHSTLIAHGHQAPVSDLFGTQGRRLLASLELPDPWASTTTATLELIDDLDRRIAGIERELQRAGAEHRYVPILMTAPGIGWILAYTIAAEIGEIERFPTAKRLVSYTGLCPRVHQSGEVDLRGRLSKHGPRYLRWALIDAAAHASRHPIYTERYQQIKRRVGRQRGSKVAQIDLARRLAEAIWHMLTKNQPFTPFTPTGAALPLAATTAPH

SEQ ID NO: 448045 - protein, 373 aa, unidentified
MDYSTVYVGMDVHKETFSVCCYTNEKEKAEYCQTIDAHYSKVLNYLEAMKFHYGNDVLFICGYEAGCLGYTLYHQLTDHGITCVILAPTTMLKPSSGKKIKTDKRDAALIARCLAHNDYKAVHIPTDKDEQIKDFIRMRNDHNLALKKIKQQILAFCLRHGYRYDAGKSYWTQKHLVWLRTIEIDGLYKEILDEYLLTYHTLIDKIDRIDRRIEELAYDEDYKDKVNKLVCFIGIKTHTALAVIAETGDFKRFKDARSYSAYLGLVPGEDSSGQKRCGLSITKSGNSHIRSLLVETAQSYTRGQIGHKSKALKERQRSNPSEIITYADKANERLKRKYYGMTLRNGKRANVAKTAVARELSCFIWGMMTENYN

SEQ ID NO: 448046 - protein, 352 aa, unidentified
MIIGCDFHPSFQQIAYVDQETGEYGERRLKHREEAVRFYRSLASRQVRVGVEATGNDRWFRKLLSELGEELLIGDASAIHASAPREQRTDKRDARHILRLLVENRFPAVWQPPAGNEAQRQLLLHRCRLVRMRTRIKNQLDSIAKSEGLTVSRRWSSQRRQQIEALPLTGWYGQRRADLLRLLDELEQRIQPLDAAVEAAARQDAEARFLMTHPGVGPVISLAYVLVIGDWRRFPRGKQVGSYLGLIPSEASSGKRQQQMGHITKQGNGLLRWLLVEAASTAQRYDASWHRQYVRLSMAKHHGVAKVAIAHKLAVRLYWMLRSGQDYGEMMERGSHARQSECPVGRSTRPIE

SEQ ID NO: 448047 - protein, 320 aa, unidentified
MRNTVGLDISKLTFDATAIVGNAEYSAKFDNDSKGLNQFSDRLKSLGCQNLHICMEATGNYYEEVADYFAQYYSVYVVNPLKISKYAESRFKRTKTGKQDAKLIAQYCRSAQESELVKRQKPTDEQYRLLRMTAAYAQIKSECAAMKNRHHAAKDEEAAKAYAEIIKAMNEQLEVLKEKIKEQTEKPKCKEGVKCLETIPGIGRMTAAVLFHHLTSSKFETSNKFAAFAGLSPQQKESGTSVRGKGKLTKFGNRKLRAVLFMLTMVAYRIRAFPDFIKRLEEKKKPKKVIIAALMRKLAVIAYHVHKKGGDYDPSRYKSA

SEQ ID NO: 448048 - protein, 391 aa, unidentified
MSASALGPAQAAIQVDLAAVFVSLELSRSAWLITSLPPGGGERMSKHPVRGGVRGGDVAGLLDQLARLRVKAQARTGKTFPIIVIQEAGLDGFWIRRVLEREGIGSHVVDAASILTSRRRRRAKTDRIDGETLLRTLLAYKRGEPRVCSMVRAPCPEEEDRRRLCRERRALVAERVEHVNRIKGLLFAQGISDYEPLHRDRRRRLEQLTTGDGRPLPAHLKAQIGREIDRLELLLGQLDAVEAERDALLAPMADAAPTPVAALARLRGIGPEFAAVLWLECLFRPFGNRRQVAAYAGLAPTPWQSGSVRHGQGVSKSGNPRLRATMIQLAWLWLRHQPTSAPSLWFKDRVERGGGRGKRTAIVALARKLLVALWKFANDGVVIEGAVMKAA

SEQ ID NO: 448049 - protein, 389 aa, unidentified
MQTARKTATHTIAPVECGAIFVSLELSRSFWLVTALATPVGSKMSRHQVRGGDMSGLLERFSDLQRNVQRRTGQVVPVIVIQEAGLDGFWIHRALVTEGIESHVVDPASIAVSRRHRRAKTDRIDGEALVRTLMAWRRGEPRVCSMVCVPTPGEEDRRRVCRELKTLIGERIRHVNRLKGLFFAQGIDGYEPRNKDRRERLEDLRTGDGRELPKHLKALALRELEIIELLNQQIEAVKAERNALLEKAPVSGSAPEPVRMLLELKGIGAGFAGALWSEGLFRQFANRRQVAAYAGLAPTPWKSGTINHEQGVSKAGNLRLRAIAVEMAWLWLRHQPDSALARWYHERVRRLGPRTRKVTIVALARKLLVALWKYATSGVVIEGARTKTA

SEQ ID NO: 448050 - protein, 366 aa, unidentified
MHATTVAIDLAKDVFQLAYTDAERSAIEPLRVTSRLRFAALFENRAPLRIVMEACGSAHYWGRRFGRLGHTVRLLPAHDVRPYVRRNKTDRTDTAGLLEADRCPGLSSVPVKSADQQGIQALHRVREHCKSARTASINLLRGLLREFGIVFARGAAQVRPAVLAALEDADNELPMSLRHTMAAVLDQIRGCECAIAAIEAQLAQFATRDLRSQRYQQAAGVGLITATALSASVGDIERFRSGRHFASWLGITPREHSSGNTRRLGRMSKRGDAYLRMLLVHGARAALRAARLRHKRGQVLDRLAHWALEVQQRHGHNKAAVALANKMARRLWAAEHHRRDFDPDHVSTRPAQRGVTATEPGRAGMH

SEQ ID NO: 448051 - protein, 346 aa, unidentified
MTTTTSARYIGIDVSKGQLDVAVSDASGFAVPQTADGIAELVQRLRTAQPTLVVLEATGGRERAAAQALCQAGLCVAVVNPRQVRDFAKASGQLAKNDRLDAQLLARFGRAVQPPAHGLVDAQTLRLQAVVRRRQDLVGMRTMELNRQPLLPADLRPGVEAHIAWLSEQIATLEAEQAALIAAQPQWREQAARLQRVPGVGPVLTATLLAELPELGRLNRRQVAALVGVAPFVCASGRFKGQRHCWGGRAGVRSVLFMATRAAIRHNPPIRARYERLITAGKPEKVAVIACARALLALLTALQRDRADWTADTNRAGQDSPGTARSAVSPSQPTTPAPRSEEAAMP

SEQ ID NO: 448052 - protein, 344 aa, unidentified
MITIGIDPHKSSHTAVALDEAGRVLAELRVAATKAMLDRLLRWAERWPERIWAIEGATGLGHLLAQQLVARDETVLDVPATLAARARLLARGHGRKTDGIDAASVARVAQSQSDLRRVGPEDHSTVLRLLSDRRDELAQGRRTVINRLHRLLRDLHPGGAPTELSAAAASGLLGRIRPAAAVDLERKAMARALVADLRRIDRALVENRTRCAAAVAASGTTVTAIFGISDVLAAKILGHVGDVSRFRSADRFASYTGTAPIEVSSGEVTRHRLSRSGNRSLNNALHLAARVQVMYPGPGRDHYERKLAEHKSSREALRSLKRQLAKVVYRRLVADRAHRLAIAS

SEQ ID NO: 448053 - protein, 405 aa, unidentified
MFDTEDVGVFLGLDVGKTAHHGHGLTPAGKKVFDKPLPNSEPKLRATFDKLAAKFGTVLVIVDQPASIGALPLTVARDAGCKVAYLPGLAMRRIADLYPGEAKTDAKDAAVIADAARTMPHTLRSLELTDEITAELTVLVGFDQDLAAEATRTSNRLRGLLTQFHPSLERVLGPRLDHQAVTWLLERYGSPAALRKAGRRRLVEVIRPKAPRMAARLIDDVFTALDEQTVVVPGTGTLDIVIPTLAASLAAVHTQRRALETQINTLLEAHPLSPVLTSMPGVGVRTAAVLLVTVGDGTGFPTAAHLASYAGLAPTTKQSGTSVHGEHAPRGGNRQLKRAMFLSAFACMNADPASRTYYDKQRARGKTHTQALLRLARQRISVLFAMLRDGTFYESRTPADVELAA

SEQ ID NO: 448054 - protein, 350 aa, unidentified
MIIIGCDYHPGFQQIAWLNTDSGELQERRLGHREEAEQFYHELKSRGMKVRVGMEASGHARWFERLLNELQFELWIGDAAAVRTKRVRKQKTDRQDAQLLLRLLLEDRFPRIWVPDPENRDLRQLLWHRHRLVQMRTRVMNQLHVVALNEGLRRKKALWRPAGRAELQALSLAPWASRRRQDLLDLLDRLTPKIHELTGKLEQIVERRPVTRQLSTHPGVGPLTALAFELVIGTPERFACAKQIASYVGLVPSEESSGDRRRLGHISKQGNVLLRFLLVEAAQVTVRSDPQWRSQFFHLAMRRGRKIAKVAMARKLAVELYWMWRRGWDYEQMQQLGSQAGEPGNRHGVQ

SEQ ID NO: 448055 - protein, 326 aa, unidentified
MFQVHGVDAEGVAVIRQRLTRGRMLKFFAKLPQCLVGIEACATSHYWARELVALGHDVKLMPAQYVKPYVKRGKNDAADAEAICEAVTRPTMRFVGIKSPEQQSAMMLHRVRLILNRQRTQLSNAMRAHLAEFGIAAPIGRNGIEQLLDVIADPADERVPTDARFCLEMLAAQLRIVKEQILENDRRILASARETELGRRLMEIPGVGPLLASAIVATVPDPAIFRSGRNLAAWIGLVPRQNSSGGKERLGGITKAGHQYLRQMLIVGAMAVVRYAERNGAKRPWLVQLLDRRKTKVAAVALANKNARMIWAMMASGERYREPQVA

SEQ ID NO: 448056 - protein, 317 aa, unidentified
MVSAPVFVGIDVAQAHLDLAVRPTNETWQVPNTDAAFPDLIARLRALAPTLIVLEATGGYEHAVLSAVAAAGLPIVAVNPRQVRDFAKAFGILAKTDQIDAAILALFAERVRPAVRALPDADTAELAALLARRRQLLDMLTAERHRLAQARPAVRRSLQQHIHWLEQRVHDFDDDLSRRIRRSPVWRAKEDLLRSAPGIGPVVARTLLAALPELGRLPRRPLAALVGLAPFNRDSGRHRGRRCIWGGRRTVRAALYMATLVATRHNPAIRACYQRLLTAGKPTKVALTVCMHKLLTILNAMVRTNQPWRDALAESHP

SEQ ID NO: 448057 - protein, 403 aa, unidentified
MNAVGIDVSKRKSTVTIRRPGDQVVFEPRDFRHTQSDINALIRIIRDLDGETKVCMEHTGRYYEPVATWLSDAGIFVSAVNPILIKQFGNDSLHAPKTDKADARKIARFALDRWPNLKQYGPMDEIRNQLKTMNRQFGFYMDQKTAMKNNLIALLDQTYPGANNFFTCPVRSDGSQKWVDFVYTYWHVDCVRGRSLEAFTEHYQNWCRRKGYNFSAAKAEQVYRASADLIAVFPKDACTKMLIHQAVDMLNTISGTVETLRAEMDKTASMLPEYPVVMAMNGVGPTLGPQLIAEIGDITRFEKRGSLTAFAGVDPGKNESGDYVQKSVHTSKKGSPHLRKTLFQIMESLIQRAPADDPVYAFMDKKRAQGKQYYVYMTAGANKFLRIYYGRVKEYIAGLSESD

SEQ ID NO: 448058 - protein, 386 aa, unidentified
MHPTSSRLVQTQSTGTPPEPTLYASLELSRSTWLVTSLSPGSEKMSKRTLPGGDGAALLDLLNRLRAKAEQFAGRSVKIMIIQEAGLDGFWIHRLLEAHDVESHVVDPASIAVPRRRRRAKTDAIDGETLLRTLLAWKRGEPRVCAMVVPPTVEQEDRRRISRERAILVQERVRHVNRIKGLLTGQGITDYEPVHKDRRARLAVLRTGDGQPFPMRLKAELLREIELLELLERQIAAVAVERDAIVEAEEHHAPSALLARLKGIGPQIAAVLYLEGLYRHFANRRDVAAYAGLVPTPWRSGKIDREQGISKAGNRRLRHIMIELAWLWVRHQPDSALSQWFRARAGDNRGRVRRIAIVALARKLLIALWRYVTHGELPEGAVLKAG

SEQ ID NO: 448059 - protein, 357 aa, unidentified
MYRHSKKLDFTGQPIFTGIDTGKKSWEVCIMTQEFEHKTFHTTPRVEAVVSYLHRHFPGGTYKCVYEAGCLGYWIQEQFLERGVETIVVSPADVPTKGKERVRKNNRVDARKLARGLRSGDLEAIYIPSRQAQQDRTLVRMRASLVKKQTRVKNQIKALLTFYGVVLPEDICDTYWSRRYLSWLETWANQGGNQGYAMSLLLRELAGLRAMILEVSRKIRDLSRTDRYRQAATLLVSIPGVSTLSGMILLTELIDISRFENCNQLRSYIGIVPGENSTGEEESITGLPPRRNPFLRTLIIEAAWVAVRKDPAMILAFTELSARMKKNEAIIRIARKLVNRIWYVLTRNQPYQLGVVE

SEQ ID NO: 448060 - protein, 349 aa, unidentified
MSPKLNSGIAVIGIDIGKNSFHVVGLDRHGAIVLRQKWSRGQVETRLANLPPCLIGMEACVGAHHLSRKLTLLGHNARLMPAKYVRPYSRGQKNDFRDAEAIAEAVQRPTMKFVATKTAEQLDLQALHPVRQRLVSQRTGIINQIRAFLLERGVAVRQGLRFLRAERPRILATPCDGLSPRMVRVLEELACDWRRLDERIEGLSSEIEVLARRDAGCKRLMSVPGIGPIISSAMVAAIGTGDTFTKGGDFAAWLGLVPKQISTGDRTILGKISKRGNRYLRVLFVQAAWAVLIKPKSWARHGLKPWLEAAKKRLHHNVLAVALANKLARIAWSVLAYGRVFEATKIQAA

SEQ ID NO: 448061 - protein, 373 aa, unidentified
MKEFSKYVGLDVHKETIAVSIAEAGGGEVRYFGEIANTSEAVAKLARQLKKGDARLSFCYEAGACGYGVYRQLRELKHECLVVAPSLIPRKAGDRVKTDRRDSLSLARLHRAHELTAVWVPDGAQEALRDLTRAREDMKHLQRQSRQRLLGFLLRHGQRYSGKSHWTQAHARWLETVKLEQPVQQIVFQEYVDTVRALTQRVGAFDQHIERASNESVFWPVIQALMALRGVSLLSATTVVAEIGDLRRFAGAPQLMAYLGVVPSEHSSGGKRSRGGITKTGNGHVRRVLVEAAWTYRHPARKTAALQRRAERAPEAIQDIAWKAQTRLCGRYRRLEGKGKLKVQVCTAIARELAGFIWAIGQAVPPVTAQASI

SEQ ID NO: 448062 - protein, 342 aa, unidentified
MEITTIGLDIAKNVFQVHGIDAAEKVVVRKQVRRGQVLGFFEALPPCLIGMEACATAHYWARELTRLGHRVRLMPAKDVKAYVKRNKNDAADAEAICEAVRRPTMRFVQIKSVEQQGRLMLHRARDLLMRQRTQVINALRAHLAELGIVAAQGREGIKELLKIIANEEDARLPVDAQASLIVLAAELQAMQTMIGSIDKRIMAQHRSSEASRRLESIPGIGVTGAAAIAATVPDPKVFRSGRDFAAWIGLVPRQDSTGGKHKLGPISKRGDRYLRRILVVGACAVLRYARQQPQKYPWLTQLLARKPFKVVAVALANKMARMAWALLAKGGTYRTPAIAAAV

SEQ ID NO: 448063 - protein, 344 aa, unidentified
MTTIDYIGFDIHKKTISFCAKAPDGAILEEGTIPSLRNRLLAWAKARPRPWIGAMEATLFTGWIYDFLKPLAQELKVAHPPMLKAIAVAKKKNDKVDARMIADLLRCNLLPECYMAPVAIRDLRRVLRYRNLVVRQATRIKNRIAGLLMETGTAYNKERLHGKAYFSELLGSLQEMPPSVVELLKLSRGQLELFAVIQRRLLKGLNEHPDLIERVMRLQTIPGVGEILALSWALEVGEVGRFASIGQAASYCGLTSAQHNSAGTEQRGPISKQRNKHLQTILIEAAKLAPRRNPQLAVVHERELQRGDRNRATLAVARKLVAYLMAVDKGGKRFAMRARTEVAA

SEQ ID NO: 448064 - protein, 391 aa, unidentified
MSVTSDRVVIGMDPHKRSATIEVMARDETVVGAGRFDTGRDGYTAMKKYAKQWPNRVWAIEGCQGIGRHIANRLLADGEQVVDVPPKLSARARVFATGQGRKTDATHAHSIALVGTRMAGLRPVVNDEQLALLRILVDRRRSLGEDHTRMVSQLHQLLLELIPGGAKKSLSAAQAKALLATVRPRDAVGKARRRVAAELIGDLERIYRRSKEADKELKELVASTGTTLMDLHGIGPSGAARLLVEVGGITRFPNRAHFASWNGTAPIDASSGEQVRHRLSRAGNRQINRVLHIMATVQLRNPTEGRAYFDRKKASGKTSMEAMRALKRRLSDIVYRCMISDAVATAAGPGGQRGTTTDSSVTDSHPQAGSSEKSLPGPAKTQDRTLLPAVS

SEQ ID NO: 448065 - protein, 400 aa, unidentified
MRVVFGIDVSKASSEVAILVNGEKVHGYTIPNDAIGFNRLLGDLKTVHQPEIVFEATGVYSRRLQAFFEDNSYTYTRLNPLESKKQLDSLRVRKTDKIDAEKLAMSQFILNRKPSYVQEALYQELRDLSRFYQNLTEDIVCSKNRLHKVLQVTFPELANILSSPTGKQYWNLVMASPCNSFVLELDDAALRAIIRQSTSKRISEKRVTYLVDKLTKLANQSYCAVKKTSPVIEEVKYYAGELLRLSEHRQGVVEEMVTLAQSLPEYEILLSIPGIAETTATSIIGELGDIRRFHSANQINAFIGIDLRHYESGNFLAKEHITKRGNPYARKILFKCIHNIASASHTNPCHIADFYEKRKRQSQVTSTKPHTIASIHRLIRTMYYLITHNKLYDYTSIQNR

SEQ ID NO: 448066 - protein, 443 aa, unidentified
MKELPVLDSRAAFCDVGSEHMHVSIAGGLPKVFGTFTSKLHELRDWLLGEGVHSIAMEATGVYWLSLYGVLEAAGLEVVMVNGRQTRNLPGRKTDMKDCQWGATLHAHGLLKAGFVPPAQIRKLQDYQRLRTDHISSAASNVQHMQKGLERMNIKLHNVISSLMGASGLAIVHAILDGERDPAKLLELCHSTIRHKKAKEVIEALRGTWEPEHLFALRQALQSWEHYQRQIAECDQQIELLLQGITFNDTQGGSIGEKPKAKEGKRPSANAPQISGLHSMLIDLCQGKDLSMLPAHTDYSVLQIISEVGTDLSKWPTEKHFTAWLGLAPGTSQSGKRKSNVKRSRSRVGRYFCIMARSLARSKDMALGGFYRRLAARRGGLIANIALARKLAALFWRVMVKGTEFVEEGLAAYEAKFLEGKKRSLRRLAKELGQTVSPIPVTV

SEQ ID NO: 448067 - protein, 318 aa, unidentified
MDVHKESITACIMDRGGNIIRQHTFPYNEESIKAFLFGISNAEIEIAIEACGIWRGVYKVLKELGYKVRLANPNKTHDIACRKKTDKVDSRILADLLRTNYLPEVYIPDEEMLGLRDITRHKSNLTRLRAEIQAKIKGYLLRKGIKYGKIWNEKALSKLAEDDPDIKNLINVYWSLKEEEKEVMRRIRKIAKNMREANLLMSMPGIGEFSSLMILAEIGDIRRFESPKQLISYAGLCPGIYRSGNTERNVRNNAVNKWLKWIIYECSGRATMLDSRFQEYYYKIKQRKGFKTARRAVARKMLTIIWYMLTNEETYRNN

SEQ ID NO: 448068 - protein, 384 aa, unidentified
MQRATNTATVSANTLHCALELSKKTWLLAIQFPDREQPSVYPVKGGDAGALMAKLIAARDRWAKVSGSPPSIVLCYEAGYDAFWLARFLKGHGIECLVLDPGSLEVNRRSRRVKTDRIDLKKLLRTLTAWCRGERHVCSIVRIPTIDEEDLRRSHRERSRLICERTAHINRIKGLLFAQGIRVGNISSKTLTLDKLVTGDGHRLPPRLAAEVEREIERLALVQKQIDKVECERDTAPAACKETEKKRHLLLQLKSIGPTNAALLSREVYYRHFDNQRQLGSFIGLTPSPFKSGDEEHCQGISRTGSGHVRAAMIEAAWLWVQHQPKSALTRWFNQRTAGQSKRVRKIMIVALARKLAIALWRFVELGLVPEGAILSPRVIAKAR

SEQ ID NO: 448069 - protein, 385 aa, unidentified
MDQTSSSMLSANILHCALELSKKSWLLAIQFPDREQPSLYSIESGNTEKLMAKLIAARDSWAKVSGAPATITLCYEVGHDAFWLARFLKAHGIECLVIDPGSLQVNRRGRRVKTDRVDVKMLLRALIAWCRGERHVWSLVRIPSVDEEDLRRSHRERSRLVRERTAHINRIKGLLFAQGIRGINIKSQYKTLAVDKLVTGDGHRLPPRLSCEVAREIQRLAMVQEQIAEIERERDTAPTPCEATERKRHLLLQLKSIGPAISALLSREVYYRQFANRRQVGSFLGLTPSPYSSGEEERCQGISRAGSGHVRAIMIEAAWLWIRHQPKSALTRWFVERTAGQSTRLRKIMIVAVARKLAIALWRYVEHGLVPQGAILNPPTTGNAR

SEQ ID NO: 448070 - protein, 343 aa, unidentified
MTYFVGLDVSQKITAICVVDDTGRRLWRGQCPTNPEQISILVRRHAGDDARIGIETGAMTPWLVHELRNLGLEVVCLDARHARAALQMQINKTDQNDAEGLAQIVRTGWYRSVHVKSFESHRARALLGARTQLIGMTTRLSNHIRGVLKTFGLLPGAMRGLPFDRKVEALILHRSDVALIVRPMLVAWRQVREQIAVFDKAIRVLVRSSSACRLLMSVPGIGVLSALAYVSTVEDPGRFSRSRSVGAHLGLTPRQYQSGEVDRSGRISKCGDTLARTLLYEAAVVILTRLKKASSLKDWGHAIARRSGNGKARVAVARKLSVILHSVWRSGQPFRWPEHANAA

SEQ ID NO: 448071 - protein, 341 aa, unidentified
MAEYVGLDVSMKETALSIRRDGKRVWRGKCASDPKLIAEVIRRRAPGVARVVFETGPLSVWFYHALTAEGLPAICIDARHAKAALDMAPNKTDAHDADGLAQLAEVGFFREVRVKGFDSMLGRTLVAARNRLVQITTELSNQIRGLMKTFGLVVPAGKGSRFEAHVRALLADQAGLAPILLPLLEAWRAMRLRAAELGRQLVASARRSEACQILMSVPGVGAVTATSFATAVEDPENFRRSRSVGAWLGLTTRRYQSGEVDYDGHISRRGNTHLRGLLYEAATVILTRTSAESSLRTWGLKLKERIGFKRAAVAVARKLAVVMHAMLRSGQLFDRTAGMAA

SEQ ID NO: 448072 - protein, 345 aa, unidentified
MKKIAIGIDFAKEKFDVTVKNVTNGTSAYGQYPNTPGGGRSMVRMVRKFAKGIASSEWLFCGEDTGYYSQTIARYLTEKGYFLWLQNPYAIKHSEGDIRRGKDDKADSAAIADYAHRYEDKARKYELPSEASEELHLLLTRRDAYVRAKRVIQSGANEIPKRDKQGETVTLIKASTRHLLKEIDDEIDRLEQQMEEIVKKEEAMQKNYEILRSFTGIGIVNSMCFIAYTDNFKKFDLNARKIATYWGVAPFGKDSGKTVHVAPHVSSFCNHWLKAILSNAANTAIVWNPVIKPYYERLEKAGKCEGICRNNVKNKIIQTITAMIRKGEKFDPEFKFTNKNGADKC

SEQ ID NO: 448073 - protein, 421 aa, unidentified
MPQPEFSAYIAIDWADKQHYWCLADAQGSRRDQGDLRHTPEAIDTWVAGLLARFPEGSLAVCLEQSRGGLVYQLSKYARLVLYPVHPATMASFRQAFFPAGAKGDPGDAALLLELLLQHRQHLRRLEPDTVETRLLGMLIELRRRLVDERTRQSNRLTAWLKMYFPQPLNWIDNIDAPLGCDFLDRWPTLQQLQRAKAETVERFFREHNSRSETRIQERMQAIRSAMAAVEDPALLKAGAAATASLVALLRALNASIASLDQHIAEQFPKHPEADLFAGLPGAGPVLLPRLLVAFGTRRERFQSASELAAYSGIAPVTKQSGKSKSVHFRRACSSFLRQTFHEFAAHSVAKSPWARQFYDQQREKGKRHHAAVRSLAFKWIRILFRCWQDRTPYDEARYLEALERHRGTKDLPPDCENRSA

SEQ ID NO: 448074 - protein, 356 aa, unidentified
MSIVAHTRPFVVGVDAHARTHALAVLACPTGEVLDEAQFPATTAGLARAVAWVARRTGADLDALWVIEGVGTYGARLARAAADAGYAVAEAPRMNARANRGVGKSDPLDARRIAQAAVPLDHTQLRLPRTDEGARAALRILIASRDHITNERTAAINALIALLRVVDLGIDARGTLNTGRISEIAAWRARAEELSIGVARAEAVRLAKRVRTADRELGDLTRQMTALLNESPAAGLLDQPGIGPVTAAIAYAAWSHPGRIRSEAAFASLAGVNPIPASSGNTVRHRINRGGDRRLNRALHMAVVTRMRMDPETRAYVDKRTAQGRTPREIRRSLKRYLARQIYRQLNATITPAAAA

SEQ ID NO: 448075 - protein, 427 aa, unidentified
MSATQNEKIRQVTDTAMVIGVDIASEIHWARAFDWRGLELGKAVKFENSAEGFNFFLRRASELAVEQKKDSIMAGLESTGHYWFTLAAHLQGGDFKLVLVNPYHVKRSKELDDGHPSKSDKKDTKTIAKLVLEGRYVYPYIPQELYAELRVAMNCRWRVRKELASLQNQIQRWLKIYFPEHGKVFGRFTGAGSMALLHSAPLPSDLISLGVEGISGIWKQMKLRGIGKKRAQRIYEAAQTSVGCTTGMEAARMELQILLEDYDAKLQQYERVMQVVENLCSQIPTVAELLKIQGLGLVTVAGLFAEIGDIRRFESPHQIQKLAGLAITENSSVKHKGPTEISRRGRARLRAILFRAAIPLLAKNREFQLLHRYYTTRQDNPLQKIQSVIAICCKLLRVFYALATKGCAYSPEKMLADIQRNQPLKAA

SEQ ID NO: 448076 - protein, 369 aa, unidentified
MNNGSTVVGLDVHKATVVAAVLPPGADRTRETVTIENAPTAIARLVTRLAARGPLAFVYEAGPCGYEVQRQLTGLGQPCAVVAPALTPVRPGDRVKTDRRDAEKLARLYRAGELTPIRIPTRAEEAARDVVRVREDVLADRLRARHRLGKFLLRQGRVYRETKAWGVAHRAWLRSQRFEWPALQQTFAAYLRALEDVEAQLEALDQQVADLAQQAPYRLLVQALRCLKGIDTLSAVTLAVEAQEFRRFPRARAFMSYTGAVSMERSSGGTVRRGSITKAGNAHLRRILVEAAWSARHGTGVSPALTARRKGCPAEVVRIAKKAQVRLHRTFWRLTSRTKPAQVAVVAVARELAGFVWAIAHQVPEGGPA

SEQ ID NO: 448077 - protein, 339 aa, unidentified
MFYVGLDVSVARTAVCIMDAAGQVVREQSVPSTPEAITAAIRASGKEVERVGLEAGINSAWIARGLIEAKLPVVVIDATHAAAALKTGFRNKTDKNDARGIADLMRVNKFRAVSVKSVAAQRDRALLTVREQLRQQSLDARNVIWSILQVEGLKPPKLTNLAFQALVAQSLDDEALAPLLRPLVAVVEHIDGQVAGLDKEIARRAKASAACKRLMTVPGVGPLVALTYAAGVDDPARFSSSRTVGAHFGLTPRRFQSGEMDWSGGISRAGDAGVRRALYQAANVLIHHSRGWCALKSWAVRVAKRRGLGKAKVALARKLAVVLHKMWTTGEDYRLNAAA

SEQ ID NO: 448078 - protein, 330 aa, unidentified
MGFRYFLGVDVAKAKLDCLLLDSVEQRRRSKVVANTPEGFEQLVKWLTKQGVGCQQVHAVLEPTGVYHERALFALSQAGIAVSLVNPAQLRRFAQGLGIHTKTDACDSAVLARFGEMIKPAHWQPAPSKARALRALLARRDVVAQDLQRERNRCEALVIEDTPERVRQSLTDTITFLEQELQALQKSIDEHIDDDPDLKRIWDLLQSIPGVGQRVADHFTALLAGRDFKSAEQLAAYLGLVPIEWQSGTSIKGRPRMSKAGPASLRQLLYMPAVVATRHNPHVKALYQRLLAKGKAKMSALGAAMHKLAQLCFGVVHTGQPYRADWPGRA

SEQ ID NO: 448079 - protein, 335 aa, unidentified
MNPVRIHIGVDVGKDSLDICYPDGTKEKARNVKSCRTKLIKKALKLGAIISFEATGPYEEPLAEECLARGVRAVRLDAWGTRKYAESQGRIEKTDAIDCEMIRDYAMSLKDDKLHFIKPRSQAHKALKRAVSTRKNLMKARAIIYNQYENLPDAGMRKCLDQTLARLDREIARIEGECDAAIASDDRMRELASRFQTVKGVGPCLTRVVLAYCPDIGEFSDGGIAKMCGDAPIDYESCTIKKKAKPKRGRTDLRKAMYMAAVSASRSNHILRPIYQRLVAKGKPRKVALTAIARRIAILLNNIAKHPDFIPARDPKDVARAALPKRGRGRPRKAE

SEQ ID NO: 448080 - protein, 338 aa, unidentified
MKVSTVGLDIAKQVFQVHGVDSKGKIVLRKKLRRGQVAEFFAGLEPCLIGLEACGGAHYWFRVLSRFGHDVRLIAPQFVKPYVKAQKNDANDAEAICEAVSRPSMRFVPSKSIPQQDMQCLHRVRSRLIGCRTQLVNQIRGLLSEYGVILPQQVARLRRALPEVLEDANNELTMFARSLFRSLYEELVELEKKVEATDIQIDRIFRDDPDCQRVAAVEGIGPVTATAVVAAIGQGRSFQNGRQFAAWLGLVPRQYSSGGKSKLMGISKRGDPYLRTLLVHGARSIVYHSKSKTDQRSRWIQDKQQRLGTTRACVALANKNARILWSLIAHEEVYRPAA

SEQ ID NO: 448081 - protein, 499 aa, unidentified
MNNFAAPKMKSGEKVLRSRHACRGRIAPGGSRSVVSYPTRIQTSLPARPAAPVPTSERTKAYEAPGIRSTHDGATTHTHKTTRMKNWKDLTHYLGFDWAKDHHAVLIVNGEGQIVADFEFAHSLEGWKSFAEKTSAWPNLAVAIETSQGAAVDQLLQRDYTVFPVHPVAAQSYRQRKAPSGTKTDHLDSWGLADALRVDGHGWKPLQPIDPLTQQLRLLCRDEVSLIEQRTALVNQLQQALAEYYPAALEAFDDWTDSFTWEFVLAFPTPQALVIAGKRRWEKFLHTHKLWRPQTAEKRLKLFAQADQFKASEPIIRAKSQLAVSLCKLLCTLGQQLKLYRKQIEALFRDHPDHDLFGSLPGAKKVLAPRLLGAVGNDPDRYGSQEVLQCIAGTAPVSYQSGRINKVHIRWSCDKFLRHTVHLWANCFRKASIWGQTYYQQKRDEGMSHTCALRCLGQRLLKILFRMLKDKTPYDAELHARNQKKHGSWVMKLVNEPAP

SEQ ID NO: 448082 - protein, 378 aa, unidentified
MSVALPEARFFTGIDWASAEHAVCVLDAAGKITAQFTIKHSAEGIASLVRRLARYGDPADLPVAIERPSGRLVDLLLEAGHPVVPVSPNAIKTWREGEVLSGAKSDAGDAAVIAEYLRLRSHRLAPAAPYSGETRALRTVVRTRDDLVAMRVAATNQLSALLEAHWPGATAIFADVESPISLEFLTRYPTPAAARHLGEKRMAAFLVKHGYCGRKPAVQLLDRLRQAPPGSTGEALTEALRDAVLAMVAVLRAVNGALKDLDRSVAAHLGEHPDGQIFTSLPRSGQINAAQMLAEWGDCRQAYDGPDSVAALAGVTPVTRQSGKHRGVEFRWACNKRFRRAVTTFADNSRHASPWAAQVYAQARASVDAHLNFLRPAH

SEQ ID NO: 448083 - protein, 320 aa, unidentified
MAKRTTICAGIDTGKRKLDVALDGNSEQLQVENTAEGHKALLEWLGRRKVKRVGIEASGGYEQAVVAELRRMRFVVVVFQPAQVRAYAKYRGQRAKNDRIDAALIAACAAAVNKIHPAPDARLSPLAGQLTLIDQIGEDITRFKNRLESCRDARIQKLWKEDIVRVAKRERVEFKALVAAIREQHDLAARLDLIYSVGGAGLPTAVAILVRMPEIGQISREQAAALAGLAPYDDDSGEHIGARHIIGGRKRLREALYAAALAASFRWNPQLIALYKRLIAAGKGHKRALIACARKLLVFINAVVARGTPWQADMSAVPAA

SEQ ID NO: 448084 - protein, 355 aa, unidentified
METQTNLEKSFFENKELFVGMDVHKAKWVVTVRSYDLELKTFSMQPLAETLEKFLLSTYPKAKYKIVYECCFSGFWIYDYFFEKKYSIIVTPTNRIYKDGNTIKTDKIDSRKLAFQLSRGLLREVMVPAKKIREYKYIFRIYDKQKMRKGQILRQVKAFLEQKNHPLKWEKWNKGLIEKLKLLTFEDKLFDLKFGNLLKEYEYVVSQIKDSEEIIERIKEDEVLGPRITRIEKINGIGIISAVRMSVYLFDRKDRFESSEKLNHHLGLTPSERSSGDKVRRGRSGMCGNRQLRSIIIQLAWKSVRKDGALLDKFERVYKKSGSKQKAIVAVARKLMSKLYAIIIKEEAYRVNLAA

SEQ ID NO: 448085 - protein, 313 aa, unidentified
MDTAVYIGIDVAKAKLDIAVRPSTEQWVAEHDEEGIAALVARLHALRPTLVVLEATGGRELPVAAALATAGLAVAVVNPRQVRDFARAIGQLAKTDALDAQVLARFAEVVRPTPRPLPDAQAQELSALLTRRRQLVAMRTAERQRLDTALRAVRPHIQRHIAWLEQDLGDLDRQLREAIQASPLWREQEDLLRSVPGIGPATALTLLAEVPELGQLDRKAIAALVGVAPLNCESGTLRGRRVVWGGRARVRAVLYMAALVATRHNPVIRAFYQRLCAAGKPKKVALTACMHKLLLIANAILRHRTPWSAPAGA

SEQ ID NO: 448086 - protein, 315 aa, unidentified
MAMPVSVAKPIVGVDVAKDELVIYHAETDRLEAIPNTKAAIKKWLKELPAPVDVAIEATNIYHQEFADLAYAQGCVIYMIGGYELSHYRKGVKVRAKTDALDARLLARYLNNEGHQLHPWTPPSPLYCRLVSLFRRRAALVQARVSLKQSWSNEPLLKKAFENQIKAMQRLEILLEKTIQTQLEAAGLGAQLKRCMKVEGIGLLNGARLLTSFQRGDFRNADAFIAFLGLDLRISDSGKKKGRRCLSKRGDPEARRLMHNAAMSARRTAAWKGFYEALRARGLSTTEALVALARKLARVVFALLKNQSEYLPKGI

SEQ ID NO: 448087 - protein, 396 aa, unidentified
MRNDVTIYVGIDFSKEKFNACLLMEQGVMGESEFPNSKTGYLKLTKWVKNTSELGRSFDSSLVLLCGEHTGTCSIGLCEYLYAKGMKIWLESALKIKYGSGLKRIKDDKADAEMIAYYAKRFYEPGSCALFEPDSADLKTLRTLYQFRNRVVCDRVAIGNRISSGAFDCSTLVRNRMVKHHKEAQKDEKDIEKEMVKLMETSEELASNYQILISFKGIGPITAAALIIYTSNFKKFDNPRKFACYCGIAPFGKQSGTSINTKPHVSRFAHIGIKAAIVQACKSAMQHNAVIKAYAQRLYAKGKHEGIVMNNVKNKVMHIIFKMIQTQTLWEHEYQQKHMKECKAIPGKNGIGATEAAPIINATLKTSSSVVECTFLEEHSFQKNSKKTSSFSCVET

SEQ ID NO: 448088 - protein, 327 aa, unidentified
MEKEKSNYAGVDIGLEWIDAAWYEQEKLHHAKLPNTLAGFKQLVKQCGAGNHYVMESTGPYYMGLALYLHLEGIKVSVVNALVIKRFIQMQLEKNKSDKKDAGWICKYAISQEPELWQSPKEHIIRARQMQTAVMQLVKQRTATINAQKALAQMPVVSKESKRCYERMIDQLNKEIRILEQKLEALLKEHEEKKMAALQTVPGIGKRTIAMMIIVTDGFRKVDNYRQLSSWAGLSPKEYSSGKTIRGKVRISKMGGKELRNLLYMCSLTAIKCNKSCKELYDRLKAKGKNGKLALAAVGNKLIKQCVAIAKSELPYDEKYLSKNTCI

SEQ ID NO: 448089 - protein, 389 aa, unidentified
MFYVGLDVASEKHDCCILNEKKKIFRSFSISNSADGFDSLLAALAELSSDEIKIGLEATGIYSENLSVFLRRKGFDVSTINPLLIKKHQCATTLRKTKTDKADAKGIAQFIAEEGFQPDLPVSYHIQELKSLSRARFSVVQDRSALKNKVKRLLVLLFPELLGEFSDIFGNSAAALLKQYPSAARLAACHCDTLAALLRKTSRGRFGRAKAEHLRQLAQNSVGNHSSAKAMELRMLLKRIDLLSEQIAEYDREIKIIMDKIDSPILSIPGISYTLGATIAAEIGDIRRFSSPAKLLAFAGLEPSIYQSGKFVPTSGKMVKRGSPFLRWALLQAAGYAPNYSSTFALYRSKKAAEGKPAAVVRSHVAKKLVRIIHSLLTHSTAFSDQLPA

SEQ ID NO: 448090 - protein, 326 aa, unidentified
MSKWYVGIDVSKDELVVAVTGRKPKSFANTVTGSKALYRWAKALATGKPLHVCLEATGVYGYRAAMTLVACPETEVSVVNPAQIAAFAKAQLRRSKTDAIDAQVILAFVQSQQPRPWQPDTDVRRQLYALVAEWDALAETKRRLANRDHSHEYIPDLPREVIRAQKNVARCLDREIARLEEAVIRLCDGAPELKAQVTLLCTIPGVKTTTAVHLLAYGKDTFTTYSRKELTAHAGLAPKHHQSGSSIHGKSRLAKQGDKRLRKALYMPVLCGIKNNPLITARYQHLCRNGKAKMVAIVACMRKLLLIIQAMLKHQTPFNPELKPLT

SEQ ID NO: 448091 - protein, 344 aa, unidentified
MDHFAGLDVSVKETSVCIVDDTGKIVREVKVASEPEALLVVLKNPAYHFKRIGLEAGPLSQWLFSALAEAELPVICVETRHMQAALKAQINKTDRNDARGIAQMMRVGLYRPVHVKTFRSQKVRMLLTHRKLLQSKAIAIENDLRGTLRNFGLKVGMIGKVKFEARIKELVENLPDLAVLVEPLLVVRRVLREQIAILHRRLLAIVRDDDVCRRLMTTPGVGPVVALTYRATVDVPARFRKSKSVGAVFGLTCSKYQSGEIDRNGRISRCGDEMMRVMLYEAAQSMLRSKKWSWLKAWAMQIARRRGIKKAIVALARRLAVILHRIWGDGTEFRWTREQVAAAA

SEQ ID NO: 448092 - protein, 338 aa, unidentified
MDYMGIDHHKQYSHITLMDEKGKKLRAGKVANYRTELEKFLDGKREDKAVIEAGRSSYTMVDLLDELDIDVTIAHPKEVKAIARAKIKTDKRDSFMLAHLLRTDLILEVYKRSPENRAYQRVLRQRAFYVGSITRTKNKIRSLLVQQREEVRDKVLRKRNLFSLSGVKFLKGLNLPDRDKELLSALIKTFVHLEERRNETNGLVEKLYQEMPEARLIRSVPGYGVFLSVLVAVETADIGRFSKASKFLSYAGVIPSVHSSGGKSYHGKIVKQGNRWLRWAAVEAVYPGIKADFDIKCFYHRLKKRRGSNTAKVATARRMLTIIYRMLKENRLYIPYKR

SEQ ID NO: 448093 - protein, 351 aa, unidentified
MLIIGADYHPSFQQIAFLDQETGECGERRLNHSDGEAEKFYRGLKEQGSSVRVGMEATGYSRWFERLLAELSFELWIGHPAEIKTRRVKKQKTDRKDAELLLRLMREGNFPRVWVPSPENRDLRQLLWHRHRLVQMHTRIMNQLQAIAMNEGMRRKTKLWSERGRAELEKLASGPWTSRRRQELLGLLDQIDPVIEELSKAAEQEAHKRPEVVRLMTHPGVGFLTALAYVLIIGTPERFHCGKQIGTYVGMIPSEESSGDKQRLGHISKQGNSLLRFLLVEAAQAAARSNPEWRRRFVRLAIRRHRNIAMVAMGRRLAIRLYWMWRNGCEYSPSMEFGSYAGQLATGHSVQ

SEQ ID NO: 448094 - protein, 417 aa, unidentified
MKNKTNQFKAFVGLDWADQKHDISVVSSAGGDPVHQIITHTPEALNEWLRKLRQQYPDGQIAICLEQSKGALIYHLIGYDFLSLFPVNPKSLARFREAFTASGAKSDFSDADYLRELVSVHHGRLRPWKPDDEQTRTMAFLAEGRRKTVDERTKLTNRFRSTLKMYFPQALELVGETLHSPMALEFLSKWPQLRNVQRAKSKIVQTFYSTHNSRSSERIKERLALISSTLPLTADQAVIKSCLITIKMLIGQIAQLNSAIDEYDMELKSLYDKHPDKYIFDSFPGSGDALGPRLLSAWGTDRDRYDSADSMQKYSGTAPITKASGKSKIVIRRIACPKFLLQTFHEFASCSRRSSIWAQAYYEMKRDQGKTHHMAIRSLAFKWLRIMFRCWQNRTKYDEIKYLQALKKSNSPLLAFI

SEQ ID NO: 448095 - protein, 438 aa, unidentified
MSALPEIDPKAAAIDIGSEEMHVSIAGGVPKVFGSTTAQLHALRDYLLSQGVHSVAMEATGVYWLCPYEVLEKAGLQVLMVNGKYVKNLPGRKTDMKDCQWQATLHAHGLLKGGFVPPERIRRLQDYLRLRADHIAMAASCEQHLQKALERMNIKFHDVIADLTGVSGLKVLRAILKGERNPVALLAICDPQIQKKKAARVCESLVGTWKEEHLFALRQALAGWEFYQLQIAECDQALQQVLEQLTEKVPAPPGLLPTWGRRSGGNAPQIPRLRELLWKLCGGKDPTAIPGISDYTLLQLVAETGTDLGSHWKTEKHFTAWLGVAPGARQSGKRRGSQKRSRNRAGRILCVIARAVGRTADKALGGFYRRLRARRGALIANIALARKLAQMFWQVMVHGLAYVEAGLKKYEDRVAQTEQKLLQKLAKKHGLILQAKPA

SEQ ID NO: 448096 - protein, 323 aa, unidentified
MVVVAGIDVSKATLDVSVSEGPVLSFENSTTGIRKLLRHLERAGVTRAVCESTGGYERLVVGRLRETTIGVDVAHPVRVRAFARACGYEAKTDPLDAQVLSRYGVVFTESDTAQPEADPDREELRQLLGRRRQLVEQRVRERNRLDKGISGSVGKSIRRNVRWLDREIERLDEEYKELLKHSVSLSETAELYQTVPGVGQLTAATLAAYLPELGRWDGRSLTSLVGLAPWSRDSGKKRGSRSIRGGRATVRRALYICALAVLRVDGDLRDFYRRLRDRGKPGKVAVIAVARKLLMQLNAVARRGTPWMKQYESNCPSYQAGSA

SEQ ID NO: 448097 - protein, 399 aa, unidentified
MLAVGIDVSKSKSAAAILNQDGTVHTKPFEFHHNQSETKALIEYLKDQNQQVTILMENTGHYHYPILKAFEEEGLSVCLINAYQMKKYGDMELRKAKTDKKDALRIARYALEKGYSLVPHTSMDQKYEDLRFLARQYDQRMGTLTTNKVFLINLLDETMPGITKLLSLTTRDPETSLTMLFIKRFKSYDRIKKMGKTRFLDSYDKLARKSRNRHAYGYGLAIYELALNSITTRGENEYTLAAQDQCADLVCESQKAADAIIRQMQTLAETLPEYAVLRSMAGVGERLGPLILAEIGDIRRFHSGKALNAYAGNDAPPYQSGTFESHNRHISKRGNAALRKYCFEVMQALKLTRPQDDPVLQFVLKKEQEGKPYNVAKMAGVNKFLRIYYARAMETLKQQ

SEQ ID NO: 448098 - protein, 318 aa, unidentified
MTESRYAGIDVAKDRVEVAISKDTSVKSFTNDGPGHEELAKLLLANEIALIVMEATGGYEFDLACALQAAGLAVAVINPRQARDFAKAMGYLAKTDRIDACVLSELARTIAAHPHADRFVKPLADAEQQTLKALVTRRTQLMGMLNAERQRLAISHPASRASIEKLVKTIREQLKGIEAQLAKHIAQNHADLSGLLKSVSGVGPALSAILIAELPELGRLRNRQIAALVGVAPFNRDSGAMRGKRSIYGGRAHVRRTLYMGALVATRFNPVIARFYKRLLAAGKPKKVALVACMRKLLIILNAMVRSGKPWDASLHSA

SEQ ID NO: 448099 - protein, 370 aa, unidentified
MEKDITYVGLDVHKQTISVGLAEPGRSGGVRSLGTIDNRPVLVGRLVKKLASAHGRLRFAYEAGPCGYGLYHQLAALKQECIVAAPALIPRRPGDRVKTDRRDALALARHDRAGELTAVWIPDAEHEAVRDLVRARYQAVVAMRRSRQHLQALLLRQGRIWNDGKSWTRAHRAWIVGLHWQHPVHQVLVSEHLAAIDQAAARRDRLMQEIEALVPQWRLAPVVGALQAMRGIAPISAITLVAAIGDITRFQTARQLMAYLGLVPSEHSSGPKVRRGAITKAGNGEARRVLVEGAWTYRSAPRLSPALQARQAMLPKDVRDIAWKAQRRLCARYRTLLAKGKPKQVVATAIAREMVGFVWAIAHAAHPAIR

SEQ ID NO: 448100 - protein, 404 aa, unidentified
MYSIGIDAAKGKSTVCILRETGECVLTPRDFKHAKDDLEDLHQTIQKLTGGTDVRIVMEATGIYHWPVLLFLKKNGYFVSVINPLRMKLFAKNYNFRGIKTDKYDSTIIAAYGCEKWFSLQDYSFADNTRDELKRLARSYVSYQKPKIAVKQALDLELEKCMPGIKKILTDDQRLYDFILYFRHYDKITSLSQKKFLSKFDKWAKKKGYRFLSSTPTKIYELASSGIPTVPLDDSCVLIVESLVNTLVTIDKGLNDILTRLHHLASSFPEYDVVLNMSGVGYILAPLLIAEIGDIRFYRSKKSLVCGAGIDVPPYESGQFKASHRVITKKGNSNIRRHLYLVMNALYVTKPKDDTAVYDFMMKKKAEGKLHKQVIVAGMRKFLHIYYARVKERYQELGLWETVS

SEQ ID NO: 448101 - protein, 331 aa, unidentified
MKKQALVGIDVSARYLDVALERGKTSRQDLSFENTAEGHRKLAKKLTRGGMRARICLEATGVYHLDLSLALHATNGIEIMVVNPRAAKDFARAQLQRSKTDRVDARSLLEFNRRMEFVPWQPPSRTIMALRALSRRIQALLVNRAQEKNRLHADEVVADTTPAIQESIERHIESINGEIAALTQAALDIVRADAELKPKFDHLVSVKGIADASAITILAELAVLPNDMTVRQWVAHAGIDPRCAESGTSVRGQVRISKVGNRHLRAALFLPAMVASQHEPQIKAFYQKLIANGKKPMQALVAVMRKLLHAIHGMFQHDENFIGEKFYDGNA

SEQ ID NO: 448102 - protein, 388 aa, unidentified
MVMWPVGVTLFRLSAIEHVGQIGAPARFILLVRTVSWAIAVRCVSPHTREVKMEAMREVLGIDVSKSKLDIELLINGKVKTKVLQNTPAGHKSLLEWIDKSKASRSSLHVCMEATGVYHEALALTLYDAGIKVSIVNPACIKGFGHGENIRNKNDEIDAGLIARYCLAMNPEPWTPPPLEQRQLRGWTLRVQALKDIRQQEENRLEAHTIGGMEDVATHVKTHIIWLDVEIKKLEKEIDDHIDRHPGLKNDAQLIASIPGLGMTTIARVLGHIGDIRRFKNAKAFAAFLGVTPKQRTSGSSVRGRTVMSKTGSSSLRAALFMPSMVARRHNPILRQFADRLLATGMAKKAVIGAVTHKLAHLIYGVIRTGKPFNANFLSNRLAIQDGI

SEQ ID NO: 448103 - protein, 377 aa, unidentified
MICGPSVGWDAGSPSIVDRSFDDRDHLETAGVAVEHAYGSQGCNARMQSGVLTRMLSLPDGGFMSKAVVGVDVSKDWLDIARSDSPEVRRIANSQAAIAAWLLAARKAGVLLVAFEPTGGYERELRDALQEQGVVFVRVHPNQIVAFRKSRRIKAKTDRIDAQLIAQFAAEELLRRGLPIAIAGDETLRELAARRRQLVDAHQAETCRLTLARSAIVRASLSDQIAGLQVSLDAIEAALLAHIAAHPDLARQFALLRTLKGIGPISAMTLIAELPELGRLSGKQIAALIGLAPQNHESGRSSRHAKTGKGRSDIRRILFNAARSAIQHNPVMRAFYQRLVEHNKRTGKIALVAVMRKMLVTLNAIARDQQPWKHHAA

SEQ ID NO: 448104 - protein, 381 aa, unidentified
MQPTLVKDFTRDEAILAVSLELAKSSWKVALYDGRREQPAVHTVAHPQAAGRLAEAMRVVEERKHAWGLGPATRVVVIYEAGQDGFWVARALTGQGYEVQVVDPASIPVARRARRAKTDRLDALRLVLSLWAWLGGERDRLRVVRVPKLEDEARRHWVRERGELQKEIGQHRDRMRKLLRTVGCWDEVDGEFERRLRQGAVVCYDDGALPAELRVRLARECERLALAQRQLAALEAELHQALPAPVQQRIARLMQLKGVGRVGATRLQLELFWREFDNRRQVGACVGLVPQPYNTGESRVDQGISKQGNRRVRALLVEMSWLWLRYQPDSALTRWFMRRTQGGQKRGKRIAIVAVARKLVIALWRYLKDGVLPEGAVLKAV

SEQ ID NO: 448105 - protein, 416 aa, unidentified
MNAAGIDVSSSKSTVAVLRPFGEVIKLPFDVPHSAEELASLAEQLKSIEGETRVVMEHTGRYYESIAKVLHEAGLYVSAVNPLLIKEYGNNSLRKVKTDKADAMKIAKYALDNWSELRDYTPMDTIRYDLKTMNRQFQLAIKQKTATANNLIALQEQSFPGIRKLFDSPVRSDGTQKWVDFTHDFWHTDCVRSGSLNAFTERYRKWCKRTRYQFSTEKAAKVYALAKSAVVLVQKTSVTKTLVQEAANQFTAISRSAETYRSEMNKLASQLPEYSIVMEMYGVGESLGPQLMAEIGDVRRFERKQSLVAFAGIDPAPSESGDYCSRSNRTTKRGSPYLRRTLFNIMKVHLQRAPADEPVFQFIDKKRAEGKPYYVYMTAAGNKFLRRYYGKVMAYFSSLEDLPPVDMDSTGLHHTK

SEQ ID NO: 448106 - protein, 353 aa, unidentified
MMVLGADTHKRSHTIAAVAAVTGELRGEKTVAVGARGFGALLIWARGLDGERVWALEDCRHVAGSFERFLIARGERVLRVPTKLMADSRRAARTRGKSDSIDAVAVARAALREGLDTLPAAHLDGPELDLRLLVDHRERLVRQRVGLNNTLQWHLHDLWPELELPGGALFSTKWSTKVGRRLARAEQTMRVRIARDELRRLRELTQAIRALEAEIAQLVARIAPQLLSEPGLGPLTAAKLVGEIAGAGRFATDAKLARAAGLAPIPVSSGKTSRHRLDRGGNRQINAAIHRIAVTRARCHPESRDYVARKLSEGKTHRDAIRSLKRHLARRVWRLLQPPAPLTNQTITPTSLT

SEQ ID NO: 448107 - protein, 358 aa, unidentified
MVNVEALQRVIARVGADLAKRVIQVHAVDAAGRVVCRRALAREKFLAWCARLPAGCVVAMEVSSGAHHWARRLLALGLQPKLMSAQLVEPYRSQGSTGKNDANDAAAICEAASRPTMRFVPVKSVEQQSMLCVHRLREGLKAERTACINRIRGLMAEFGVVQAQGAEALQSVLTELIEDASNEMNALARRVIQHAQAQWRELDAHIAWCDERIAEHARQNPAVRRAAALMGIGQLGASAAVATVDDFGQFKNGAQFGAWCGIVPRQHSSGGKTQLGRITRRGDSYLRSLLVQGAKSAVFSAHKRTDPISRWALALRERSGWQVAAVALANKNARILWAVMTKAEAYDPHHVSTKPPAA

SEQ ID NO: 448108 - protein, 345 aa, unidentified
MDKITRIGIDTSKHVFQLHGVNAAEKPVLRKKMRRKESIDFLTTCPPTVIAIEACGGSHHWARLLTSLGHEVKMIAPQLVKPYVKRSKNDAADAEALCEEMSRPTMRFVPVKTVDEQAALMVVGVRGRLIRNRTQLANAIRGYAAEFGISAAKGLAHIPLLLERIQADATVPELARELFASQAEEYAQLEEKIADVDAKLKAWQRTDERSKRLNRIPGIGPIGAALLIMKTPAPELFRSGRQFAAWIGLTPKDHSTGGKLRLGRITRAGDEALRAVLVVGATTVIQHARRSGKASPWLTELLKRKPPKLAAVALANKMARIAWKIMVSGETYNVKLAPALMVNAA

SEQ ID NO: 448109 - protein, 335 aa, unidentified
MEKKKKYMVGIDAGSETFFATIIEVGCRYIAGQEFSNTAEGILSSRKWVEAHGIECSDVLICIENCGVYDELLCYHYYECGYVVSHISGSKVQRAIPPNVEKTDKLDSRRIAEYGDRFYDQIELWQPCLDAVEEVAALMVVYEHALTTAVKLENDVTALKRKKHNCKDAIRHARALAKSSRTRVAKIEKDIQAIIRRSPKGETARNLLTLPGVGKVTVAHVFITTNGFTVHPDGNHLAAHLGISPQRYQSGTSVKRRSASRGFGPKRFRATLHMASKAAARTAFKEYYQRMADRGKHTQLIYNNIANKIIHRICVAMHINGVYDKESDRIVPVAF

SEQ ID NO: 448110 - protein, 351 aa, unidentified
MLLIGVDYHPSFQTIAFFDEETGECGEQKLNHSDGQAEKFYRGLKQRGICVRIGMEATGYARWFERLLAELGFELWIGHPAEIKAKRVKKLKYDREDARLMLRLMRENNFPRIWVPDPENRDLRQLLWHRHRLVQMRTRIMNQLQALAMNEGYRWKKKLFSEQGRAQLEKLALAPWASRRRQELLELFDRMNPTIEELTAAVEREARKRPEALRLMTHPGVGPITALAYVLIIGTTNRFQRGKQVGTYVGMIPCEDSSAGKQRLGHISKQGSSLLRYLLVEAAQAAARVHPDWRRRYMHLAMRRHRSIAKVAMGRRLAIRLYWMWRNGYEYSPSLEFGSYAGQLGTRHDVK

SEQ ID NO: 448111 - protein, 387 aa, unidentified
MPPPNDLSRSLVALDHNSTIIAVVELSQSSWLVGGVVPGIERQPRKKLEPSPERLLAVLHRWRDEAIKAGRNITRIALAFEAGRDGFWLARWLAARGVEAHVIHPSSVAVSREHRRAKTDRLDTELLKRGFLGWLRGERGHCSMVRVPTLAEEDAKRPNRERECLVKERTRLVNRMKGALARLGIRHFRPALRNAAEHLAGLYTPEGSPLPPNVAAELERDIARLGLVIGQIKQIEQARRQRLEEQPESRPHAMVRLLVRVVGIGTETADMLVNEVLSRPMRDRRAVARYAGLTGAPDESGAKRREQGLAKAGNARVRRGMIPLAWRFLRFQKDSALAPWYQARAADRRAGTRKTMIVALARKLLIALWRFATTGETLEGVVLRPAA

SEQ ID NO: 448112 - protein, 350 aa, unidentified
MKKNSKAVERHPAETIGVDLGDKMSKYAVLNEEGVVVEEGSFRNNVESIAKHFGERSKARVALEVGTQSAWISREFAKRGHEVIVANARELKWITSSDTKNDRNDAVKLARLARADRNLLAPVEHRTAEQQAELAVIRARDALVKSRSLLVNTARSLAKGFGLRLPASITHTFGARALARLAEDLRTAMSGLLEQVDALSLKIRDYNQRIEELAVRHPEVERLASVPGVGTLTAATFVLTLGRKERFAHSRDVGSFLGLRPQQKQSGERDPKLGISKSGDRYLRKLLVQCAHHILGHWGKESSLRQWGLSKSDGTSGKKRAVVAVARKLAVLLHRLWTTGEIFKPFPKMA

SEQ ID NO: 448113 - protein, 360 aa, unidentified
MRIQRTSVGLDVHARSVVGCAIVEDTGEVIRHRFGYDPAAVLEWVRSLPQPAAVTYEAGPTGFTLARLLTASGIDCVVAAPSKLQRPVGDRVKTDARDALHLARLLRLGEIVAVTVPTIEQETARDLVRAREDNRGELMAARHRLSKLLLRHGIIYDGKQAWTATHDAWLRRQRFNHAGLQAAFDADYEAVQQARARKDRLDVIIEQMATTSDYAPVVRRLGCLRGVSTLTGFGLAVEIGNWERFTGSSIGAFVGLVPSEHSSGQSRSQGSITKTGNTHARRLLVEAAWHHRKAYRPGAVMHARWAAAPSLAASRGDDGNRRLHQKWQHFTARKKRPTIANVAIARELAGWCWSLAVMPD

SEQ ID NO: 448114 - protein, 376 aa, unidentified
MSNLRFIGLDVHAETIAVAVAEPDGAVRSLGVIPNRLESIQKLVKRLGPTTQRRVCYEAGPTGYVVYWQLTALGVQCSVVAPTLVPVKAGDRVKTDRRDARKRARSYRAGDLTTVWVPDAAHEALRDLVRAREAAKKDQLRARHRLGKFLLRHGRRPCRPVKAWTPAYLTWVNTAVRFEHPAQEATLLDYVHEVEHAARRIERLEHAIDEAIKTAPVRMRAVIAALQALRGIAQVSAVTIVAEVGELSRFTTPRQLMGYSGAVASEDSSGGRIRRGAITKTGNAHLRRIIIEAAWAYQHRPSVGAALRKRHAPLDAAVIAMAWKAQHRLHARYRSLTARGKSKQSAMTAVGRELLGFIWAIGRTAERPRLGAPVAA

SEQ ID NO: 448115 - protein, 435 aa, unidentified
MIDRILPGFAALDLGAAKIFAATADVPVKTFGTFTVDLRSLSQWLREQRVEAVAMEATGVYWIPVHDILQAAGFKVTLFHGAHARNLPGRKTDASDCQWHAMLHSHGLLRPCFIPPEPIRKLRSFYRLREDHLSMAAAHIAHMQRALDLMNVGLHRVLSQITGVSGLRVLDAILAGQRDAAVLAALCTDQILKKKKAEVLASLEGDWQEHHLFALRQALEAYRFYHQQIAACDEQVETLLRELNADRPIQKPPPGQKVKVVRHNAPQIDNLHGLLLTLTGGRDATLVPSISPLSWLKLTGEVGIDLSSFRNEKQFSAWAAVSPWRHQSGKRKRRHERAKTKVGQIFREAAMSIAKSKHLALGGFYRRIKGRRGAAVAMVATARKLAVLYYRVMTRGLHYVEEGLAKYEANYRAQMERNLRKTAARLGFTLQPKTA

SEQ ID NO: 448116 - protein, 363 aa, unidentified
MSIVGGLDVHRRQITFDYLDTDTGQVCCGRIEPADRPGLRAWLARRFTGRVDVDLAFEAGPGWRYVAEEITAAGFRAHLAEPAQTAHQRGPKRRAKTDRADARLLRDLLLKDDLPRCWIPPGIVLDCRAILETYRDLREQHEGWLQRIRAVLFHHGCPHLGPQNLTTRIGRDRLAQAAGEHLPPTGRWQIETALGQVDRLEADLVRLYWQIAQIARRMRGPRLLREQLYGVGPVTALALTVWLGGSNRGFSSRGAVRFTGLDVTVHSSDGKRSSHEHLSKQGPPVLRWALYEAGKLSAQHRAPDHTYYAAVAERIDGKRATLAEARKLTRQAIHLLAGLGDDAFTLDALRGATKPIHPLGLTA

SEQ ID NO: 448117 - protein, 378 aa, unidentified
MRFYNQAHRFYCGVDLHARTMYLCILDHRGQVVLHKEVPCEPAAFLEAIGPFRDGLVVACECLFCWYWLADLCQAQNITFVLGHALYMKAIHGGKAADDKTDSAKIAHLLRGGNLPIAYVYPKGLRETRDLLRRRMYLVHKRAEVVAHVVNTNSQYNLPPFGKKLIYARNRQALKIAQRFSDASVKKSIEVNLRLLDCLDDLIADVELYLERTVKVDDADTFYRLRSIPGVGKILALVLFYEIHDIKRFAGEGEFLSYARLIRPLKTSAGKVKGNGGGKIGNAHLKWSFSEAACLLARESDQAKRFLARKEKKHGKPKALGILAARLGRAVYHMLWQKKPFDPKRFWNGEPGVTPEKLKKSVVKRPRRAKGSRCVLQA

SEQ ID NO: 448118 - protein, 339 aa, unidentified
MSEISMIGLDIAKSVFQVHGVDGAGAVVVRRKLRRSQVVAWFAPLPRCVVGIEACATAHHWGRALRKLGHEVRLIPPAYAKAYVQRNKNDPADAAAICEAVGRPAMRFVAIKTELQQAAVGVHRVRDLLMKQHTMLRNQLRGLMAEFGIVAAKGRRGFSALLAILADAEEPRIPRPLREGLMAIAETLRGIDRKLEVIDRQIVAAGRADATYRHLITAPGYGPILSSAMAAIVTDPAPFRRACDFAASLGIVPRQEGTGGKVWLGPISKRGNGYLRRLLVNGATALINSKRAKDDPWLAKLLATKPRKVVAVALANKMARIGWALMIRQENYRMMPAAA

SEQ ID NO: 448119 - protein, 310 aa, unidentified
MDERMVGIDVSKDRLDVHLLPGGESFAVSRDGEGIAALVERLGSLGPAIIGVEATGGFETVVAAGLAGAGLPVVVVNPAQVRAFAQALGRRAKTDPIDAAVIARFIAATKPDLRPLPDAAAHLLAELVARRRQIVQMMASERQRQKRLHERRVARSIARLITALEKELADLDRQIDDEIRGTPAWRAAENLLRSVPGVGPIVARTLLAELPELGSLSRREIAALAGLAPWTRQSGRWRGKSFIGGGRKNVRTILFTAALVAARHNPVLKTFRDQLVQAGKPKMVALIAVARKLLTILNAIIRDKKPWAHV

SEQ ID NO: 448120 - protein, 415 aa, unidentified
MKTTNQYQTKRAQPRKPGKARGPAQRDTKEVMAELVARLSQKLDTQSGRFCTDDEVNRTLAPNRDRLTVGVDLGDKRSNFCILGLDGETLVEGELQTSQLDFSELFGALAPARVVIEVGTHSAWARDAVALCGHEVLVANPRQMEGPKKRKRKNDRIDAHKLARVGRMDPQSLFPIHHRSVEVRRDLLGLRARSALVAVRTELINATRGLVKSMGARLPKCSTQAFPKKVERELPAEVREILLPLVEIVKCVNASIQSYDERIEELATDKYPQTKLLRQVKGVGPVTSLAYVLTLEDPKRFSRSRDVGPYIGLVPKQEDSGDRQPQLRISKMGDVMLRSLLVGSAQYILGPFGPDTELRRYGLRLSERGGKNAKKRAVVAVARKLAVLLHRLWVSGAVYEPLRQGLLPTAGRNAA

SEQ ID NO: 448121 - protein, 450 aa, unidentified
MHYKLRGNPMPVLILFLMKGGDTMNNALTTTLFIGIDVSSRTNYVFTLDFFGTKLLSFQVKNNLPGSEQIISKVCSCLKENNLTHLTIAMESTSFYSWHLANTLSSHEALLWFKPKVYCINPKVIAAYKKSFVDIDKTDPKDAFVIADFARVGKITTSPWNGAEYIAIQRLTRCRLHLMENISREKSYILSNIFLKFSELAVLDKNETPFSNTFGVTSEAVLTDYMSVEDVANTSIEDLISFLVEKSKNRFSNPEATAKILQRAARDSYRLDKALYDPLNATIAASLNCIKALEKEVKSLDKAIEKAVKGFGNHQYQCLMSIPGIGPVFAAGIIAELGDITKFNNQACVAKYAGLTWRKKQSGNFTADNTFLTKTGNKYLRYYLLEASASVIRHIDEYSAYYQKKSDEALVHKHKRALALTSRKLVRLIFALLRNNQLYTSNEVVEKATI

SEQ ID NO: 448122 - protein, 340 aa, unidentified
MKLYGAIDLHSNNNVTVLINEKDEVVYRKRLPNDLKLILGQLAPHQSKIEGIVVESTYNWYWLVDGLMERGHRVHLANTAAIEQYSGLKYTDDDSDARWLAHLLRLGVLPQGYIYPKEQRPVRDLLRKRSQLVRYRTANLLSIQNLFTRNTGQSMSANQIKGLQVEEIDGIVPANDLALAIKANLSVMRSAEQQVEVLEQTVTGRVKLRPEFRFLKSVPGIGPILSLTIMLETGDIRRFSTVGNFASYCRCVGSQKLSNGKRKGSGNTKNGNKYLSWAFVEAANFAIRFSPKVRSFYQRKKAKSHPVVAIKAVAHKLCRACYYIMRDRVPFDLKKAFSAK

SEQ ID NO: 448123 - protein, 342 aa, unidentified
MRSVKRGGRSCHFMSALVCGLDVHKDSTYATILNNEGKVINQTRMDNERVLSYLTRYKVNKVAMESSTAVAPLYRQLASKGFEVVVSHPKKTRYIAEAKIKSDRVDSKAIAELARLDALPLSYVPDTETSRLREKVRRRAFLVRQRAKLKMKIKSILLYEGIKPSFSHGLFTLKGVEWLHSLKFESIDSYLRIMNTFNREIKLLSKQLLGLAEEDEDVKLLMTVPGIGYYSALLVKSEVGGINRFPFAERLCSYAGLVPSTHASGGRVRHGGIVKEGSRWLRWVMAQAAQTHVRSFDSNVTRMYHRVAEKKGTRVGLTAAAHKLLLICYSVLKNKRPYYDQA

SEQ ID NO: 448124 - protein, 343 aa, unidentified
MDHFAGLDISVKETSVCIVDDTGKIVREVKVASEPEALLAVLKDCAYRFKRIGLEAGPLSQWLYSGLAEAELPVVCVETRHMQAVLKARINKTDRNDARGIAQMMRAGLYRPVHVKTLRSQKLRMLLTHRQLLLSKAIAIENELRGTLRNFGLKVGMVGTVKFETRIRELVENLPDLAVLVEPLLVVRRVLRQQIGLLHRYLLTIARDDDVCRRLMTVPGVGPVVALTYRATVDVPARFKNSKAVAASFGLTPCKYQSGEIDRDGRISRCGDEMMRVMLYEAAQVMLTRTNKWSWLKAWAMQIARHRGMKKAIVALARRLAVILHRIWVDGTVFRWTREVVAA

SEQ ID NO: 448125 - protein, 354 aa, unidentified
MSENLNSAVAVIGIDIGKNSFHIVGLDSRGAIVLRQKWSRGQMDARFANMPPCLIGMEACVGAHHLSRKLKTFGHDARLMPAKYVRPYSKGQKNDFRDAEAIAEAVQRPTMKFVATKSADQLDLQALHRVRERLVSQRTGIINQIRAFLLERGIAVRQGQRFLRAELPRILATPPDVLSPRMVRLIEDLASDWRRLDGRVESLSGEIEAVARQDADCERLMSVPGVGPIISSAMVAAIGRGEVFSKGRDFGAWLGLVPKQTSTGDRTILGKISKRGNRYLRVLFVQAAWVVLIKSNSWERHGLKPWIEAAKRRLHRNVLAVALANKLARIAWSVLARGRAFEARSAIAPATQSA

SEQ ID NO: 448126 - protein, 356 aa, unidentified
MNKRSKLNFSGQAIYLGLDVHKKSWSVSIFTKYGEYKTFSQPPEAEVLVQYLQRHFPGAQYYSVYEAGYCGFWIHDHLREKGIENIVANPADIPTRDKERRSKRDRIDCRKLARGLRGGEIEGIYTPPRWRLEDRSLIRTRLSMGRKQARCKNQIKSMLLFYGVAIPEQREMGHWSRRFIRWIEGIRMERTSGDVALKLHLEELCYLRQIIAKLNRSILALARTQEYRSWISLLKTIPGISTLTAMIVLTELYEINRFRSIDQLCRYVGLIPDTQGSGEKEHVGGLTRRRHSSLRWLLVEASWIAVRKDPVMMEAFNEYCKRMRKTKAIIKIARKLLNRIRYVLKNQAEYVTGVIE

SEQ ID NO: 448127 - protein, 361 aa, unidentified
MSSMPEPTSSDPTEVVLGIDTHKDIHVAAVLTALGVLLATSTFPATAAGYRRLLAWARGFGPLHRAGVKCTGSYGAALTRYLSAETITVIEVNRGDRAERRRRGKTDTLDAETAARAVLSGRATAIAKSGDGQVEMLRMFKLAKASAIKSRSQAINQLKAILVRTEPALRESMTGLSNPALLRRCAQLTASDPHDPAGAAALTPRLLAHRVLTLTDEIDELNSHITAAIQTRAPRLLQRYGVGPDTAAAQLLVAGDNPDRLTSQASFAALCGVSPVESSSGKTHRRRLNRGGDRQANPALYTITIARLRWDKRTQHYIRRRVAEGKTRREAIRCLKRYICREIYRDIIATPDPSLRASSAA

SEQ ID NO: 448128 - protein, 321 aa, unidentified
MNYLGIDIAKAKVDCCLKLAGRYLHRTFANNIDGFAKLVEWVGKHGNDPVHACLEATGIYGEAVAVYLHDAGHIVSIINPLAIKKYIEMKLIAVKTDKQDARNIADFCSEQKPKAYTFPSESERILKNLTRHLQYLTDMQTAQINRAKVAHTVAKHYIDEMLQHIQKQMAEVEAEIARHIQRDESLRHKAKLLQSIRGIGKRTVPHLLTLFVSRKFKNAKQVVSYIGLNPILKQSGKQKIRYCAISKQGDKHIRTSLYMPAVVCFRLPEFKAYIQRLENAGKKKMQIVCALMRKLITYCFAVLSKDKAFELHGTLTLSSIG

SEQ ID NO: 448129 - protein, 411 aa, unidentified
MKLFCGIDWAETHHDIAIVDGGGNLVAKKRITDDADGFAQLVELLAEAGDSAEHRIPVAIETPRGLLVASLRATGRSVYAINPLAVARYRERHSVARSKSDHADAMTLANILRVDAHVHRKMPADTELCQAIAVLARGQQDAIWRRTKASNELRSLLREFYPSFLAAFKGRFQIGIASLEARAVLAIAPTPAVANKLSASRLAAALRRAGRTRNIDQVAAEIKTALRAPQLRQLPLVESTMGRQTLALLAALDAACVSVDELGQAAAELFHTHPDYAVITSFPGLADSTGARVLAEIGDDRTRFADAKALKAYAGTAPITRASGRSISITRRRIKNDRLAAAGWVWGFAAMANHPAAQDHYRRRRDQGDHHAAAIRHLVNKFLGQLHYCLQNQQMFDTVKAFPPPNEGLAA

SEQ ID NO: 448130 - protein, 372 aa, unidentified
MQQKSKVFVGLDTSKLKIAVALAEDGRQGEIRFLGEIDNTPEAVRRLVGKLASRHGELLFCYEAGPTGYGLQRQISALGHECAVIAPSLIPKRPGERVKTNRRDALSLARLHRAGELTAIWVPDPGHEAVRKLVRARETAMEDLREKRQHLQSFLLRHGRIFPGRKSWTRAHARWLAELIFEHPAQYLVLREYRQAIEDAEARLERLNQQVAEVVKTWSMAPVVEAYQALRGVALLTAVTFVAEIGDVRRFESPRQLMAYLGLVPCESSTGERVRRGSITKAGNPRVRRVLIEGAWTYRFPARMSRVLQERQEGLPAIVRAIAWKAQVRLCARYRRLMAAGKRQTVVTTAIAREMAAFLWAIGREIEPRSAA

SEQ ID NO: 448131 - protein, 353 aa, unidentified
MTRNKRSIIGGVDTHTATHHAAVIDVNGRLIADAEFPTTPAGYASMLTWMRSKGKLGLVGVGVEGTGAYGAGLARYLHDQGIDVLEVPRPDRRIRRQRGKSDPIDAEAAARTVLAGKASGAPKLADGPIEAIRMLRVTRNGAVQARTATLNTLRSLVITAPEPLRTQLRSLTSAQLVTACAHLRPDLTKLADPVQAAKHALRSMALRAQHLNTETRTLRMQLNDLTQAAAPATSAVFGLGPDTVSALLITIGDNPDRLRSEAAFAHLCGVAPIPASSGKTHRHRLHRGGDRAANSALHIATVVRLRYDPRSRAYADRRTTEGLSMPEIIRCQKRYLAREIFDALRADYAQLST

SEQ ID NO: 448132 - protein, 388 aa, unidentified
MYLIGIDISKYKHDCFIATEAALPIKAFRFDNNRLGFDLFLETLKSLDQSQDIRIGLESTGHYGTNLKQFICASGYTYLEFNPYLTHMFSKALSLRKTKTDKVDAKTISSMLGSVDYKTLHTSFYHINELKKLVRSRHTKMTARSKTLIEITNILDSIFPEFKPFFKERLPGTALFILRKFKSGSRISKFQTKDYDPIRCYSMGKFSYVRFQKLKQLAKDSIGFETQSDLFLLKEAIKSYEYLSILIQSIEEKIEIYMEDIPQTITTIPGVTTISAAIIIAELGDFKNFTNPAQVISFAGLDTSVSQSGMMETRGHLVKRGSGLLRMTFWQITFSSLRLNPVLYDYYLKKRAEGKHHKVAMVHCTRKLIRTIYYLGVNQIQFDQSLFR

SEQ ID NO: 448133 - protein, 443 aa, unidentified
MSARTGTGQHRGGSDSLGVCTMEDERNWFVGVDWASETHHVRVSDARGRKLGARAFAHSGEGLAAMAAWILEVTGAPPEAVFVAIEVPYGPVVESLMERGFRVHAINPKQLDRFRDRFSPAGAKDDTRDAEVLGDALRTDPRCFRALQPLDPVVVELREASRMAEDLKQERNRLGNRVRELLWRFYPQMLGLTDDVAAPWFLDLWRLIPIPEKATRVREVTVDRLLKRHRIRRLSAADVLEALRRPAILLAPGTVSAAVSHREAIAKRLDLVNRQMLAVDERLDRLTQSLAGAQERAGGQRPEPCDVTILRSLPGVGRIVLATLLAEAVEALQRRDDRALRCLAGVAPVTKRSGKSRIVLMRQAAHVRLRNAVYHWARVAVQHDPRSQAKYAALRARGHGHGRALRSVADRLIGVACAMLKAKTIFDPNLASQRAPNLGKPTC

SEQ ID NO: 448134 - protein, 415 aa, unidentified
MSTTPSASSEEATIKYVCGVDIGSQSCVGCICRPDRSTMVKSVTFANAREGWPIWEEKLSELDAPPSQILIGMEATSCYHENLYHELEQRGYVLRLLHPRQTHQFHERQGLRAKTDRLDAMTIARVLLSGEARAGYVPSEQVATYRELVRLHTRLSDEAAAYQNEIQALVVVLFPEFTQIFVDPCGQTALAVLKAFPSAQALDEAGVEPLFHLLRAQKPAHYGRPTAQKLVALAKASVSSGRALAGRSLSLRILCDQLEHTRANLARLEAEIEELLTHDPRVKGLQQVPGFGPKTVAVLRAELGDVQRFARTDEVIAYGGMDIAIKESGLWKGQPKLSKRGSGLLRRMLYMAAMRSISLEGSAFGAYYHRLVERGLKKMSALTAVMRKMLAVAAHLLMHEGEEYDPHKVCGSGAG

SEQ ID NO: 448135 - protein, 347 aa, unidentified
MNFYNNIHPYYCGIDLHARILYVCIIDQEGNTCVHKEISADPDKLLKLLKPYIGNIVVGVECMHCWYWVSDFCNDIGVDFILGHALYMKAIHGGKAKNDRIDSFKIANLIRGGNFPLAYVYPKKMRATRDLLRRRMKIVQHGADLKAHVVNTTSQYNLPPNKVNLKNKDAREQLRSTFPELSVQKNIDLDMTILDCYASELSKIEWYIQQQAKQHNPNHFHLLKSIWGIGPILALTIIYEIGNIDRFESVQKFASYSRLVKCKAESAGKSYGTQGNKIGNAHLKWAFSEAAVLYLRGNKKAQKYLLKLQKRMSKAKALSALAHKLGRCVYFMLKNETVFDENKFLKG

SEQ ID NO: 448136 - protein, 494 aa, unidentified
MSKPKKDATASTKVGKTASMANDYRKRRAKAQAKAAAKSDAEIRRVEGLPVLNSRAAGIDIGARSHWVCVGVSANPDVDVIREFLAYTEGLHDIVAFLRHNQVTTVAMESTGIYWIALYELLEANGFEVLLVDPSYTKQVKGRPKTDRLDCQWIFRLHSVGLLAAAFRPDEKTCQLRAYLRQRANLIRYAGQHIQHMEKALEQMNLKLTETISDITGKTGQSIIKAILRGTRDPQKLAKYRDARIKASEEQIAQALTGSYRDEHLCELKLAFEAWQFYQKQLNEIDAQIEQQLGRMKKDRALPPLKPHKRSGGRKPNHPRFDVRTALYYVVGIDLTEIEGIEEMTALTIISEIGVEMSRFATVHHFCSWLGLCPLLKKTGGRVKSSRTRPGVNRAAAAFRLAANGLHASKGAIGAFLRRKKAQLGAPKAITAAAHKLARIVFLALKHGMTYVRQTQEEYEARAHEQQVKSLHKKARALGMKVMEMPAPEMPPTA

SEQ ID NO: 448137 - protein, 342 aa, unidentified
MSEVTTIGVDLAKNVFQVHGVDEAGATVIRRQLRRRQVLSFFKKQPPCLVGMEACATSHHWARSIASLGHEVRLMPPRYVKPYVKRNKNDAADAAAICEAVTRPSMRFVAVKTTEQQGVLVLHRTRELLVRQRTMLVNALRAHLAEFGVVARVGLPQVKELLAVIADEADERIPALARTCLAGLARQLLSLEREIVASEKRIHAWHRASEVSRRLETTPGIGPITASALTASIGDPSIFKNGREMAAWIGLVPQQNSTGGKERLGRISKQGDHYLRWLLVAGAMTVIRHAKRRGTVDPWLASIIADKPIKVAAVALANKNARIAWALLSHGGTYRRPATAAA

SEQ ID NO: 448138 - protein, 320 aa, unidentified
MRNAVGLDISKLTFDATAIVGNAEYSAKFDNDSKGLDQFSDWLKSLGCENLHICMEATGNYYEDVADYFAQYYSVHVVNPLKISKYAESRFKRTKTDKQDAKLIAEYCQSAKESELVKRQKPTDEQYRLSRLTAAYAQIKSECAAMKNRYQVVKDEEAAKAYAEIIKAMNEQLEVLKAKIKEQTEKPKCKEGVKRLETIPAIGRMTAAVLFHHLTSSQFETSNKFAAFAGLSPQQKESGTSVRGKGKLTKFGNRKLRAVLFMPAMVAYRIRAFPDFIKRLEAKKKPKKVIIAALMRKLAVIAYHVHKKGEDYDPSRYKSA

SEQ ID NO: 448139 - protein, 418 aa, unidentified
MYYLGIDVSKKKSDFLILDEKGERFQRAFSLENSREDFQTLARKLEELNLTPENLLSGLEATGSLWENLYSFLTEKGYKVILLNPYQTRKYHQALRQKAKTDRVDALVIADLLRSNRYLSSSVPEEETEALRELVKLQYQLEGEKKRLQRRILSLLFVVFPEYEKTALKKVFGIATRKVLEKWPTAKDLAIAKPKQIEKLVRSIKGNNFNISAIEKSIETAKNSIYSGRAREVRSFTIRLLLSQLDRTLSSLKKIKDEIEKILSPRDESGSFPGDNVLSIPGVGKGTLATFLAIAGQGGSFFSSAKKVIGYLGFYPQIYQSGEKRRDNVISHQGPNYARQALYMAAVSSIRHNQEMRTLYNKKVSQGKSHKQALIYVAKKIAQMMLALLKSGKSYQPERVFVSPTALPYFRERIPVCV

SEQ ID NO: 448140 - protein, 354 aa, unidentified
MMIIGCDYHPGFQQIAFVDTETGELQERRLEQREEAEKFYRDLAAQGIKVRLGMEASGHARWFERLLGELQFELWIGDAAAIHAKRVRKQKTDRQDAQLILRLMLKDDFPHIWVPSWENRDLRQLLWHRHRMVQARTRIMNQLQAVALNEGVRSKKRLWRDSGREQLEAFRLAPWASRRRRDLLELLDRLTPTIAELTAAIELEVERCPVAQRLQTHPGVGPLTALAFRLIIGQAERFECGKQIASYLGLVPLEDSSGQRRRLGHITKQGNSLLRFLLVEAAQVTVRSLPEWRSKYCHLALRRGRKVAKVAMARKLAVRLYWMMRKEWDYEQLRKFGSHAGKPGNRDGVKMNTE

SEQ ID NO: 448141 - protein, 311 aa, unidentified
MENYIGIDVAKQNFDLCCLNQKEIMQFENNTKGIRKALGLIKKFQPKLVVMEATGGYEALLAAELHAARLPVAVVNPRRIRDFARANGQLAKTDKLDAMVIALFAARMKPPAQEQIDQNSRRIKALITRRNQLIRMRTAENNRQEHVLDGVISRSLNRTIRTIEREIGNVEKLIQEQLDSMPELRAKAGILGSAPGIGQTTAAMLITEVPELGRLNRRQIAMLVGVAPINRDSGTFRGKRMTGAGRRDVRSRLFMPTLVAIRFNPVISRFYKHLLAKGKVKMTAIIACMRKLLTILNFMLAKNEVWNKKCA

SEQ ID NO: 448142 - protein, 341 aa, unidentified
MDISKKVVGVDIAKRVFQLHWIDMETGEIVSLQLKREKFLEHFANLAPCLIGMEACGGSQHWARKLTGMGHQVKLMAAKAVRPFVGGNKSDVHDARAIWTAVQQPNVKAVAVKTEAQQAILAIHRMRQQLVKFRTAQINGLRGLLTEYGEIMPQGKAGVKKGIAEALQRLADRLPAMVIDTLREQWARIHMLDEQIGEIELRLKLWHKEDQACQRIADIPGVGLLTATAAVATMGDAQAFKSGREFSAWLGLVPRQTGTGGRIRLLGISKRGDTYLRTLLIHGARSVLTHAKEPTPWTTELRQRRPLNVAVVALANKMARTIWALLAHERTYQKGFVSQPA

SEQ ID NO: 448143 - protein, 434 aa, unidentified
METDTMKVTIVEEKIKSLNYLIVAYDVSKGKLNYFIKLNNEAGDVCKTEGEIVNRAKHLEGHFAEVKSIADKYGYPGVCVVCEPTGGYEKKFLRMAREYGFFTKYVSGEATSKAKVIESNDAGKNDKKDSRVIYFLAENGKTLTCNARPAVYEHLKIINEYYEDLSNEGARLKNHISSITEQLFPDLSLAASQLYCNVVAGVIELYGLNPYKIAKVKWNMFVKKTEKVIGRKVSGSSLDLLAEIHNNALASVLYLMDKWESDEYENELRFYYKHRQIIEQKKEEYKRKMTDLFETTEEYSSLKEIPVSLFLLSRLIATTGPLGRYESIKQLMRFGGLNLLERQSGKFTGQIRLSKKGNVLMRKILGQIAFSCLIKTGKLYHNFYSSKKEKKGGFYALACTMRKALKMINGVYKNNGNFCIERVFDQHVKIEMAA

SEQ ID NO: 448144 - protein, 375 aa, unidentified
MEGAPMLDTTTFIGLDVHARSIKAVSLDVMTGEVRAATFGYDAGAVAEWVRSVDPRARCVYESGVTGFDLQKRLSGLGVDCAVGAVSKMIKPSADRRRKNDRNDAEFLARMLSVGNVVEVWVPDDECEAARDLTRALEDARDDLSRSKQRLSKFLLRHGLVFDERTPTGRRKGNWTRAHWSWIESIRFAERADNDVLAYYVDAVRRAAEEKARLEGLVEAEARKPRWRRRVDSLRCLKGVDTASAADLVFEAGEFSRFRNARSFAAWVGLTPSEHSSGESDRRGSITKAGNKHLRKTLVEAAWHYLTCSGRPKDLAKGQAPDRGARRHAAKGVRRLVERREALLARGVHNNKANVATARELACWVWAVGLMAEEA

SEQ ID NO: 448145 - protein, 408 aa, unidentified
MRIIGLDIHRVFAEAVALENGELRRLGRIAMTRNHLEAFARTLCLTDHVVVEATSNATAVTEILAPYVARVAVANPLQVHLIAKAKIKTDAIDARVLAKLYAAGFLPEVWIPDAATLARRRQITRRTQLVRQRVRLKSIVQSILHANLIPRCPHADLFGGKGRAWLRAQYLPGDEQEAVEQHIQEYDRLTEVLKGVERDIARAALADPNVTRLMTIPGIDMVVAVGLMAAIGRIERFSNPSKLAAYIGLNPSVYQSGDGAAHHGRITKRGRSNARHLLVEAAWQTVRSPGPLRAFYHRVRAKRGNHIAAVAVARKLTVIIWHLLTKHEDYVWVRQAFHAKKIRDLELRAGYPEQRGQRGRSYDYNLPHRRRQERARAEQAESAYRRMTEGWRRTGPQRPTGAAIEERQ

SEQ ID NO: 448146 - protein, 336 aa, unidentified
METKFIHFAGVDVSKQKIDVSVIVNNQRSQILHNCFEQSKKGFACLKKWLVQVTGKQTRRLLICVENTGLYDDALMYYLSDNELAVSLENAANIKRSVRDSRGKTDKLDSRNIALYALTHCDELRLWERPRKQVALLQQMLSERSRLVSALKMLKQAHTEQQVFSWSGRVQSKSYQWGIKGLQKDIEQVEKDTWELIKSDKELLQMFMLIISIPSVGKITAYHFICYTNEFKQVKNGKQLASYCGVVPFERSSGSSIKYKPRLPHQANKIFKTLLHLCAVTSIRMKGAFAAYYKRKIEEGKNGLIAINGIRNKLALTIAAVIRNNEPYKENYIYQP

SEQ ID NO: 448147 - protein, 436 aa, unidentified
METIVERAAGLDVHKAQVTACVRVPGRRGERAQQVAEFPTTVPGLFALRDWLGAHAVAQVAMEATGVYWKPVWAILEDEFDCLLCNARHVKQVPGRKTDVSDAAWLCQLLEAGLLRRSFVPPKPIRSLRMLTRYRKAQISERQREANRLHKVMEDTGIKLDCVASGRAMLDALVAGTTDPQLLAALAKGKLRAKIPALREALVGRFDRQHALIVSAILAHLDFLDQQIQLLSTEIETLLAPFAAAVELLCTIPGVQRRTAEVIIAEIGTDMSRFPTARHLASWAGQCPGNDRSAGKRRSGKTRHGSKWLDTALTEAALAATRTNDVYLAAQYQRLRPRRGHSRALGAVKHSILTACWHMRSPPAGCTAKPALTTSPAATPNAPPAASSPNSNASATTSPQGGSRIAKLFPIRRRKGLARSSNGTVCTWRPSAHEVG

SEQ ID NO: 448148 - protein, 320 aa, unidentified
MSGKLFVGADVSKEWIDFARVGDGGRRPPVCRIVNTEDAIRRWLDRQPRASIELVCFEPTGGYERGLGRCLRAAGLAFTRVHPNRLAAFRELRGVLAKTDAEDARLLAEFAASDLARRGLAPVVECDETLRALVLRRRQLRDMIQAETCRLAQCEDGLARALFEPVREALRSGFKAAGGAIAAHIAGSPELSALARRLRTLKGVGPITASTLMAELPELGRLSRREIAALVGLAPVQRDSGKRQGKAKTGFGRPGVRQVLFNAARAALRWNPVMRAFHRRLVEQNHRPGKVALLAVMRKMLVTLNAMARDGTDWNGASAA

SEQ ID NO: 448149 - protein, 469 aa, unidentified
MTPRFGKAFRTSDQADDLAVTQRHAAGVDVHAALHFVSVAPADVPAGFRNPDPKLPDGVRKFGTTTSDLEAIAAWLQECGVTTVAMEATGVFWIPLYDLLASRGFDVILVDPRQTTHAPGRPKSDVLDCQWIRRLHSYGLLTASFRPADDIVRWRGFQRQRDMLIRYAAQHVQHLQKTLEEMNVKLTEVVSDIVGQTGMKIIQDIVRGQRDPLKLAKHRHENCKRTEAEIARALQGTWRAEHLFALKQALKLYEFYQKQLRECEARIELCLRGMEDKSKGAALPASARKRRRQPEKNEVRFGARGLLFKMAGVDLTVLEGISETTALVILSEIGTDMSQFPHEKNFVSWLGLCPQHRGSAGKIFKRRTRRGANRAARALRMAAQGCHHAKNALGAFYRRIQARAGGAKAVVATARKIAERVYRLLKYGQEYVRQSQEAYEAAYQDRMMKGLAKKAASLGYKLVPETLST

SEQ ID NO: 448150 - protein, 309 aa, unidentified
MKEQLVYLGVDIAKSYLDAAVGNEKRRFSNDAIGHRELIKWVKQLKAPVQVICESSGGYERALVQGLARARVKISLVQANRVRQFARAAGILAKTDRIDAELLCEFGKVMRPQTVTAAKLEQEHLRELESQRRHLTHLLVMELNGGARVSDASVQRLNRSLINQIKKQIEQLDLLIKGHIDQSHQLSAKAAKLTSISGVGARTAALLLAQLPELGELNRREIAALVGVAPFNRDSGRMRGKRAIYGGRKPVRHGLYMAALVAAHHNPILRNFYLRLRAAGKPAKLALTATMRKLLIVLNSALKTDLRYA

SEQ ID NO: 448151 - protein, 373 aa, unidentified
MSNNLRYLGLDVHAETIAVALAEPGGEVRSLGIIPNNPPAVAKLIRKLGGREHLRACYEAGPCGYVLYWQLTKLGVACDVVAPTLVPTKPGDRVKTDRRDAEKLARCHRAGDLTAVWVPDAAHEALRDLVRAREAAKADQLRARHRVSKFLLRHGIRPPTDARPWTQRHRRWLDTVTFTPLAQQTTLGDYLHEVDHAGARLERLETALDAAIAAAPPAMQAIMRALQCLRGVRQVTAATIVSELGPLSRFAHPRQLMGYSGTVPSEHSSGSSVHRGAITKTGNAHLRRVLVEAAWAYRFPPKCGDALRTRQRGQPSGITEIAWKAQHRLHTRYRRLLGRGKPVPHVITAVARELVGFIWAIGIAAEREVAIAA

SEQ ID NO: 448152 - protein, 377 aa, unidentified
MSESIKYVGMDVHKETIAVAVAPSGAGEVRFVGEIANTPHAIEKLVKQLRKDGADLKFCYEAGPCGYGLHRQLSDFGWECQVVAPSLIPKKAGDRVKTDRRDSLSLARLHRAGELTAVWVPDGAQEALRDLTRAREDMKHLQRQAKQRLLAFLLRHGRSYDGKSNWTQAHYRWFEGVKFEQPVQQIVFQEYVDMVKAMDKRIDALDKQISTAASSSVFWETIQALMALRGVSLLTATTIVAEIGDLKRFVSAPQLMAYLGVVPSEHSSGGKKSRGGITKTGNGHVRRVLVEAAWTYRHPARKTAALQKRAQNAPEVVQEIAWNGQKRMCGRYKLLEGRGKLKVQVCTAIARELTGFIWAIGQTMAQPAAKKQGEKAC

SEQ ID NO: 448153 - protein, 321 aa, unidentified
MESAIVGIDIGKKELSATLLLGDKETNGVFRNSTAGFAMLGRWLGKHDVEHAHICMEATGTYGEALAQHLHDAGHVVSVVNPARIKGFGQSELSRIKTDKADARLIARFCRAMKPEPWQPPTPEVKELKALVRRLDELKGMLTQETNRLGTADDVVKPSIQDMIGLIESRVHQVTQQIRDHVDRHPDLRGKRDLLETIPGIGPGTSAMILAEFGDVSRFPDAGSMASFCGLTPRHRQSGTSVHGRSMLSKTGSARIRKALYMPALAAIRYNPIIRAFRARLLANGKLKMIVVGAVMRKLVYIAYGVLKSGKPFDPAIGATA

SEQ ID NO: 448154 - protein, 348 aa, unidentified
METIVRIGLDTSKSVFQLHGVDGMEQLVLRRKLRRSQVLEFFRRLPPAFVAMEACGASHYWARELRSLGHEVAMIPPQYVKPYVQRGKSDAADAEAICEAASRPKLRKNFVPIKSPEQQGAQMLTRVRSQFIGRRTQLANSIRGYAAEFGFTAPKGLSRLHQLLIDIRADETVPDLALELVEALAAELARVDDQIAKLDKKLMHLHRSSEMSRRLAAIPGIGPIGATLLSIKVVDAGGFKSARNFAAWLGLTPKNHSTAGKNRLGVITRAGDGMLRTVLVAGATAVIADVRRRESRSWPWLKDMIARKPPKLVAIALANKLARIAWKLMVSGEHYRPAGSVIPMPTPV

SEQ ID NO: 448155 - protein, 370 aa, unidentified
MKKYSEAFVGVDTAKKKHAVAIADAGRDGEIRYLGEIDSSPETVARVIGKLADRYETLHVCYEAGPTGYGLFRDIRALGQDCIVVAPSLIPKKPGERVKTNRRDAVTLARLLRAGELTSVWVPDAVHEAVRDLVRAREAAAEDFRKKRQQLLSFLLRHGRIFMGHKHWTQAHRRWLAGQKFERPAQQIVFQDAIDAIEDATTRAQRLEEQLALIVPSWSMAPVVAAYQAMRGVSFVVAVTFAAEIGDVRRFDNARQVTAFVGLVPSERSTGESVRRGGLTLAGNRRARRALIEAAWTYRYPARVSKVLQTRIEGLPKAVREIAWKAQIRLCARYRKLIAHGKKKPVAVAAIAREIAAFLWAIARHVAPAA

SEQ ID NO: 448156 - protein, 448 aa, unidentified
MPLPCPPVNRPVKTLRGLQRVSFLHHHEPIEYCHPFFGQGYDTGISVVKPSGQTTDRRDLFTNGNVRMHYTACSQALATPRERLLFVGMDVHKDTHAAVGTTALGEKLFEIQLENNRADFDRLIKQSRFVASERGLGLVFGLEDSTAYGLRLAKHLFANKLLVKTVSPIYVDRERKYETHPEKNDSLDAYAAAKVLIQRIDTLPTYTITKQNELAKEIKELTLDREFLVKEQSRLKCHVHRLLHRAWNSDYQKKFKNLFSLKGLKYWLSHPLPTGEAKDDIIGTPNILKNQIKRKIKRLLAIREELKEIETELQSLIEQTGQKITTLNGCGIALGAKVLAEVKDIANFTSPSALAKYAGLCPREKSSGKTFRHVKTKSGNRQLNTAIHRIALSQISRSGNQFAKDYFQRKISQGKTKAQALCCLKRRLIDIVYMMLKHKQPYHQPDNQ

SEQ ID NO: 448157 - protein, 433 aa, unidentified
MPKSNGGFTMNFTQNEKLNQVTADTLIVGVDIGSQTHFARAFDWRGVELGKRVFKFSNNGVGFLTFTKWLDEMQQRTGMKKIIVGCEPTGCYWLTFQSFLEKHDIKLVTVNPYSVRKSKELDDNSPEKSDLKDPKTIAGLVKDGRYSISYIPTGVYAEIREASVCRDQIMKQHVRLSNQIQGWLQKYFPEYLECYSDFDSTSGLMLLQNVPLPHDIVKLGAGGINEIWRNAKVRAAGLKRAQTLVEAAGNSVGLEGGEAAKLEIWILVNDYIAKKQQLERLDEYLAQKVMEVPNVEKLLAIKGVGLSTVIGFIAEVGDIGRFTDPKQIQKLAGLEITKISSGKKKGQPGISKRGRSKLRRTMYESARALMNWNPAFADVFLYYRNRTRNPLGGMQAKIAVACKAIRVFYTILKKGCDFDEVKFREDIKSPEAA

SEQ ID NO: 448158 - protein, 340 aa, unidentified
MSLFVGLDISVKTTAICALDENGQILLEATVDSVPGTIAERLRAIGHRFERIGLEAGPLSQWIYAGLVDMGLPAICVETRHMHAALSARINKTDRNDARGIAQMMRVGLFKAVHVKTPASQHRRLLLTSRKLLQRKIYDIENDLRGSLRNFGLKVGMTGGAKFEERVRELVADHPVVAAIVGPLLEARAALRIQFGKLHRMLLDLVRTDPICRRLMSAPGVGPIVALTFRTCVDNPARFSRSKCVGAHYGLTPRLYQSGETARTGRISRCGDLMLRSSLYEAALVLLTGPGRWNPLKAWGIAVARRRGMQKAIVAVARKLAIILHRMWRDETDFRWTAAT

SEQ ID NO: 448159 - protein, 411 aa, unidentified
MEVIYKRCCGLDVHKEIVVACLLIREGGKVLKEIRTFLTMTVDLVVLHDWLKAHQVTHVAMESTGIYWRPVFNLLEEDFTVLLVNAAHIKAVPGRKTDVKDCEWIADLLSHGLLRGSFIPPEPIRDLRDLTRYRKSLTDERVREVNRLQKFLEGANIKLSSVASNVMGVSGRAMLEALTAGSTDPQVLSELAKGRLRKKLPELKKALEGRFRAHHRFLVAEILTHLDFLDEAIERVSQEVSNRIAPFSKKVELMDLVPGINQRVAEGVLSEMGVDMSCFPSHGHAASWTGLCPGNNESAGKRKSGKTRKGNQWLRRYLIEASWAAVRKRGTYLSALYYRLVPRRGKNKAIVAVAHALLVMIYHILKHQVSYRELGADHFNKLNAAYVQRHHVKRLESLGFKVILEPLSEAA

SEQ ID NO: 448160 - protein, 314 aa, unidentified
MNPSRIYVGIDVAKDRLDVAQRPGTEAWSASNDDRGIADLVARLKTLRPALVILEATGGIELPLVGALAAAGLPVVVVNPRQVREFARATGRLAKTDAIDAQVLARFAEAVQPALRPLPDAATQQLSSLVTRRRQVMEMLTAEKNRLRTTAPAVREHVKEHILWLERSLSDLDKELEQAIHSSDIWRAQDDLLQSAPGVGPVLSTTLLAELPELGTLNRKEIAALVGVAPLNRDSGTLRGRRTVWGGRSQVRAVLYMAALVATRFNPVIRAFYQRLQAAGKPKKVALTACMRKLLTILNAMMRHQIPWRICSTS

SEQ ID NO: 448161 - protein, 325 aa, unidentified
MRPPQSQVKPQTQIGLDVSSQTLDAHIRVDGKAFSVPNTDAGFDQLCEILSAYSVSMILMEATGGYEDNVACYLQLQGFDVVVINPRFARRFAQSMGRLAKTDRIDAAILAQMAFMIDSGPDRERYIKPVTDEQRKQLSRLSSRRRQVVDLITIEKQRLTHADDYARESINGIISLLNVELKRIESDILRYVKKNFSELANRLLSIPGVGEQAMIVLIADLAELGHVNRRRISALLGVAPFNHDSGKFKGQRRIRDGRQSVRNVLYMGVISATRFNPVIKAFYDSLLLRGKPRKVAIIACMHKLIRIINAMMRTGKPFDMSLHGV

SEQ ID NO: 448162 - protein, 409 aa, unidentified
MERQVERCCGLDVHKETVAACVRVGGRTGQAEQHVQTFGTTVGELLVLRDWLAAHGVTHVAMESTGVYWKPVFYTLESDFTCLLVNAAHIKQVPGRKTDVKDCVWIAQLLEHGLLRGSFVPPAPIRDLRDLTRYRKAVIQDRTRVANRLHKALEEAGMKLASVASDILGVSGRAMLAALVQGTTDPAVLADLARGRLRGKLPALRQALANRFRPHHAFVLGQLLTHLDYLDEAIATLSTEIERVMAPLAEPLRRLDTIPGINQRTAEVILAEIGPDMRVFPSARHLASWAALCPGHHESGGKHKSGKTRKGNRWLRTALIEAAAGASRAKHSALQARFRRVLRHRGPKKAVVAVAHALLRMVYHVLADGTVYREAGADYYDRHHSQRVTRRALQALERQGYRVTLEPAA

SEQ ID NO: 448163 - protein, 402 aa, unidentified
MAEGPTRFFGLDIHKKYFVAVGVDAQREVVFGPQRVSNYQLDDWVSRVLTTQDAVVLEMTTNTYLFYDTLVPHVHSVIAVHPPNVSLVTNVRVQTDKKAALALAQLHAAGMLTGVWIPPHEVRDLRALIARREKMVRLSTMAKNRLHSVLHRNHLVLPEKPFAPEQHTWWESLSLSATEQFLVRSDLDTLEFAQKQIGQAEECLKKASAKDERIPLLVQLPGVAMLTAITILAAIGDVTRFPDAKNLVGYAGLGTRVHDSGMTHNSGRITKAGRRDLRRSMVNAANHAIEHHPHWMKEFERLEPHLGRSKAVVAIARKLLVAVWHVLSEKTADRFADTGGVARSFFAHAYKVGVRNLPKGQSAVAFTREQLDRLGIGRDLQEIPWGSKPHKLPRSKLLPEKE

SEQ ID NO: 448164 - protein, 360 aa, unidentified
MLAELIDAVVGVDTHRDTHEVELALPTGTAIGIRKISNDNSGFAELLAWILDHAPGPRVVVSIEGTRSFGVGLARAVAAAGLTVIECEQPNRKARRGKGKSDPIDAHLAVLAALRLDADRLPVPRADGDREALRILLGTRHELTVVTTAQTNRLRALLLGGKDSERDLARATLTDPVLLAMVRRREPPQASREQAVRHGEIRRLAHAIRAGRHALAANRAQLQAIVDQIAPELTERRGIGAVTAAQAIVSFSHPGRCRSDAAFAALSGTSPLQASSGKTVRHRLNRGGDRALNSAIHTIAVTRMRCCPRTKDYVARRTAEGKSSREIQRCLKRYIARQLYRALNASTTLTAQISAAPTTA

SEQ ID NO: 448165 - protein, 330 aa, unidentified
MIPVARTRQVTVTSLICGVDVSSLSLEARLGPEGPGGRFVNRPEGVAELADFCQQHGVKLVAMEATGGYEKQAFALLWGRGVPVALLNPRAVRQLAQSMGLLEKTDRLDAGVIAWFAAVKHVAPSLPASAEPARLQALVTRLRQLTELQTMQRNPRRLVTDAVVTASFAEMLALVAAQIRALEVAITQLIAADPLWQQLDAAFRSIKGVADRTVARRMAEMPEIGTLSNKAVSKLAGLAPLARDSGQSQGKRAVRGGRGEVRAILFVVAGVVRRYHPDFAAFSERLTAAGKPKKVIRVALAHKLLVRLNAKAREVRQQYPGVEVCASVRV

SEQ ID NO: 448166 - protein, 456 aa, unidentified
MQVVYDRCCGCDVHKKMIVACVLITLASGEVQRHIRTFSTMTAGLLALSDWLESLQVSVVAMESTGVYWQPVFNLLEDGRQIILVNAQHMKAVPGRKTDVKDSEWIGQLLRHGLLSASFIAPAPVRELRQLTRYRKTVVQERARHVNRVHKLLETANLKLGAVATDVLGKSGRSMLDAIANGEQDPEVLAQMACGRLRKKLPELRLALDGRVQPSHRFLLKRLLSHVDFLDRSIETVQQEIDEHVKGFAEAMTLIRTLPVQLQAGAATVIAEIGVDMTRFPSPEHIASWAGLCPGSCESAGKRIAGKTTKGNPYLRSVLCEMALIVTRMKDTYLSAFYHRIARRRGHKRAVVAVAHKLLVIIYSMLKNKTPYQELGADHFDQIDPAKVERRAIARLQQLGYKVTLTRPEEDSDQGATQVTDQHVTTPAKRTSRKTVTKARKAVLRKVPTKQALEKV

SEQ ID NO: 448167 - protein, 459 aa, unidentified
MTLPPPAFAGLQTGNRGTRRRAPVSDRPGAGLAAAGPSLPLPLQGVELSLALPEALFFTGIDWAAATHAVCVMDAAGKIIAEFTIEHSADGIATLVRRLARYGEPASIPVAIERPNGRLVDLLLEAGHPVVPVSPNAIKTWREGEVLSGAKSDAGDAAVIAEYLRLRSHRLRVAVPYSGETRALRTVVRTRSDLVDMRVAATNQLSALLEASWPGAKAIFADVESPISLAFLTRYPTPASAAHLGEKRIAAFCASHGYSGKRPAGELLARLRSAPAGTADPALTTALGTAVLAMVAVLTALNSAVRDLDRSAAAHLGEHPDGEIFTSLPRSGQINAAQMLAEWGDCRQAYDGPDSVAALAGCTPVTKESGKHRAVHFRWACNKRFRKAMTTFADNSRHASPWAAKIYSDARAAGKDHPHAVRILARAWIRVIWPCWLSHTTYDPARHGAAAALAEPIAG

SEQ ID NO: 448168 - protein, 331 aa, unidentified
MKNVNESAGIDVSKLTIDVHLFKKNKHHQFVNKSNGFKEMIQWIKKEGLVVEEVLFCFEHTGWYCLELSFFLHEIALKYTCVNPIEIKRSIGLKRAKTDKDDAGYLAHYAWLRREEIKQSVPPSQNIIELQRMMSLREQLVKQSVALKNLRTGMLQIVISREIDPSILILDQTIKELEQQTKNIEKEMELLIKSDTNLKENYLLSKTVKGVGKILAVQMLIHIHNYTRFLSWRQFSSYCGLVPYPYQSGTSIRGRNKIHSISDRKMKSLLSMSAISAIRSDKELKMYYEQRVKEGKPKMVVINIIRNKIVARVFSTVKRGTPYVELNKFTA

SEQ ID NO: 448169 - protein, 365 aa, unidentified
MQKISTMQTSEENILNGQLTIGLDLGDRFSCYCILDEVGKILREQKVPTTPEEMKQTFGRMVRSRIAMETGTHSPWVSRLLTGLGHEVIVAHAQRVRLIVKSRRKDDRLDARTLARLARIDPELLSPVQHRSAEAQIHLTEIRARAGLVSARTALVNAARGLVKSYGERLRKCGTQQFRQEITSGLSTGLREALEPLVREVESLNERIKEYDRRIERMAKETYPEVELLKQVKGVGDLIALAYVLTIEDPHRFRKSRDAGCFVGLQPGRRDSGESAPQMHISKEGDEYLRKLLVQGAHYILGPFGEDSDLRRWGKKLAERGGKNAKKRAVVAVARKLAVLLHRLWVSGEAYEPLRNSQKAMSTAA

SEQ ID NO: 448170 - protein, 349 aa, unidentified
MTVLRYSMPWSAATPTAIATRWRCSGASGTTIAVLSISNDEDGFAEAIAWIAEHAPGPRIVVGLEGTRSYGIGLARAIAAAGLTVTEVQAPGRSARRGRGKSDPIDARMAALQVLRMSVGQLPAPRADGDREALRILLGARRELTITRTRQVNRLRALLLSGDDNDRVLARGTLTGARLNAIARRRCSGPTAEQAVRRPEARRLAIAVRAATAELHANNRQLAALVAALAPALLAKIGVGPVSAAQAIVSWSHHGRCRNDAAFAALAGASPLEASSGRTTRHRLNRGGDRQLNRALHDISLTRLRVDPRTHDYIARRRAAGKNDTEIRRALKRYIARELFRALESAGAA

SEQ ID NO: 448171 - protein, 480 aa, unidentified
MNFKVKKTKKQVSVETPVMNLLSKEEINKKMELIEKNLKSSTWRELETRGKFTKNDKLSFISDDMLIVGCDIGSETHYIRAIDVRGRELSIGAFEFSNTVEGFMNAKAWVLNLAAKNDKKQIVLGLEPTGHYWFALATWMISNGISVVQVNPYAVKQSKEIEDNSQLKDDRKDPKLIANLVKDGNYGMPYLPKDIYADMRRLSMFRDQLTEDRIRNINRLHRELKIYFPEYMDAFGKIDGAFALEVLKVSPIPADIITLGAEGLKNIWHTAKLRGRGYSRANDIVSYAKTSVGLTDGTDAGREAARWFAEQIINLNEQLAVIEHELHKKCMEIPYAENILEINGVGENILAGALAEMGDISRFDDVKEIQKLSGMGLVACSSGKHKGQTKISHRGRKRLRYWLFQAAKSAVVHADEFKQLHEYYTTRANNPLKKMQSLIVIACKILRVIYTILKTGTTYDPKKMLKDIKHPVNITSKAVA

SEQ ID NO: 448172 - protein, 311 aa, unidentified
MSSKSYVGIDVSKDQLEVFFLSTGGNQTVTNTEVGIASLIPLLQSTDPKLIVLEATGGLERPTAEALTAAGFPVAVVNPRQVRDFAKAKGILAKSDRIDARVLADFGEAIRPEARPPKAPEVQELEALTTRRRQIVDMITVEKNRLGSAPKRTRLQIQEHLRYLGKALKATNQEINKSIKKHPQFGAKSRIIRSVPGAGPVLAVTLLSDLPELGSIDRKAVAVLVGVAPLNRDSGRFRGRRCVWGGRARIRAVLYMATLAATRCNPVIRTFYNRLLQAGKEHKVALTACMHKMIGILNAMIKNQTNWRLAN

SEQ ID NO: 448173 - protein, 263 aa, unidentified
MFSRFIGVDVSKTKIDVFLSETGEVFQVKNSTTNIERFVQKIDCRSKTLAVIDLTGGYEAACVDVFYRAGFAIHRAEGRKVKAFMRAVGQLAKTDSIDACALADYGQRLQDKLPLFQPIENEIKPYVFRLTELKQILKSEKNRLNAPSIVPRIRLEISKHTEFLQTEIDELSKELQAIVKQNPVLLKKQQALTSQIGIGETSANVLLACLPELGILSRRKIAALAGLAPYAQDSGTIQKVRHVVGGRCDVKRTLFICSLVAIQ

SEQ ID NO: 448174 - protein, 351 aa, unidentified
MDRFVGCDAHAASCTFSVRDVKGRIQRRDVIETNQESLVGYVGSLEGEVHLCVEEGEWSQWLCELLAAHVEEFVVVQPEKRQGSKSDARDADGLSARIQTGQLGLVVFKDQGRFSALRDAARVYTMISRDVTRTKNRIKSFCRARGLREPGEALYKSEKRNELICELPSSTQHAVNLLGEQLTVLEALKEEAQARMTRESHRHRISRILETAPGMGPVRVAQLLPIVVTPHRFRTKRQFWAYCGFGIVTRSSADWVLYEGRWMKAHVAQTRGLNQNYNRHLKGMFKSAASSVLREGSSSPLRLHYDELMQNGTKPNLAKLTIARRIAAVVLAMWKNKETYRPERDPRLATA

SEQ ID NO: 448175 - protein, 355 aa, unidentified
MQQFKYHLGIDLHKRTSYWTLMDSDRKVLFRKNMATSERAMDEALTKIGTDPREIEAAIEPVSQWGWYGDLLEARGLTVRLVNAYKSKLIANSKLKYDRVDSRTLADMMRSDFLPEAYRAPRETRDLREFMRGRAFLVRMRTRVRNRITGILGKHGIISPWTDTFGKGGMIWLREQNLGSPHDPEVKNLLAVFGEISLHIAGRDRECAAFTADSEDLQILTSIPGIGNVTALMIMAEVGDFSRFPTPGKLASFAGLVASSHSSGERNRFGHITHRGSVWLRSALVESTGKVSPKWGYLHSFYRRIQEKKGNSIARVALARKVLVLAWHLLRTRQRFHPHPLGPHDSVKTGSSDIS

SEQ ID NO: 448176 - protein, 327 aa, unidentified
MDSKGNKLVHTNIEGNDFGYFLKKIAPYRHDLTVCCECTFNWYWLADACQAEGIEFVLAHALYVKAIHGGKNKNDRIDSEKLAHLLRSNLIPPAYVYPAEKRPVRDLLRRRTSFVWRRATLLGQLTCSMYVLGHEPIRKTQHKVRDKWFDQLRAHYEQPLTKMAAEANMYMIKEYDTIIERLELAILKHTKREHARDFNILQTIPGVGDILALTILYEVDDISRFLSVQNFSSYCRLVKGSVASAGKFKGLRGGKLGNPYLRWAFAEAAILCKRANPDLRAYAGKLEAQHIKPVANAILANKLARAVYFMLKQGKGFDPKMFAKSSN

SEQ ID NO: 448177 - protein, 360 aa, unidentified
MIVIGIDPHMKTHTAVALDAATGRMLAELTVTCNDRGHDGLLAWARSLSDDRYFAVEDCRHVSGRLERHLLPRGERVVRVPPKMMAGARHSARSYGKSDPIDAACVARAALREPGLPEASLAGPEQDVRLIVDHRDDLVDERKRIQKRLRWHCHDLEIALVLPPRVLDRYVWLERLEAVLAALPESTRRRIALDLLRRCRDLTKDVRALERELRTRMRELSPELLEIPGCSAVCAANLVGQTAGASRFSGDAAFAMHVGVAPLPVSSGQTNRHRLNRCGNRRLNSTIHMIAVTQARMHPPAIAYMQRKQAAGMSYREALRCLKRLLARVVFKTMLRTERSAALGRVVPVRFRAEDVAIAV

SEQ ID NO: 448178 - protein, 373 aa, unidentified
MIAGIDTHKDTLAVAVVDDTGRLVAGGEVPNTERGFAQLVDMFNTHHVQRVGIEGSGSFGRAVAVHLALCWQSDQPVAVVEVPTLMTSRERHGQLGKGKTDPVDALAIARITTREQQLPPVRLTVGAAADLRALLDYREDLVRERGALVNRAHAELGGLRPGYQQQIPILTTCARVRAAVDLLGDDTSIRATLCRRRLERVIAIDAETAELKRQISKLVAAADTTLTDLYGVGPLVAARFLAEVLDIRRYPNRNAFASANGTAPLPASSGRTVRHRFNPGGNRQLNRSLYTIALTQIRGDTEGRAYYERKRAAGKSKREALRCLKRRLSDIVFTTMRHDAAGADASPDQASPPAWPVLLGVGAVDANEARLTA

SEQ ID NO: 448179 - protein, 348 aa, unidentified
MMIIGVDFHPEFQQIASVDTDTGEFQEKRLAHREEAEKFYRALAGKKVRVGMEASGHARWFERLLAELQFELWIGDAAEIRTRRVRKQKTDRQDAQLILRLLLEDRFPRIWVPNWENRDLRQLLWHRHRMVQARTRIMNQLQAVALNEGLRCKKRLWRERGRQQLEAFRLAPWASRRRHDLLELLDRLNPTIAELSRAIAQEAEKRPEAQRLMTHPGVGALTALAFVLIIGEAERFGCGKQVASYLGLVPLEESSGNRRRLGHITKQGSSMMRFLLVEAAQVTVRSLPEWRSRYFHLMMRRGRKTAKVAMARRLAIRLYWMWRQRWDYEQFVKFGSHAGQPGNRDGVQ

SEQ ID NO: 448180 - protein, 403 aa, unidentified
MKHVIAFDVSMGKSYMVIYNAQKQCVFESEIKHSKPDFKKLQEKIHNLTDETGESPKIVFEATGIYSRQLERFMQNNQYTYCLLNPLEAKIQCDSLRIHKTDRSDAHRLALTHFTVTRRVSTETDNLFYQLKSLSRLYSELDDELSIIRGRMHKVIQLTFPELERIFTSKSDLFLNFVQLFPHPDCVLGLSKTIIKNRIRANTNKKISNITAEKKAIQILEIAEICYPAVSQNDVLCDQLKLYARRYQELLHQKESCISKMVYVAKQRAEYDIIRSLPGIGPNTAVRLMAEIGDITRFNNNKQLNAFAGIDIRRFQSGKTFFKDKINKRGNKHLRKLLFLIIQNMIKQRRYGQNHIVEYYDKLKTQPYNKCHKVASIACVNKLLKLLFYLITHNMHYDYRLTA

SEQ ID NO: 448181 - protein, 346 aa, unidentified
MRFYNRQHPYYCGIDLHVKTMYVCILDATGQVLVHRNMPSTPEALLEVLTPYREGLVVAAECMFTWYWLADVCAAEGIAFVLGHALAMKAIHGGKAKNDKIDSFKIASLLRGGLLPQAYVYPAAMRSTRDLLRRRLHLVRKRGELAHIQNTRAQYNLPAFEKRLAYPGNRDGVVERFPDPSVRKSIEVDVVLLDQYDVLVNDLELTIVRDAKRHDADAFHRLRSVPGIGKVLALTILYEIHDIHRFDRVQEFASYARLVKCQKQSGGKTLGTSGAKMGNVHLKWAFSEAAVLFLRHTKDGKKLLTGMAKKHGKGKALSILAHKIGRAVYDMLSRGTVFSMEKFLAA

SEQ ID NO: 448182 - protein, 357 aa, unidentified
MNNIMNYTAENQEIFIGLEDSKKTWKVCARSNKVTVNEASMPAEYEILRNYFNNKFPGCTIHVIYEAGFRGFELHDQLKADGYDCIVTPPHTVTQEKVQRQKNDRIDCRRLAKNLENGDYHICYVPDRKLREDRQLSRLYEQLKRDINRECNRIRRTLEYHGLDRKFPSGTWHRSHYKNVKITIDEMELASALKFSFSMMFEELFNLWEIQKKVLKEIQILAKSEPYKKDVDIIKSAPGVGVLSAIRLVLEWGDLSRFHRKEEFASFLGLIPGEYSSGEQEHKGHITKQGNRMVRSWLTECSWKALKYDPVLLEKFNSVASHTGSRKKAIVAVARKLAIRLRSLIILQTPYVIGIVK

SEQ ID NO: 448183 - protein, 341 aa, unidentified
MQATKYFIGLDISAEDFSASCITNPDNNVFPIQKFPNNFDGFNEFISLLNKNSIKQSEVIICMEATGVYSENLSYFLASREFLVAIEAPQKIKNKIKDSPRKNDFVDALSIAEYAFRYHDKLTFWKPKEEIIEQIQVLLSTREQLSSQMIANENALKTIKHKYYQTPLANRIYEQTISKFKEHIKHIDQEIKSLIDKDDSFKQKISLAKSVPGVGLLLAANLLVLTKGFTEHLNYKETAAYSGICPYEQTSGKSLHKLPRSKKCGPAKLRKLLYLAALSVRTHNKTFKKYFLRKTAEGKNTRLVLNNIENKLLKIIFAVINSGVSYTENYKSIDPVQLKTA

SEQ ID NO: 448184 - protein, 391 aa, unidentified
MSGSLSQVWYRDHEDATSVPNTVTGSGPTQPKESMMRFYDRQHRFYAGIDLHGRFMHVCILDATGAVVFDKNIACSPEAFLAAIAPFRKDLIVGAECMFGWYWLDNLCRKEKISFLIGHALYMKAIHGGKAKNDRIDANKIARLLRGGNFPLAYVYPHGMRETRDLLRRRSFLVRLRSGLFTHLQILNIQYNLPPFGQKLGVPGHREEMNIAKRFSDVSVQHNAAADLAVVDCLDEQIAALEKYLTRTAKVDDTQTYHRLQTIPGIGIVLALVLLYEIHDVKRFATAGQFLSYCRLVRCEHESNGKVLGHGGKKIGNAQLRWAFGEAACLFLRSSERAKAWKQKQVKKRGEGKTLAILAAKLARAVYHMWRKGQAFDETRFWQGKPPAAND

SEQ ID NO: 448185 - protein, 349 aa, unidentified
MKILGIDLGKYNCAACLFDTQTQDTLFFTFKTIASEFSTLLRQTQPEQVVIETCTITGWVYDLCQAEGFETIVANPTHEAWYWKNVKRKTDKDDALKLTKLAALGQISPVYVPSAESRQYRQLVKYRKRLVGQSTKAQNTIRALFAQQGISIPSGQKAWTLSGIETLRKHATTLADCSLLSLWQGQVDLELARLDALWEQQHLVDAKLTAIAQQNARVQLLETIPGVGRKTAEVVVAYIDDPNRFKNARQVGAYAGLVPRQHQSGEMNQMGKITRRGPRLLRSALVEASWVMLQYNPWAAALYQRLCGGQKTRRKQAIVAVARKLLVLCWTLLKKQERWDPDKTTLIAA

SEQ ID NO: 448186 - protein, 348 aa, unidentified
MIAIGADVHKQQCTLAVQRPDGKLSMLPSMENTRENWLDLLTQLPPEAQIALEVSTSGHFVMSVLEEAGWRDRAHWVHTAGIDSLRKQKTDRLDAKRLARKLSVREQDPLPEAWFPPRPIRELRLRARQRCWVAVVRTRVKNRVRSLLQMSGRCAGTNPFTASGRTWLKEQKLSEATRESVEQLLRFHDFLTTEREKSETSLRGMEKDFPEIARLQTLPGLGHILSAVIWSEIGDLKRFDSPRALVNYTGLAPSLYESGERSVRGGITRQGPVRLRWALITAVNAATHGQNAFARRYRRLRRHKLPNVAKTAVARSIARCAYGVLKHGVDYQEQRWGRKAGIEMEQEA

SEQ ID NO: 448187 - protein, 465 aa, unidentified
MAKAQKSRSKSRAKQNHRAKLKAPDSTLGLQVVHPKAAGIDIGNEEHWVAVPADLDPEPVQSFGCFTQDLEEMANWLVRIGIQTVAMQSTGVYWIALCDILAERGIRVFVVNASDTKNLPGRKTDIQECQWLLKLHAYGLLRNSFRPEEEILVMRTYWRQRQQHIGDASRCIQRMQKALTQMNVQLANAISDLSGSTGQAILKAVLAGERDPAVLAKLRDPRIKATEATVAKSLEGNWRPELLFVLQQEQESYESFQTKIAECDGQLKRHYATLEPKADATKLPPVPRDRRAKGNVPAGFDLREEMYRATGVDLTAIDGVNVLTVQTLISEVGWDMSRFATEAHLVSFLGLSPRDKISGGKVVGREKKKNKNRAGVALKLAAGTLLNSDTYLGAQYRRLRTKLGAPKARKAMANRLARIAYRMLKYGEQYVDRGKELYEQKYRALQIRLLTKKATELGLQLVQSA

SEQ ID NO: 448188 - protein, 429 aa, unidentified
MQESSSSASAEGVAAYVGMDWADQKHDVILRTASEPAKVEYRRLAQQPEALMEWVAELQQRFAEKGKILVALEQSRGALIYHLMGYEFLELYPINPSQLASFRQTFSPGGAKDDRPDAELICELLYCHRDRLKAWKPDDELTRKLTFLNEGRRKAVDQRTQLANEMKSQLKVYFPLALQVLDNDCSTALAADLLLQWPTLDSLQKQRAHKLRKFFYAHNCRQEQKLLERLELIKAAKPLTRDLAVIEPTALRVQLLAQQLKSLLPYIARYEKQIAELFDAHPDSFLFRDLPGAGSAMAPRLLTAFGTDRERFEHSMEISSLSGIGPVRRASGKKSGKHATVHFRSACPKFLRQSFHEFAACSIRYCSWAEACYETQRKRGKGHHAAVRAVAFKWIRILFACWKQRVPYDPQRYQQTLQTRGSEYAKITA

SEQ ID NO: 448189 - protein, 421 aa, unidentified
MKPQAPEAFAAFVGLDWADAKHDICLQVAGSTRREFLRLEHRPEVIDAWVCTLRTRFNGQPLAVCLELNNGPIVSALQNYDFLVLFPVNPLTVAKYREAFTPSRAKDDPTDAELQVEILLKHRDKLTPLVPQSPTMRALAQLVEHRRRLVGDKVRLTNRLTSALKNYFPHVLQWFQEKDTAIFCDFLSRWPTLKAVQLARRATLERFFRAHHVRSADVITTRIEAIKNAVALTTDAGVIAPNTLLVHALVAQLRVTLQAIADFDTAIAQRAQAHPDFPLFDALPGAGAVFAPRLLVAFGEQRERFTSAEELQKYAGIAPVTERSGKKSWVHWRWQCPTFLRQTFVEWAAESIRHAFWAQVYDQQQRDKGKAHQAAVRALAFTWIRILYRCWQERLPYDESTSLQALHRRGSSLIQNLAKAS

SEQ ID NO: 448190 - protein, 319 aa, unidentified
MSTTIAPCIGIDVAKATLEIGIDTTGEIFSVANDPQALPALVARLETLAPERIVVEATGGYETLLVAACIAANLPIVVVNPRQTRNFAKAIGKLAKTDRVDAFVLAHFARAVRPEQRLHKSEAAQAVSALVARRRQLTEMLVAEENRRQSPLFAEMADEFKEHIEWLQKRIAELDRDLQNQIHRTQHWREQDDLLQSAKGVGPILSVTLLTQLPELGRLNRREIALLVGVAPISHDSGKRRGERHIAGGRAAVRSALYMGTLAALRFNPVIKEFYQRLLAKGKLKKVAITACMRKLLTILNAMVRDNEAWHPPAKRLSA

SEQ ID NO: 448191 - protein, 394 aa, unidentified
MESFLVGIDVSKALFSVAGIDSEGNESLSQSYSMDSTGFDEFLKTITSHCEDFSKVIIGMESTGCYHINLFSFLTSRQIHTLVINPLLIANYAKLSLRKTKTDKKDARTIAKFLLDHRQEISQLSVSQDLQDLRDLSRERESLCHLISAIKVEIKRVLRTTFPELESMGDLYTRTMIRFLQEYPSARLVRTAKPKAIAKALQRPSVGNKLTLTAEEIVQAAQKSVGTISPAKEIILRGKIATLLHLQERLAEVTKLLTELCQKTRLEDLEILRSIRGVGPKTAAPFLAEVGEVKNYSSHKKIIAYAGMDPSVHESGKFVGMSKLSKRGNRHLRRAIYLMTASVVSQNAFFKAYFLKRKREGLAPQKALFATAHKLIRVIFAMLSQRTHFKVKEV

SEQ ID NO: 448192 - protein, 403 aa, unidentified
MNNVAGIDISKGKSTVSVLRPFGEVVAKPFAVGHTGSELRQLADYLKSLDGETRVVMEHTGRYYEPVAQFLHNEGIFVSAVNPKLIKDYGGNTLRKVKTDAADSRKIARYGLDNWAELRQYASMDTIRYQLKTLNRQQGLYSKTKTMMKNNLIALLDQTYPGANALFDSPVREDGTQKWVDFAASFWHVDCVRGMSQSAFTERYRKWCKRHGYNFSSDKADEIYTEARDLIAMLPKDAMTKLLVQQAIEALNAVSTAQARLKAEMLKLASQLPEFPVVMAMRGVGESLGPQLMAEIGDVTRFPHRGSITAFAGVDPGANQSGSHESQSVNTSKSGPPELRKALFLVMDCLLKTMPQDDPVYRFMDKKRSEGKPYLVYMTAGANKFLRVYYGKVKEYLSQLENL

SEQ ID NO: 448193 - protein, 344 aa, unidentified
MEYFAGIDVSLEQSSVCVVDGAGRIVRETKVASEPEALVRFFRGLGIRMIRIGLEAGPLSQWLHAGLVAAGFEGVLLETRHVKAALSAMVNKTDRKDARGIAQLLRMGWFRPVHAKSPGAQEVRALLVARKLLQTKLLDVESSIRGILRGFGLKMGAVSKGRFVARVRELAAGHPMLERITEPMLRAREALRTEYARLHGEMLAIAKPDPVCRRLMTAPGVGALVALTFKSAVDDPGRFTRSRALGAYFGLTPKKYQSGEKDVTGAISRVGDPMVRVTLYEAANIMLSRVTRFSSLKRWALDVAKRRGLKRAKVALARKLATVLHRIWIDGTTFHWGKQADAAV

SEQ ID NO: 448194 - protein, 478 aa, unidentified
MARKEQTQPHLKAVPMLLHESLYVGVDVGKQRHVAGFVSKTLLQRYERFEACPALAFEQSREGFRTLIDRIRELVPLEQAYLLLESTGHYHRALVQYLQELDIPVYIMPVQKRPVGLIKTDKRDALGLANQLYNQLELGVQLADKTHLVRRLLPASEAALQLKGWIRHRYELMHESTQRKNKLTAICDELFPEFTWVLKDPNGTAALKLREHFPTPHAIATTPLTTLAQHRVSSHPSMEQLVELQRLASQTIGTKDVVRQRGLVLEQQQLIRELRMLQEHVQQLDVEIVKLVEQSREGQILTSMPGIGPIQAAAIMAAIGNVLNFENGATLKAYFGWAPKREQSGTTLDRDQLAHTGTRTMKQTMFLVVANAIQRKECEWAKLYERLVPRMCSYDERKRTYRGKLKVLVRIAGQMTEMIYALLKQDAEVLSKTPPGETPPDPILYDPELHQRHRNGEYRPIKNTPRHRKVLRLPAVIT

SEQ ID NO: 448195 - protein, 342 aa, unidentified
MTSFQSFVGVDIASTSFMACVGTTPWKLTVKPVEFENDEEGFVSFLGWLKAHNLPAQSTVVCMEATGVYGEGLAYFLYASGYTVAVEPPLNIQRKFPVNASKTDELDCQYIAEYACRYVDKLSVWQPRAEILEQVKVLLTTRQHFSVQLTGHKNALHAVNRKKVSSELAKQVHHNMVEQITKSIKTIDQEIRRLLESDPTFKHTLLLLLSVPGIGLQLAAHLLIAMQETLDPKVLAAFIGICPIQHESGSSVYATPTSRHYGPSVLRKLLYLAACSVRTHKQQFQHYFFRKVAEGKHKKLVLNNIQNKILKIACAVVRSQQPFISNYVAVNPLVFQKTLTSS

SEQ ID NO: 448196 - protein, 411 aa, unidentified
MQVVYARCAGLDVHKKTVSACVSVCDAVESKRQQTRTFGTFTGALLELADWLREQGVTHLAMEATGVYWRPVWAVLEGQFEQMLVNPQHIKAVPGRKTDTKDCEWIADLLQHGLLKGSFVPPTPIQDLRDLTRYRAELRQSQARVANRIQKLLEQANVKLASVASNALGVSGLRMLEAIISGQADAAQLAQMARGKLKSKIPQLEQALEGRVRDHHRFLLAEYLDEWKSFGERIRRIEAEIDQRIRPFESAVTLWQTIPGVDRVTACNLVAEVGVDMNQFPTAQHLASWAALCPGNHESAGKRMSGHTRDGNKWLRRSLCQAAWAVTRQKNCYLSAQFHRIAARRGVKRAVMAVAHTMLVIGYHMLKTGQTYHELGATYLDQINKDQLQRYFVKRLQRLGLDVTVTPAIAA

SEQ ID NO: 448197 - protein, 366 aa, unidentified
MEVTTIGIDLAKNVFAVSAADSSGRVVMRRQLRRAQVLGFMRGLPRCVVGMEATGGAHYWARQLSALGHEVRLMSPALVMPYRKGNKTDRNDADAILEAVTRPSMRFVAVKSVAQQDLLGLHRVRAQLVKNRTALCNQLRGLLRERGVAVRAGVAALKRGLPAALADDSSELSGEMRELLCEMSQWLRTLEQRIASCEARITRKFKHDERCQRLAEVPGVGPLTATALVAAVGNAQRFRNGRELSAYLGLVPRQHSSGGKTVLLGITKRGDRYLRTLLIHGARSALRQCKLKGDARSEWAARISAERGPNVAAVAMANKNARVLWALLTRGDRYRSTSKITSAVLHPGSPPAINRARGAKLRVIRD

SEQ ID NO: 448198 - protein, 464 aa, unidentified
MRTIGLDLAVTGEHKAIVLDDATTEYITPILRLRTSAGELSRLLERAREGVTDAPVRVVMEPTAMAWFPVSAFLRRQQVDVYLVNSQQVAALRRYYRHHAKSDRIDARILARLPLFNPEHLHPLLMPSPKLFACQRGCKRADRLTRQITAAQNRIRDLDRFLWPGLEGMVFSEPFAPAARWFRDQFYDPRCAVAAGADTIQKNWLASALVGQDDGRWAEPLVTLAGQVLALYGAEDESVDFDLLQEDVRREQAMMADCEVALRELRNHTVRPLYRQLHPSRNLETIPGVGQDGAAVYVSFMVDPRRFDSQRRFRSWTGMIPKSSQTATSEAKGLHITQAGPNLVRKFAYMGADAARKRDPQIAQVYYTQMVQYGKHHSQALCTCATHLLDRIRVVLMEDRPYELRDVSGERITSEEAMHIIATRYTVSESVRKRNNKRARKERQERRAERQQMGKAIHVRKGQA

SEQ ID NO: 448199 - protein, 355 aa, unidentified
MCSKKTGDIEDLAVVGIDMGKDTFHMVGFDRSGQLVMRKQIKRLALNATFAQLPRCIVGMEACLSAHFVSRTLRGMGFEPRIIPAIYVKPFNKGQKNDYNDAEAIAEAALRPNLRTVSEKDQDQLDLQALHRVRARLVSRRTATINQIRAFLIEQGITVRSGLRALKNSFEAILEQRRDEISPRMRGILIGLYGDWLWLDKRIEDVSGEIEEISRTEENCANIMTIPGIGPMISTAMVAAVGQGEAFDRGRDFAAWVGLVPRQFSTGGRTILGRITKRGSRYLRMLFVQAAKVIMMRPHRWSDFSFGPWLTEAVARMPRNKAAIALANKLARTAWSILRNGTRFDAPKDAAMEAI

SEQ ID NO: 448200 - protein, 456 aa, unidentified
MAKRSSFKRNELFPVINPHAAGIDIGSKFHQVSIGEGISARFGVFTEDLHELANYLLAHGVNSVAMESTGFYWKNLFVLLQDYGLEVILVNARHTKNVSGKKTDKVDADWIRKLHSCGLLKASFQPDLFTEELRVYCRHRARLIEAGASYIHKMQKCLVLMNIQLTNVIADISGKSGMRIIEAIIEGERDPDKLAALGSTRLKASKEVLRKSLEGIWRPEVVFELKQCHELYLYHKDKITECDSQIEQLLTQQTQQHSAKEDNNGPSDPPAKMRNAKNYPNFDIIKLAHQLSGGIDLSLIPGVGPTTILTIISEVGCDLKSKFPSAAAFTSWLGLCPNNKVSGGRTLASRTQAKKNKLKEALKKAANAVERLKEQNALTHFFHRIKARKGRKVAVTATARKIATTIYAMLTKQETFRPLEIEKYLQLVRKQKVNKVKRIIAQFEISTEEIQVALSA

SEQ ID NO: 448201 - protein, 349 aa, unidentified
MGVIGADTHRDFPQVEIAYPSGAMIATRSFSNDSVGYAQTLAWVFEHAPGPRLVLSIEGTRSYGAGLARAAATAGLPVIEAEQPRRTHRRGRGKSDSIDAHLAVLYAVGLDAAQLPTPRCDGDREALRILLCARQELTTTTTGQTNRLRALLRDGDDTDRQLARARLTDTVLASVARRRLPAHASRQQAVRQGEIRRLALALRDAGRALTTNRAELAAIVHDLVPGLLSQPGIGPVSAAQAIVSFSHAGRCRSDAAFAKLAGTSPIEASSGQTTRHRLNRGGDRALNKALHVIATTRMRDDPATQAYLARRRKQGKSDREIRRCLKRYIARQLFGTLTAAMTPTTAAST

SEQ ID NO: 448202 - protein, 362 aa, unidentified
MNKKRMPTSQDPKPLAADQVDPCGTEVSAEELIVALCRKGVQQPLKSFPNTPEGHREIGRYLARPGRLVRVCLESTGVYGLDLALALAAQAGIQVMVANPRAVRHFAQALMERNKNDRVDAGVLQEFAARMPFEPWQPPARPALHLCALARRLEAITDLCAAEKNRLHASAAAQALPAIIRQDLERSIRFHQRAAQRLTREALKIISTDSNLQQRYTLLVTIPGIAQTSALRILAELVMISSHLDVRQWVAYAGLDPREYSSGTSVHKKARISKAGNRHLRRGLYMPALVAVRHDPHLRAFYEHLLALGKLKMQALVAVERKLLHAIYGMFKHQQAYDGTKVYRLPDALASASPAPVRMEAA

SEQ ID NO: 448203 - protein, 406 aa, unidentified
METRFAVVIGLDVGKTAHHACALDPDGNKLFDKPLPQDETKLRELFTQLQNHGEVLMVVDQPNTIGALPIAVARDSGCSVAYLPGLAMRKAADLYPGRSKTDARDAFIIADTARTMPHTLRSVDRDSEVLSALKVLAGFDEDLAHETTRALNRIRSLLTQIHPALERVFAGGTLSTGLVLDLLEKFGGPTGLNTAGRGRVLRFARAHSRRDPEVLIDQIFTALAEQTVVVPATAAVELVIPRVAGQVKELKDQRATVAREVEGMLEDFPLASVLMSMPGIGIKTAAQILLNIGDGTAFESAGHLAAYAGIAPVTRRSGTSIRGEFPARSGNKRLKNALFYSAWVATRCDPISKAYYDRKRAEGKRHNAAVICLARRRCNVIFAMLRDGTYYQPPITPAPEPTALAA

SEQ ID NO: 448204 - protein, 349 aa, unidentified
MEEITTIGVDIAKNVFQLHGVNAEGHVVLRKALRRGQMQPFFEALSPCLIGMEACATAHHWARTLIASGHDVRLIPPNYIKPYLRRQKNDAADAAAICEAVTRPSMRFVPVKNEDQQATLMLHSARELLISQRTALINALRGHFAELGIVAPQGARNVRQLIAILEDERYSPQAVRTALTPLATVLIEIEGQITKLDKALLAAHRNNDVSIRLATVPGIGPVIATCLSASVSDPKLFEGGREFAAWLGLVPRQHSTGGKPRLGSISKMGNRHLRKLFVVGAHAALYRMKKGTADTPLANWARGLLSKKPFKLVAVALANKIARIAWAIMARNVNFQSERVSRCPDLVPA

SEQ ID NO: 448205 - protein, 342 aa, unidentified
MNIITVGIDLAKNVFAVHGVNDNGKPALVKPKVSRADLLPLIAQLPPCLIGMEACSGAHHWARLFRQHGHTVKLMAPKFVAPYRMTGRRGKNDAADAAAICEAVTRPAMLFVPIKEEHQQIILCLHRTRQGFVEERTASYNRLRGLIAEFGIVLPQKVTCLRREIGAHLEDLPGYANRCVADLLTHADRLDERIAEYDRAIAQAARDDAASRRLMKLPGIGPTTASALLASIGGGHDFTSGRQVAAWIGLVPGQYSSGGKARLGRITKAGDNYLRSLLVMGARAVLNSIGDKQDRFSRWARSLQERRGYWRAVIAIAAKNARLAWAVLKYGEDFKLEPAKSE

SEQ ID NO: 448206 - protein, 356 aa, unidentified
MNKITTNFCDQTVFIGLDVHKRSWNAAVYLNDQYLRNIHQPPSPLALYKYLTANFPGANYLCAYESGKFGYWIQRELNSKGIDCYVVNPADIPSTHKDEINKTDRRDARGIAMALQCGQLKSIYIPVPQQEADRSIVRQRKKIWRDLVRCKNRIKGFLDYNGVTVPDKFSNSNWSRNFITWLQALAFEYPGTRVTLNYMIREAELLRKELLAISNDIRKLMRSAVYKKLYYLLRSINGIGPLTAASLITEIADMHRFSSFYRLNSFIGLLPMEHSSGERELKGRLTVRKHRQLRSDLIECAWTAKRNDPALSLYYIEQLKKGKEPKLIIVKIARKLLSRIRYVWLTQQPYQSGIVK

SEQ ID NO: 448207 - protein, 343 aa, unidentified
MHTTKQDALYGGADLHGRNVFISLCDSDGQTVYKKRVKADFASVDNALKPFKDRIVRIGVESTFNWYWFVDDLSEAGYAVDLGNVPKMEQYAGIKETNDLTDAAWLAEQERLGIFPACYIYPKETRSVRDALRRRQLLVRQRTQSVLSLNSLLARTGNETRSVDTLRSWKQADTEKLELDTFGQVQLKALLESFQGNDRVIAELESAVLEFAKPTWQYKRVQQAPGIGRILGMTVSLESGEFDRFPSAGDYASYSRTVKTRRLSNGKKKGSNNRKNGNKYLGWAFIEAATYAARYYPRIQAWYDRKKQRKNVTIAKMALACKLSKAVWHIMNGKDYDEKMLFG

SEQ ID NO: 448208 - protein, 326 aa, unidentified
MQSFLGVDVSKAKLDAALLLSSDKFKSKVFANDRLGWQALVQWLQGHLPAGLDALHVCMESTGSYHEALACALHDQGLVVSVVNPLLVKRYAEANRLRNKTDGGDAKCLAQFCKAQKPERWQAPSAAVRALQALVARLDTLHGLHQAECNRRDVAHPAVAGSIEQLLTELDTAIAQVKAQIARTIDDDPDLKRRAALLQTIPGLGERTIPQLLGYIGRPERFKSVKALIAYASLAPLIRQSGTSLDKRRGTHPLGHHELKRALYFPAMVAGRHNPLIAAFWSRLKAQGKPGKVIVVACMHKLLAIAYGVLRSGQPFCADPQKPKAA

SEQ ID NO: 448209 - protein, 372 aa, unidentified
MSNTAPSTNAPSTNAPSTNAPSTGVIIGVDTHKLTHAAVAISALGARLGAITIPVNGKGYRALKAWAQSMGPVRAFGIEGTGSYGAGLSRFLCEHGHTVLEVNRPNRQLRRQKGKDDPLDAESAARAVLAGQAAALPKSGTSTVEMIRHLKVARDTAVKGRTQAMQTLKAIIVSSPDALREQLDRLAGKMTLIRHIAALRPGSLTSTTASAKTSLRAIARRWLALDAEIKGHDAHLEQMTQQLAPELVQAHGMGAGTAAEMLLLVGDNPERIRSEGALAKLCGACPIPASSGKTSRHRLNRGGNRQANAALYRVVIVRMRGHQQTLDYIRRRTAEGKSKPEIIRCLKRFVAREIFGYLCRPPNAAPPAQMAA

SEQ ID NO: 448210 - protein, 340 aa, unidentified
MGEVTTIGLDLAKHVFQVHGVDAEEATVLRKQLRRAQVLAFFSRLRPCLVGLEACATAHYWARELRALGHEVRLMPAQYVKAYIKRNKHDAADAEAICEAVGRPTMRFVPGKTADQQAAVLLHRGRERLVRQRTGLVNALRGHLAEFGVIAPQGLRNVGKLIAIIRDNGDTRLPDVARQVLQVLANQIEQIEAAVAGLERQLLAWHKTNAVSQRLASIPGIGPIIATALATTVADPNVFHSGREFAAWLGLVPRQNSTGGKTRLGGITKRGNRYLRRLLINGASANLLRSKATNADPWVIGLRRRRPPLVVAVALANKTARIAWVVMLREREYQPRAVAA

SEQ ID NO: 448211 - protein, 342 aa, unidentified
MYHYAGIDVSLESSAVCVVDGAGKIVREAKVASEPEALIGWFRSLGLPVERIGLEAGPLSQWLYAGLREANLAVELLETRHVRDAFKAMPVKSDRNDARGIAQLMRLGWFRPVHCKSIEAQETRAILTARKLLQSKLRDVENSLRGTLRGFGLKVGKTTEQEFAGRIEELVSGHSRLEVIAQALLAVRAVLRKEFAAFEKQVRKMARTDARTRLLMSTPAVGPIVALTYASAIDDPSRFKSSKQAGAHFGLTPKKHQSGETDYTGRISKIGDSSVRTSLYEAAHVMLTKPLKGCSQLKSWAMRIARRAGMSKAKVALARRLAVIMHRMLANGTPFNAAAAAA

SEQ ID NO: 448212 - protein, 338 aa, unidentified
MSIVTLGIDLAKNVFALHGVDATGRAVLVRPSVPRGKVLEAVAALPPCLIGMEACSGAHHWARLFQAHGHTVRLMAPKFVAPYRLSGKRGKNDAADAAAICEAVTRPSMRFVPPKSVQQQSELMVHRARQGFIVQRTATINRIRGLLSELGIVLPLKAATVRREALLQLEDLPGWVNTVIGDLLSEVHRLDERIAQYDRHIEHIAKESAAARRLMQLPGVGPATATALAAMIGNGHEFKSGRQLSAWLGLVPGQYSSGGKQRLGRITKAGDPYLRMLLVLGARSVLQAADGKTDPVSRWAVQLAARVGYWKAVVAIAAKNARMCWAVLQRGESFKLPT

SEQ ID NO: 448213 - protein, 351 aa, unidentified
MSDFLVAIDLAKNVFELAVADESGAILERRRLGRTQFMRFFENRSFRRVVMEACGSAHYWGRWFMACGFEVALLPPHYVRAYVRRNKTDRADVTAILEAAKATDIIPVRVKSVEQQALQSLHRLRSAWHSARTARINTLRGLCREFGVIAPLGAKRGIAELGREVADPDSAVPSLLRRALRQLLAEIRSLEESVHAIEAELAQIAAQSEACTRLRTIPGVGLIAATAIVGAVGDIRRFRNGRCFASWLGLTPREHSSGDIRRLGSITKRGDKYLRTLLVHGSRAVIMSANAAQRKGQPLGAFRQWASETRLRCGHNKANIAVANKVARIIWATWYRQRDFEFRAPAVALAA

SEQ ID NO: 448214 - protein, 358 aa, unidentified
MSDGSKGRPKITAGVDLGDKYCYLCLIDTQSGEVVEEGRLRTTPEAFGRRFASERPMRIAIEAGTHSPWVSRVLEECAHEVLVANSRKTRLIYSNKRKTDEVDAENLARLARVDPKLLYPLKHRNEDSQAHMALIRSREALVSCRTQLVNHVRGAVKSFGARLPKCPARSFHKKAPEHIPEALRPALGPILEQIGSLTESIRQYDRKVETACEELYPETELLRQVEGIGPLTALTFVLTLEDPYRFQKSRSVGAYLGLVPARDQSGDRDPQRRISKEGDELLRKLLVSCAHYILGPFGSDSDLRRHGQKIASRGAKNAKKRAVVAVARKLAVVLHSLWVSGEIYEPLRNTHRSRDQAA

SEQ ID NO: 448215 - protein, 350 aa, unidentified
MPIVGGLDIHRKQITFDYLDTATGEVRRGQIAPADRAHLRAWLARFAGRDDVAFAVEGCAGWRYVAEELAAAGIAAHLGEPADTAARRGRKRHAKTDKTDARHLRTLLAEGRLPECWIPPAQILEYRALLETYHDLRRAHTAWVQRIHAVFFHQGAPPLADDALRTEQGLARLRAAAAAHLSPAGQLQVATALDMLAATEARMGPLRKQLTQTARHLTGARVLAERLYGVGPVTGLALTCWLAGKGRFSSSRKAVRFTGLDITVHSSDRKGPPGRLSRQGPPVLRWAVYEAGKTHARTSAPDHGYYAAVAGRKGGQSVPDEKRSFSQHPELAAQAGRKGGQASHGSGRPS

SEQ ID NO: 448216 - protein, 413 aa, unidentified
MDIVYRCCCGVDVHKESVSANLLRRGVKRKEDIDEVRSFGTMTKDLLAMADWLKEAGCTHVAMESTGVYWKPVFNILEAEFEVLLVNAKHIKYVPGRKTDVKDCQWIAQLLQHGLVRGSFIPPKPIRELRDLTRQRRKLIQEKSSVVNRIQKVLEDANIKLGSVASDVMGKSGLEMIRAIVRGEDDPKKLAGLALGRLKAKEEELVYALEGRVTEHHRFLLSEYERQIEFLDEMIERFSARIEERIQPFFACIPLLDTIPGINLRGAEDLIAEIGVDMGQFPTVKQLGSWAGMCPGNNESGGKRRSGKTPKGSKWLRAVLSEAAWAAARKKGSYFGAQYRRLVRRRGKKRAIVAVGHSILTIVYYVLKNQVKYQELGEDYFDKLNIEHLRRHYVKRLESLGYSVDIKEVSKVA

SEQ ID NO: 448217 - protein, 340 aa, unidentified
MNKLIKKKHFIGVDISKDTLDLALLEEETFGTFIDKKIENSLRGFDRILEWLDKQNKKLEDCFFCMEHTGTYGLLFFAWLSQMEIDYCVEPGMQIKRSLGMTRGKNDKVDARRIAEYAYTNKAKLKTFTMPSTLVVQIKQLLTYREQTVRIRSSLKNSLKSHRQYQRVSGLKKITKQIADQIEQQDRLVKEIEKQIVELIETDPQMKKNFELATSVKGIGFVIAAFMLVTTNNFTSFENGRKYACYSGIAPFEYTSGASIKGRSKVSHLGNKTIKTLLSNGANSASKWDPQLKAYYKRKEAEGKDHKLIMNSISCKLVNRVFAVVKRQTPYTCIYEHNFA

SEQ ID NO: 448218 - protein, 423 aa, unidentified
MMKLKYSICCGLDVHKNVIVATIVTTNKDGISEYLQKSFSTINSDIQRFHNWLIENNCYHVCMESTGKYWIPIFNYLENDIDVCLTHPKYVKAIKGKKTDKKDSKWIADLYKFDLVRCSFIPPKDFRQLREIARYRFKLVCMKSSEKNRIQNCMTVSNVGIASVLSDPFGKTSTEIMSYLLKHTADSMDEKAVRKLIKQRAKAKSDEIIEAIKGYSIETDQAKKLKLARGHLEYLDDMITQTEVELYVRIKPYYEIVEFVSSMPGMTDLSSTIILVETGVDMTVFDDAKHLCSWCGLSPANNESAGKKKSVRISKAGDYLKPMMVQCALAAIKSKKQPYFAIKYGRIKKRRGHKKAIIAIARMMMVCIYHMVSEKKPFTPTDYEELIDSQNHVERVVLNENNVFAYLESLGYDSSKLVKRNDN

SEQ ID NO: 448219 - protein, 427 aa, unidentified
MGVDTHRDADVAAVLSVTGTVLATGEFPATAAGYRDLLKWARKWGAVRRAGVEGTSSYGASLSRYLLAQGIDVFDVNRMDRADRRRRGKSDPLDAQNAAGAVLSGRARARAKSGDGPVQIARMYKLTKASAVKARTQAINQLNAVLVTADPALREELAGLGNAELFRTCARFADVSSLEEVGEESVLQATRITRGLLAHRIGQLSGQIRDVDARLARLVECHAPQLLDVVGVGPDTAVALLITVGDNPERLGSEASFAALCGVSPVERSSGRRQYRRLNRGGDRQANAALHRIVFTRLRVDPRTQDYYERRIKEGKTRREIVRCLKRYARGLPPGHTATASTPLIGAVTPPERTAARRARRSVRGGLPQAGACGCVEYLGKHGVEHEFGAAEHREGAGVVDGAPRQVDEPAARTTLDIGALHIGASR

SEQ ID NO: 448220 - protein, 359 aa, unidentified
MLYLGIDQHRKQLTVNVRDEQGDVVLKRQVSTQWDRVRKFFEDLQERAEPEGGFLAIVEICGFNDWLLEMLKDYGCRETVLIQPEKRSRKKTDRRDASSLSQLLWVNRQRVLGGKRVQGLKRIILPSQEEQDNRQLTAWRQRTAALRTRTINKVQHILLKHNLQQECPTKGMKTKKARHWLTELPLGEVDRLAMDQLLAQWELWDTQIAKIDAKIQERQQKHKTAPILATLPGANAYSSLALASRIGAIENFPRPGSLANYWGLTPGCRNSGDATDRLGSITKEGSAMARFILGQLVVHVLRRDASMKAWYARIKKRRGSKIARVAVMRRLATIIWHMVKNNEPYCMGGPPRQRQKKAA

SEQ ID NO: 448221 - protein, 313 aa, unidentified
MSQNNPPILHAGLDVAKSSLQLDLAGKSHCLSNDAKGHAKLLRLLGSHPGAHVVCEATGGYEQPVVRVLHAATLPVTIVEAGRVRHFAKAKGLRAKTDPIDASVLSAYGRTFQPPATLAPSATQARLSHLSHRRLQLIDTRIAETNRAAHYTDKWLLRQTRQLQQLLEKQIAACDCAIAELIAADPDLKFRAQRLDAIAGVGTVTAATVLAQVPELGKINNNAAAALVGVAPFNRDSGDQSGKRHIAGGRKAVRCALYMAALSAVQFDPILKAFYMRLRAAGKKPKVALVAAMRKLIILMNRLLKNPQFQLAH

SEQ ID NO: 448222 - protein, 413 aa, unidentified
MMETIYVRCAGLDVHKKTVAACVRVQAEGAELVTETREFGTMTRDLLLLSDWLAGYGVTHVAMESTGVYWQPIYNILGGDFEVLLVNARHVKMVPGRKTDVNDSQWLAQLLQVGLLRGSFIPDRGMREMRDLTRQRSQLVGERTRVANRIQKVLEDANLKLASVASDILGVSGRAMLAAITTGQDDPVALADLARKRLRNKIPDLQLALTGRVTAHHRFMLGLLLDQLAQTEGLIARLEEEIERQLAPFATAIPLLTEIPGINETAAHALLAEIGTDMSRFPTGHHLASWAGICPGNNESAGKRKSGRTRHANRWLKTVLVQIAWAASRTNDSYFQALYYRLARKRGKKRALVAVGHSILLTVYQMLKTGECYRDLGRDYFDRHDRARMTQSLVHRLQHLGFKVTIEAETVAA

SEQ ID NO: 448223 - protein, 352 aa, unidentified
MSHTTATSCASTITVGLDLGDRFSRHCEMDFQSGVIAEGRLRTTAEALQRQFAGRESLRIVIEVGTHSPWVSRLLENLGHEVLIANARRVRLIYANDSKSDKVDAETLARVGRLDPKLLAPIRHRGEAAQADLARLRARDCLVRARTQLVNHVRGAVKSLGGRLPPTSTPAFPRKVEPHIPASLRPALQPLLEMIASLNQQIRAADRALEALARQRYPETERLRQVSGIGAITSLCYVLTLEDPARFKNGRSVGAYLGLRPRQRDSGAQSPQLRITKRGDAMLRRLLVGSAQYILGPFGPDCDLRRWGLRLAERGGKNAKKRAVVAVARKLAALLYTLWLTGADYEPLRQAA

SEQ ID NO: 448224 - protein, 366 aa, unidentified
MKKLTTKGICRTGKLQDQQLTIGLDLGDRSSFYCVLNGAGEVIAEQKVSTTPDAMKKTFGKMARSRIALETGTHSPWVSRLLADLGHEVIVAHARNVRLIGESRRKDDRLDAQALARLARVDPQLLSPIQHRSAQAQADLSVIRARHALVRARTALVCAARGLTKSFGERIRGYSAKGFRQATGEALSPQLQVALAPLLSALETINERIREYNVQIEKLAEESYPEVALLKQIKGVGTLIALTYILTLEDPKRFRKSRDAGCYIGLQPGRRNSGQSEPQLHITREGDSYLRMVLVQGAHHILGPFGEDCDLRRWGLKLAERGGKNAKKRAIIAVARKLAVLLHHLWSSGEEYEPLHNTQKRTLAAA

SEQ ID NO: 448225 - protein, 427 aa, unidentified
MPYRIAGIDVHKRMLAVVVSAVEVDGEYQFERRRFGSNPAQLRQLADWLLEQQVEAVVMESTAQYWKPVWGTLERYWKPFCQKREGARPMSGTLHLAQAQSNRARRGRKNDFADGERWVKRLMAGELTLSLVPDPEQRLGRTVTRAQQQQTRNRVQLQNRLEARLEEAHLKLSSLVSDWLGASARRMLQARADGETDPAALAALADYRWRATPEPLGDALGACQELNPVYRRLLKMALEELHRIEEQMGQLDPEIAALLRPHQDQVQRLAEVPGLGVDSAQQIIAQVGVTAATFPSEGELASWVGACPGDNESAGVSRSHRSPKGNRPMRRILNQAANAAVKCKGSIFEILYRRYVPRLGHRQTIGVIAHRLCRLVWKILHQGVRYEERGPAVSKQSKQRRATRMIRELRSLGYRVEFLNSQSAATQ

SEQ ID NO: 448226 - protein, 320 aa, unidentified
MGGLLAQTSVRADAGGYRRLLDFAQAQVPGQRCWAVEGAGSYGAGLTSFLQAHSERVVEVSRPKRPPRRSGAKSDALDAVRAAREALTQDHPLAPRRRGDWEALRVLLATRRNACAAKISAINQLKALIVGAPEELRAELRGLATKRQITRCAGLRDRPSRSLEHRMTVRALRSTARRIRRLAAEAAGLRAELERLVAAVAPWLLELPGVGPISAAQVLVSWSHAGRLRSEAAFAALAGANPIPASSGQVTRHRLNRSGDRQLNRALHTIVVARLRDDPVTRGYAARRTVEGKSIRDIRRCFIGRVSRPRSTWSWVVTAR

SEQ ID NO: 448227 - protein, 345 aa, unidentified
MKILALDLGNYKSVACIYETSSLSHRFTKVVTTPKAIHDLLVEEEPDRVVIEICPLAGWVSDLVRALGMELQVASTTHDAWRWKNVKRKNDRQDGLKLAQLSALGQLTLVHVPRIGVRQWRALINYRQRLVSRRTKIQNHIRALLLRQAVAMGSGHRGWTRAGIAQLEGLARPLHEVEGEELWRGELALELEGLKALAEPLRQVEQKLDELGAADERVQLLRTIPGVGPRGAEALAAVIDKAQRFKRGKELGAYLGLVPKQIQSGESNRLGRITRQGNRLLRSLLVEISWSGLRYNSWMRSVYERVRRGSKTRKKIAIVAVARRLLIRCWAMLRDGTTWRPASST

SEQ ID NO: 448228 - protein, 382 aa, unidentified
MTGTEPHAWGTGLMDDIIFVGLDVHKATVCIAVAEGTRGGEVRQLGAFENRPEILSKVVSRLSKGGRRLSFCYEAGPCGYGLHRLLTGYGHECVVVAPSLIPMKAGDRVKTDRRDALMLAKLHRAGELTAIWIPDAAHEAMRDLVRARATAVRVLVKARQHLQGFLLRHERIYRGARAWTLAYRRWLSTVHFEHPAQQIVLQDYIHAVQEAETRRDRLTQQIEELLPNWSMAPVVAALQSMRGVALIVAVTVVAEVGDFRRFANPRQLMAYLGLVPSEHSSGPSVRRGGITKAGNALARRVLIEGAWTYRMSARVSRKLYDRLEPLPAAVRDIAWKAQLRLCARYRRLAAIGKPKVVVTTAIAREMVGFIWAIARLAQPALV

SEQ ID NO: 448229 - protein, 483 aa, unidentified
MNDAKLYVGIDLARRANHKAVALKGEETASPQAARSKPVSFSHDRDGFLALRDRLREQTGAASLKGVTVNLEPTSGVWETVAGFLRAQGAEVFFTRTDVVSALRKVHSKFAKTDRIDARTLAGIPRSFPERLVPVVEVEERIRTLRQLSAQRQRLVEDQTAWKNRLVAKLETAWGPLMCSLNKEQRFSQLACAFFKRFARPAKVVACGRERFLSWCQTHTHANTDPHTFETFWQGAVESAALWSLLDDCKAIAVNWDVLHDLILQDLRLIAVFDKEIRTTEAQIRQARSDVPECDVVQGLPGVGKVVSVTLTAVLSPTTRFANTKKCGAYTGFTSRKKSSAGHDIEGLKITKTGNRRLKRDLALAADVAMHQDPQLAAFAIRLLRAGKHYNKVRVAVGRKLAVCAFSLLKRYNSGQTNVAYVWRDLQGHPIQKRQAKELARSLWDAYETQQKIKGSSPTPALPWQSENSTTQALNELPEADHD

SEQ ID NO: 448230 - protein, 316 aa, unidentified
MNNLTNVWVGVDVSKDTLDIHLYPLNKSFKITNTKVGIEKFVNQELSKFDVKQTTCEATGSYEKVFATTFKKHGYPVWVVHPQRIKGYIISTGCRSKNDKIDAKKIAEFASKNPPDYTAQERTENQEILRALVNRRDDLTKSLAEEKTRYQQPAHEPCRPSIESLMEHLESQIKVIEKQIKDILKKDEELSAKAQLLESIPGVGVMSATMLLSWFPELGLVSNRAIASLAGLSPFERSSGKYVGKRYIGGGRSLPRKMLYMCALSAIQYYQPLKEFYKRLIAKNKPFKVAIVAVMRKLIVLANTLLRKGEMCYTFN

SEQ ID NO: 448231 - protein, 342 aa, unidentified
MWIIGCDYHPRFQQIALVNTEGGECGQRRLEHKAEAERFYRGLAGQAVRVGMEASGHARWFERLLAELGHELWIGNPAAIRAAAPRQQKTDARDAEHLLELLCSGQFEKKMRIWVPTAAERDVRQLVMHRHRLIGMRTQVKNQLRAIALNEGMERKPGLWSKSGQQQFQGLELPAWTAQRRRDNLELLAELERRTEPLDQAVKQEAERRPEVVRLQTHPGVGPITALTFVLTLGDPKRFGCGGQVASYLGLIPAENSSGGKQRLGHITKQGNALLRCLLVEAAHVAARYEPELGRCHRRLAMRKNRSIAAVAVARKLAVRLWWMWIRGWEYGQLRESGSHAG

SEQ ID NO: 448232 - protein, 344 aa, unidentified
MGEVSTIGLDIAKSVFQVHGVDVAGVVVIRKRVSRARVLEYFGKLSPCLVGIEACPSAHHWGRELQALGHTVRLIPPSYVKAYLKRGKNDANDAAAICEAVTRPSMRFVPLKTKEQQSALMLHRTRQLLVRQRTMLSNALRGHLAELGIVSAKGRNGTAELLRIIADDRDSRVSAAVRGILNVLARQYGAIGAEIASIDKSIMALHRGCEASRRLAEIPGIGPVGATALVAEIGDWNTFSSGRSLAAWIGLVPKQHSTGGKERLGSITKQGNRYLRWLLVVGAMAVIRYARKHGTARRPWLGRLIERRPTKVAAVALANKMARMAWAIMVRGERYKEPRLSLAA

SEQ ID NO: 448233 - protein, 351 aa, unidentified
MPSKKDAAVIRAIGIDTGKNTLHMVGLDEKGAIVLREKVSRNRITARLVNMPPCLIGIEAGMATHYMSRELVALGHKVKQVPPAYARPFRQGHKNDFRDAQAVAEAVQRPSTRCVPIKTDDQLDLQALHRVRSRLIGDRTAVINQIRGFLLEHGIPVRQGPRFLRQQLPQILATRTDVLSPRMVRIIGEIVDDWENLDERIERVTDEIEGLARADVSCGQLMTVPGIGPIIASATVAAIGNGTAFAKGRDFAAWLGLVPKQMSTGDRTILGRITKRGNRYLRTLFVQGARAILLHPASWAKHSFGPWFTSAARRLHRNVLVIALANKLARIALTVLVQGRSYETRVEPAAV

SEQ ID NO: 448234 - protein, 423 aa, unidentified
MSQKETPNFERYLGVDLHKDYVVIGGVNGRQEIVLPPRRVELDDWPRWAKAHLLKSDVLVVEATTNTWDFHDGVVALVGRVEVANAGKIALIAQTRVKTDKHDVMKLAKLSAAGLIPEVWVPPEPVRELRSLLAHRRHLIKTQTRLRNRLHSVLHRHHLGLPEGGPFTAKNRAWWDGLAVSPTEKLHLRHDLATLEHLAPQMADVEADVERLSTTKPWAEQITYLLQLPGLGVLTSMTLLAAIGDITRFESAKKLVGYAGLGASVHDSGQTHRTGRITKQGRREMRWVLVEAGWAAVDKHPYWKAEFERLTRRMESAKAIVAIARKLLVAVWHVLTERAADKHADPQMVATKLMRWSWGLTDEQRGGLTSRQFIRYHLLKLKLGDDLTHLTYGNMPRRIATVEEVLALKPELRPLTEGTAPPG

SEQ ID NO: 448235 - protein, 405 aa, unidentified
MWETSSANYHPKEVFLLYVVGIDISKYKHDCCVIDSDGVIVQGPFSFSNDRGGFNDLLEILHSIPASEEIRIGFEATAHYALNLKLFLEEAHYSFMEFNPVLLSKFNKSQTLRRTKTDAIDCLSIARWLMTVNYKPHPVGFYHSFSLKSLTRLRDSLVRERSYYLVKITNILDLTFPEFKPFFNDRFSATALYLLENYGTAEKISHMNSQSYENLRKISYGKFSPQQFIKLKNLARNTIGEGNDIFTMQLESLLKLYKQSVTEIDTLESRITELILQINPKYLSIPGIGPLSAAVIYSEYGDFSKFDSPAQMLSYAGLEPGYYQSGTSVHKGRMVKRGSSYLRYTLMNLCAPLTRFNYVFAEYYDKKRAEGKPHRVACTHVIKKLIRVMFYLEKNDVDFDPSLLR

SEQ ID NO: 448236 - protein, 340 aa, unidentified
MDITTLGIDLAKSVFQLHGTDTNGVVVLQKKLRRGAVLNFLSKLEPCLIGMEACATSHHWAREIAVLGHDVRLIPPAYVKPYVKRQKNDAADAEAICEAVTRPNMRFVPVKTEQQQGVLVLHRSRDLLMRQRTMILNAIRAHFAEFGIIAAQGARKVAELVSRLRDDDSLGLPQTVRSALEALAAQLDSLAQEVRKIEGQLLAWHRQNVVSQRLETIPGVGLITATALAASVPDPTVFKSGRQFAAYLGLVPRQNSSGGKDRLGHISKMGNGYLRRLLVVGATSVTRRAPTTDTRTGAWVRSLLERKPARVVTVAIANKTARTAWALMVKGESYKAKPAI

SEQ ID NO: 448237 - protein, 450 aa, unidentified
MCAEKQKKSKTVNLPKHLQHINVHAAGIDVGSRSHFVAVPEGTSEPPVRAFESFTDDLQRMADWLITCEVSTVVMESTGIYWIPVFEILESKGLEVKLVNARHVKNVPGRKSDVLDCQWLQRLHTYGLLQGAFRPPEQICTLRGYVRQRMNLVRYAASHIQHMQKALAQMNLQLTNVVSDITGKTGMLIIKAILSGERNPLVLAALRDQRCKNSEETIARSLHGNYRPEHLFSLKQAVDLYSFYQGQIAECDQAILAQLATFDVASDSDKDNKPPTTIEEALQRMSGVDLTKIDGIDSNSALKIIAEIGINMNRWKSPKHFASWLGLCPGTKVSGGKNLSGKSKQVANRAAATLRMAAFTLFNSKSALGAYLRRQRSRLGAPKAITATAHKLARLVYAMLKHGSAYVDAGQDYYEKCYRSRVVHNLKRKAQELGYQLIEVSGLQQKTATT

SEQ ID NO: 448238 - protein, 356 aa, unidentified
MSRNANRTSAGFVNTIGIDIGKNTFHLIGFDEEGAIVLRQKLSRGQVEARLANMRPCLIGMEACVGAHHLGRALNAVGHDVRLMPAQYVRPYSKGQKNDFRDAEAIAEAVRRPTMKFVAIKSVEQLDLQALHRIRERLVCQRTAVINQIRAFLLERGIAVRQGPRALRSELPIALAKIHKLSPRMIHLIEDLSEDWRRLDERVETVTSEIEALSKEDHGAIRLMTVPGIGPIISTATVAAIGTGEIFSKGRDFGAWLGLVPKQMSTGGRTILGRLSKRGNRYLRMLFVQAARSVLLRAKSWERHGLKSWIEAAAKRLNRFKLVIALAHKLARIAWGVLNGGRNFESRSMPPASQPA

SEQ ID NO: 448239 - protein, 350 aa, unidentified
MSEHITIGMDLGDRHHIIVVFDNQGNEIATKRIANTKLALRKYFQRYATATVAIEAGTHSPWISRELQQLGLVVYVGNPRKLRLIWDSHDKSDERDARILAMVCRVEPRLLWPVKHRNAQAYNDLEVIKARDMLVQTRTKLINHVRCVVKSHGERLPGCSAQSFAKRVAGLLPAPLSDALSYLVETIADMSQRICDLEHKIEQLSTQRYPETQRLRQVAGVGPTTALTYVLTIEDPSRFRKSRMVGAYLGLTPRRDQSGASDKQLRISKAGNRYLRKLLVNCAHYILGRFGPDCHLRRFGLAIAARGGKNAKKRAAVAVARKLAVLLHRLWASQQSYEPLYAVVSNRKAA

SEQ ID NO: 448240 - protein, 349 aa, unidentified
MAEGGRQGEVRHSGVIPTEGAALDKVVRAWRAPNRVLDIVDEAGPCGFGIHRHLTARGEDCVVVSPSRVPKRSGDRVKTDRRDRVTRARRHRAGELRAIHSPDATDEARRDLVRGREDAVVVATQATYRLQACLLRPGRRYPGRAGWTLPYRRWVADRSFSRAAQHITLQEYRDAIDETARRIARLTEQVRQVAPTWRWAPLVAALQARRGVAFITARGVVAELGDRTRFGHPRERMAFVGLVPSESSSGPSVRRGGITNAGNPHVRRLLAEAAWADQGVPRIGRQQRYRQEGLPKGVCDIAWNAPLRLRGRLRRLVARGTSKPKVATAIARELSGFIWAMAREVSASA

SEQ ID NO: 448241 - protein, 338 aa, unidentified
MTVVTVGIDLAKNVFAVHGVNAAGKAVLVKPLVRRAKLLELIATLPACLIGIEACTGAHYWAREFQKMGHTVRIMAPQLVSPYRMSGRHGKNDAADAAAICEAVTRPNMRFVPIKSVEQQGQLFVHRAHQGYVSERTALINRIRGLLSELGIVLPQAFKAFLSGVAQVLEDLPGYCNQVIGDLLNELYHIEEKIKNSEKLIQQLARDNSAAQLLMQFRGIGPMTATAIVASIGNGHDFKNGRQFSAWLGLTPRQQSSGGKARLGRITKAGDSYLRTLLVLGARSVLLGAAKNDDPVSRWALQLKERRGYGRALVAIAAKNARMCWAMLHLRDEFRFPA

SEQ ID NO: 448242 - protein, 356 aa, unidentified
MYYSGIDLHKDNSYITTLDSKGKIIKQERLVNERTIIIDYFSSMVGKHKAVIESTSSWYWISDVLKQNKIDIKLAHAKHLKAISYAKVKTDKIDSTTLANLLRMDLIPEAHMISEDKRGLRDLMRTRLRFVQKRTSCYNSIHRIGEKFNCPMSEYMKNGTIPETLPPEYKLQVKLLDGQIDLLIQQIKELEKGLQKVLIPDEDIQRLLWIPAFGIITSFSVYLEVDGIDRFADVKNFLSYSRVVPGAKDSNKTKRNKSGNKEGNVYLKIAFTDAAVHAVRYYPEVREFYHKMLRRTNKAIARTLVAKELAKITYYILKEKTEYKGFKGKPISRHKTQVWPRLSSPRFGLDKSDPQC

SEQ ID NO: 448243 - protein, 356 aa, unidentified
MAEGTWVGLDVHARKVVAGVLDARTGELRTLRVLAPLAETVGWLRQLPAPVRVAYEAGPTGYGLARACSEIGIACTVAAPSKIPRAPGDKVKTDRRDAERLARLLRLGELVAVRVPEPHEEAARDLVRAREDARGELMRARQRLSKLLLRHGLVYDASAWTGAHDAWLRRQRFEAKPLALAFDESYAAVAQAKLRRDALDRAIVELAAEPPFVEIVGRLVCLRGVATLTALALTVELGDWTRFRPQSLGPFLGLTPSEDSTGERRRLGAITKTGNTHVRRLLVEAAWQQRRPLRESATLAQRRQGQPAAVRARADQSARRLHERWHALERRGKRRTIVAVAVARELAGHCWSLATM

SEQ ID NO: 448244 - protein, 349 aa, unidentified
MKILAIDLGKYKSVACNYVTTTGTARFVTVVTHVLELDRLLLRESPDLVVIETCSIAGWVHDLCCQRGVTCQVANPSSEAWKWKNVKRKTDRDDALKLAQLAALEQLPTVHVPAPETRQRRALLKYRQSLITRRVAIQNHLRAIVQREGILLDRGGRAWTAAGFEVIQEISKPLEQCSEDELWRGEAALELQALEAVTKLLREVERKLEVLAASNERVKLLRTIPGVGRCTAEVVVAYLDNPQRFENGRQVSAYAGLVPKQFQSGETDHRGRISRRGPSLLRKMLVEAGWILLRYNPWAQRLVLRLSRGQKTRRKQAIVALARKLLVRCWAMLRDGTEWHEPPPATATA

SEQ ID NO: 448245 - protein, 344 aa, unidentified
MSKQVVRGGDVAGLLERFARLREKARARTGKVFPFVVIQEAGLDGFWIDRALQNEGIESHVVDPASIATSRRRRRAKTDGIDGEVLVRALLAYKRGEPRVCAMIKAPTPEEEDRRRLCRERKVLIVERVRHVNRVKGLLFSQGISGYEPLRRDRRRRLDTLQTGDGRLLPVHLKAQVCRELDRLELLLEQIKAVEAERDVLLAAQQVAAPAPAAMLLDIKGIGPEFAAILWSEGLFRHFDNRRQVASYAGLAPTPWQSGSVDREQGVSKAGNPRLRTTLIQLAWLWLRHQPHSALALWFEERVRRNGGRLKKTTIVALARKLLVALWKYVTAGVVIEGAVMKRT

SEQ ID NO: 448246 - protein, 373 aa, unidentified
MKKVRFLGLDVHAETIAVAIAEPDGEVRSLGIIPNREEPIRKLVKKLGPAEQLQACYEAGPTGYVLYWQLTALGLKCEVVAPTLVPVKAGDRVKTDRRDATKLARSYRAGDLTAVWVPNEEHEALRDLVRAREVAKQDQLRARNRLSKFLLRHGRRAPAGIKAWTQKFQEWIKEQVHFEQPAQEYTLLDYLHEVEHVADRIRRLEQAIAEAVKLAPPQMQEVIQSLQALRGIAQISAVTLVAELGEISRFEGARQLMGYSGAVPSEASSGKRIQRGAITKTGNAHLRRIAIEAAWAYRHRPAIGLALRKRQEGLSEEVKEIAWKAQHRLHKRYRTLSAAGKEKQKVITAVGRELLGFIWAIGVQVERKHKRVA

SEQ ID NO: 448247 - protein, 354 aa, unidentified
MPKTASAQIAVIGIDIGKNSFHAVGHDSRGAIILRQKWSRGQIEARLANIPSCLIGMEACVGAHHLARKLAAFGHDARLMPAKYVRPYAKGQKNDFNDAEAIAEAVQRPTMKFVATKTADQLDLQALHRVRERLVSQRTGIINQIRAFMLERGIAVRQGVRFLRTELPIILATRTDTLSPRMLHVIEDLAGDWRRLDERVENLSSEIEAIARHDSGCDRLMSVPGIGPIISSAVVAAIGSGDVFSKGRDFAAWLGLVPKQISTGDRTILGKISKRGNRYLRVLFVQAAWVVLVKPMSWERHGLKSWIEAAKKRLHHNVLAIALANKLARIAWAVLAKGRDFEATRTVNGSTQPA

SEQ ID NO: 448248 - protein, 343 aa, unidentified
MQIRSVGIDLGKTTFHLVALSAAGRVLLRKKFTQKQLITFTANMQISLIGMEACAGSHFLSRTLREQGHDVRLIPAQFVRPFVKSNKNDFLDAEAIAEAVDRQNMRFVPIKTDDQLDLQAIHRVRDRLIARRTSVINQLRAFLLERGMTFAKTPFKLKVAMPDILENAEANLTPRMRNLVSLLWSEWKDLEQQIVGMNQEIEQIASSDPACQRLRQIPGIGPLVATAIVAAIGNGAAFHKGREFSSWLGLVPRQHSTGGKARLFGISKRGNRYLRKLLVHGARSAVLRVKRERSPFGPWLDTLETRAPINVVVTAAANKLARIAWAVLSSGQDYRAAVNSVAA

SEQ ID NO: 448249 - protein, 373 aa, unidentified
MKKAKYYGSIDVDDSSFNVALIKTVGEELLHFKCSSNVGAMIKKIKQKNIHLKDIQLCYEATYLGYTLYRELKGKGIRCEVIAPSLIPKAPGNKVKTDRLDCIKLAKYYLKGMLTPVHIPDEEDETVRDLIRSRKLLVDQVKKIKTHIISLCKRMGLDYRKQRGISNAAYWTQIHYKWLEKEINQLPKDSPLRLNLSSLLSTCHNIETFISTYDEQISVIAERPKYKDKVKALNCFRGLKTLSSLTLTTELGDIRRFPHPSKVTAYSGLSIREYSSGGKELRFGITKQGNRILRTVVIEACQFSFKPPKVSNILKERRIGADPEYINIADRCMHRLSKKSIRMFMNKKHRNKIKVACAREMLCFVWEALHKAA

SEQ ID NO: 448250 - protein, 370 aa, unidentified
MKQDSVFYVGVDVSKAKHAIAVAEGGRNGEVRYFGEIEARPAAVERFVRKLEKKHPRLHFCYEAGPTGYGLYRQIVELGQRCDVVAPSLIPKRPGERVKTNRRDAVSLARLLRAGELKGIWVPGAVHEAVRDLVRVRSAASEDLRKKRQQLLSFLLRHGRVFTGRKNWTRTHARWLAAQKFDHPAQQIVFQDQVDVITDAQDRLERLDAQLAELVPSWSMAPVVMAYQALRGVSFIVAVTFVSEVGDVRRFDTPRQLMAFLGLVPSERSTGDTVKRGGLTLAGNRRARRVLIEGAWAYRYPARVTEPIRVRLEGLPKAVREIAWRAQTRLCARYRRLMAAGKNKPIVVAAIAREMAAFLWAIGHQVEPVR

SEQ ID NO: 448251 - protein, 428 aa, unidentified
MQSYRIAGIDVHKKMLAVVVADVCGGGEFQFERRKFGTTPGELHVLAQWLVQQQVEEVVMESTAQYWRPVWEALEQFWQPAMRSREETAKMSGTLHLCQAQSNRAPRGRKKDFPDAERLVKRLVAEELTLSFVPEPDLRLLRTVTRRRYQLSRARVMFQNQLESLLEQAHIKLSSLVSDLLGSSARRMLKALSEGVNDPAVVAAMADRRLRATAEQLRDALGSCTDMNPHYRRLIKMALAELQLVETHIQELDQEAMELLHEHQEVVRRIAAVPGFGVDSAMQMIAEVGVAAANFATAKNLVSWVGVCPGDQESAGKSQSTRSPKGNRHMRRLLTQAAHAAVKVKGSIFELTFNRHMRQMKYKPAIWAIAHRLCRLLWLLLSKRVDYEERGPEVSAKSKRVRTSRMIRELKKLGYRIEGGPAELTLQY

SEQ ID NO: 448252 - protein, 329 aa, unidentified
MLDVETGELVERRLEHESGEARAFYAGLAGPVRVGIEATGHTRWFERMLGELGQELWIGDAAQIRASVVRKQKTDARDAVHLLDLLLSDRFPRIWRPSLEERDLRQLVWHRQKLVWMRIAVGNQLHALAMGEGVCRKKKLFTKKGRVELEGLKLGPWASYRRQELLTMLDQLDASMKELDQAVAEQAEQNRSAMLLMTHPGVGPVTSLAFVLTLGPVERFERSKQVVSYLGLNPREHSSGGRQRLGAISKQGNPMMRSLLVEAGHSAARLDSELRQDYQRLKLRRGSGVAKVAIARKLAVRMYWMLRGPASYAQLVRMQGSPWATLVKE

SEQ ID NO: 448253 - protein, 403 aa, unidentified
MNTDTTLVQRVIGLDAHPDTFTAALVRGPTPAAAVVEHTFNKVPMAQLQRWASKHTTTEDLIVLEASGNSFQIVRTLAAVERQALVLESCQMGKLKEAHANNDKISAVRIGKAYLAGTAKIVWVPDARTQERRDWFHAHRKAVKRTTQMRNRLLSYLSDNGVRLKQRAPLNLDALQQTRDWSARQWQVIEGLHMEWEHAQQQRRHWRSFIAQEVLTDPQLLSIVRLCGVRDIVAFALGALVGDIHRFATPAKLVKYIGLNPAFDDSGQGTWSGGIGGHGRKDLRCLLIEAAQAILRSKSPLAQWGKKLLARKGAVNLVVAAIARKLAVAVWYLMMGRWTPLEDIDSRLSIKVSKIISQVGAKGLQQLGKTRQALRQETHHSLKHGKPYVLDPDKKFPLTPSLA

SEQ ID NO: 448254 - protein, 349 aa, unidentified
MHFNTFLFFLNFKCMKNYELHVGIDISKLKLDVSFITDPTKKEHDHLIVSNNKTGLMQLVKAIKKRHTRMDEVLICFENTGVYGMLLAMFLSEQKIDYSMVAALEIKRSKGITRGKNDKADARDIALYAITHKHKLSLYQLPNDDIMKLQVLHNQREKLMKCILSLSMYSENEGFLQKEILKEVQGISNSGIKKLKELLKQTEDRMMEIIKANEQMKKQYELATSVPGVGQHVAIALILTTRGFSAFDEWRQLACYVGIAPFEYSSGSSIRGKTKVSRVASKKLKGLLNMSALAAKRSDKEIADYYKKKVGEGKNKMSVLNAIRCKVVARVFATVQRGTPYVNTQKFAA

SEQ ID NO: 448255 - protein, 333 aa, unidentified
MYKLFIGSDISKEVIDVAYYDQGKSHYLGAQFSNDIEGFEQVVQQLKKITDIPLSSWFVCFENTGVYSKPLLEWLFSQGIPCREENALKIFKSLGLRRGKDDKTDAMDICTYAFEKRDSIKPSILPKPLIVKLKKLLSRRDLLVKQKKALDVSLKEQKQILDTDLLESLEKGNEILIKEYKKQIKEVEALMEQLIGEDSEAKENHVLAQSVVGVGPITSATFIAYTHNYKCFTDGRKFACYSGVAPFPNRSGKRIGKTKVSHMANKRIKSLLSNVVNAAVMHDQEISIYYHRKIGEGKEKGIVLNAIKNKIIHRTFAVINRKTPYVRLMNYAS

SEQ ID NO: 448256 - protein, 354 aa, unidentified
MRILALDLGKFKTVACVYETAAGAHRFETIPTEYLEVGHLVDTVRPDRVVIEISPLAGWVGDLIRSQGLELQVANANGAAWCWRNVKRKTDRLDALKLAQLSAMNQLSLVHLPEPRVREWRSLIQYRQTLVAQRTRIKNRLRAILDQEGLPGLPTSQKGWTITALKVLRSAARPLEECARGQFWRGELWEELQQYDRLQEALGRVEAKLDKVGGSHSQVCRLESIPGVGRRLAEMVVAVIDDPHRFKNGKQVGAYVGLTPRQYQSGTMNRQGRISGQGHKHLRSLLVEVSWLGRRHNSWMKEVYERVSRASPARKKIAIVAVARRLLIRCWAMMREQTRWQGPSRRVSSLAQVA

SEQ ID NO: 448257 - protein, 339 aa, unidentified
MKEVTIIGVDLAKNVFQLHGAAADGSVVFRKKLTRVQFHKFMSGHPACLVAMEACGSSHYWAREMAQMGHDPRLIAPRYVKPFVKRHKNDTADAEAIVEAALRPTMRFVDPKTPDQQGGAVLFRTRAQFIRQRTEAINALRAHLYEFGYIAPIGVQNVKQLVEIVDADNSDLPALVRFSCRELIEQISRLTERLAVLDKEISRLSGEVARRLRTMPGVGPITALAVETFAPVMESFRCGRDFAAWLGLVPLQRSTGGKQILGKTSKMGQCDIRRLLIVGAMAVVGSSVRRGAPKGSWLEKMLARKPRMLVAIALANKMARGLWAMLTKNEEYRGPVMVG

SEQ ID NO: 448258 - protein, 353 aa, unidentified
MTQPALTRVTVGIDTHLDVHVAHAKDALGRRVETVSIPTTPAGYRDLLAWARGLGEVEAFGIEGTGSYGAALARFLRSQGQVVLEVNRPDRSARRRHGKSDPVDAEAAARTVQAGEATAVPKAGDGSVEMIRSLRVARATAMKARTQAGNAMKALLVTAPDDLREQLRALSVTQLVRTAARLRPGAITTPTAAAKLALRTLAERHQALSAEIKELNTELDRLTTKTAARLVALFGVGPDCAGALLVAAGDNPGRLRSEAAFSMLCGSSPIEASSGKTTRHRLNRGGDRQANAALYRIVVVRLRWHQPTKDYVARRTKEGKSKKEIIRCLKRYIAREVFAVLKDMTPQASTQAA

SEQ ID NO: 448259 - protein, 355 aa, unidentified
MGRHVIAMDTHCQFVEYVVMSESGRITSRGKIGTSIPELVKVIEAVRRPREVVMEEGPLADWLVRELRPHAEAVVACNPRRNALIAKESDKDDPIDAFKLAQLYRGGYVQAVHHGDSLERAMLKRHVALYHDRVRNRVRLSNRILAECRGYGVFVREGDLKETKDRIEVLKRLPTSKLVRTDLKLLLSEYDLACRNIQLLRRQLVRQAKAYEPIVRFTALPGIKWVRAATFFAYVDTPWRFRSKQALWRYMGIGLERRHSGAGPTQVRVPASVHVCRPLKNVIIGAAMSVIAGHDNRFAERYREWIHAGLTPRNARRNVARSLAAVLWGMFKNGGAYRPDGVGVPAADLSSCVLS

SEQ ID NO: 448260 - protein, 351 aa, unidentified
MAAKKRSLIGGVDTHRDTHHAAVIDTTGGLLADAEFPATTAGYADLLAWMRSFGRVTAVGVEGTGSYGAGLARYLTSKKIAVMEVDRPDRRARRAQGKSDPIDAIAAARATLAGTAMGTPKTRTGPVEAIRALRVARRGAVKACTAALNQMRGLVAAAPEPLRAHLTRISAAVLVSRCAVLAYDPTKLHDPQHATAAALAGLARRVTALTEEITLLDRQVTPIVRKAAPRTTALFGVGPDVAAQLLTTAGDNPDRLHSEAALAHLCGAAPIPASSGRVRRHRLHRGGDRGANHALHTIALCRMRYDQRTRAYLHRRITEGLSKQEIIRCLKRYIVRDVYTALRADFAALAP

SEQ ID NO: 448261 - protein, 362 aa, unidentified
MRTQTYKKSEPELVNFAGKTIYSGIDTHKKNWNVSIFIDDMFVRRFHQEADPKAFHSFLTNHYPGARYVTCYEAGFKGFSIQRDLSELGIECVIAHAADVPQTNKDKLQKTDKIDSKRLGEALSKKMINAIYVLDMQTEADRTLVRYRRKIKGILKSRKSAIKSLLFRLGIDIPPQFDKSHISKKYISWLRSLMFNEPSANYTLKAMIDDVEWLRKREYEHTKQLRILAASERYRDVYNELHKIPGVGLITIMTLLTEVVDINRFCSFKKLNSYVGMCPTEFSSGEKIKHGKITPRANKGVRTVLIEAAWTAVKYDPALSLKYSELRSRMESNDAIVSIARKLLSRIYAVWKNHVDYKIGVK

SEQ ID NO: 448262 - protein, 358 aa, unidentified
MNQQRRWYAGVDWASESHHVFLTDDEGRKIGEKVFKHGGEGLAEMAAWLKAASTEDPAQIHIAIEVPHGPVVETLMERGFKVHAINPKQMDRFRDRFTLAGAKDDSRDAEVMASALRTDGRCFRLLAVADPVIVELREWSRIAEDLGAERNRLTNRMREQLWRYFPAFLELESDLGAEWLLDLWETTPRPDKAGRVREITIARVLKRNRIRRFDAAHVLGILRQPPVTVVAGTTEAACAHVATLIIRLVNQQLKDAHHRLEVLTGRLIPSEETEPGQRKQHDVEILASLPGVGRIVLATLLAEAFDALQRRDYAALRSLTGVAPVTKRSGKSCIVVRRQACHNRLANAMYHWARVAVQ

SEQ ID NO: 448263 - protein, 344 aa, unidentified
MQITTIGIDLAKNVFQVHGVNERGKAVLRKKLRRDQVAAFFANLAPCLVGMEACGGAHHWARKLQAMGHTVKLMAPQFIKPYVKSNKTDAADAEAICEAVSRPTMRFVLIKNVEQQSVLSLHRVRQGFVKARTAQANQIRGLLGEYGLVVPQGIGYIASRVPDLIEDASIELPGTFRLLISRLLDHLKELQRQVEEIEDQIRAWHRSSETSQRLEKVPGIGPITATALAATVGDAKNFDNGRQLAAWLGLVPRQHSSGGKPTLLGMSKRGDAYLRTLLIHGARSVIYRAGQRADAESWLVKLVARRNANIAAVALANKTARIVWALLAREREFRSDYTTVRAAA

SEQ ID NO: 448264 - protein, 464 aa, unidentified
MYRELQPLRDALSQQLKADLFPAVAGVDPNKLLHTYLHRLTMFIGIDVADQTFTALAVDANDEVLGSLPNCPNNPKGFRTFMAWAEALRDQHGLRIIATACETAGIFYWALWDFLAQQPGLARVLYNPRTTEHMGEVLSKKVRNELVDALLLAEQLRLGSTPEVLLQEDADLLAARYYSRAARDLAQQINRKKNQLRTLLRAYSPSLTQTFPGCKLHHPAVYALLQEYIFPEEFVQAGAEAIAVTLMAHCRTAFGLAEAQQLVEAARQALPRPIHRQVIRCLVQHHLEDITTFRQRQQLYLQAGYRLIQNRPETKLLRGSVGAGISNTLALVTEVGDVSRFPAGKYVASFLGLTTSKHISGTTLFQSKHITKQGTPNGRYAAVNLAFHLSQRVPRYQAMYQRIVARKPPHKGHRLALVAIARDFVTHVLYDMWRYQRPFFKEVEEYHQYRQKHPRMEDHAMPLT

SEQ ID NO: 448265 - protein, 345 aa, unidentified
MKLIKKVIGVDISKDSFTIRFGTLDQELNQLVSKPFKFANDTKGFNQLLKTISKVHYFDSTDPASETVPIWFVMEATGVYYENFAYFLAEKKFSLSVVLANKVKNFSKTLDNKSKTDDIDAANQTQYGLEKKLKLWNSPSEIFKELKELSREYQSIKRSAAKIKNKLHAKSYSYKANKETVKRLNQHKKFLNQQLKQVKDQIKNLIKSDNDLNERINTVTSIKGVGMITAVTAVAETNGFALFENKNQLTSYAGYDVVQDQSGTHNGKTKISKKGNSNIRSAFYMPALSAARYNNKLKQLYIRLCKTKANKKIALIAVARKLLILIYCLWKKNEKFIQNYQTVTA

SEQ ID NO: 448266 - protein, 399 aa, unidentified
MIENYDSVDVFIGVDVGKSEHHAVLLDRAGKRRYDKALPNDEAKLRAVIRKLKLRGQVLLVVDQPETVGALRVAVAYAEGILVGYLPGLAMRRIADLHADEAKTDARDAAIIAEAARTLPHALRAIRLEDEQVAELSLLCGFDDDLVGQMTATSNRIRGLLMQIHPALERVLGPHLDHPAVLDLLQKYPTPTAMKAAGLARLGTHLLKLAPRIGRRLAEEIFQALAEQTAVVGGTNATSAVLPRLAEQLAALRRQRTEIAVEVAVLVADHPLEPIITSMPGVGVRTAARLITEVSGKDFATAGHLASYAGLAPVTRRSGSSIRGEHPSRRGNKALKRALFLSAFAALSDPVSRTYYDRKIAQGKRHNQALIALARRRCDVLYAMLRDGTIYQAQSPVAA

SEQ ID NO: 448267 - protein, 376 aa, unidentified
MNQLSGEISKGIGAEATQDKALGRVLKLGLDVHYRQVTVAMQEDGGRIKAAGKMGLGGFLNWVRTKLEQGWRIESCYEAGASGYWLHRQLVELGVQNLVVAPKAMGGAEAKRQKTDKRDSAQLCDGLDRYLRGQDQALSVVAVPTLEQEQNRALIRYHRQIIKDRTRAEARGKGLLCTQGIEVGGRWWEGKGWAEVQSDPRLKDWMKEQLEGWQKKILSAQSQEKPLREQIEALAPERLPKGVGAYSAAVLQHEMKGWKRFSNRRQVASYTGLCPGIHLSDGRGKEGSINRCGNPTVRWTLVEMVWRLMIWQPHYGPVRQLAAGLVKSKRAKKRLVVKAARRLAIDLWRLETGQTTAEKLGLIMRLRSSSKKNRGL

SEQ ID NO: 448268 - protein, 312 aa, unidentified
MEAVLECCCGLDVHRDTVIACLLRGPKDLKPEVMMKSFSALQDGLLKLRKWLEEENCRHVAMESTGVYWQPVYNILEEAFGGTIVIIVTNARHMKNVPGKKTDIKDAQWIAQLLRAGLLEGSFIPSKPVRELRDLTRYRRSIVEEVQAQKNRIEKFLQSCGFKLSTFLSDVFGVSGRAILEHLCNHGEITVSSVEKYLKGSLRKKKEDIALATRGKMTSHQKDFLAMLLKHLYSLEANIREIDLKTEEVSKKFKHQLEQLDGIPGIDKVSAAAILAEIGIDMDKFKTSAHICSWAGLSPGNNESAGKKSPLG

SEQ ID NO: 448269 - protein, 335 aa, unidentified
MHYLYYVGLDVSKETFDASLVAFEDANEMAHRKFANSRKGICSCLHWVEKRHGILLDDVIFCAEDVGSYISEMAVCASDRTLNFNFSLISPLVIKYSMGIARGKTDRVDARRIAEYAITHYRKIALYLPAEKELCQLRTWLILRAHLAKQRVAKLVLLEKLDYKEKFADVSIQRSMLQEEIAYAETHMKTIEREMKELIAADSNICRNYKLLTSIKGVGPITAIVMLCSTLNFTKITDHRKFACYCGLAPFEHSSGTSVRGGCHTSSMANRDIKVQLNRSALIAIRCDPQLKAYYERKVAEGKHKFSVLNAVRAKIAARCFAVVRRGTPYVALQI

SEQ ID NO: 448270 - protein, 337 aa, unidentified
MYKGSLRDMSEYIGIDVSKNKIDVCWLRSPDTLKIKTRVFRNTHKGHEELDRWLLKHVKKPAQDLQVTLEPTGVYHEALMYFLNEQGVTIFLANPGKAKEFAKSLGLTHKTDKSDATMLARFGRSQPSALRLWQPDREEIRELRAMLRRMDALESDLRRENNRREKTQCSEASPRVLASLDGMIEALESEIKHLKNDIDNHIDQYPDLKNNRRLLESITGIGEVMSRELVYLFAAKHFTNAREVAAYLGVIPKLNTSGNYKGRSTLTNNGPSKLRAKLYMASIVASEHNPDINAQRERLLKSGKTKMQALGAAMRKLSQICYGVVKNQCEYQPQIHR

SEQ ID NO: 448271 - protein, 371 aa, unidentified
MKNLLYVGMDVHKETITVACASEGEEIRVVGTIVNTAAALDAMIRKLVSGGKRPTFVYEAGTGGYVIYRRLREMGFTCMVAAPSLIPRKSGERVKTDKRDAVMLTRLYRAGELTGIAIPDADDEAMRDLYRVRNDAKQVCKSVKQQLLGFLLRMGLVYSASKKNWTKTHYNWLDGLSLSHPAQQLALQEYLDAIRQGESRVARLEGMLQSSALQWKRLEEVKRLQSLRGVSFITAVGLLSELGDLRRFKNARQLMAYVGLVPSENSSGNTIRRGRITKTGNAGVRWLLIESAWSYRVKARKSSHLLKRLVQVDAATAELSWKAQVRLCGRYQRLLQKGKPKGKVITSIARELAGFIWALGTMETTEQRQAA

SEQ ID NO: 448272 - protein, 412 aa, unidentified
MYYVGIDIAKRTHVAVVMKEDNSLKIKPFSFNNDQSGFKKLLIHLQTLCCERSDIIIGMEATGLLFENLYRYLQDIDYNVVLLNPYQTAKFREMDTMKRVKNDNIDSVMIAALLKSGRFSEGYVSQEQLQSLRELYRHRASIENQLKSLKRQTSAILTVVFPELETVIRDPFNVSGLALLDKYPTAKHYTNASVDRILKTFRGIKGNNFNRDKAQALLDASRRTIYSGIAKDARAFNIRTNIEQIHLLQKQLEQTLEMMQLLFNSKEVKQEDQEVMEDLIDNLRTIPGVADKTILALLAECGNLDRFYAPKALIGFLGLYPTLSQSGDSTRNGRLAKRGASLAKKAIYLASIAAIRHNDEMRTIYMNYRSKGRAKKEAIIIVARKLLTIIYTIYTRNIPYDPQRVFVAKPNQ

SEQ ID NO: 448273 - protein, 324 aa, unidentified
MTISIIGIDISKLKFDLCLLRENGKLKHKVFPNTPSGFAQLSAWLQKQKVERVHACMEATGTYGQALATYLFDAGHVVSVVNPAIIKAYAQSHLSRTKTDKADATLIARFFAERKPPAWHPLAREVRELQALVRRLESLLEMHQMEVNRLEAGVSADLVEESLTGHIAYLTEEIKRTTALIHQHIDQHPTLREQRELLISIPGIGNTTAAKLLAEMLDVKLYKSARQLAAFAGLVPRLHESGSSIKRKTRLSKIGAPRLRKALYFPAIAAIKYNPSIKAMSLRLKERGLCPMQIIGAAMRKLVHIAYGVLKSGKPFDPALVKTA

SEQ ID NO: 448274 - protein, 312 aa, unidentified
MSERVAVGIDISKDEIVIAVAPSGEQWTSPTTPEGLERTMARIAALQPTVVVMEATGGYEAPVAAAGAAAQLPIAIVNPRQVRAFAQARGRLAKTDVIDAHVLAAFGLHVDPPVRPLPDAATQVLAAFVARRRQLIEMLTAERQRLAQATAPAVQKDLRAHVRWLERRIANVDDDLTTHIQGSPLWRAREELLRSVPGIGPIVARTVMAELPELGTLSRHGVAALTGVAPMNRDSGQYRGPRMIRGGRPSLRRALYMAAVVAARYNPPLAAFYQRLRAAGKPAKVALVAVMRKLLTIMNAMVKHETVWNPAN

SEQ ID NO: 448275 - protein, 343 aa, unidentified
MESYVGLDVSLKRTSICVVDRTGKVLCEGTVNSAPEAIVEFVKSKAAGAVRIGLETGPTSTWLWTEIKALGLPVICIDARHAKAVLKMQINKSDRNDAFGIARIMQCGWYKEVRVKGLDSHAMRALLESCALLVKMKRDLENQIRGLLKNLGLIIATARGQAFHARVQELVEGRPCLAVAVLPLLETRNGIVRQIATLDREVLMMARNDNQVRLFMTVPGIGPITALCYRATIDEPSRFKRSRSVGAYVGLTTRRYASGEVDWTGRISKCGDAMLRSYLFEAAGVLLTRVQKWCALKAWGMRLAKRVGLRKAKVAVARKLAVILHRMWIDGTEFQWSAAKVVA

SEQ ID NO: 448276 - protein, 411 aa, unidentified
MNPVIGLDISKGESQVQAFLDKGKPYRKSFKVSHTLEGLNDLVIFLEDVKNEAGMKPTIILEATGHYGAPVIHYLEERGYLLIIINPLISYKARGSSLRKVKTDAIDAYLLCELFYKEELEPYKKRGVQLLNLRNLTRQHENITGVMIQTKLQFQAVLEQIFPEYKGVFGDLYSNVSLLTLSDFPSSEDILKASEESITDKINELCKSRSIRWANEKALQLKAAAARNPFEKTVYQSHILSLDMYIKILLQYKEHLSKLESEIDTLAKEIEEYSIIKSIPGIGEKIAATIISEIGEIDRFNNPKKLVAFAGVDPSVFESGKFSATKNRITKRGSSRLRHALFMAVRCAIRDCRKTKTDDKIIPRNKKLREFYDKKRDEGKPFKVAMIACINKLLHWIFALLKNRTTYQDLA

SEQ ID NO: 448277 - protein, 422 aa, unidentified
MLAESVDEDQVIARVAAVDIGKAELVCCVRVPGAEGAKRRLQEVSTHSTMTRSLAELANHLVDLRIERVVMEATSDYWRPVFYLLEAHGLEPWLVNARDVKHLPGRPKTDVLDAVWSCKVAERQMLRPSFVPPRPIRQLRDFTRYRIDLVGARTAEKNRVEKLLEDACIKLSVVASDIFGVSGRAMMAALIAGERDPKVLAGMARTRMRAKIPQLQEAFTGHFDDHHRFLLAQMLARIDGIDADIAVLDTQIEALLAPFAQAAARLDEIPGIGPVAAAVIIAEIGLDMTRFPTAGHLCSWAKFSPGISSSAGKNKGNGSTGHGNRYLARVLGEAAVIAGRTDTFLGERYRRIARRRGKKKAIVALGRSILVIIWHLLSDPDAGFNDLGADHFTRNVNTETKKRNHIRQLEALGFTVTLEPAA

SEQ ID NO: 448278 - protein, 372 aa, unidentified
MNYNTVYVGMDVHKESFSLCAYTIEAEKAFHYQRTEADYKKVLNYLEFLRTIYGDDANFICGYEAGCFGYTLYHQLTANNVKCIILAPTTMLEQRSKKRIKTDRRDAEIIAKCLAQHNYSPVHIPTAKDEETKEFLRMRDDHKLALKKVKQQILAFCLRHNYRYDGKSHWTAAHLKWLKALTPEALYKEILDEYLLTYQTLSDKIERLDKRIEELATQDEYKEAVKKLCCFIGVKTHTALSVLVEVGDFKRFASAQHFASYLGLVPGEDSSGDDQNRLGITKAGNRHVRLLLTEASQCYARGQVGFKSKELKSRQSGNTPAVIAYADKANERLRRRYYKMVLNKYKKHNVAKTAIARELACFMWGMMTDNIA

SEQ ID NO: 448279 - protein, 418 aa, unidentified
MFKIFRKNCCGLDVHKTWIYACIGITDANSRTEYFQARFSAFSKGLQELSHWLDKYNCKQVCMESAGKFWIPVFNILEKTCLVTLAHPKYTKPQKGNKTDRKDAKWICDLFMCDMIKPSFIPPPAIRHLRDLVRYRGKLTNMLTGEKNRAQNCLTVSNLKLDDVFADVFGKSARSITEYILAHPGEPFDVAQFVDRSCKSPLFEIQAAAAGAVSPEQAVKLRQCLDHIDQLRLLRQRLEQEILRICEPFADILQLLRTVPGLGNDPMTAIAVLSEIGGDMSVFPTAKNLCSWAGCCPRNDQSGAKVKSSRISRAGSYLKPLLVQVANALIHSRKHPEFAERYRRIKARRGHKKAIIAVCKMLLTAIWNILSKLVPYSPAGFLSTSHDLPPSKSLTVAQGLSLLRRRGFILTDDPLSAP

SEQ ID NO: 448280 - protein, 330 aa, unidentified
MKSGSNCNTPADVFHVGIDVSKDTLAVNASEAFTKTIPNNRKSIHKMVRTVRKTVGRDRKILFVFEDTGHYSLPLLLELDKLGEQSHVANAARVRHFAQARGVGAKTDPVDAAVIRDYAETMRPEPTEIPSDSHLRLKELHRTRSLMVKISIMVSNLLTATTNRTCREVLRDTIRLIDKRIEKIDSEMETTISENVEMREMADELAKIEGVGKTTAAAVLAGVPEIGTMGKRRIVSILGLAPFVRQSGKWKGKSCTCGGRSEVRRCLYMPAMSAASNNPVLKVFYERLVAEGKPKQLALVATMRKLAIHMERVVHRVRQRHNAEGANSAV

SEQ ID NO: 448281 - protein, 348 aa, unidentified
MKILALDLGKYKTVGCAYEATSGRHRFQASFTTPTGLAQLVSEVKPDRVVIEVCNIAGWVCDLLRGVGVEVQVANTSEDAWRWRKVKKKNDRCDALKAAQLSAVNQLREVHIPHIEVRQWRALIAFRQQLVRRRGKVKNHIRDLLLSEGQILPRGAKCWTQLGVEQLTALAKPFSEIGLHELWRGQLDIELRQWRELQHEIDQVEEKLDAIGKADPRVVLLRTIPGVGPRLSEAVVALLDQPERFHKAREVSAYVGMVPKELDSGETQRRGRITKHGSRLVRSLLVEVAWAGLRYNPWVRATFRRISGGKKSRKKIAIVAVGRQLLVRCWAMLRDGTSWRPPALPGIV

SEQ ID NO: 448282 - protein, 331 aa, unidentified
MTNAAREAAADVRPVDYIGIDMAKARFEWGVHGARSSQATTNDPPGFERLLTELRERRVGLIVIEATGGLEHALASVLLQHGLPVAVVNPRAAREFARSMGQLAKTDAIDALALAHYAHTLAHKANQAGVQLTPLPVHLEALQIMVLRRKQLTDMRTAELNRRAGAMRVLRNSIDAVVKTLNQQIDALNKDIGSHLDEHFKDLNRRFDSIQGVGPNTCAAVIAFMPELGHISNACAAKLVGLAPLNNDSGTSRGQRSIWGGRTLVRGALYMATLSAVRFNPVIKAFYLRLLAAGKSKKSALTACSHKLLRILNAMARTGQPWRPELHRLTA

SEQ ID NO: 448283 - protein, 317 aa, unidentified
MIHLGIDIAKLKFDVALLTQGKFKTKVFANDSAGIGACLKWLGTHAGGSVHACLEATGPYGEALACALHDAGHTVSVINPVRTKAYAQSLGLRQKTDAVDAKMLARFVQTQQPLAWTPPPAELRALQALLRRLDALVEMRTQEKNRLGVAEPTVSGSIAQHLDYLQGQIDALKAQIENHIDQHPGLKQQQALLDSIPGIGSATSAWLIGELNLTRFDSARQAAAFVGLTPRRDTSGTSVRGKPRLCKQGNSLLRKLLYFPALTAMTHNPLVRALCLRLKAKGKHNMAIIAAAMRKLVHIAFGVLKSGKPFDPTLADT

SEQ ID NO: 448284 - protein, 421 aa, unidentified
MKKIQAKTERIVNGRTLIVTVDLGKTTNVGYCRCPDGTDNKPFNFFNDGHGFNKFWSCVSEMMRIHNMEDVVVGFESTGPYGEPLVHYLQKRGVRLVQVNPMHTKRLKELHGNSPNKTDEKDPKVIADIIELGHALSLVIPEGVAAELRRLTQARERGIARRTALLNQLHDLVFILFPEFLQIMGSMKGKSAQYLLTYHTIPQEIIGLGLETLTLVLRRISRGTLGAERASALYEAAQGSVGIKEGEDSIVFEMRNILAIVEASDRFTEDVETKMSHYLGQIPYSRSILSLKGVGKITAAGLIGEVGDFRKFKTISEITKLAGLDIFEISYGKHKGKRRISKRGRPLMRKLLFFAAVNVVRKGGILHEQYQQCLQRGMVKMKALTAMARKLLRIIYALVRDHSDYVHGYTKTQKLSLPEAA

SEQ ID NO: 448285 - protein, 361 aa, unidentified
MTHPDTVELFGGVDTHSRTHHAAVIDPLGRHLADAEFPATAAGYQDLEAWLRSHGQLVAVGVEGTGSYGAGLARHLSSAGLVVVEVDRPDRRARRNKGKSDPIDAYAAAAAVACGRATGTPKSRDGAVEAIRALRVARNSAIKARTQAINQIRALLVTAPEPVRGPAAGLGTASLIGHLSRLGPGTDLRDPAAAVTTALRTLARRHQSLDTEVRDLDKAIKTLVDQVAPQLLDLPGVGVETASQLLTTAGDNPHRLRSPASFAALCGAAPVPASSGKTRRHRLSRGGDRQANRALHIIVLTRMSHDPRTRAYVQRRTTEGLSKKEIMRCLKRYVANEIHRTLNDPRPAQIYPAATEHTPAA

SEQ ID NO: 448286 - protein, 341 aa, unidentified
MGEVSTIGMDLAKSVFQVHGADASGAVVFRKKLRRSQVLSFFAAQPPCTVAMEACSSSHHWAREISTLGHAVRLIPPAYVKPFVKRQKNDMADAEAICEAAQRPTMRFVAPKSEQTQAAALVFRARDLLVRQRTQTINALRGHLAEFGTVVAKGPAHVSQLVQAVENPDGPLPEIARPILQILIDTLHRLDEQIALLDREVAQRAKADEMARRLMTIPGVGPVTAVALTALAPPAQTFRRGRDFAAWVGLTPLQHSTGGKQKLGATSKMGERTLRRLLIIGASAVLRWAARHGAPAGSWMARMLARKPPMLVRVALANKMARVVWALMVKGGTYQAPAASA

SEQ ID NO: 448287 - protein, 413 aa, unidentified
MTVFCGIDWAERHHDVALVDEAGTLRAKARIADDAAGYHKLLALLAEHGDSPDDPIPVAIETSHGLLVASLRTGSRRVFAINPLAAARYRDRHGVSRKKSDPGDALVLANILRTDMHAHRPLPADSELAQAITVLARAQQDAVWTRQQVANQVRSLLREYYPAALLAFQSKQGGLTRSDARVILTLAPTPAKAAKLTLAQLRAALKRSGRLRGCDAEAERLRDVFRAEYAHQLPGVEDAFGHQLLALLKQLDATCEAADDLAEAATAAFHQHADSEILLSFPGLGPMLGARVLAELGDDRARFADARALKSYAGSAPITRASGKKRFVGRRFVKNNRLIHAGFLWAFAALTASPGANAHYRRRREHGDWHAAAQRHLLNRFLGQLHYCLKTRQHFDEQHAFAPLLSPPSEQAA

SEQ ID NO: 448288 - protein, 391 aa, unidentified
MSMYFIGIDISKYKHDCCIISAADQKVVSKVTIKNNKAGFNELLTIIHSLANPADIRIGFESTAHYALNLELFLENSLLTFMEVNPVLISEYKKSKTLRRTKTDSVDCESIARWLMTVEYKPHSKGFYHAYSLKSLTRLRDKLIRQRSFYLIKITNVLDHTFPEFKPFFNERLSKTALYLLENYGSAEKMARMNSASYEKLRSLSRGKFSPQQFLRLKELAANTVGVNNSIFDVELNSLLSLYKSLVKEINTIEKEINKLIEEVHPHYMSVPGIGPLSAAVIYSEYGDISNFTNPGQMLAFAGIEPGINESGTESHGGKMVKRGSSQLRYTLINCCLPLIRFDMTFATYYAKKRGEGKPHRVAITHVAKKLIRVIYALERQDIDFNTQKLR

SEQ ID NO: 448289 - protein, 392 aa, unidentified
MSNTNKRVVIGMDPHKRSVTIEVMDAGETVLDGGRFGTDEAGFAAMRDYVSRFGDRVWAIEGCNGIGRHVAVRLVALGEDVVDVPPKLSARARVFSTGQGRKTDATDAHSVALVGTRMSGLRPVVNNEQREELRVLVDRRGWLGEEHTRKVAQLHHLLLELIPGGAKKDLSAAQAKALLAKVRPRDAAGKARRRVAAELIADLERIYLRRKAADKELTELIRASGSSLLDLNGIGPTGAARLLVDVEDITRFPNRDHFASWNGTAPIDASSGDHVRHRLSRQGNRQINRTLHIMATVQLRRPSEGRSYFDRKTAAGKTNMEAMRCLKRRLSDLVYKTMLDDLVITQRTGPGGQRGNDSESSATGSQPHTGSSDKPLPGPARPEPKPVLPAAS

SEQ ID NO: 448290 - protein, 467 aa, unidentified
MGKGSSGMTRGDRRRNARRERLRGMLPRGGSVIGIDLADEKQAIVVIDHDVRVLARTTVRVKAFRLGEALDWAVGQARAKGFEAVTVACEPTGPRWLQVQRLCAERGLPLVCIQPLMSHIAREQQDYTTHKTDEADCVLIARLAVELRCYIPEELDETWAHLRHLGRRRAQLITSATASAQRIRDFLSVAWPVVTETCAQPLQSLTWLAALQMVTSRCGADPGGLAGLGEQEFTALVRSAVPGWGGKKGWGPICARIFAALTSTEGVVVASRRGLLRRCADELGDLQRTRAQLRAVEADMVAVLDELGLSRLADIPALTAVGAAAILAETGDPRRYDSSSSLVKHAGLSPSDNASGAFYGQAHISRRGRPGLRLTVWRAVWPMLLHNPVMAAKYAAMTEAADTAAARADAGSQQVTAAAATARARRAKARVACAASLLRWIYSMVAHGTAWDPVIASGAASCPAEAA

SEQ ID NO: 448291 - protein, 418 aa, unidentified
MNEVKCWFVGVDWASESHRVRIADCCGKRLGERDFAHGGEGLAEMAAWLTSVAGAEPSAIYVAIEIPHGPIVETLLERGFNVYAINPKQLDRFRDRFSPAGAKDDSRDAEVLSDAVRTDRRAFRRLALAEPLVIELREWSRMTDDLNGERNRLCNRVREQLWRYFPAMLELEQDLGAEWFLDLWELVPTPDKAVRIRETSIARILKSRRIRRLTAAEVLAMLRKPPVVVAPGTIEAASAHIRVLIERLRVVNRQLKDAHRQLDRLCGLLAEPTESEPGQVNEQRDAAILASLPGNGRIVLATLLAEGWEALQRRDYHALRTLCGAAPVTKRSGKTCIVTRRLACNPRLRNALYHWARVAVQHDPRSRAKYAALRLRGHSHARALRSVGDRLLNVACAMLRNGTQFNPSLESQKMLAKG

SEQ ID NO: 448292 - protein, 334 aa, unidentified
MPTTAKGYERLLRWAEGFGPVRCAGVEGTSSYGAGLARHLRAKGIEVLEVERPKHRRRSSRQNVEKSDPSDAYSAARAVLAGEASGVPKSGDGRVEMIRTLRAARRSAIKARTQAANQLQALCVTAPEQLRRRLRGLSTKDLVSMAARFRLGDGPRDVPTATKFALRSVARRHEALSEEISELEAHLDRLVAQAAPELVALPGIGTDNAATLLIVAGDNPKRLGSEASFASLCGVAPIEASSGKEVRHRLNRGGNREANRALYMICLARMRRDGRTKEYVARRTQEGKSKREIIRCLKRYIAREVYRVLISCGARFSPKVPMDEAHIATGSNAA

SEQ ID NO: 448293 - protein, 394 aa, unidentified
MKLVGIDVGKNSHHFCVMDKETGEFNVAPSSFSNNKEGFDFLINSLKPYSKKSILIGMEDTGHYHVALLKFLLSNGYTVALINPKTTDLTRKMEGGITKNDKLDTITICDVLDTPERKKQYRITKVDRFDLYEQRQLTRHHHNLKEELNIYCNRLQKSIDLVFPEFNTLFSSKYGIVYMNLLKTFGSAEIIASTDIRTIRKCFEIKGRGGRISLTAEKLKECAKNSIGISSEVETIQIKHLVSQISLIKEQIAEIDKKIEEFSIKNNSPILSIPGISHFSGTSILAELGDIGNYSKPSQIIKFAGVAPYHYESSQYNAQHTGITKKGSKYLRKTLYQIILPVINNNPVFKKYYRLKISQGKEHRCAQGHCIRKLLRIIYHLLETGQSFNPALLR

SEQ ID NO: 448294 - protein, 414 aa, unidentified
MELGYRFVAAMDVHKKMLAVVIRRQSGAHIEYRKQKFGTTRSEIEHLSAWLQSEGVGEVVMESTAQYWRPVWYGLEAHFLLHLTHPLKTRAPRGRKWDFRDAQRLADRWCSGDLEESFIPGAEQRSWRWLTRTRVDLKDKMTVVRNQVEGLLEQGGIKLTSVASDVFGVSGWAMLEKIAQGVTDVETLVGEARGVLRRKREQLKEALAGRLEPVYQLLLRQYLDQVRLLRRQVEEINQALAEAMKEQLPALHRLSQMPGVDLYAAQELLSEIGPRAAAFASPARFASWVGVCPGNHESAGICYSHRSAKGNRYLRRLLCQIAWAAIHTKGTFFAGLFHRLKPRIEGKGAAWAVAHRIAKVIWIVLHNEVDYQEHGVAPPNERTLVRKFKRMVKEFGRLGLDVRALLDQQLSTPV

SEQ ID NO: 448295 - protein, 419 aa, unidentified
MGRSRSKVCGIDVHKKFLVATVLERNGQKKTEKFQNSLEHLLKLREWILAEECEVVAFESTGEYWIPLYDILQGDVEIIVANSYHIKWIPGKKTDTIDSEWIAELVLNDLIEPSRILPKEKRDIRSLTRLREKLVNERTDHKNRVHKILDSASIRLAAFFSDLFGKSGLRILKCILSGVPPEEIIQKLPKRLRPHSDFFLGAIQAQLSDHQLIQLQTSVTMIDLLNERIKELEQTILNALHKERRKLQVLMSIPGIGTIGATTLLAEIGDVSDFPSPDKLTKWVGITPRVYQSADKLHTGSITKQGSKHIRWILVEIAHSCIRTRNTVLRDFFDRIFARSGYKKAIVALARKILKLVWHLLTNDEMYQENNLVPKSPCLPNPREIGSISVSAALELLVTAGYHIIDRIDSSPKKRDLGT

SEQ ID NO: 448296 - protein, 370 aa, unidentified
MSSVARPAGPVHVGMDTSKNTIMAAVLWPGEESPVTERILSEEPSVRRLLDRLAGKAGGREWLRCCYEAGPGGYDLYRLLDSMEIACDVVAPSLIPKGSGDRVKTDKRDSRRLARLHRAGELTAVRVPSRDEEAVRDLARARTALLEDRKTAQKRLTAILMRHGRTWRGPTYWTRAHRDWIAAQKFAEPALATAVSCYRAALQTRETELAAIEAELLPWVSREPLAGPAARLMCYRGIAELTALTLAAEVVDWRRFPAARAFMGFTGLCPAEASSGDTARRGHITKAGPQTVRTALVESALAYRHPAAIGAVLRRRQRGASPDTLARSWKAQRRLHDRYVHLVSHGKTPPEAVTAVARELAGFTWAEMTS

SEQ ID NO: 448297 - protein, 457 aa, unidentified
MSKGNKKAKSQSFKGSNLPQQLQHINLNAAGIDIGSERHMVAVPAGRDPVSVHEFGSFTADLQDLATWLKQCGVTTVAMESTGVYWIPLFELLERRGFAVKLVDARHVKNVSGRKSDVLDCQWIQQLHTYGLLAGAYRPPDEVCVLRSYLRQREMLMQTSSMHIQHMQKALQQMNLLLHNVVSDITGVTGMKIIKAILAGERDPRVLARNRDERCQNSTATIAKSLVGNYREEHLFALRQAVDLYETYQAKIADCEQAIMKQLEKQPNSSDDGPPTAEKPVPARNRIRNGVDVRDLLFKKSGVDLFAIPGLAADTLLTLASEVGFDLTPWKTEKHFVSWLGVCPGTKKSGGKILHNKTKRHPNRATQAFRLAAASLYRSQTALGAFYRRIKSRAGGKQAVTATAHKLARIYYAMLTQGTAYIELGQQAYEQRYKERRLDHLKTQAKSLGFQLVPCAT

SEQ ID NO: 448298 - protein, 346 aa, unidentified
MKINRVGVDLAKNVFQLHGADRQGKTLWKRQLSRDKWLTVLFATVEPGTVIGMEACTGAHHWSRLLLDKGYEVKIIPPQFVKPFVKSNKNDANDAQAICEAMARPNMYPVKVKTIEQQDMQAIHRIRNEIKSHRIAKANQIRGLVAEYGLVAPKELTSLRSAIPKWLEDASNGLTMFFRQLLQGLYEDLSPVDKRMAELDKQIAVIAQQDPIAKRLQQLRGVGPLIATALVATMGDGKQYRKGRDMAAAIGLTPRQHSSGGKDRLLGISKRGDAYLRCLLVHGARSAMRTAKDKDDRLSRWITNLQDRRHANVAACAMANKMARMASAMMTKGVDYDPDFSSVSAS

SEQ ID NO: 448299 - protein, 328 aa, unidentified
MENYANIYGIDISKDTFDVVDLEGNHSDFKNTKKGFMEFKKTIKKDSLCVMEVTGIYHLNIAKFLFKKKIDVSVVNPLRIKRFFQMLLKRNKTDKADAKMIATYGDNQKPNLWEPCSEKMEQSKDIYKIMDQMIRFRAGLKNKLSALVTKEAMIFAIKEIKKQILLVSESILNLENKINELVKEEDAELLTNLKSISGIGERTATLLIISTDRFKNFDSSKQLSSYFGLAPTEHRSGTSVKGSNRISKMGNPDVRKTLYMCALQASRNNKTCSILYNRLLDKGKPKKVALIAVANKLLKITYAIAKSGLKYDPNYVSKLDRSKIVSST

SEQ ID NO: 448300 - protein, 410 aa, unidentified
MEIVITHGAGLDVHKRRIVATVLTPAVTETRTFGTLTADLLALADWLTACGVTHVAMEATGVYWKPVYNVLEAVDGLTVWVVNPQTIRGMPGRKSDVQDSQWIASLLRIGALKASVIPPRPQRELRELVRYRQSLVRERAAEANRIQKILEGANVKLASVISDILGKSGTRILQALAAGETDPAALARLADARIRAPHETLAAALQGLVRAHQQQLLRWQLQPVAFLDQQIAAVSTEIAARLTNFDDALLRLQTIPGVGRRTAEIILAECGTDLQRFPTAAAFVSWAGFSPGQHESGGKAHPAPTRKGSQTLRTALVEAAQAAAKTDTYLAAVFRRLAARRGKRRALVAVGRHMLHAVYHILRGTDTVYHDLGPNYFDERDRQAVIRRAMRRLETLGYRVTLEPLVPEAS

SEQ ID NO: 448301 - protein, 413 aa, unidentified
MKTNTITAVGIDVSKGKSTVAVRRPGGEIVMTPFTVIHTIEGLDKLIDTLRSVDGEIRVVMEHTGMYWRPIALALKNAGFFVSVVNAMLIHDFSDNSIRKVKTDRADSLKIANYALTFWQELRDYSVEDENRQLLKIQSRLYERTLNSSVALRNGLISLLDQTFPGVNKLFGIETRTASGHIRWVDFVRRFWHKDCVAALSLHSFADTFQKWCKRTGYHFSLSDAERIHEIARNSVATLAKNDSTKLLITQAVDSLNAVYDTLQILRGEMYRLASLLPEFEIVMSMQGAGKITGPQLMAEIGDVRRFTSKGALVAFAGVDAPPYQSGTFDSKSRHVSKRGSPHLRRVLFTICSVILQHADPENPIYQFMDRKRAEGKHFYVYTVAGTAKFLRIYYARVKEYLNAIDVQTDTVA

SEQ ID NO: 448302 - protein, 341 aa, unidentified
MSKSRIRQKGDPARMSLFVGLDLHKVYSEFAVMDIFGNVLRQGRVENTLDKMREFSESLPSSSSVVMESSSTWYWAHRLLSERHNVTLSNPVRNKAIASAKVKTDKIDSTTLANLLRGGWAAESYVPSKETMEFRELVRFRANLVRERTRMKNRIHAYLLMNNISIDAGPFTKGFVEKVRGIDDARVQSYLRLIDGLNREIREASMTIRRKAGSNEDASLLMTIPGISYYSALLIISEIAEIERFEDSASLVGYSGLAPSTHSSGGKTHHGPITKTGSSYLRWIMGQCTRAHMRVEPEGTVANFYARIARKKGDQKAIVAASAKLLKIVFWVLKEKRAYHS

SEQ ID NO: 448303 - protein, 376 aa, unidentified
MKIVGCDLHTRYQQIAMLEEETGELVERRLEHESGEARAFYAALSAPVRVGIEATGHTRWFERMLGELGHELWIGDAAQIRASMVRKQKTDARDAAHLLDLLLSDRFPRIWRPTLEERDLRQLVWHRQKLVWMRNAVGNQLHALAMGEGVCRKKKLFTKKGRVELESLKLGPWASHRRQELLKMLDALDPSLQQLDRAVQQQAEQNAEAVRLMTHPGVGPVTSLAFVLTIGPVGRFERSKQVVSYLGLNPREHSSGGTAAIGCDLETRQSHDAFAAGRSRTHGGASGRRTATGLPAAEVAAWQRSSESSDGEKVGGSNVLDAAQPGQLCAAGSHARQPVGHPGEGVIHRRADWAPCLPEKVGEFEQRITIGSKVTG

SEQ ID NO: 448304 - protein, 408 aa, unidentified
MQQQPGQQAEPHAGRVVIGMDPHKRSATIEVVTADETILGTGRFGTDEAGFTAMRRYVKEIRPVVGDRVWAVEGCKGIGHHIASRLLAESEHVVDVPPKLSARMRVFATGQGRKTDATDAHSVALVGTRMAGLRPVVDDEQLAVIGILADRRRALGEDHTRMVSHLHHLLLELIPGGAKRDLSAAQAKALLAKVRPRDAAGQARRRVAAELIGDLERIYVRRKAADKELRELVAATGTGLLDLNGIGPSGAARLLVDVGDITRFPDRAHFASWNGTAPIDASSGDVVRHRLSRAGNRQINRTLHIMATVQLRNPGIGRDYYDRKKADGKSSMEAMRCLKRRLSDLVYRTMLDDTVAATITAGRTGPGGQRGNDSDSSAAGSHPHTSSSDKSLPGPATTNPRTPLPAAS

SEQ ID NO: 448305 - protein, 327 aa, unidentified
MHVAAALDPIGGLLGVQEFPAAAGGYAGLLGWLGGFGTVALAGIEGTGSYGAGLARHVTAAGIRVVEVDRSDRQDRRRQGKSDPLDAVSAARAAQSGRARGAPKGRDGAVEAIRALMVAKRSARSERVQTINQARALVLTGPEDLRTRFARHTAASLVSGLASLRPRPGDVVGYATRIALRELGRRAEFLDGQLERLDELIAPLVAARAPGLLALHGVGPDTAALLLVAAGDHPERLRSEAAWAHLCAVAPLQASSGKVTRYRLNPGGDRQANHALWRIVLTRMSAHPPTLIYVERRTREGLSKKEIIRCLKRYVAREVYRHLRAAG

SEQ ID NO: 448306 - protein, 351 aa, unidentified
MITIGVDYHPSFQTIAFLMEETGEYVEQELNHSDGEAERFYRKLKEKGVRVRVGMEATGHARWFERLLAELGFELWIGDPAEIKAKRVRKQKTDREDARLMLKLLQENRFPRIWVPSPENRDLRQLLWHRHRLVQMRTRIMNQLQAVAMNEGYRWKKKLFSEKGRALLEKLSLALWASRRRKELLELLDQLDPKIAELTAAVEQEAKKRPEVVQLMTHPGVGPITGLAYVLVIGTPGRFPCGKQIGSYTGLIPCEDSSAGKQRLGHISKQGNTLLRFLLVEASQAAARCNPDWRRRYAHLMMRREKRIAKVAMARKLAVRLYWMWRNNWQYSQLVEFGSNAGKLGTVHGVK

SEQ ID NO: 448307 - protein, 438 aa, unidentified
MSNKVIFNLDELFISVGIDVGADFSWMSIALPNQQFVGKPYKILHNSIDSLTTAVSKIKEAEELYSLESRIFLESTGIYHYPLFCYLRDKGFNCSVINPIITKNSTNINIRKVHNDRFDSKKAALVGLKPDLKVSLMPSDLALNCRNLCREYYDLMDSRNAYVNKLIDELRMVFPQYLGIFSKVTIDTSLILLETYTSPSAFINADKQEIIDLIRSTARFGLTYACNKYNAIIQAANDADEFGYILDSNIKRIRLYIGFICKYDEEINSILESMHELAAANEDTDFVKQIRLIETFKGAGFLSAMSLMGEIGDFSAFSKPKQLFAYFGLDPAVKQSGKFEGTKIQMSKRGSAIARRVIHTLTLQSISASRTGESKNPVLLDYYLKKCESKPKLVAMGAVSHKVCNMIFAILRDSKPFEIITPQEHIKKYNAAKCDVAA

SEQ ID NO: 448308 - protein, 343 aa, unidentified
MKLTRVGVDLAKQVFQVHGVDRAERSVWCKRLKRNRWIEEIEQNVEAGAEIGMEACGGAHHWARLLQSKGYQVRLIAPQFVKPYVKSNKTDANDAQAVCEAMSRPSMRFVAVKSIEQQDIQAVHRVRASLISERVGKANQLRGLAYEYGLVAPREIAALRRAVPAWLEDATNGLTVRLRTLLSGLYADLQALDERVRELDKEIRAIGQENEAVGRVQQLRGIGPLIASALVAMIGDARQFKNGRQVAVALGLTPRQHSSGSKERILGISKRGDSYVRTLLIHGARSALRTAAGKNDRLSRWALALAQRSHANVAATALANKMARVAWAMLKHGTTYEPNGLAA

SEQ ID NO: 448309 - protein, 429 aa, unidentified
MKNSAARKLKQVPKGYLVMGVDPHKKRHAAVAMTQDFTTHSKFKFNNSREGFEIALKRARAEMVRTGSRGVIFAIETGGHYWRNLAYFLDERGIPFHFINQFTLKRRREGKDLNRRKNDYRDSEVAAQLLCTGEFTDTKLQHGVYAELRAAHNAYRRLVKERTRITNLIKGLLDGIFPEFTQVFKDPCGLTALSVLSSCPVPNIIAQMTEEEFVNAIRARHQGRLMRKKLRALYYAAQISIGIEAGAQSVASELSFLVEKLQLIKGQIFRIDGALVRLVDGTEEGKYLLSIIGLNYISVAGLVAELGSFRSYRSAKQLIKMAGSNPTESESGGKRSAHTPMSKKGRPVLRYCAWTAVIPMLRFNPDFRAWAKKLRERPVHANPLGGREIVGAALNKLLRLAFALVKKQTFYQVPEIELISEPELLPVAS

SEQ ID NO: 448310 - protein, 357 aa, unidentified
MKKLHYKKAYLGFDVSGKTIEIFGRTAESDEGVSIQIKNSKAAIKKFIEALPCPQKTVIAMETGTDSPWMSDYLSLFGCEVIVAHARELALIWGSTAKCDRRDAEMLARLACFDQKLLHPVKHQEIEKRDDLCVIKARDTLVRMKVTLISTVRNLMRSHGTDVSALTPENFAKLAPHLLPDELRPALEGLLIQLCNIRQEIKKYDRIIAKLCNKYPETKKIRQIKGVGPITALAFVLVIGDPLRFSSAERLAAYLGLVPRRDQSGEVDRQLGITKQGNTFVRRYLIQGANYILGHFGEDCDLKRYGERIAARGGKIAKKKATVAVARKLSGLIYMLWQSDAVYDPNYKQNRRQAKTA

SEQ ID NO: 448311 - protein, 359 aa, unidentified
MRIIGCDLHSRQQTLAMLDTATGEVEKKTLRHEGNNVREFYSKLPGPVRVGIEATGSMQWFVNLMEELGVECLVGHPAEIRAAEVRKQKHDRRDAELLLSLLVEERFPAIWLPTKELLDLRALLRHRHQWVSLRVKIQNALQAIALANGLRRGSSLWTQAGQRAIAALPLSPHAAYRRNELQAMYVKFETEIEKLNQQVEQQARERSGARLLMTHPGIGPITALATDVFLGDPARFENSKALASYVGMIPSEYSSGERQRLGGLTKQGNPLLRFLWSEAVIHAVRRDPQLKHFYRRKLIQKGLGKARAAVARKLGIRMWVMLRDRIEYNEFCRRGQMQQKSGDACAGMPERRCGAKVTG

SEQ ID NO: 448312 - protein, 410 aa, unidentified
MQTLVERGCGLDVHQATVVACLLIVLESGKAHKQVRTFGTATRDLVSLREWLLSESCTHVAMESTGVYWKPVYAILEGAFEIVVANAQHVKKVPGRKTDVKDAEWIADLLCHGLLRASFVPPKPIRELRDLTRYRRKLVESRSAERNRLLKVLETANIKLASVVSDAFGASGLLMLQALAEGKATAPQMAQLAKKQLRKKIPELQLALEGRVEEHHRFLLRVQLHRLWAVENDLGIVEQRIQEKLKPYATEVTLLDEIPGVDATLAGAIIAELGVDMSVFETVSQLASWAGVCPGNNESAGKRRSSRIPKGNVYLKTALVEAANAAAKAKGTYLRDKFYRLKARRGYKRAAVAIAHKILVAIYHMLSHRVCYNELGDLYLDKLNKHHLTRNLVHRLERLGYTVTLEQKAA

SEQ ID NO: 448313 - protein, 386 aa, unidentified
MMTTTRTQESTAPVSLAPTVLLVAFELGERVWKLGFTTGFGQRPRLRQVPAGAMERVLDEIARAKRRLHVPDETPTVSCYEAGREGFWLHRWLVAHGITNHVVDSASIEVNRRARRAKTDRLDLIGLLNLLARYRLGDRRVWRVVHVPRPEDEDARHVHRTWETVQQDRTRLINRLRALLATQGVRMPIDQRFVTRLAAVRVWDGTPLPAGLSERLMRVWTQLELLNRQRAHLAAARAALAPDPQTVTGRYATTLPTLRGIGPIGAWTLATEIFGWRQIQNRRQLGALVGLVPAPYQSGDMAHDQGISRAGNKHVRRLIVQLAWSWVRFQPTSALTLWFQQRFGGGSSRHRRIGIVALARKLLVALWRYVDQGVTPEGALFRQTVA

SEQ ID NO: 448314 - protein, 416 aa, unidentified
MKLFVGIDVSSEKLDVCFLTDDNQLSILSEISVANDIEGASFIRETILEFNDSYHFDQIVIGMESTSMYSFHPSMFFHEDEKLKKLNTLVTIENPFRVKQFSRMFDENKTDRNDALRIADFLRIQRFTTSPIKEEKYMALQRLTRTRYQLIKQLIRTKQHFLENLTYKCNTLAREMRDESTSLFSATLISLMTEDFTLDELAELPLEAFCDLLQEKGKGRFKQPEKIAKAIQRAITMSYRLGALAQESINVVLSVLVREIRALEKNIKELDKAIEQVIVVIPEYQCLTSIPGVGKVYAAGLIAEIGQIERFEDQTKLAKYAGLSWKVNQSGNYQSQNTPLTKQGNRYFRYYLVEAANSVKNYLPEYKAFYQSKYKEVPKHQHKRALVLTARKFTHLVDTLLRKHQLYTPPRSVIEK

SEQ ID NO: 448315 - protein, 259 aa, unidentified
MKALQEINVGVDTGKAQLDIFIRPIGEFFTVENNPSGIKDAIKRIKKHKPTRIVIEATGRLEMPFACAAAKAKIPIVVANSYRVHKFASSTGKLAKTDKLDAQMIAYYGEALQPRETQLKPEYIQLISDLLARRGQLLEMRTMEKNRLSILPKTLSTPIKQHIKYINNAVEKIEIKLDKLIDATPQWQQLMTILLSVKGVGKVLAYTLISELPELGQLNRKQIAALVGVAPMNRESGAYKAGKRAEKGVKYNIDGFDWW

SEQ ID NO: 448316 - protein, 347 aa, unidentified
MTNRSQLHVEVFAGLDVSAREIRVARLRSKEETPTVASFANNASGHKALLAYLLQGSEHVRVCLEASGNYSLDLALALHAHRQVEVSLVNPRRARRFAESLGERSKTDPVDARVLCQYAVRMPWVAWRPPTLRALRLRAITRAIESLGVMHTQEKNREHALKASQALPSLVIREMQRHQRYLENRMEQLRREARRLIVKDPELDRRFRLMVTVPGVAETSALQILGELVVLPDGLDARQWVAFSGLDPSQFTSGTSVEKKPRISRGGSRHLRRALYMPALVALRREPHLRAFYQRLVSRGKARLQAVVAVMRKLLHALFAMFRSGQTYDGSKLCSHELPATVTASCA

SEQ ID NO: 448317 - protein, 389 aa, unidentified
MLEENDAVTDAPSCANIFVSVEMSRSKWVVGIHVPTADKIALHTMTCGDVDALLTLVDRARAKLAPDGGTPAVVVCYEAGYEGFWLYRRLITLGIRVVVIDPASLLVDRRAKRAKTDRIDARAMVRALMAWSRGEPQVLSEVRVPTVKQDDARRGLRERQRLVKERTAHGNRIKGLLKTQGIMDFDPRAADAVARLDALVTGDGRPLGPCLKREIVRELERLGLVMQQIEQVEAERDAVVQKCGQQVDTTAEPERAATMIAVLNRLKGIGMSDATILVREAFWRGFRNRREIGGWSGLAPAPWASGSVSRDQGITKAGPPLLRAHLIQMCWRWLFWQPDSDLAQWFRKRTEGATGRMRRIMVVALARKLLIALWRYATTGMVPRGAIVT

SEQ ID NO: 448318 - protein, 458 aa, unidentified
MPVARKRKKDKKVKVTNLDHLEQINLNAAGLDIGAAEIWSCVPANRDEQPVRCFETFTADLHDLADWLQACGIETVAMESTGVYWIPIYEILEARGLEVNLVNARHIKNVPGKKTDVLDCQWIQKLHTYGLLQASFRPEEQMCALRSYLRHRDNLIRYRSAHIQQMQKALHQMNLQLTNVISDITGQTGLQIIRAIVAGEHNPVTLAQYRNPRCRSSQSEIAKSLEGHYKAEHLFALQQALEGYDFYTQQIKVCDLEIEQKYKAFKPQVDIQAQPLPPPKKKARRQATQPDYDLRSYLYQMSGVDLTPIDGIDVLTAQTIISEIGLDMSKWKTVKHFTSWLGLAPHNDISGGKVLKRKTKKTDNRANTAFRIAAQSAGRSQSALGGFYRRMRAKHGSPKATTATAHKIARIVYHMLKYRDHYIDPGQDYYEQKYQERVVKNLQRKAKELGMELVPAAA

SEQ ID NO: 448319 - protein, 308 aa, unidentified
MTFAGIDVSKTHLDLALVSNSPKPTRLRFPNSPEGRQALLAALAHHNPAWVALEPTGAYHLPLLKLLAENRLQVALVNPYHLAAFRKAKGERQKTDRQDALLLARYAQVYHEDLRAYTLPPETLRELKALVGYREDLAGRERTILNQMEAAEWAGSKEVLALLQKELACVKGLLGEVEARIQALLATLPEAEVLMALPGVGPQVAAAVLALLPPELWGRAKRAASYAGLIPEREESGKSVERSRLSKKGPPLLRRKLYMGALVAVRHDPEMRAFYHRLLSRGKRKKQALLAVAHKLRSCKDLCVRVRV

SEQ ID NO: 448320 - protein, 355 aa, unidentified
MTIVAHAHSFVIGVDTHARNHVLAVVAANGQFIDTASFPTSPAGLTRAIDWAGRRTGGDLDALWVIEGVGNYGARLAHATAQVGYQVVEAPRMGARGPQGKTDAVDARRIAEAVLPLDHTQLRHPRRDNGERAALQILITARDQMTTERTATINALTALTRTTDLGIDTRGPLTHSQINQISNWRSRDEPLATATGRAEAVRLAHRITALDTELATNLKTITTLLRATPAAGLLDHTGIGPVTAAIALTAWSHPGRLRSEAAFAALAGVNPIPASSGNTKRHRLNRGGDRRLNRALHMATITRMTHDPNTRTYVQRRTEQGRTTKEIRRCLKRYLARHIYRYLTTAYTQPTLDKT

SEQ ID NO: 448321 - protein, 412 aa, unidentified
MNAVGIDVSKGKSTVTIRRPGDVVVMSPRDIPHTQSAINDLIGLIRGLDGETKACMEHTGRYYEPVATWLSDAGIFVSAVNPVLIKDFGDDSLRTPKTDKADSQKIARYTLDRWAKLKQYGIMDKARNQLKTMNRQFGFYMNQKTAMKNNLIALLDQTYPGANDFFDSPARSNGSQKWVDFVHTYWHVDCVRSRSLDAFTEHYQNWCRRKGYNFSASKAEDIYRLSSDIIAVFPKDDSTKLLIRQAVAMLNSASETVESLRLKMDEAASTLPEYPVVMAMNGVGPTLGPQLMAEIGDVTRFTHRGALTAFAGVDPGKDESGQHIRKSVPTTKKGSPYLRKTLFQIMDGLIKRSPVDDPVYAFMDKKRAQGKPYYVYMTAGANKFLRIYYGRVREYLAALPETSDGEAQNDGI

SEQ ID NO: 448322 - protein, 342 aa, unidentified
MNYYAGIDVSLKSSSIAVVNANGEIVRETKVPTDPIPLIEWLRGCGLPLERIGLEAGPWSQWLYAAMKEAGFAVELLETRHVRNAFRTMAVKSDRKDARGIAELVRVGWYRPVHCKSLDAQETRVMLSARRLVDQKLGDVEMTLRGLLRNFGLKVGKTTPTRFADRIKELVSANATLQIIAESLLAVHQVLLRELKALEKRVRRIARDSADARLLMTVTGIGPIIALTYAAGVDDPARFKKSKSVGAYFGMAQKKYQSGETDITGRISKAGDATVRTALYQAAHIMLTRPVKPSKLRSWALRLAKRVGMKKAKVALARKLAVVLHRMLIDGKPFNPALGAAA

SEQ ID NO: 448323 - protein, 457 aa, unidentified
MVMIGIDPAKHSHAMAVLDATERQLAALQVSNDSDGYRAMLRLARRWPQRTWVVEGASGVGTHLAQRLVADGEMVLDVPPKLSTRARIFDVGHGRKNDPADAKTIAVVGLRTNGLRRVEADGERVALKLMSERRRELVHTRTQTINRLHQLLMELIPAGAPKDLTATKAKALLATVRPRDVAGRTRRQLAVNLIDDITALDRKVKDLDKRLAEAVAATGTSLTRIVGIGPVTAALILGETGDVRRFATKHHYATYTGTAPREVSSGDIHRHRLSRAGNRRLNHALHMAALANKRFDDRGRAYYARKVAAGKGSKGAMRCLKRLLSDAVFRALHEDLQAAQVAGPVGHSGASTKSSAAARSPMDSTSDQSLAGPANPDATPRRDTGNKPVLTQRGAVLARGSRQRKRRSGLRGGVAHPRRARGSRCTFRMPLDVRPRPVYVPGQRVGSSTKRSDREHA

SEQ ID NO: 448324 - protein, 345 aa, unidentified
MKIVGCDLHTRYQQVAMLDRETGELVERRLEHESGEARAFYAALSSPVRVGIEATGHTRWFERMLAELGHELWIGDAAQIRASMVRKQKTDARDAAHVLELLLSERFPRLWRPTMAERDLRQLVWHRQKLVWMRNAVGNQLHALAMGEGVCRKKKLFTKKGRVELEGLGLGVWASYRRQELLTMLDGFDASLQELDRAVAEQAEQNAAAVLLMTHPGVGPVTSLAFVLTLGPVERFERSKQVVSYLGLNPREHSSGGRQRLGAISKQGNPMMRSLLVEAGHTAARLDGELRQDYQRLKLRRGSGVAKVAIARKLAVRMYWMLRRQASYAQLVRMQGSPWATLVGQ

SEQ ID NO: 448325 - protein, 420 aa, unidentified
MPPNFPVQRPCAAPVARGRASTVNRWHVRAPALYRDPTAANTREFPSAEDRHLGAMIDVCAFNQTEQRGTLVNEITTVGVDLAKSVISVCGLDREGRVVLEGSMSPSAFARWAEQQQPCLMGLEACGSAHHWARTLAGHGHDVRLMPAHLVSPFRMSRGAKSDRNDAQAIAVAVRQPTMRFVQAKSVAQQCTLAWHRLRDGYGVERTALINRTRGLLAELGVWVGRSPEQLLRVLPRLIAGEELPESFRRRLEQALHHLQQLGEQMSGCEAHICAHAKAHPDAVRVQRISGIGAITASACVATITDPTAFRNGRQLAGWIGLVPHQSSTGGKTRLGSITKRGDTYLRGLLVQGARSALQSALRARPEKRSGLQQWICALNARVGYHKTLVAIANKHARILWVILARSEHYNPDAAAPAAA

SEQ ID NO: 448326 - protein, 367 aa, unidentified
MKKVSTAATKPSRNFSQSNLTIGLDLGDRSSCYCVLDESGRIVMEQKVSTTAKALQAAFGVMPRSRIALETGMHSPWISRLLSALGHEVIVAHARNVRLIGESRRKDDRLDAQTLARLARIDPQLLCPVKHRSAKAQADLTVIRARAGLVRARTALVNTARGLAKSYGERLRGCNVRTMNPEKAEGLSPELQAALAPLLVALESLSEQIREYNERIETLAQEKLSAGGPAEADQGRGHADRSDLLVTLEDPYRFRKSRDVGCYLGLQPGRRNSGQSEPQMHISKEGDPYLRTLLVQGAHHILGPFGVDCDLRRWGLKLAERGGKSGKKRAIIATARKLAVLLHHLWVSGDVYEPLHNSGRLALPAAA

SEQ ID NO: 448327 - protein, 349 aa, unidentified
MIVVGIDPHKQTHTAVAVEAATGRVLAELTVKARTQGFERLVAWARELDPERSFAVEDGRHVSGHLERHLIARGERSVRVPARMMGEARRTDRVSGKSDPVDATAVARAALRHPDLPQATLAGSEREVGLLVAHREMLVNERTDRICKLRWLLHDLDPDLAPPLRTLDRFKTLDALVQTLRTLEPSVAQELCIELVQRCREITVRANELERRIRGLVQTHAAALLEIPGCAALTAAKIVAETAQVSRFRTEGHFARYAGTAPVPASSGARHRQRFNRRGNRQLNAAMHRIAVTQLRMHEPARVYVATKRAEGKTKTEAIRALKRHITRVVFKTLTSMDQPTDRLTAVAA

SEQ ID NO: 448328 - protein, 365 aa, unidentified
MVEVVWSPGGRFGSGLQRPPESLIPGSQWFFPEQSFEPPGELALQEWERTVNKSRLSYVGIDISKDHLDLHQLPQDRASSFEANSEGISKLITYLKRRKPTLIVIEATGGYETQLAAELVTAKLSVAVVNPFQVRSYAKALGILAKTDAIDAKVLARFAQDVKPQPRPLPDEKELDLKALVMRRRQLIEMLVAEKNRQHRASSSRVKQSLQRMVNTIQQQIDQLDDQIKETVRSSPVWREKDNLLRSVPGISDKTSHTLVALLPELGKLNRRQIASLVGVAPMNRDSGLYRGKRKIYGGRKSVRNALYMATVTAIRYNPLIKSFYDRLISTGKEFKVALTACMRKLLLMVNSMIKQNAAFKQNFA

SEQ ID NO: 448329 - protein, 400 aa, unidentified
MVTQETPQVFLGLDVGKSEHWACAITSGRKVIWNKALPNDEAKLVDMYTRLQEHGPLLVVVDQPATIGALAVAVAQHMGVPVAYLPGLTMRRIADLYPGDAKTDEKDAFIIADAARSLPHTLRELTEADVDEATLGMLTGFDLDLSRQVNQVSNRIRGLFTQIHPALEKVLGLRLEHDAILEMLATWPTPEKLRKAGRARIDAKLKKHGARRHAAWTEEILTALAKQTVTVTGTQAAGIVIPHLARQLIHLHAQRADVAQEVEKIVVHHPLYLVLTSMPGVGLRTAAVIIAELSGKTFTSAAALASYAGLAPTTRQSGTSIKSERVSHSGNKRLKRALFLSAFAVIRTDPESRAYYDRKRSQGKRHNQAIIALAHRRLGVLYAMLRDGTLYNTPETVLMA

SEQ ID NO: 448330 - protein, 474 aa, unidentified
MGKGSNGVSRSERRRNARKERLRGLLPRDGAVVGIDLGEEKQALAVVDHDVRVVWRKTARVRAHQLGGVIDLAVGAARERGFGAVTVACEPTGPRWMQVQRLCAERGLDLVCVQPLVSHIAREQQDYTTHKRDESDAVLIARLACELHCYVPEELDETWAHLRQLGRRREQLVRAATAAVQRVRDFLSVAWPAAETAAAVPFRSLTWLACLEVVTGRCGGDPARLAAAGEDEFLAAAADAARGWGATRADRRIARRVLGVLEDPDAVAWSRRGLFRRIAGELADLRRIRAQLKATEAEMAAVLGGELGLARLGEIPGLTLAGAAVILAEAGDPRRYETSSSMVKHAGLSPADTSSGAFEGESHISRRGRPGLRTAAWRAVFPLLLHNPVMAAKYKAMVAAAEGAARVAAAAARPGSAQAAQAARAVRSARAKARVACAASLLRWIYYMTVHDAGWDPVAASGGRWAPAADAEAA

SEQ ID NO: 448331 - protein, 483 aa, unidentified
MTNENFEFWVGIDWAKSSHQVCVLDSAGRVLEERCIDHSCAAIARLVDDLVARAGGNPAKVAAAIETPHGAVVSMLIERGIAVFAINPKQLDRFRDRHSVAGAKDDRRDALVLGTSLRTDMKSFRRVRLGQAELVQLRELVRVHEDLKHEFNALANRLDDLLVRFYPQILKLGSVHTDPWLWDLLELAPTPTQGALLTDASLRDLLSKRHIRRLNSKVVAEALGEPALQVAPGVVEACTQHISLLLPRLRLAAQQQRQCLQEMRRILARLCRPVAQDDDEEADQQRKHSDAKILLSLPGIGPIVGATLLTDASEALIDRDYSSLRAQCGVAPVTRQSGKHKDVSIRYACNSRLRQATYDWARVSTCHDVRNKQHYADLRRKGHSHGRALRGIADRLLGLLVAMLKTHSLYDPTRWNQPRASVQPTGQASAVHPPSPSPPHPEPEPPAEHPSPSPTRTPTRRAQRVSRPPKAPRAAGPERSAGP

SEQ ID NO: 448332 - protein, 308 aa, unidentified
MRFYNRQHTYYCGIDLHVKTMYICILDAAGQVLVHRNVPSTPEALRETVAPYREDLVVAAECMFTWYWLADVCAAEGITFVLGHALAMKAIHGGKAKNDKIDSHKIAGLLRGGLLPQAYVYPAAMRSTRDLLRRRLHLVRKRGQLLAHIQNPRAQYNLPEFGRRLAYPGNRDGVVEHFPDPSVRKSVEVDVVLIDQYDALVTDLELTIVREAKRHDGDAFHRLRSVPGIGKVLALTILYEIHDIHRFDRVQEFASYARLVKCQKQSGGRTLGTSGAKMGNVHLKWAFSEAAVLFRATRRMARSSWPGW

SEQ ID NO: 448333 - protein, 366 aa, unidentified
MKKISTVQTFKSENFKEQKLTIGVDLGDRWSFYCVLDEAGKIILEQKVPTTPEAMKQTFSRIPQSLIALETGTHSPWVSRLLTELGHEVIVAHAQKVQLITKSNRKDDRHDAQTLARLARIDPELLGPVRHRSVQAQIHLTVIRARAELVTARTALVNAARGLVKSYGQRLPKCGTQQVSRELAAALSTELRDVLEPLLKEVESLNERIKEYDERMEKIAKEVYPVVYLLKQVKGVGTQIALTYVLTIEDPHRFLKSREVGCFLGLRPGRRNSGESEPQKRISKEGDRYLRTMMVQGAHYILGPFGQDSDLRRWGLKLAERGGKNAKKRAVVAVARKLAVLLHRLWVSGEVYEPLRNNHQVVSAVA

SEQ ID NO: 448334 - protein, 369 aa, unidentified
MEQGTTYVALDDSARKIVAGILRPDTTQVELREMPNEPAHLRRLFERLKREGPVVACYEAGVSGYDLYRQLRALDVPCQVMAPALTPRRAGQRIKTDRRDAIKLVRLFRAGELTPIHVPTEVEEAGRDLLRCRDDVRRDVLRWRHRVLKLLARHGRVFRGGRHWTQRHWRWLRQQQFAVPPLQRTLEASLGTLEQALARLAELDHEILALAETDPYRTPVGWLRCFRGIATLSAMILVVEILDFHRFTRPRELMAYLGLVPTEYSSGDREWRGALTKAGNSHARRVLVEAAWHYRHRPAIGEALARRSLGQPGAITTHAWRAQQRLHRRYRHLVGRGKRAPVAAVAVARELVGFLWAAMTDSPRPRRVA

SEQ ID NO: 448335 - protein, 312 aa, unidentified
MDAIYVGIDVSKDRLDVAVRPGGESFSIGRTGAGIEELIERLKAIHPQLVAVEATGGFETVVAAGLAGAGLPVVVVNPAQVRAFAQALGKRAKTDPIDAAVIAHFAEATKPRVRQLPDETTQMLADLVVRRRQIVEMIAAESQRARRVTSARLKKSIARLHKALEKELSDLDSEIGDHVRGSPVWAEKEDLLVSVPGVGPTIARSLIAELPELGSLDRRQIAALVGLAPWTRQSGQWRGKSFIGGGRANVRRVLFMGAMVASRFNPTLKLFRDRLVAAGKPKLVAIVAVARKLLTILNAILRDNSPWQLKNA

SEQ ID NO: 448336 - protein, 327 aa, unidentified
MDVLALDVGSRKHAVAVSDARLGASTEVANEVDALRKLYAALVRKAPDAWVVMEATGVYHWQAAVLAHAAGLKVAVLNPKVTANFARVLGQRNKTDRADAQVLLRYAQTVPMVAWQPPRRAVIELRAISRHLLVLTQQQIAGKNRLHAEQSMGEAPVFVLRAYQQEVKRLDKQIAKASAEAMKIIRADADLLAQFKALDSIIGVAEASAIALLGELATLPEAMKARACVAHAGLDVRQHESGISVAKPGRLTKHGNRHLRRALYMPALVAISHDPHAKAFYERLKTKGKKPLQALCAVMRKMLTAAWALMKSRGTYDGSRLYAALEG

SEQ ID NO: 448337 - protein, 424 aa, unidentified
MQVTYPICCGIDVHKSFLVATIIKTTNGFEPSYQKKRFSTFNNSILEFKTWLIQNNCRDVCMESTGKYWIPVFNLLEDEINVTIANPKWVKAVKGNKDDVKDSKWIGDLFRLGLVKGSFIPCKPIRILREYTRYRYKLVSCRSSEKNRYQNSLTVCNVALDSVVSDIFGKSSTSIIDYLLNQTNDSINHEEIASKLLKSLKSKSDAVIESIEGYQMTDTQKYRMRLIRSHIDYITAELNDVNSIIDKFISSNTDYLNAVQLLCTIPGVKYDSAITIISEIGIDMTQFSNSKRLCCWAGLTPGSNESAGKKKSVRITRAGVYLKPALVQCAHAAVKSTKSPYYKNKYERIVKRRGKKRAIIAIARMILTAIFKILTTGEVWNPCDLYKVDMPVALVEKQKTKAIKQAIKLLQKEALLPLDFAVIT

SEQ ID NO: 448338 - protein, 416 aa, unidentified
MQVLYPCCCGLDIHKKFVVACVLRTAPDGSLQKETRTFSTMTGELLALGDWLRAVGCTHVAMESTSSYWRPVYNLLEGQFELLVANAYHIKTVPGRKTDVKDAEWIADLLRHGLLRGSFIPAPEQRHLRDLTRYRTHLVEERARLTNRLQTVLEDANIKLAAVVTDVRGVSARAILDALVAGETDPALLADLARGRLRTKRDQLAQAVVGRFAAHHAFMITEQLSHLDYLDEAMERVSSEIEQRLQDEWAAVELLDSVPGISQRAAEIVVAELGSDLSRFPSAKHLASWAGMCPGNKESGGKRLSGKTRKGNVWLRQVLIEIAHVASKTKETYLAAQYRRIAARRGKKRALIALGHTILVIIYHILTERKPYHELGGTYFDQREREQVERRLVRRLERLGYSVSLQPADTSPQPAA

SEQ ID NO: 448339 - protein, 322 aa, unidentified
MSFVGVDIAKRTFDIATPLANGKVRTKARLTNDSNGFQQFEAWLQTYAEPGAWVVMEATSVYHEALAEYLHARDYRVCVVNPASIAKFAVLELRRVKTDKADAKIIAAYAQHKGDSLRQWAPESEAQKRLRALVRRLDDLKEMQQMEQNRLEVAPLAVQPSITAVIGHIADEIKKTCEAIKQTIDDDPDLRGRRDLITSIKGLGDTTAALLLAELGDPLKYKSPASIVAFAGLNPTVHQSGEKVGQTAISRVGSSRLRAGLFMAGTVAMRYNPVVKALADRLEARRKAYKQIVCAAMRKLLYLVYGVVKSGKPFDPQIALAR

SEQ ID NO: 448340 - protein, 397 aa, unidentified
MPVSNFNNFTDFKGQRFYIGLDVHKKSWAVTVRSMGIEVARFVQPPSVANLKAYLTKNFPGGQYFSVYEAGFCGTTTHELLCKHGIRNIVIHAADIPATDKQKKNKTDVHDSRFLSERLEKGDLKGIHVLTREQQELRSLFRLREAKVRDVTQVNNRLKSFLMFFSIELPEHIGKKEYLSMKALQWLDNLELASSAGTIALKQHLEELKYQRKQLYQITKMLREQIQTEHARVFECLLSVPGIGAVTAMGLIAEIGDFSRFNDPDQYASYLGLCPWEHSSGDTKQTKGMQPRCNRHLRPLLVEASWTAIKRCPPLFAYYSKHAVRNPKAAIVKVARKLAMIAKGVATSQKPFNTDVMQNIQHKNTDTKHDQDEKRFSSGIAQQHKNKQPGNRTLLPG

SEQ ID NO: 448341 - protein, 344 aa, unidentified
MGEVITIGLDIAKSVFQVHGVDGAGVVVIRKRISRAKVLVFFADLQPCLIGIEACPSAHHWGRELEALGHTVRLMPPSHVKAYLKRSKNDANDAAAICGAVTRPSMRFVALKTKEQQASLMLHRTSQMLVRQRTMLINAMRGHLAELGIVSAKGRNGTGELLRIITDGADGRIPPMARGILGVLARQYSAIGAELGSIQKSILAWHRSCEASRRLEEIPGIGPIVATALVAEIGDWKAFGSGRNLAAWIGLVPKQHTTGGKDRLGGITKQGNRYLRWLLVTGAMAVIRYAQTHGTHKRPWLGRLMERRPTKVAAVALANKIARVAWAIMVHGDRYKEPELQAAA

SEQ ID NO: 448342 - protein, 392 aa, unidentified
MYIVGIDIGKNHHEASIVSPEGKQIGRSLRFATTHKGADSLMSFIFKNFGNSPCVFGMEATGHYWYPIYSFLKAKGYTIYVINPIQSDSLRKMYIRQTKNDSIDSFLIAEVIRFGQFGTTSMADENILAMRQLCRYRDSVISSRTEIKLRIGTIMEQIFPEYEKQFSSLWVSTSMGILEKYLTPENIENAPIDELFEIIKDKSHNRLTRAKAISIKEAAADTFGIKIAQDAFSFQLKQLIDRMNFLDKQIEALDCQILEYYEKFDCYLHTIPGIGMIAAATILAEIGDINRFKSSSALVAFAGIDPTVRQSGEFSSTHNHMSKRGSPYLRHAIFLAATTCSFHNSPLNAYYKKKRDQGKHHLTATGAVARKLTSVIYAVLRDSKPYEPKSFC

SEQ ID NO: 448343 - protein, 333 aa, unidentified
MNAVFCGLDVHKESTYATVLDHAGQVVTQRRMRNEEVPEFLEPHKVEKVAMEASTYIIPMYRRLVEDGYDVTVSHPKKTRYIAEARIKSDRVDSKALAELLRLDSLPKSYIPPKELSDLREKIRRRAFIVRQGTKLKVKIRDVLAYEGVKPPTGHGLFTKKGVDWLRGLGLEPVDCYLRLMAPLSREVLLLSKELRGLAKGDTDVQLLMTVPGIGYYIALLVKAEVGDINRFSSGDHLASYAGLVPSTRSSGGVTRHGRITREGSRWLRWALVEAAMVHVRQDSQVTRFYHRVAERRGKKPALVAVARKLATICYSVLVNRRPYYSPLDAQAK

SEQ ID NO: 448344 - protein, 372 aa, unidentified
MTSIIYVGMDVHTTNYRLCCYSMEDDRFFAEVQVEPDAKNILKYLARIEKQQSRDCRIVCGYEAGCLGYSLYHQLHAHGIDCVILAPTTMMTKPGKRIKTDRRDARLISKCLAFHTYSPVYIPTEVDDAVKEYIRMRDDANSALARVKQQIIAFCIRHGKIHDGKSYWTNKHLEWLSSLDLGNKILSEVLQEYLIRYYQLREQVDMYDMRINELAQAEPYRQKVEKLGCFRGIAAHTALSFCVEVGDFRRFATAQQFASYLGLVPGECSSGDKQQYTGITKAGNSHLRKLLVETAQVFGRSATKSGKSVALKERQAKCDSLTVAYADKANARLKKKYFKIAMRSKVNIAKTAVAREMACFIWGMMTDNISCA

SEQ ID NO: 448345 - protein, 342 aa, unidentified
MLIIGCDYHPGMQQIAWFDEESGECGEQRLEHGTGEGERFYRELKRRGVPVRVGIEASGHTRWFERLLTELEMELWIGNPAKIAAQRVRKQKTDREDARLLLRLLREGRFPKLWVPSPENRDLRQLLWHRHRLVQMRTRIKNQLHAIALNEGVQRKSRLWSKAGRGQLESFALAPWAARRRHDLLQLLDQLTPQIAELSQAVEQEAERRPEVQRLMTHPGVGPITALAFVLVLGTPQRFRCGKQVGSYLGLIPCEDSSAGKQRLGHLSKQGNTLLRYLLVEAAQAAVRCDAGWRRRFVHLAMRRQRNIAIAAMARKLAVSLYWLWRKAEDPPAAPQSGSHVG

SEQ ID NO: 448346 - protein, 346 aa, unidentified
MSAVIGCDAHKKFSVFVTIDSKGKTSPPVRIEHHRQEYIDFLHTLPHASEIALEATGHWYWMVDEMEKAGHRPHLANPSEAKKRMGGSNKTDALDAKGLAILLHNGTLPESWIPPGALRDKRELLRTRMALRDLRTSLKHRIHAGIDRYGLQADAITDLFGKKGRAYIAGVLNALPPETAQMIALQLHSIDQIEEKIAAIELRIDDQLEASPEIKLLRTVPGLGPILAPLVWLEIGDVDRFPRAEHLASYAGLVPRIIASGGRIRHGGTCRNVNHYLKWGFVEAANCAIRIKAYRQSHIGLLYDRLHPSKGHGRAVVAVARHLAEASYWVLRKKQIYRAPQPRSAD

SEQ ID NO: 448347 - protein, 403 aa, unidentified
MTSGSYFAGIDWASQSHSVCVLDAAGRVELRLELAHNQEGIERLLRQLKSFAGVVISIERPSGLLVDALVDAGLRVVPIHPNVLKASRPRYRGAGKSDPGDAYMLADILRTDGHRFRALEPQSDEIRALRALVRTRDDLVAERVALANQLRSLLETFWPGAAEIFADIDSPIALAFVARYPTPQSAAHLGEKRLAGFLAQHSYCGRRPVAALLERLRSAPAGRTGDLEAEAKGELVRSLAAILERLVAELAKLTARIEHTVANLADGQIIMSFPRSGRVCAAQILAELGGVRERFPNDAQLAAEAGVAPVTYESGKHRSVVFRFACNHRLRRAITCLADQTRHAHPWAADVYHRARSRGCDHAHAVRILARAWVRILWRAWYSRTPYQPHLHRSAAAFIPATG

SEQ ID NO: 448348 - protein, 391 aa, unidentified
MSMYFIGIDISKYKHDCCIISAADQKVVSKVTIKNNKAGFNELLTIIHSLANPADIRIGFESTAHYALNLELFLENSLLTFMEVNPVLISEYKKSKTLRRTKTDSVDCESIARWLMTVEYKPHSKGFYHAYSLKSLTRLRDKLIRQRSFYLIKITNVLDHTFPEFKPFFNERLSKTALYLLENYGSAEKMARMNSASYEKLRSLSRGKFSPQQFLRLKDLAANTVGVNNSIFDVELNSLLSLYKSLVKEINTIEKEINKLIEEVHPHYMSVPGIGPLSAAVIYSEYGDISNFTNPGQMLAFAGIEPGINESGTESHGGKMVKRGSSQLRYTLINCCLPLIRFDMTFATYYAKKRGEGKPHRVAITHVAKKLIRVIYALERQDIDFNAQKLR

SEQ ID NO: 448349 - protein, 351 aa, unidentified
MRILALDLGSASRTITKTAVTVLVTETGEITRTTLPTTPDALIALIRAHRPDRVVLEITRGCGWVVDLVRGCGVATVQVANANDPAWLNRTSKTDRQDADLLARLSATEMLRTVHVPDLSVREWRDLIGHRHVLVRDRTRIKNRIRALLSNQGESTGQAWSARGMASLAALAKPLVACDTDDLWRGSLWLELARLREIAAHLATITTRLDRLAEASSGAGILMEVDGIGPRTAEIMTACIDNPLRFRNQKDIGSYTGLAPRVSQSGSTLRLGSISKHGPPLMRAMLVEAVWLGIRRPGKIRTLYEQHLKGDPTRQRRAITATARRLAVILWAKLRDHRRQHPELPTLPQAA

SEQ ID NO: 448350 - protein, 462 aa, unidentified
MQMTLGIDVACRAAHQASLADEAGRFTWSGRKFRTTAADLDRLWESIPAGAAVLVVMEPTRNAWVLLAAWFRRRGATVIMVPPEQSADLRDYYSKHAKSDRLDSKMLARLPLLHPEGLRPAEGLGPADALRRASVLRSSLVKRRHVILARLDSYLELLGPAWHAAFGGDLANITPLRLLAAGYADPHAVRRLGLARLTRFTWRYSHGAFGEHYAAGILAAAAETLQLWDGELSYPDLAEDIAAEARLALTLTTEIRDLERKIAALLHQADPAGILTTVPGVGAIGAAQILARLTDPARFRSMAGARSFTGLVPSLTASGTSGRHGPPTKSGDALLREALFMAANQARRIDPVLAARYHRLMVTCGKHHNSALCHISTAVLTRIIACWRAGTPYQIRDLDGTPLTTAQARAIVTQRYHVSDELRALRRTSHLSAKAGRRHQESPSAPTPARPQPNATARSRNT

SEQ ID NO: 448351 - protein, 421 aa, unidentified
MYVLSDRPGRCRPPRIGRAATIMTSICARVGGVDSHKDTIHVAVITEIGQHVADQEFSTTSAGYRRAVAWLIGHGPLTKVGVEGTSSYGRGISTELIATGLRVVEVNRTRPAERRRQGKTDALDAYRAARSVLSGEATTEPKSASIEPLRALAIARRSALKAQQAAWRQIGAVLVNSPASLRDRYRDLREDSLVSTLSRLRPDQASEPDTADLLHSLRSLARRHQSLTREITDLQERMRARALVANPGLMAVKGVGPVAGTQLLITAGDNPDRLRTSASFAALCGTCPIPVSSGRTDRHRLSRGGDRQANAALHHIVKNRMTHDAATRAYRDDHLDRGWTKKAVYRALKRAVVREVYRALTGRCAVPDYTDLRPARQGKNITLTTVAGALDVWPSRVSDIELGRRRDDAFAERYRAWLDAA

SEQ ID NO: 448352 - protein, 453 aa, unidentified
MAKKAKKIHTSKGIELKIVNPNAAGIDIADYEMQVCVPADRDGENNRRFGCFTRDLNEICSWLCACKVDTVAMEATGIYWLPLYFKLKDSGIDVVLVNARDVKNISEKKTDEADAEWLMLLHTYGLLKASFQPENEARKVRNLARHRNNILKASSKEVLHMQKAMGQMNIKLSNVLSDIAGKSGIAIIEAILAGERDPRSLALLADSRCKRSKEEIALSLEGTWGEDHLFELKQAYDLYKYLQGQMAECDRMIENALTSYTAKIDTEMGRYVKSGKPVCKKNAVSFDVEQYGYAIWGVNAMEIPGMSASSLLQLVGELGHDFVEKFDTPEKFSKWCNLVPNNKVSGGKLISSRVPKRKNPVGQIFRLCANTLKSAKNSLGVYFRRIRSRSGYMQAIVATAHKMARILYVMVKSKTAYDETKVGLDEQELLMKKIERAKCALNRLNAKLCNSMG

SEQ ID NO: 448353 - protein, 357 aa, unidentified
MIYVGIDVAKDKHDCCILESEADKLYPVFTIPNNKAGFDELYEKIFTVTDDKTKIKVGLEATGHYSLNLLGSLIDKGLPTCVINPLHTNLYRKGLSLRKTKTDKVDARSIAMMLMTNKTLKPYSDTSYHSEELKSLTRYRFDKVQERAKLKSSVARLVNILFPELEKLVPSLHMASMYALLSKLPGASYITECHLTHLKNLLETASKGHYGRDMAITLRNTARDSIGSVIPAKSMELKHTIHLIEVMTEEIDEIEDSIKSIMDTCNSPIMTIPGISYRMGAMILAEIGDFTRFNYADQILAFAGLSPSTYQSGQLDSSYSHMEKRGSRYLRYALFNAAKFVCKWDENFRSLPLKEDR

SEQ ID NO: 448354 - protein, 442 aa, unidentified
MRGVPEEIPDAQSEQILARVCAVDVAKGSGMVCVRLPGEGGRRISRVWPVPATTNAVGDLAADLVTAEVEKVTVESTSDYWRIWFYLLEAAGLDVQLVNARDVKNVPGRPKTDKLDAVWLAKLTEKGLLRPSFVPPVPIRVLRDYTRMRVDLVRDRTRYWSRLEKLLEDALIKVTSVASTVRTVSTRDMVEALIAGERDPQVLADLARGPLRSKRAALVEALTGRFDAHHGELARILLNQIDHLDAEIATLTERIAVLLDQIDPAGPPLPPGGAGTVAVLDARRRLAEIPGINTESAQLIIAEIGLDMTRFPTAAHLVSWAKLCPRTLQSGTSITAGKTGKGNPYLKGALGMAAAAAARGHGTFLSERYRRVVKRRGKGKALVAVARSILVIIWYLLADPSARFQDLGADFYDRRVNTTRKINNLVRQLEALGHTVTLHPAT

SEQ ID NO: 448355 - protein, 440 aa, unidentified
MIDTNQNKEIEFAAFVGIDWADLKHAWALQIPGHLEVERGDLDHTPQAVEDWAAELGRRFGGRPIAVALEQSRGSLLFMLTKYAHLVLFPVHPTTLYDYRKGFRPSGAKSDPSDAGLLVDLLVRHREKLRRLNPDTEQTRTLQFLVEARRKFVSDKTRYSNRLTAYLKMYFPQVLGWFSEVTSPIAGDFLERWPSLQKVQKARPETLRKFFIQRHSCTLDNVDRRLEEIRSALTATHDVAVACSCSAAVLALVRIVRTVRDAILSYDQQIETLARQHPDFAIIDSLPGAGPALVPRLIAALGTQRDRYQSASELQSYSGIAPVLASSGKQHWVHWRWACPKFVRQTFHEWAAHSIGSSAWAKAYYEQQRANGKPRNTVVRALAFKWIRILFRCWKDRKPYREDFYREALARHQQRASKRAPVQLQWKTCAGFSKITAIPS

SEQ ID NO: 448356 - protein, 364 aa, unidentified
MREHITHVAFDMHRDSVTAAWLLPGESSPELRTIPHEVKPFRRLVRAILAHGPARACYEAGPLGYAPQRQLTAWGLPCEVIAPSLTPRRPGQRIKTDRRDAQKLVGLYRAGELTCIRIPTPAEEAARELVRCREAVVGEARRAQQRLRQFLLRQGLRCPAGSPGSQAWWSWVLTLQLPDAAAQRTLEEYCLAATTQRARAQALDAEVTALATQEPWAPAVARLRCLRGIDTLTAVTVLLEVLDFRRFARPRPFMGFVGLVPSEDSSGETKARGRITKTGNAHLRRVLVEAAWHYQYRPRPSKAIQARRAGQPPAVVALAEQAEQRLHRRFARLLARGKRSTIAATAVARELCGFLWAVMVQEPA

SEQ ID NO: 448357 - protein, 412 aa, unidentified
MEVIYPTCGGVDVHKREVKACLITRDASGQRTKEVRTYRTMTQDLLALRDWLQDQGCPIVAIESTGVYWKPVFNLLEGDLEVLLVNPSHIKHVPGRKTDVKDCEWLAERLEHGLLKGSFIPPQAIRDLRDLTRYRRKLVEMRASEVNRLQKVLEDANIKLASVVSDVMGVSGRAMLAALLAGERDPKQLAELAKGRLRQKKEELVAALEGRFRPHHARLLAQMLAHIDFLEESIAECEAQIDEMCRPFAEDIERLDTEPGVDRRAAQDLVAEIGVDMSAFPSHKHLCSWAKICPGNNESGGKRKSGRIGKGNKWVRAILTECVHAAGRTKETYLSAQYARFARRKGKKHAAVVVAHSLLEGAYFILRDKVPYRELGPHHFDEINQAHAIRYHIRRLESLGLQVQIQQLPLAA

SEQ ID NO: 448358 - protein, 365 aa, unidentified
MSTIYCGVDFHARQQTVCYLKTEDGELVVRELKHQNKEEVRAFYAQFKGHVIVGLEASGYSPWFEKLLTALGHEAWLGNATEIRRRARWRQKNDRRDAELILDLMLHNEFPRIHRPTSESSEILRMLRYRQKLVKMRTIGKNSLQALALQSGLSLRAKLFTKAGKQELCKATMSPVMEQQREQWLTLLETLDQRILESMLWLKQQSQGDERVSRLRTHPGIGLLTSLGIVHTLWPVSRFRNPRTVTAYAGLEPMERSSAERKHFLGISKAGSRLLRYLVVEAAHTAVKKDEELKRFYRRLEARRGRPKAKVAAARKLLVRGYIMLRDEIDYAEFQRRAVAARLARQSSRLTMPVSLIGQPASPDS

SEQ ID NO: 448359 - protein, 473 aa, unidentified
MSRVVEDKLDVLLVLSTGSKSRDIQEDVVTKGSGLSRGDKRRNAKLARLRGLVAAGNAIVGIDLADKKQAVVVCDHDSQVLARRTVKVRAWELGPVLDWARNVAGRHGFAGVTVGCEPTGHRWMVLNQLAGQRNMTLVCVNPMLVGRAREAEDYTRDKSDDKDAMLIARLVAQLHCYAPECPQETWARLRQLGARRQRLITEATACVQQLRDLLECAWPGVLEAAAKPFESANWCAAVAVVLKRCNGRPERLARLSLARFEAAVIRELPRWGAQRRRRAIIAAVHSALVDPRGVMTQRRGALERADGIVGDWHVTKTRLAEVEARMVEVLDELELTAHVTSIPGLSAVGAAAILAETGDPARFDSPRAVVKHAGLCPRDNASGTFTGRSRISRRGRPGLRLAAWRAAWGALQHNPVMAARYRYLTTRQHNRLTDGQARAAIAAALLRWIHVVVTRRVHWDAAIAGVTKLPAAA

SEQ ID NO: 448360 - protein, 350 aa, unidentified
MKIRHPIIIGIDTHKATHVAVAIDTQGTRLAALSIPANSKGYLELERWSCGLGHVQAFGIEGTGSYGAGLSRCLLAQGHHVVEVTRPNRQLRYTQGKTYSLDAEGAARSVLSGQANSHPKTQTGSSEMIRHLKIARDTAVKSRSQAMVTLKTLIINAPADLREGLDQIKGKIGLIRHIAAFRPGDILNTLASAKAAMRALARRWLLLHEEILGHDKELERLVIKRAQDLMQSHGIATMTVAEMLILVGDDPTRIRSEAAFAKLCGVCPIPASSGKTHRFRLNRGGNRQANAALYRVAIVRMRSHEPTLAYVKKRTKDGKSKSEIIRCLKRYIVRENYSQLCVPQTIKIAA

SEQ ID NO: 448361 - protein, 324 aa, unidentified
MIDGILGIDVSKNTLDVSISSCSKVRTKSFANTSDGWRHLLDWLLAQKIQRVHACLESTGRYSLGIACALYEAGHVVSIINPAQVRDFVRTKLGRNKTDGIDASRIREYCELFKPLPWAPPSEAHRRLGELQTIRSGIIAGLTEWKNRKNSGIIDAEAQALADATILHFTSQIGAVDKAIALAIENDSDLRSKRDLLLSISGVGDTLAGVVLAELPGPDVLHSSGEVVAYAGLNPRQHQSGTSVDRATRISKIGNAVLRAALYMPALSAMRYNPAIVALVTRLKSRGRLKPKQIVVAAMRKLLVLCFGVLKTGKPFDPAIAMGR

SEQ ID NO: 448362 - protein, 410 aa, unidentified
MGLFCGIDWATEHHDVAVVDDDGRVVARGRVSNDAAGFAQLLTLLAEAGDSAADPIPVGIETDRGLWVAALRETGRVIYPINPLAASRYRARYAVSGAKSDATDAVLLANIVRTDPDAHRVLPADTEAAQAIRVLARAQQDAVWARQQIGNQIHDLLKDFYPAALVAFADLSEGGLARRDARTVLAAAPTPAQAAKLTRARLRRLLVNAGRKRYLDRDTDRLREIFADTYLHQRPQVEAAMGIQLTALLGQFDAACTAAADLAEAAIAHFEQHPDAEIITSFPGLGNLTGARVLAEIGDDRARFVDARSLKAYAGSAPITRSSGKKTVVLHRHIKNRRLAAVGPIWALGSLRASPGARRHFDARRAAGDWNRQAQRHLFNKFLGQLHHCLHTRRLYNEHQAFPPPLELAA

SEQ ID NO: 448363 - protein, 425 aa, unidentified
MNCKQNQKINQVKESTLVVGIDIGSTTQYARAFDWRGIELGKVFTFSNSREGFENFKSWMQRLQDKYKKSDVIVGIEPTGHYWFDLGAYLEDGGILLVMVNPYAVKQTKELDDNSQSKNDRKDPKVIAKLVIEGRYSEPYIPDGVYADLRIMVANRKRLIRELTQIKNRFARWFAIYFPEYKEVFGDYEAQSSMMLLKAACTPEAIVELGAEKINQIWRDAKLRAVGMKRATTLCETARRSIGLKKGSSAAEYEMKLLLADYEYKTAQLDSVMEEITGLCKQIPESGQMLAIKGIGVVTVAGFLAEVGDVRRFESPRQIQKLAGLSLRENSSGKHKGQTTISKRGRSKLRAVLFNAAIPLIAKNPEFRSLHEYYTTRANNPLKKKQSVIAISCKLIRVFYAILANGVTYDPQKMISDIHRQPQAA

SEQ ID NO: 448364 - protein, 361 aa, unidentified
MKPALNTPTSTTVPKTAPGGLTAGLDCATDDHVVCVVDSTGEVRDRFSVKHNRAGLNALVRRLAKLGCAEVAIERPDGPVVEALLTAQLTVVVISPNQVKNLRSRYGSAGNKNDRFDAYMLADTLRTDRARLRVLTPDSPATVTLRATCRARKDLVNTRVAVANQLRAHLQTAFPAGALLFADLDSGINLDFLTRFTHQGLADWLSPKRLAHWLRAVGNCGRTSPEELHTRLLSAPPGPVDDHGLARSHITLAYVATLRALREQITTLGRQISEQLAAHPDNNTFTSLPRSGTVRAARLLSEIGDCRARFPTPESLACLAGAAPSTRASGKSRSVGFRWACDKQLRDAVTDFAGDSRRANP

SEQ ID NO: 448365 - protein, 338 aa, unidentified
MNIVFLGIDLAKNVFQLCGVNQAGKPVYTKRTGRKELLQTLANIPACLIGIEASTGAFYWQREFEKLGHKVKVISPQYVKPFVRGQKNDGNDAQAIAVALMQPTMQFVPPKSPEQQDIQALHRARQRIVNHRTATVCQIRGLLLDRGIPIGSAVSRARRAIPLILEDAENGLSSRMRRTIAELYDLFNDLGRRIHFFDKEIETVFRQSEACQRIAKVKGIGPETATAVVAAIGKGTEFKNGRHFAAWLGLVPRQHSSGDRQVLMNMTKKGDKHLRTLFIHGARAVVRVATNNNDGHMNQWVNQLKERRGFNKTTVAVANKNARIIWSMLRNETGYQVV

SEQ ID NO: 448366 - protein, 452 aa, unidentified
MARLELTAFDAIVGFDQGYEAHHLYVINLHGERLFDAKVNSDAKGLQDWLEKLRHTLGHQNLGRVALATESPSAPWLPQMMTLGIAVFTINPAQIAAARKLEAPSAAKDDRRDSRLLAEFLLFKPGCYERLQPPPDVIDELRLLLRRDHQLHKAHHQQAEQLRDQLHNSLPQLLPFSSGADDPWLWQLLAKHAPTLLTVLPPAEACQQVLDAFRVRRLKGEELHQALALGLLPHLTGRRAQTLLDLRVGQVRTLQAVWQEWRAIQTRVAKIMAELLATEPHTAAGPTTTETSSVSMAATGTPSGAGVAVAPEALRPLSVAEVAQLLNSLPGSGPRTLPVLVVEGWLQWSTLDLAHLRSYSGVAPVVEASGKQHRVRMRQACNQRLRDALRFSVDAFRHHDPRAKAIYDGLKEAGRSHWRALRGVGDRYLTLAFSVLRHRTPYDPARRQLAEA

SEQ ID NO: 448367 - protein, 342 aa, unidentified
MEYYVGLDVSLKQTSICMVDQTGLVVREGVVVSDPEAISVFVRSKAPGAVRIGLETGPTSTWLWTELKRLGLPVICIDARHAKAVLKMQINKNDRNDAIGIARIMQTGWFKEVHVKDIDSHSVRALLASRALLVKIKRDLENHVRGLLKNLGLVIGRATFNVFAARAEGLIEDRPDLVAAVRPLLEARNAVEQQVSELDRKVMKLARRDAQVQRFMTVPGVGPITALAFKATIDDPARFARSRSVGAYVGLTSRRHASGEIDWSGRISKCGDGMPRSYLFEAAGVLLTRVPKWSTVKAWGTRLAKRNGLRKAKVAVARKLAVILHRMWIDGTEFNWSKEVAA

SEQ ID NO: 448368 - protein, 319 aa, unidentified
MAQNDRVVVGIDVAKDKVDACIRSRSQRQTFPSSVVGRRKLIAWLRKHKVGKAVMEASGGYERDWAKALREGGIEVRIVDPKRVRNFARSAGRLAKNDTIDADTIAWFAETFDEAPGQIHDPAREELATLVKARKHLIDLKTRLQNQKEHAVPGAVQKAHARVLKSLDTEMTKLEDAIVARVKATPALAVRAEIIESVPGLAETASAILIAGLPELGTVREEIAAALLGAAPYDDDSGKRRGERHIKGGRRWVRNALYMPCLGAATRINPVLKAFYQRLIAKGKEPKVALIACMRKLIVILNVMIARGEKWDPSRYASR

SEQ ID NO: 448369 - protein, 338 aa, unidentified
MGTYAGIDLHSTSSYVVVLDEEDRRLYGKKLENSIDVIEQSLSPYKEDLQGVAVESTYNWYWLVDGLQERGYPVCLANPSAMKQYEGLKHTDDKWDSYWLAHMLRLGILPTGYIYPKEERPTRDLLRRRLFLVRQRTTQVLSIQGMMEQNCGRKLAAHRIKALSGEELEDWFEHSHLRMAAESSVSVIRCLNEEIARIEKEVLSTVRLRDEYKNLLTIPGIGEILGLTIMLETGDIRRFKNVGNYSSYCRCVKAERWSSDKKKGEGNSKNGNKYLSWAYVEAAHFASRYCERAHRFCQRKKSQKNYCVAIKALANKLARASYYMMRDGVPFDESRLFG

SEQ ID NO: 448370 - protein, 414 aa, unidentified
MFAVGVDVSNGRSMVAVLQSKTSVLMKPFEIPHTAEGFASLAGKLAGLDGEVRIVMEHTGRYYESFARAMHSAGFFVSAINPLAIKNYQDGINIRKVKTDKADAMKIARFALDKWEILPQYTPMDTIRYDLKTMHRQFQLSSKTKTELSNNLIALLEQSYPGANQYFDSPVRPDGSQKWVDYVDTFWHVDCVARVSQNAFVERYRKWCKRHGYNFSQQTAIDLHTDARQKFPLVPKSDTCKLLVREAVSQLNAVSRTVETYRTEMDRLASQLPEYETVMAMTGVGKSMGPQLMAEIGDIRRFPHQKSIVGFAGADPIKDDSGDKVSDSKPSSKRGSPYLRKTLFVIMSILLQLHPQDDPVYQFLDKKRSEGKPYYVYMTAGMTKFLRIYYGKVRDCLKEQGLWEQTPDATGKAD

SEQ ID NO: 448371 - protein, 327 aa, unidentified
MKDLLIVGVDVSKSTLDFHCKPNDLFFQTENTIGGFRVWLKKITATSLCKLLVVMEHTGSYSLKFESFLRSKGIDYCKIPALEIKRSLGVIRGKSDKVDAARIAEYAWLRKDLLTADAPLEEGTRKLRNLLSLRAKLVRDRSGYMCRIKEMKHTQAWTKSDVEIIIQESMIKKISSDILRLEKEIRSAIKANHTLQTTFELITTIKGVGLIVAAYMIASTNNFKRFKNARKFNCYAGLAPFSYQSGTSIKGRARVSHLANKEAKTLLNLAASSAIQYDKEMKEYYEKRTTEGMKGMSCLNIIRSKIVARMFAVVKRQSPYVELTTAA

SEQ ID NO: 448372 - protein, 346 aa, unidentified
MSYSTTVGVDLAKNVIQISVISDRGKEVLNRSLTRRKFAEFLGKQKPALVAFEACATSHYWARTAKRHGHIARIIPAKAVAPFRQGHKTDSNDALAVAEAARRPNIKEAPMKTIDQQGLQAIQRSRDLLVQESTALSNHMRGLLMEFGVVIPQGFAALRRMLPEILEDGDNEVPDMYRPTLHRLYGRFLELRDDIQSMNVEVKELVKQHPDCKRLIALEGVGPISAVLLYASLGTGEAFSGSREFAAYLGLTPRQFSSGGKTNIVGLSKKIGNCRLRSVLIQGARAYVHKLKEPKTSKDRWLMELIERAGHGKAAVALANKNVRTAWAMLTQGTEYQRRPQLKVAA

SEQ ID NO: 448373 - protein, 405 aa, unidentified
MPYILALDVSMGHSYSVLYKDDTCLFEDEIEHTQRGFHALLEEIQHLPERPLIVFEATGIYSRPVEKFFQDHHFSYCLLNPLEAKKQMEENTLRSWKTDKSDAHRLAQTHLKNQRQPKEVQSNFYLEMRDLARFYQEIEKKITRLRMDLHNCLQLTFPELEQFFSNRLTPYALTLIRLFPHPDFVLASTRTKIKNKLINETRKKISANRAEQKTDQIIHYAQCAYPAVEKDSIHCQKTIYYAELLQDLLEQKEALATQMIKKAEGSPCFLLYQTFPGIGALTAALLLGELGDITRFKTHKQLNAFVGIDIRRYQSGKYTGQDRINKRGNPKARKIIFFTIRNMIRQQRAAPNHIVDYYYKLKKQPIPKKEKVATVACMNKLLKCMHAMVRAHTEYDYAYAVSVDH

SEQ ID NO: 448374 - protein, 347 aa, unidentified
MSISMIGLDTAKTVFQIHCVDEAGRAEIKRKLRRNDLIAFFEQQAACTVVMEACGAAHHWARMLSGLGHTVKLIAPEAVKPFVKKGKKNDAADAAAICEAASRPDVKFVPAKSVEQQGVLALHAARSLLVKQQTMLANAMRGLATEFGVTVPKGIRKLDELMALVDTDESIPKQAKQAITGLHDYGNNLSEGVETFEAEIVAHARRDETARRLATIPGIGPITASLIAATVGDITLFKTARQFAAWLGLVPRQNSTGGKTRLGRITKTGNREIRKMLVLGATSMVYRADGWNSAAGAWLRSVLERRPVRLVTVALANKMARIAWAVMTRKEVYQAKGRIAAAAEVAA

SEQ ID NO: 448375 - protein, 355 aa, unidentified
MTRLARIGIDTSKSVFQLHGVDEKEQVVLRKQLRRRQFVAFFAELDGTVVGLEACGASHHWGRELGKLGHQVMLIPPQHVKPYVGRNKNDKIDAAAICEAMSRPKVVERLVPIKSAEQSAAQMLLGVRDSLIKRRTQLSNTIRSHAAEFGLVAAKGLDKIEPLLVRIAQDDSLPALAKEMFAALGQEFDAIKRQSAAIDKKMLAFHRANEVTRRLAEVPTIGPVGACLFVTKIVNPHGFRSARRCAGWIGLTPKDQSTGGKQKFGGITRAGDESLRAALVCGATAYLRHVRSGRTTPSPWLAGLLSRKPPKLVAVALANKTARIAWKLMTSGQRYDPRRPGARPNIAADAIGIAA

SEQ ID NO: 448376 - protein, 367 aa, unidentified
MKELTTKAAATMGLDLAKSVFHVHGVDASERRVFSRSLKRGELIAFFAAHPPCLVGMEACSGAHHWARQLIALGHQVKLMPPQYVKPYVKRQKTDANDAAAIAEAVRRPDMRFVAIKTIEQQLVLVQHRVREGLIKERTALSNRIRGLLAEFGVVLARGARALREGLAQAVAPTDTQLPEGIRPLLVQLQEQMREVDKDIAQTERAIQQWHRLDPASQRLADTPGIGYLTASATVATFNDARQYRSARQFGAALGITPRQYSSGGHTVLGGISRQGDSYLRRLYVHGARAVINAHERRAQLQPTAARGWLHEILKRRPKNVAIVAQAHRNMRIAWALLTHPERRFDAQFKPAARNAKPTDVLATQAA

SEQ ID NO: 448377 - protein, 337 aa, unidentified
MKITTIGIDLAKTTLSVHGVDDNGKVVLRKSMSRSKLLEFMANREPCLVGMEACGGAHDLARRLIAMGHRARLMAARFVQPYRKSQKNDGNDAEAICEAVARPNMRFVPVKSAEQQALLSVHRVRLQLIETRTALINQLRGLLAEFGILMPKGRYQLRTHATPALEHPDLPELARTVLKELNTRIQALDIEILSQDRRIEAYARDNVLAQRLIAICGIGPISASAIVASVGDAKLFKNGRQFCAWLGLVPRQYSTGGKARLGRITKRGDVYLRTLLVHGARSALNVLAKRTDRLSTWIQSLSARRGYKKAIVALAAKNARMIWALLAKGEPHQPRIS

SEQ ID NO: 448378 - protein, 434 aa, unidentified
MSALSTIKLSGDVFMLRIVYPICCGIDVHKKFVVATVGTTNQSGVTEYQTKQFSTFTEDLIHLRDWLKSQSCVHVCMESTGKYWHPVFNVLENDCNVVVANPKYVKGIRGKKTDIKDSVWLCDLHKHGLVPGSFIPPLEIRQIRDLMRYRFKLINFKTSEKNRVQNSLTVSNIMISSVVSDTFGVSSMKIIQHILDNPDDTNFNFSSMLHGSMKHKAEAIGKSIQGNLTKPQADKMRVCLDHMDSIEKHIADIESVVLKLIQPYLPQVELILSLPGIKDIFTAIAILGEIGVDMSVFLSQKHICSWAGLTPQNNESAGKKKSVRVSRAGVYIKPLLVQCANATIRSKDCLYFKNRYNQIKKRRGHKKAIIAIAHKLLICIYHMLDKNEPFNDELYKIDVNPKSKLTYAPQITEDMAIRYLETLGYQIPDKCVKA

SEQ ID NO: 448379 - protein, 339 aa, unidentified
MNKLYGGIDLHANNSVLVLVDDEEQVVYEKRTPNDLSNILAQLCPFQPRLHGLVVESTYNWYWLVDGLMEAGYSVHLANTAAIKQYDGLKHTNDHSDARWLAQLLRLGILPTGYIYPKEERAVRDLLRKRSQLVRQKTSNLLSIQNLITRNTGASITGNRIKTLTAEQVHDVLPTAELALAVTSTLTVMRCVADQIVELERAIKAHVSLRPSFRPLLTVAGIGQTLALTIMLEAGEMQRFPTVGQWASYCRCVNSTKLSNGKRKGQGNTKNGNKYLAWAFIEAANFAVRYYPAIQRFYQRKKAKTHGVVAIKAVAHKLARACYYVLRDQVPFDLDKAFA

SEQ ID NO: 448380 - protein, 423 aa, unidentified
MMRSVALDVHLDFCEVAIVEDGELRSAGRIETEPCQIELFASSLAPDDRVALEVTGNAWEIARLIEPHVAQVLVVSPSDTGIRQARAKTDRLDARTLARLLAAGSLDGVWMPDRWTWVMRRRLSRRSQLVWARSRSKNQIHAVLMRQLVGRPPVSDLFGVKGQQWLKGLKLAEEERETVDAHIRQIEFLEKELSEVERLIAQAAMESADIKRLMGVPGVNVIVAASFLAAIGDISRFESPRKLVGYLGLDPLVRQSGVGPATHGHISKQGSHRARHALVEACWTTVRQPGPLHAFYERIRARRGHSVAIVAAARKLASLFWCLLTRGEDYAFQQPSLTKKKLRRLEITAGAKRYTPEAAGIWSANDAVRKAERELARQAEVAYARTVRDWHATQAEKVGASVTPGRASKKPLKGETARQTTSP

SEQ ID NO: 448381 - protein, 315 aa, unidentified
MRDRQPQTALYVGIDVSKDTLTLATDPTTQVWDIPNQPDAWHALATQLRALSVQRVLLESSGGYEQGVVQTLQQAGLPVVVPAQRARYFARSLRGNLKTDRVDAQLLAYFACCYPAPEATEVPEGQAQLRALGARREQLVEALEAEKKRLSLATVPVVRATLEQSMAHLEALLAQIEAAVAALVAADEALSQKAALLQTAVGVGAVVAYGLLAELPELGQVSREAIAALAGLAPVCRESGSWRGYARIGGGHWRVRRLLYVAAVVAVSHDARWRAVYEGLLAKGKPKKVALCAVARRLLVVLNAMVRDGRCYERA

SEQ ID NO: 448382 - protein, 355 aa, unidentified
MDNRKYIGMDVHKEAIAIAVLNAAGKLVMESIIETKANTILEFLKGLRGELHLTFEEGTWASWLYELLQPHVKRVVVCNPRRNALLKEGSKSDRIDARKLAELLYTKMLRPVYHRENGMRAVKELARSYVTISKDQVRVMTRVKALYRSWGITCSGKQIYTVRHRASWLGKIKEPGVRRRAEFYYQQLDGLRSVRRQVRRELLLESGKHKASKLLRQIPSIGPIRAALLLALVQTPHRFRTKRQLWTYSGFGIETHDSAEYHYVAGQLQRCKKPQQVRGLNRNHNHDLKNLFKSAATNAVAKSGPLQEFYLALVKRGIRPEMARLTLARKIAAITLAIWKKGVSFDAKHLKQQTA

SEQ ID NO: 448383 - protein, 342 aa, unidentified
MLYVGIDIAKNKHDVTALNVPGKTVLKPLTFSNNKAGFELLDLSIRQINQDCLIALEDTGHYAFNLLNFLHEQGYKVYTCNPLLIKEFAKSLSLRKTKTDKKDAHGIALKLLSDPNREQFQHDNRQVDLKILARHIHRLKKNSLIGKYNTLVVLISSFLSWIKSLESIQNIPTNLLTRYPNPQKRLEARFDKLIEIKRLTASKIQDILSIAPRSIGTTSPAREFEIIEIIKHYKRLIDKAETCVNDLMAEFNSVITTVTGIGGRLGAVILAEIRNIHAFDNPAQLQAFAGLDSSIYQSGQIDLAGRMIKRGSPHLRWALIQAAKACARFSPAFKAYLKTKLE

SEQ ID NO: 448384 - protein, 345 aa, unidentified
MTVYIGVDFHARAQTISYLTTEDGEIRRAQLDHGQPPEVRKFYEQFGGQQVIVGFESSGYAAWFEELLEELGYEIWIGHATAIRLYARRRQKNDRRDADLILDLLWRGDFPRIHRHSPESRAVLQQLRYRQRLVKMRTMIVNSLVFMASSRGVSLRTQLKSRRGIERLQQIALPQPLIEQRAEMCQLLQELKTRIARVEQWLEAKANSDIRVQRLRTHYGIGPLTGLCLVHTLECVERFANPRKVTAYVGFDPVEDSSGERRRIGSISKQGSRLLRFFLVEAGQIAIRKDQDLARIYQRVLVRRGHAKAKVAVGRRLLVRAFIMLRDEIDYAEFQRRGVAARSSR

SEQ ID NO: 448385 - protein, 333 aa, unidentified
MTMHPQGGVVNREQKPNVGIDVSKQHLDVCLGSEHQRVANDAGGWEVLTRQFKEAGVDLIVIEATAGYERDLVWALQNAGLSVARVNPRQSHDFAKSMGELSKTDKVDARMLRDFADVLARHKDRAKYITPLMDAQRLELAQLMTRRRQLMDMSVAEGHRLEHAKGRAVRSIKTVLKTLDKQLEVIDADIDSHLDQHFKSQRSLLDSVKGVGPVTILTLTAALPELGQLGRRQIAKLVGVAPLANDSGQRAGKRRIWGGRSEVRAVVYMATMSAVRFNQPIKAFYDRLLEAGKPKKVAIVACMRKLLTILNAMLRDQSSWSSLKHELSLQQST

SEQ ID NO: 448386 - protein, 398 aa, unidentified
MTESSDYESVQVFIGVDVGKDTHHAVAINRSGKRLFDKALPNDENKLRSLISDLKQHGQILLVVDQPATIGALPVAVARSEGVLVGYLPGLAMRRIADLHAGEAKTDARDAAIIAEAARTLPHALRTLKLADEQIAELSMLCGFDDDLAAQTTQASNRIRGLLTQIHPALERVLGPRLDHPAVLDLLQRYPSPEKLASLGEKKLAAQLCKLAPRLGKRLAADIAQALAEQTVVVPGTNAATVVLPRLALQLITLRKQRDEVALAVEQRVLAHPLYPVLTSMPEVGVRTAARLLTEVACRAFASAAHLAAYAGLAPVTRRSGSSIRGEHPSRRGNKALKRALFLSAFAALKDPLSRAYYTRKMSQGKRHNQALIALARRRCDVLFAMMRDGTFYTPQAS

SEQ ID NO: 448387 - protein, 347 aa, unidentified
MIIIGCDFHSRFQQIALLDTETGKVEERRLAHENGAARDFYAGLREPALVGIESMGYTQWFEELLAEFGHELVVGDAAKIRKMEVRKQKHDRRDAEHLLNLLLRGDFPKIWLPSAAERDARVWLEHRHQLVQMRTRTLNGLQAVALNHGLCLRQKLWTKHGQEELKKLPLREGRARRRADLLALRAQLDRWIAELDERLEQEVAQRPDAQRLLTHPGVGPLTALGTVLILGPVERFPDAKHVTSYVGLIPQEESSGGRQHFGRLTKQGNHLLRFLLVEAAQTASRLDPGLRRAYRRLTFRRGRASAKVAVARKLAIRLYIMLRDKIDYEEFCRRGSHAGMLGEVALA

SEQ ID NO: 448388 - protein, 342 aa, unidentified
MEKITIIGLDLAKSVFQIHAITEDGHIAVRRALRRSQVLEFFRHIEPCLVGMEACGSAHYWANAIGKFGHTVRLMPPAYVKPYVKRNKTDAADAEAICEAVTRPTMRFVPVKSPEEQAAGMVLKTRELLVRQRSQTANAMRGHMAELGIIAAAGMTSIAKLIAILRDDQDGRLPHSAKAALLEMADQIERLTERVEVLDSKIIAAVKADDAARRLTTIPGVGPIIAATVRAAVQDPAAFRTGRDLAAWIGITPTANSSGGKERLGKISKRGNKQLRTLLIVGATSILKQARRGSKLPGWVVSLMARRPYKVAAVALANKMARTIWALLVKGGTYQAPSMAKA

SEQ ID NO: 448389 - protein, 450 aa, unidentified
MSKGSGVSRGDKRRNARLAELRRLVPRENAIAGIDLAEDNQAVVVTDHDSKVLARRSPRCKAWQLGEVLDWAVAKAQARGFASVTVACEPTGSRWMHVQQACAERGLNFVCVQTLVTHNAREAEDCTRDKSGQKDAVLIARLTAELRCYRPEVIEEDWAVLRYLGQRRDALVTEAIRCRQQITDRLALAWPAALGTAAAPLDSVTFLACLQVVADRCDGDPGKLRGYGLAEFTQLVRGVLPRWGGQRACHRIVAAFHAALGDSHGAVPARRRGALKLAGHALADLRRARELQARVGAEMIAQLHVLGIADVLATIDGLSLEVAACILAETGDPARSGSSRALVKHAGVAPCDNSPGNSAGQARISRRGRPVLRKAAWRATWAMIHGANPVLAAKYAHLTSRPAGQLAKGQAHIACMATLLRWIYSVVTSRASWDQRVAAGTISHTAAMAA

SEQ ID NO: 448390 - protein, 397 aa, unidentified
MVNVGIDLHKTQFTVCVRTKDGDRFGWYPTTEEGYAAFLKQAAVWQKAGEVVRVGVESTGNTRYFKQRMEAAGIEVTTINTSKLKVLNESVKKTDKHDASTIAEFLEANMLPQSQLCSQASEQLRRLLKARTTLVQAEVVMKNQIHALLTAEGMEDTKASLQSKKGRKRVLDALNQCKNGLVAQPLFETIDQLEENVKLLEQQLRTLTAGDRMVELLMTIPGCGEIGAWTIRAYIDDINRFSSSKKLVSFAGLAPWVQNSNETIRHGRITKRGPKELRTAIVQVVMGIRRMKNKTSSWRIMEQHEVLKKHKIPGVAIIATARKIATIIWHMLSEDVAFDIEKMFSKKDKKKTGTESESTRLAKIALANRQKKPKASKTGTKKDRKPGVASEKRKKAG

SEQ ID NO: 448391 - protein, 421 aa, unidentified
MAYKVAAIDVHKMVLIVTVAKAADEVKDPVGEALEFECRRFGATAQERAHLIAWLEQRGVTEVVMESTAQYWKPVWLDLEPHFPKLHLAQAHSNKAPKGRKNDYRDAKRLARRLLAGELMLSFVPGAEQRVWRELSRAKEQYVRERVRVQNRIEGHLEEMRVKLSGVVSDLLGVSGRRILTALADGETDPVKLAELGDERLKCGRELLIDALRGSPTPVQLQILKLHLEMLGKIDSAIGSLDKLLAEELKKHEEAVIRLAEVPGLGVDSAQRLIAEIGVDAEAFPSADEFASWFGGCPGSNVSAEENQSSRSPKGNKYVRKLLTQAAQAAVKKKGSIFQSLFRRFLPRLTYNGAIWAVAHRIGRLAWIILHQGVRYIEKGEEPTPQARKRRTQKLTQALRKLGYAVTLTPLNPGPQPVPGR

SEQ ID NO: 448392 - protein, 343 aa, unidentified
MEYYIGLDVSLKQTSICVVNQTGSVVREGVVDSTPEAIAGFVRSKAPGAVRISLKTGPTATWLWTELERLGLPVICIDARHAKAVLKMQINKSDRNDAAGIARIMQTGWFKEVRVKDLDSHAVKALLASRALLVKIKRDLENQVRGLLKNLGLVIGRGTFNVFTARAKELIADRPELTAAASPLLTARTAIGQQIEELDRKFLKLSRQDAQVRRFMTIPGVGPITALCFKATIDDPTRFKRSRSVGAYIGLTTRRHASGELDWSGRISKCGDAMLRMYLFEAAGVLLTRVPKWSALKAWGTRLIKRNGLRKAKVAVARKLAVILHRMWIDGTEFNWSSKELTA

SEQ ID NO: 448393 - protein, 422 aa, unidentified
MKNVTDSGQKVKGQKRLMALERASWILGIDVGKEKLSCALLLKDETFRCRFDVEASLHGFQMMLERVKTETKGEGAVMFALEPTGHYWMVLGQFFEDHNQSYVLVHPLVVARSREVKQLNRGKTDAFDACLIAELACRGSVTRTQIPEDDWATIRFYAREYMDREKEIAREKNRMMSYLETTLPGFLEIFPKPLGMNSRACLRVLANFREVLQGDIVQFESQARKHITGKRLMTSRVRRLFEMLQRGDALGLRAGRKTLFWRIINSLDRLELYEKQQDMASKALISLYEQCEFKPYMDSVWGTSPLTNSLVLGFMGDPTSYDTPASLIKMAGCDPVPNESGKFKGKASISHRGRNLLRKAGDRISFLLEKRNTVFRNFMHHLTARPKNKLTKRQARIACINKYFRIIWVLCNHRVLFNPALA

SEQ ID NO: 448394 - protein, 368 aa, unidentified
MNTVKFIGLDVHKKTITIAIADQGRENQPRSYGAIANDLGALDKFCRKMVSTASRLYFVYEAGPCGYGIYRHLTDKGFDCMVAAPSLIPKKSGERVKTDRRDAVKLASLHRAGELSAVYVPDPADEAMRDLSRARQDAVNATKKAKQRLKAFLLRNRIVYSGRSAWSKAYFRWLADITMAYPAQQVALQEYIDAVHEGIQRVERLTDQIRQLVPGWRLAPVVSALQAARGVSLVVAVTLIAEIGDLSRFQKPSQLMAHLGLVPSEHSSGESTKRGAITKTGNRHARRALVEAAWAYRMPARVSRALIKRQQDVPEQVCRIAWKAQLRLCTRFRRLAARGKVKQKVVTAIARELSAFLWAMAKQVQPAA

SEQ ID NO: 448395 - protein, 343 aa, unidentified
MDHFAGLDVSVKETSICIVDDTGRIVREVKVASEREALLAVLANPDYHFKRIGLEAGPLSQWLYSALAEAGLPVICVETRHMRAVLQAQINKTDRNDARGIAQMMRAGLYRPVHVKTLRSQKLRMLLTHRKLLQSKAIAIDNDLRGTLRNFGLKVGVVGTVKFETRIKELVEDLPDLALLVEPLLIVRRVLREQIGILHRHLLAIVRDDDVCRRLMTVPGVGPVVALTYRATVDVPARFQNSKAVGAVFGLTPSKYQSGEINRTGGISRCGDEMMRAMLYEAAHIMLTRTNKWSWLKAWAMKIARHRGMKKAIVALARRLAVIMHRIWVDGTEFQWTREVVAT

SEQ ID NO: 448396 - protein, 340 aa, unidentified
MNEITTVGLDLAKHVFQVHGVGASGAPVLRKRLRRSEVLGFFARLPSCLIGLEACATAHYWARELRSVGHEVRLMPAQYVKAYVKRNKNDAADAEAICEAVRRPTMRFVPIKTAEQQAALLVHRGRERLVRQRTALVNALRAHLAEFGVIAPLGLRNVARLIAVIRDESDARLPDLARQVLRVLATQVEQLEAAVAALEKQLMAWHKSNPVSQRLATIPGIGPIIATAIAATVVEASGFRSGREFAAWLGLVPRQHSTGGKARLGGISKRGNRYLRRLLINGASANLLRSKATNADPWVIGLRRRRPSLVVAVALANKTARIAWAVMHRQENYERMAAVA

SEQ ID NO: 448397 - protein, 341 aa, unidentified
MSIMTVGIDLAKNVFAVHGIDEFGRAALVKPKVARAKLLELIAQLPPCVIGMEACSGAHHWARQFRQYGHTVRLMAPKFVSPYRMGGKRGKNDAADAAAICEAVTRAHMRFVPVKEEHQQIILTLHRTRQGFVEERTALYNRLRGLISEFGIVLPQKVSCLRREIGAHLEDLPGYANQCIGDLLAHADRLDERIADYDRIIAKAAREDARSRRLMERPGIGPIGASALLASIGGGHDFKNGRQVAAWIGLTPGQYSSGGTARLGRITKAGDPYLRSLLVMGARAILSGLGDKQDGFSRWARNLQERRGYWRAVVAIAAKNARLAWAVLKYGEDFRLTAGTV

SEQ ID NO: 448398 - protein, 373 aa, unidentified
MTKIIRIGVDTSKTIFVLHGVDAAEQPVLRKKLRRKQFLEFFAKLEPTKIGLEACGAAHYWARELRALGHQVVLLPPQYVKAYLKRGKNDAADAEAICEAMSRPTMRFVPVKSAEQQAALMLEGTRAGLIARRTQLTNTIRGYAAEFGLTAAKGLDKIEPLLARIAKEAQLPRLAKQLFAVYAKEYAQLKGQIAKIEAKLMAWHKDNEQSRRLAEVPSIGPIGGVLLTMKVVDPHAYRSGRDLSAWIGLTPKDHSTAGKTRLGVITRAGDERLRSVLVAGATAVVKQVRLGKGKHPRWLVELVNRKPPKLAAVALANKTARIAWKLMVSGERYDHARARRREERSATLLGGSALRPSLPPCPTTRELPAPTNA

SEQ ID NO: 448399 - protein, 412 aa, unidentified
MDVLFERCCGLDVHKRNVLACLITPDQNGQAVHQIRNFGTMTCDLIELCDWLTEAGCTHVAMESTGVFWKPIYNLLEGNFKLLVVNAQHIKAVPGRKTDVRDCQWIAELLRYGLLRASFVPDQAQRELRELTRYRTSLVRERGAAVNRLQKTLESANIKLACVASDVTGKSSREMLQGLIEGVTDARQLADHAKMQMRRKLPELEKALTGRVTPHHRFLLSQQLSHIDSLEALIDQASQEVAKRLRPFEPVLEQLITVTGVARRTAEILMAEIGWDVSRFPTSKHLASWAGMCPGNNESAGKRKSGKTRKGSPWLRSALVEAGRAASRTKNTYSNSQYHRLVARRGTKKAAMAVGHSLLVAIYHMLKDGTEYQDLGHQYFEERDRQAIVKRSIKRLTSLGYKVDLTPGLQTG

SEQ ID NO: 448400 - protein, 347 aa, unidentified
MNEVTTIGLDLAKSVFQVHGVDASGKPVIRRQLRRRQVLAFFKKLPPCLVGMEACATSHYWAREIAALGHEVRVMPARYVKPYVKRNKSDAADAEAICEAVTRPTMRFVPIKTPEQQAVLMLHRTRALFVRQRTALINALRAHLAEFGIVAGVGRNGLEKLLGVIADDEDERVPPAARDSLLALRDQLVMVRQQILEADRRILAWHRASEVSRRLAEIPGVGPLIATALVAAVPDPYAFRSGRDLSAWIGLVPREDSTGGKHRPGHISKAGDRYLRRLLVIGALSVIKRAKQTGSTRRAWLVALMGRRPTKVAAIALANKIARIAWAIMVRGTHYKEPQAEPTAQAA

SEQ ID NO: 448401 - protein, 342 aa, unidentified
MEKVATIGLDIAKSVFQVHGVAADGEVLIRRRLTRARMLPFFAKLPPCLVGIEACNNSHYWARELTALGHDVRLMPAQYVKPYVKRGKNDAADAEAICEAVTRPTMRFVAVKSPEQQSLMMLHRVRLMLNRQRTQISNAIRAHISEFGVVAPVGRLGVDRLLEVVADASDDRVPEDARLCLQMLAAQLEVVKRQILENDRRVLASARRTELGRRLMDIPGVGPLLASAFVASVADPTVFKTGRDLAAWIGLVPKQNSSGGKDRLGSITRAGNRYLRQMLVVGAMAVIRYAQRHGTKRPWLVQLLARRPAKVAAVALANKNARMVWALMTSGKRYREPLAAGA

SEQ ID NO: 448402 - protein, 367 aa, unidentified
MKKISTAAAKQSKNFLEQKLTIGFDLGDRSSWYCLLDEVGEVLREQKLSTTPKAMREVFGARPRCRIALETGTHSPWVSRLLSELGHEVIVAHARSVRLIGESRKKDDRLDARTLARLARIDPQLLCPVKHRSAKAQADLTVIRARAGLVRARTALVNTARGLAKSSGERLRGCNVRNLNPEKAEGLSPELQTALQPLLAAIESLSERIRECNEGIEKLAQESYPQVALLKQIKGVGTLIALTFLLTLEDAHRFRKSRDVGCYLGLQPGRRNSGQSEPQMHLSKEGDPYLRTLLVQGAHHILGPFGADSDLRRWGLKLAERGGKNGKKRAVIATARKLAVLLHRLWVSGEVYEPLRNSHQTAMPAAA

SEQ ID NO: 448403 - protein, 367 aa, unidentified
MKKVSTVAAKQSKKISQQKLTIGLDLGDRNSWYCVVDEAGQIQLEQRVRTHAKALQEVFGAMPRSRIALEIGTHSPWISRLLSELGYEVIVANARKVRLIGESRKKDDRLDAQTLARLARIDPELLSPVRHRSAKAQADLTVIRARAGLVRARTGLVNTARGLAKSYGERLRSCNVRNLNPEKAESLSPELQRALGPLLACIESLSEQICEYNERIEALAQESYPQVALLKQIKGVGTLIALTFLLTLEDPHRFRKSRDVGSYLGLQPGRRNSGQSEPQLHISKEGDPYLRTLLVQGAQHILGPFGIDCDLRRWGLKLAERGGRNGKKRAIVATARKLAVLLHHLWVSGEAYEPLHNSTQRAMPAAA

SEQ ID NO: 448404 - protein, 355 aa, unidentified
MNVSVNHYIGFDVHKKSISYCVKLADGRIVEEGKLAARRATLCQWASKRAEPWHGAMEATLFSGWIYDTLKPFAAKLEMGHPGRMKAIGASKKKNDKLDARTICDLIRANLLPACWVAPSEMRELRRILRYRNLVLEQAVRMKNKISGLLMESGVEYNKKRLHGEKYFHELLENLAAEVPESVKDLLKLSRGWLESFQATQQQLLVKLQKHPILMERLKRLKSIRGVGEVTALTWALEIGDPHRFSSIGDAVSYCGLTSALVESADKQKRGPISKQRNAHLQTVLIEAAKLAPRWNPRLAELHQAEIDNGRHRNRATLEVARKLVAYLLAVDKSGKDFAVRTPSGKSEGEVKPAA

SEQ ID NO: 448405 - protein, 340 aa, unidentified
MALYAGMDLHSRNTLVGVINGSFQRVFEKRVPNDLSLIVDTLEPFASRLKGIVIESTYNWYWLVDGLMDAGYSNVRLANPSAVKQYEGLKHTDDRHDAFWLAHLFALGILPEGYIYPKEDRPVRDLLRKRSFLVKHRTAHILSLQSMLEREKGYKLRGNEIKRLKTEDIARIFSQEHLVMSAQANRASIEFLRHHIKRIEKAVRNRVKLHRSFEYLMTVPGIGDILALTIMLEVGDIARFARVGNFASYARCVSSQKLSDGKKKGQGNRKNGNRYLAWAFVEASHHARRYNERLRSYYQRKCAKRNKAVATKAVCNKLARACYYIIRDQVPFREEALFCS

SEQ ID NO: 448406 - protein, 321 aa, unidentified
MPTAPVTVYAGVDVAKASLQLHLQGRQAEFPNQPAGLVQLCRQLQAIPHVHVVCEATGGYERSLVQAMHQAQIPVSVTNPAQVRAAAQAQGQRAKTDRIDAALLTDYGQRYQPKPTPPTTPCQDQLVALTQWLTQLVQALALAKTQAEHHEAAFVCKQHAKLMAHYQSQIVAVEEQIRALLAQDAVLQQRVECLDQIKGVGPRTAWLVLAHLPELGQVNRQEVAALAGLAPWTRESGTMKGMRCIGGGRPEVRLALYMAALSAARCNPVLQPFYQRLRAKEKPAKVALTAVMRRLLVYMNHRTKELAAKAATAKTQKGEKT

SEQ ID NO: 448407 - protein, 402 aa, unidentified
MKNQPPQSSKKGSRQSTSQKPWSQMNRKQRREMQRKIRSQDLNLEVLHPDAAGIDIGNEVHYVAVPPNRSSEAVRRFGCTTAELRAMADWLKQCGIQTVAMQSTGVYWIAVFDILEEAGLEVYLVNARETKNLPGRKSDVQESQWLMKLHTYGLLRNSFRPPQEIRTLRTYWRQRGDLVRAAGRHIQRMQKALTQMNIQLANVLSDISGKSGQASIKAILQGERDTGELAALCNCRVQASQEEVAGSLEGNWQDDLLFVLQQEQDGYEFCQTQMAECDRHLEQCLQQRADRSQGASLPADKRKERRKKKKGNKPQFDLRTALFRMAGTDLTLMDSIDVMTAMTILSEVGWDMSKWKTEDHFVSWLRLCPDNRISGDKIIGKGRLPSNYQGAPLKMRFRRSMS

SEQ ID NO: 448408 - protein, 400 aa, unidentified
MACVRHMVDGAVKREVRTFKTTTKDLMALSEWLSAEGCTDVAMEATGIYWKPVWHILADGDFKPMLANAAHVKNVPGRKTDVNDATWLADLMAHGLIRGSFVPDEPTQEMRNFLRTRKQFVRERTSHVQRIQKTLEDANIKLDSVITDIMGLSGRRMIEALIAGETDPFALAALAHRRIKASQAELEAALRGRVSDHHRFMLRLLLQHIDAIDAAIGQIDQEVDAHVEPFRTAIQILSSIPGISDLSAEVIVSEIGIDMNRFPTEGHLISWTGLCPRNDESAGKRRSTRQEPAPAKAGGAPWLKTTLIQCAWAAARTKGSYLQAQFQRVRSRRGAKKAIGAVAASVLTAAYHMLKNGTLYEDLGSDHFDRRAKGKQILRLVSRIQNLGFAVQITPIGAAT

SEQ ID NO: 448409 - protein, 474 aa, unidentified
MSYRIAGIDVHKKMLAVVVADVEIEGEYQFERLQFGSNPENLRLLVEWLIEQEVVEVVMESTAQYWQPVWGALERYWRPICQKREGAGPKSGTLHLAQAQSNRGPRGRKKDFPDAERLVKRLVANELTLSFVPDAEQRLWRTVMRRKYQLTRNRVQLQNRLEALLEEAHIKLSSLVSDLVGVSARRMVKALGDGETNPAVLAAMADKKLRATQTQLRDALGACTELNAVYRRLLKMTLEELQLLEQQVGQLDQEMARLVSQHQDSVKRLAEMPGLGVDSAQQIIAEVGATAGTFPSAKQLSSWVGACPGDEESGGVSKSHRSPKGNRHMRRILNQSANAAIKVKGSIFEIVYRRLVPRLGHKQTIGAIAHRLCRLIWIILHRRVRYEERGPAVSQRSRKHRTNRMIRELRCLGYRVESMNLLPTCLEGFSTLDVAQRVELRAVEQVRFARGRARISPWCGVEHREIDWASRSFS

SEQ ID NO: 448410 - protein, 425 aa, unidentified
MSSSDVLSSPLDASGFASVVGIDVGSQACVYTVLQPDKRIIVKPTEVANRDTGFVQVHASLSHLGVPPQRILIGLEATSRSSENWCQFLAAQGYVLCLLHPRQTHQFAQQRGLRAKTDRLDAATIARVLLSGEARPGSVPDELIATYRELERLHSQLTDDGARYQNQIQALLVVLFPEFVQVFADPCRPTALALLKGYPSARALVEAGVEAVAATLREVAPRRYGRKTAQQLVALATQSSASGLATDARALSLKILCDQLQHTLANLAQVEHELDQVLDRDTGATGLKSTPEFGRNTVAVLRAELGDVTRFQRVDQVVAYAGLDLEVKQSGKWKGEVKLSKRGSGRLRRVLYLAALRSICLPASAFGAYYQRLVARGLKARDALTAVMRKMLIVAYHLLRSNETYDPTKVCAVAGPPPHTPSSGS

SEQ ID NO: 448411 - protein, 347 aa, unidentified
MLIIGCDFHPGFQQVAIFDNRTGEIEEKRLQHPVEAERFYRTLAGQPVRVGMEACGHYPWFERLLEELGIELWMGDAAKVRASVVRRQKTDRRDAEHLLRLLMENRFPRIWVPSLEVRDVRQLLVHRHKQVQARTRTKNQLQAMALSCGMQKKRKLWTKAGRTELEQLPLLPYAAERRKRLLEALDGLEVEISELDRRVAEEARERPEAVRLMTHPGVGSVTALAMVLTLGPAERFESAKKVGSYFGLIPSEESSGGKQRLGKISKQGSSFLRFLLVEAGQTAARLDPQLKRFYRRLAARKNRGVAKVAVARKLATRLYLMLREDWTYAQLCQAVMQVSPSHSVAGE

SEQ ID NO: 448412 - protein, 424 aa, unidentified
MSKRKYHAESLDQVEIGGIFKKINSDKVIVAVDVAKEDFFASVAGEDGVVVKTIKWQHPTQTLLFLEFLQALGDPSRVEIALEPSGGYGDSLRWQLYTRKYEVYRVSGKAVHDYREVFDGVPSSHDAKACALISELHARGRSKKWTFATDSQREFKARTTQLNAYDKAYKQNVNRLHAVVCKHWPELAQIIDLRCSTAQTLVHHYGGPQAVLQNSHKARDLMQRVGGHLLQKEKIDAVINSATSTLGVPQLEAEREVVQNLAGQVLHYRQLKAKEEVKIRKLIKKTPPAKEMADAIGKTTAAIIIGATGNPASYKSSAAFVKALGLNLRESSSGKHHGAHHITKRGSPLARKYIYLAVLRLIHRNPIVRAYYEKAVATRGGKQTMKVLIGIMRKLAASLYHVAQGHAFDASKLFDVRRLELKAS

SEQ ID NO: 448413 - protein, 339 aa, unidentified
MARYVGVDLHRNQFTVCVIAENGREYRSAYRLEQLPRFVGKLRPTDEVAVEVTGNTRLFYDAVAPHVAKVVVVNPTQFRVIRDSVKKTDPHDARTLAFYLSKDMLPEVRMKDKLHAQLASLTQTRDTLVKQRTALKNKVNNILSAHGINLRKAALSGDSGLEEVLGMKFDAIVMTELRVIVGQIRALNQSIAELEKTIKTEGPKLPGHENLRSIKGIGDLGATILLSVIGDIQDFAHPGKLAAYFGIVPRVRNSNDTERSGRITKRGTKLGRTTLVQCALIAMRYSPYLAKFYRKIQARRGTGKAIIALAKKFLGVIYNTLKNNWIFEDFPNFVLAEAS

SEQ ID NO: 448414 - protein, 408 aa, unidentified
MEVLYPRCAGVDVHKKTVVACARIARGGEVDQYVRTFATTTGGLFELLDFLQEHGCTHVAMEASGVYWKPIWHMLEESFELVLGNASHIRNVPGRKTDVNDAMWLADLLAHGLIRASFVPPSPIQELRALTRTRKQLVREQVSHVQRIEKILEDANIKISSVMTDILGKSGRAMLHALIAGETDPTKLADLAFGKLKRKREELVKALHGRVTAHHRFMLRLHLDQIAALDSGITAIEREVSAQLEPFLAAVELIKTMPGVADTVAHVVIAEIGIDMSRFPDAAHLRSWAGMCSRNDESAGKRRSTRLRKGAPWLKTNLVQAAWAAVKVKGSYLRALFLRVKARRGAKKAIIAVAASMLTAIYHMLRDGVIYQDLGDAHFATIDKERTTKRLVTRLESLGYSVDLKATA

SEQ ID NO: 448415 - protein, 412 aa, unidentified
MDTMDIIVMKGCGLDVHQATVVACIQRQGFDKIIRTFGTTTEELLDLKQLLKEQQITHVAMESTGVYWKPVYNILEDGAWEIVLANARHMKNVPGRKTDVQDCEWICKLLRTGFLKASFIPQEDIRLMRSYTRCQKNFQYNIQNEKNRVHKLLQECNIKLTQVLSDIFGLAGTRILNDLAAGITEPVELAKHMEADKRLLPKKQQAISCLNGRTTPHHQMMLRSMLGTICYYQKQIDTMNAEVSKLLGPYKQEYELLQSIPGVKEKAAGHIIAELSANMYVFPDEQHLSSWAGLSPGSNESAGKKRSSRMRNGNTHLRAILTECAWAATKTKDTYLRAKFYKLASRMGKKKALAAIAHKILISCYHILKYKIPFKELGGDYFTKGKEDTLLLHYQKKLQKLGYRVVLQPIEA

SEQ ID NO: 448416 - protein, 458 aa, unidentified
MGRNRSTDKSRRAMPTVHPNAAAIDIGATMHMAAVSADRTPEPVRSFGTFTTDLHRLVDWFVECGVDTVVMESTSVYWIPIFELLDARGFAVFLVNARDAKHVPGRKTDVSDAQWLQRLHSFGLLRASFRPKGQIAELRAYLRQRERLLEYGASHIQHMQKALTEMNVQLHHVVTDITGATGLRIIRAILGGERNPAVLARMRDRRCHATVETIEKALAGNYRAEHLFALEQALALYDTYQQKASACDARIEAVLKELSARRGREAGPLPSPRQNRSRQQNSLLFDVRTALFALLGKDLTQINGLGPYLALKLIAECGDDLSAWPSAKHFTSWLCLAPSNKISGGKVLSSRTRRSGSRAASLLRLAAVTVGRTDTALGAFYRRLSARIGKAKAVTATARKIAVLFYNAVRHGMDYVDPGASSYEIRYRARVIDNLHRRAKAFGFMLQPMAPTPGMTVS

SEQ ID NO: 448417 - protein, 309 aa, unidentified
MDIIVGIDVSKDRLDVHVAPAGQSFFVSNDHAGIDVLVEQIVGVGVDVVALEATGGFESLAVAALTAAGLAVIVVNPAQVRAYAHALGRRAKTDPIDAALIAAFVAATKPELRPLRDGDNQVLSQLVTRRRQIVQMIVAEENRASMALAKAAQKSIKRLLSALRRELASLDEELDNHIRKSPIWKVRETLLTSVPGVGSTTARTLLAEMPELGRLDRRQIASLAGLAPWTRQSGTWKGRSFTSGGRGKVRTALFMAALVASRHNPVLKAFRDRLVASGKPKIVAVVATMRKLLTILNAIIRDEKPWQNA

SEQ ID NO: 448418 - protein, 407 aa, unidentified
MNAVGIDVSKGKSMMAALRPMGEIALRPKEYPHTEVGLEQMALAILALGEDSRVLMEATGRYHEPVAAVLHEYGIRVTVINPLFIKQSGGGSIRKVKTDKADAMKIAKYALDNWADLREYTPMDAIREQLKLCSRQYNLYMKNVVALQNNLTSLTDKTFPGVNELFSSPDRADGSQKWIDFVTTVWRCECINFVSKAAFTERYRKWCKRKGYHFSERKAAELYMDSMGHVTTLPRNSNTKLLITTAAKELASAKATLAVLRAEMTRLARQLPEYETVRAISGVGETTAGQLMAGIGDVRRFPRRSSIVSFAGVDPAVDDSGKHISKSNPTTKRGSPHLRKTLYQIVCTYLRKAPFDEPVYQFLDKKRAEGKPYFVYMTAAQNKFLRIYYARVKECLVAADTKEFSED

SEQ ID NO: 448419 - protein, 310 aa, unidentified
MHYLYYVGLDVSKETFDASLVAFEDANEMAHRKFANSRKGICSCLHWVEKRHGIRLDDVIFCAEDMGSYISEMAVCASDRTLNFNFSLISPLVIKYSMGIARGKTDRVDARRIAEYAITHYRKIALYLPAEKELCQLRTWLILRAHLAKQRVAKLVLLEKLDYKEKFADVSIQRSMLQEEIAYAETHMKTIEREMKELIAADSNICRNYKLLTSIKGVGPITAIVMLCSTLNFTKITDHRKFACYCGLAPFEHSSGTSVRGGCHTSSMANRDIKVQLNRSALIAIRCDPQLKAYYERKVAEGKHLSLIHI

SEQ ID NO: 448420 - protein, 403 aa, unidentified
MNSNTNQKINQVSENTLVIGIDIAKHKHFACAVDDRGRVLQKSFPIMQSRCGFEGFYERLLALKATHEKQEILVGFEPTGHYWMNLAAFLTHYGIPFVMVNPMHVNRSKELDDNLQTKNDQKDALVIARLMRDGRFSYPRILDGVEAELRNGATLRSKIQEDLNALQNRIIRWLDRFFPEFTHVFKSFGKMAYAVLEMTPLPSDIKGRTPEELLFLYRQVDGMKSPQLPKAKQLVEVAQNSIGLTDGVVMAKLEIATLLSRVKLMQAQLDELTAQLIELAKQMTDYEYLASVPGIGDVTIVDLLSEVGSLTQYAHPRQLIKLAGLTLRENSSGQQKGQKRISKRGRRKLRALLFRVMMPIILHNPAFKQLHEYYTTRTKNPLRKKQSIVVLCGKLLKVTSKNS

SEQ ID NO: 448421 - protein, 343 aa, unidentified
MSGIVTIGLDLAKSIFQIHGVDNTGRTILRRRLSRHELIPYFAKISPCLIGMEACSAAHHWARELSRFGHSVRLIPPQYAKPYVKRNKTDAADAEAICEAVARPNMRYVPIKTLDQQSVLSLHRVRALFVRQRTAAINTVRGLLTEFGIIAGKGIGRIAELRHRANEADNEALPDEARAAITEVFEHIDALTKRIDATEAKIVAWHKSSEASQRLASAPGVGPITASAIVASVGDARQFRSSRHFAAWLGLTPRLHASGGKEHIGRISKGGDRYLRALLIHGARAIVGTSFRKDVPPRLWLKQLLTRRSVNVAAVAVAHKTARALWAMITREEGYRRIAVQAA

SEQ ID NO: 448422 - protein, 395 aa, unidentified
MFIVGIDIAKRSHEAIIIAEDGQVVRKAFSFRNNCTGYNLLLEQVRRLTLVKSQIVFAMESTAHYWLALYARLLKDGYAVMVLNPIQSHSLRELYIRKAKTDARDSLIIADLVRFGRCKASNVPQDKILALRELCRSRAYLVDMAADLKRKLIALLDRIFPEYESLFDSVFSKASIAVLRKYSTPQKVKNANLRKLTDLLMESSNGHFGEWKAHQLKEAACSSFGIDDSGGVYSTLLGMFLEQILSLTAQADSLEKQISVFFQEFNNPLTSIPGVGTVLAATILSEIGDITRFSSADKLLAYAGLDPSVKQSGEFKSNQNRMSKRGSPYLRRAIWLASTVAVHRDPMFQTYYEKKISEGLHYMNVIGHVSRKMTAVIFAVLRDGQPYQPILQSAD

SEQ ID NO: 448423 - protein, 424 aa, unidentified
MKRTQNEKILQIKNETLVVGIDIGKETHYARAFDYRGIELAKLLRFSNSAQGYKDLDNWMQSIMQQKEKTEAITGFEPTGHYWFTLGDHLQRKGHRLGIVNPFHVKCTRELDDNSPTKNDRKDPKTIAMLIKDGRFRDVYIPEDLFQELREAVLERERLQEQINALSNQIIRWLDIRFPEFNKVFKDWSGKTARTALRAFSTPARVISAGTEGIMGIWRKHLKKSSLKKAERLIKAATESIGRTAGSEAAEAALQNMLTQYEVITLQKQDIERLMQELLLRVPNAAKLLEIKGIGMVTAAVIVSEIGDIHRFRDPRQILKMAGLSLRENSSGKHKGKTTISKRGRKRLREGLFRAIIPILANNPEFRVMHQKNLTRENNPLNKMQSIIALCGKLIRVIFAIMTKGYAYDANKMMSDMNQSMKAA

SEQ ID NO: 448424 - protein, 422 aa, unidentified
MEGTESNYQWYVGIDWGAERYEVCVLDRQAQVVARRSIAHSGTGIAEFVDWLVKFCEGKPERVAIAIETPRGAMVESLVERTFAVFAINPKQVDRFRDRYTVAGAKDDSRDAFVLGDSLRTDEHCFHRVGLDEAAILRMRELSRLEENLQQESNRLSNQLWEQLHRYYPQMLALSKAADEPWLWELIEWAPRPVEAGKLELARVQQLLGSHRIRRIRAEQVLEALKKEPLRLAPGAEEAASEHALLLLPRLRLAHEQRTQVAKRIQRMLREMSAAKPTEKADKREHSDVKILLSLPGVGRVVPATVLAEASGPLRERDYHRLRNYGGIAPVTRQSGKKKVVSMRYGCNMRLRNALYHWARTSVQKDAAAKKHYAALRQAGHSHGRATRGVADRWLAVLMAMLKAGTLYDPERRGKGQATKVS

SEQ ID NO: 448425 - protein, 342 aa, unidentified
MKTFYGGIDLHAKNSQACMIDEKGVRIKEKKLKNELPLILEFLEPFGKGTKIAIESTINWYWIVDGLMEAGYEVKLAHPLGLKLITDAKVKTDRRDAYKLANLLRLDALPSAYIYPKETRPLRDLLRRRSDLVAQRSKCYSSLRMQFLQYNANTMSQTALKCFEDENLNVMDLPGVVKMHGSMTLKRIELLTEQIEAIEKFLESVTITDPHFNLLTRIMGIGRVLGLTIYYEIGDISRFTNVRHFSSYCRLVPGCHQSSDKVKKGKGSKQGNVYLKWAFTQAAMHMARYDKDIRAFRDRQANKSKGNSKNMKANAILAHKLGMAVFNVLKDGIPFKKELLFA

SEQ ID NO: 448426 - protein, 360 aa, unidentified
MNATTVAVDLAKSVFQLAVADPSWRVTETQRLTRAQFERWFANRQVSLVIMESCGSAHHWARWLNALGIEVRLLPAQYVRAYVRRNKTDAADAVALLEAARASDIRPVRIKSVEQQALQGLHRVRSLWMGTRTSRINALRGFCREFGIAIPVGARIGIEVIARVLADPQTGVPDLIRGTARLLLEEIRLLEARIAQLERELAQAARLSPACTTLLSVPGIGLLTATAMVAATSGDVSHFKDARHFASWFGLTPKEYSSGNSRYLGHISKRGDRYLRMLLTHGARSVLRAAAAARTKGREVDGVRRWALDVQARSNHNKATCALANKLARICYATLRDKQRFDEKQPLIKKMNRQVFALPG

SEQ ID NO: 448427 - protein, 388 aa, unidentified
MFFLGIDIGKNTHVASLLDEKAKIIFKAYSFANTLDAAEALLVKLEPYKDSLEIGMEATGHYWLSLYSFLAEHKFIVHVLNPIQTDGWRKGIEIRKRKTDVIDSVLIADLIRYGDFLETSLADEDILSLRNLSRFRVYLVNSVSDLKRKAIAVLDQIFPEYASVFSNVFGQTSKELLKSLSLPSDYENLSATKIEEVLSNITQKKKASKTISTLSDKASRSFGISFCKDSFAFQLKLIIEQICFIEEQIASVELEIEQLMSKLGTNIKTIPGVGSVIGAVILGEIGDIERFDNPSKLVAYAGLDASVSQSGEYEAYSGKLSKRGSPYLRKALYMAAQRAEFCDPVFHAYYEKKRNEGKHHLVATNAVSRKLCHTIYAILKKDIPYKVQ

SEQ ID NO: 448428 - protein, 455 aa, unidentified
MIEDERIRHKDYCQLREEIRGSREYLIVGIDVSKSKHHAFFGTATGKTLYKKLVFENSYQGFNRLIDHAKAMLVQNGLCKTVFGVEPTGDYHKPLGNFLIKSGYHLVLLSGVALKRNRELLDNRWDKNDTKDAANIADLISQGKCLFYEYPTEEISTLRSFLSLRKRLKTEAHGVQMRIRNNLMAKHFPEMDIHYNETCLGIVRWCLAPGRISSMDFDSFFKMTSSNPRQEKRSRLIYDCSKNSIGLPMDKGSEYDAAVLTKRLTELRLILKEVEGHIEKTASLFEEYNYLLSIPGFGPYISALVLSSIGDPCRFKNQSQVIKMAGLDLNASRSGKTSDNATPVISKKGKSELRYALYQAAIVSSTSSTLFKNYLTEKLMGRIREKGIKTKMLTKLSAKLLVIAWTLMKHKTLFNPCFVKTGECQFPLSGKKAEVRAQSRASKASPEGIDRPLTA

SEQ ID NO: 448429 - protein, 341 aa, unidentified
MTEVSTIGFDLAKRVFQVHGIDGDGAVAIRRQLRRSEVVKFFAKLSPCVVGMEACASAHYWARTLAKLGHDVRLISPAQVKPYVKRGRKNDAADAAAIAEAVTRPHMQFVPVKSEEAQAILMLHRTRRLLITQRTMLGNALRSHFAEYGIVEPEGQGGLARLVACALDAPDTALPQAAREAMAMLAAHVRDTGAKIDALDHEILRWHRDSADSQRVASIPGIGPLIASAIVATMGDPTRFKTGRDFAAWLGLVPSQNSTGGKAVLGPITKAGDRYLRSLLVVGATGTLWRRRKEQGTWLAALLARKTARQVSVALANKMARIAWAILAKGSIYKQPAAQAA

SEQ ID NO: 448430 - protein, 408 aa, unidentified
MDVDYPRCAGLDVHKDTVVACVRIVEGRQVQQEVRTFRTTTKELLRLSDWLAELGCTHVAMESTGVFWKPVWHVLEDSFELVLANAGAIRNLPGRKTDVNDAMWIADLLAHGLIRGSFVPSRPVQELRDLTRTRTQLVREISRHTQRIQKTLEDANLKLTGLITDVLGVTGRAILDALIAGETDLDALAGLRRRGIKASHEELVEALRGSVRDHHRFLLQVHLRQIDTLQQAVRDLEGRMETLLEPFRPQVDLLTTIPGVSVTTARVVLAEIGFDMAQFASAGHLVSWVGLCPRSDESAGKRRSNRLRPGNTWLKSALVQAAWAASRKKDSALRAQYLRLKSRRGPKKAVVAVAASMLTAAYFMLQRSLPYTDLGPSHLDTRDPQKTAQRLVRRLRDLGFEVELRHAA

SEQ ID NO: 448431 - protein, 314 aa, unidentified
MADPCSVGIDVSKGTLDVAWSTNPTARWQTTNDDVGWTALVAHVRALQPTIIVLEATGGYEIGAASALSTADLPVAIVNPRQVRDFAKAFGLLEKTDAIDAAVLAAFGARIRPTPRPLPDDLQADLQALVTRRRQLVDMLTAERNRVPLARGAVRRNVLVHIAWLEKQLAKTDRDLRTQIEASPIWRARDHLLQSVPGIGPATSARLLASLPELGTLSHRQISKLVGLAPMPDDSGRRRGYRRIQGGRGDVRSALYMATVTAITHNPTIRAAYRRWRAAGKLPKVALVAAMHKLLIHLNAMLRYQTPWHPPATA

SEQ ID NO: 448432 - protein, 386 aa, unidentified
MPQLNDLSRSLVILEQDATLIAVIEMGQSSWLVAGIVPGVERSALKKLAVDESALLKLLNRWREEAEKAGHRIERIAIAFEAGRDGFWLARWLRARGIEAHVIHASSVAVSREHRRAKTDRLDTELLKRAFLGWLRGERDHCKMVAIPTLAQEDAKRPNRERESLVGEQSRIVNRMKAALARLGIRGFNPKLKKAVERLDGLRTPEGEPIPPNTLAELKHDMERRRLVRSQIRDIEGTRLERLKQAPGDGPHVMVRLLARVIGVGVETADMLVQEVLSRNLRDRRAVARYGGLTGSPDESGKKRREKGLARSGNARVRRGMIQLAWRFLMFQKGSALAHWFYARTKNAPQTRKTMIVALARKLLIALWRLAREGAIPEGIVLRPAL

SEQ ID NO: 448433 - protein, 358 aa, unidentified
MSNVKSSKLDFTGQPIYIGLDVHKKSWSVSIFSEHFEHKTFTQPPEVDKLVHYLRRTFPGAQYHSVYEAGYSGFWIHDRLKEKGIDCTVVNPADVPTKDKERATKRDRIDCRKLARGLRSGEIEGIYVPSRTKLEDRSLVRTRQGMVRKQTRCKNQIKSMVFFYGIDLSEEVMMSHWSRRFLGWIESIRMERASGDMALKAHLEELKHLRQLIASLNRAILALARTEEYRVPVMLLKTVPGISTLTAMTLLTELYEITRFPSLDELSSYVGLIPETHGSGEKEYIGEITQRRHPQLRSLLIEASWVAVRKDPALLMAFHQYSKRMRKTKAIVKIARKLLNRIRYVLKNRMEYVPAVIQ

SEQ ID NO: 448434 - protein, 345 aa, unidentified
MEPMYYIGLDVHKRKISYCVKDSCGKVFAEGLLPATRLDLDLWMKTLPQPWSAAMEATMFTGWIYDHLRPHAAALKVAHPLMLRAIAAAKKKNDRIDAGKICDCLRCDFLPECYMASTAIRERRRTLRYRNLLVRQMVQMKIKISALLMETGVSYNKPRLHKAGYFRELLATNPDIDEGLCSLLRLCRETVVRLGKTESALVRSLERDSLLVERVERLMTIPAVGPITALTWALEVGDVQRFSSIKKAISYCGLCGAEKSSGNTVQRTPLSKQRNKHLQTTLIEAAKMAPRNSPELAMLYDKEKQKGNANRATLAVARKLVAYLMAVDRGQRNFQIAETSSNIAA

SEQ ID NO: 448435 - protein, 361 aa, unidentified
MAGTMTWVGLDVHARSTHGAAIDVMTGELSRVRFGAGVQGPVAWLTQLPGPVRACYEAGPTGFGLYREAVAAGIAMQVIAPGKTPRGPSDRVKTDRKDAELLARLLLAGSLTRVVVPPPEVEAARELTRAHDACRRDLMNARHRVSKMLLRHGRVYPSSTTWTARHRRWLSAQQFEQAASRLVFADLLAAVDGLTSRKTAIALQLSQLATDEAWWPTVARLRAFRGIDTLTALSIHLELGGDWKRFERASALPSWLGLTPSLNQSGESSRQGSITKTGSMLARRLLVESAWHYGRQPRLGATLANRQAGQPEHILAIANRAQQRLYTVNRGMKARAKPHNVVVVACARQLACFLWAAATAD

SEQ ID NO: 448436 - protein, 337 aa, unidentified
MQLYCGIDLHSNNSLISLIDEHDQVIKEKRLNNDINIISSYLSPFQNDISGVVVESTYNWYWLVDGLVELGYPVHLANTLAIQQYNGIKYTNDASDARFLAHLLRLDILPKGFIYPQPMRYVRDVLRRRLLLVKQSTAQLLSLQSLISRHTGKRLSSYQVKRLQCEDLGCYFKDAAVLFTGQQSLQLWQQLQQQINHVETFVLSRCEADQYSVLTSTPGIGKILGMTILMETGPIERFAAVGNYSSYARCVPSKKISNGKIKGHGNRRNGNRYLSMAFVEAAHYATIWNPTIKRYYQKKCKQVPLMVAKKAVANKLTRACYHMLKENQMFDVKRAFG

SEQ ID NO: 448437 - protein, 413 aa, unidentified
MLKIVYPICCGMDIHKSFLVACIATTNEHGVTSYKSKRFSTFTGDLRRLAAWLSENNCNDVCMESTGKYWIPVYNILESSCQIVLAHPKYVKAIRGKKTDKKDAKWIADIFKHDLISGSFIPPADIRQLRDLVRYRWKLTSFTTGEKNRAQNCLTVSNIKLDDVFSDVFGKAASAITTRLLESNEPFDVTPYLTKGIKASVEDIQNAVDGKMCAEQAEKLRIIRSHMDNLELCKMNLESLILFVVEKYLPQLNLVLTVPGIQTFSSIAVIGEIGVDMSVFPTSKHLCSWAGLTPQNNESAGKKKTTRVSRAGAYIKPLLVQCANAAVKSNKHPEIKNRYLSLKKRRGHKKAILAIARMLLTAIYNILKKSEPYNPALYRKANLPPAHREVSVDQAIFILQRQGYLITHPALSA

SEQ ID NO: 448438 - protein, 349 aa, unidentified
MDRYIGLDVHATTCTAAVIDAQGKKLRSYVIETNGQALVEFVKMQPGTLHVCLEEGTQSGWLSEILSPYVARVVVVHVKESRGQKSDELDAFALAEQLRTGATARTVYKLVGAYSTLRQLVKAHSMIVRDTVRVQNRIKAIFRARGVHVEGKTVYLPRGREEYLHRLPASSRAAACLLLAQYDALKVVRDRAQKELVAESHRHEVTRRLESCPGVGEVRAAQLVSVVVTPDRFRTRQQFWSYCGLGIVMRSSSDWVQGAHGAWVRAPVQQTRGLNRMHNSLLKQVFKGAATTVIRQHHNDPLYADYQRMLAGGTKPNLAKVSLARKIAAITMAIWKKKEVYKPAATTKS

SEQ ID NO: 448439 - protein, 371 aa, unidentified
MRHHSEAFIGIDTSKSRNAVAIAEDGRGGEVRFLGEFAATEAAMHKLVAKLAAKYSLTFCYEAGPTGYGLYRLIKRLGHECIVAAPSLIPKKLGDRVKTNRRDAVSLSKLLRAGELTAVWVPDERHEAMRDLSRARLAANKDLQGKRQQISSLMLRLGRCYPGRTTWGPAYMKWLMSQKLEHREQRMALEELLEGVRQEGERVGRLEQAIREAVPEWSLAEVVTALQAMRGIDLIAAVGVLAEIGDLSRFQNPRELMGYLGLVPSESSTGDRVKRGGITKAGNGRARRILVEAAWAYRHPARVGREKQPKVAAAPKRVREIAWKAQTRLCGRFRSLLRKGKLPTVAATAIARELSAFIWAINREVMQARRT

SEQ ID NO: 448440 - protein, 488 aa, unidentified
MALVFAVVLSLLILEDVMPRRKPASSQPDPATAALLQTLNPHAAGIDIGATELWVCVPPSAVASPAAPSAAAVLPPHVRRFGAFTADLHTIAAWLRQCQVTTVAMESTGVYWIPLYDLLESAGFQVLLVDPRQVQRAPNRPKTDVHDCQWIQRLHSLGLLTAAFRPEEPIRVWRSYQRHRATLIEDAGRHLQRMGKALEQMNVKLPEVVSDITGLTGMGIIRAIVRGERDPQELAKLRDHRCKESAETIARALQGTWQPEHLFALQQSLALYDYYHEQIRDCDRVIEAHLKGMALPEVPPLEPTRRVRRRKDNAVTFDARQRLHHVSGVDLTAIEGIEESTALVVLSEIGTDMSRWPSEKHFGSWLGLAPNPRKSGGRVKSSATRPGVNRAAQALRLAAKNLQRSQSALGAFFRRIAARRGLAKAITATAYKLARIVYALLKHGTAYVAQGLAVYETAYRERVVRQVKRKAAELGLVVMERDAVVQSS

SEQ ID NO: 448441 - protein, 457 aa, unidentified
MSKRTKKSKFQKFTVQSLPEHLRHINLNAAGIDIGSERHMVAVPEGRDEVSVREFGAFTADLQALADWLQQCGVTTVAMESTGVYWIPLFELLERRGFEVKLVDARHVKNVSGRKSDVLDCQWIQQLHTYGLLAGAFRPTDELCVLRSYLRQREMLTQSSSMHIQHMQKALQQMNLLLHNVVSDITGVTGMKIIKAILAGERDPRMLARNRDRRCQNSSATIAKSLVGNYREEHLFALKQAVDLYETYQAKIADCDQAIIKQVEKQPDITDDTLPPSEKLIQARERIRSGVDVRELLFKKSGVDLFATPGLAADTLLTLSSEVGFDMSPWKTIKHFTSWLGVCPGTKISGGKVLNKKTKRNPNRATQAFRMAAATQARSKTALGAFYRRIKSRSGGKQAITATAHKIARIYYTLLTKGTAYVELGQQAYEDKYKERRIHHLMAQAKSLGLQLVPCAT

SEQ ID NO: 448442 - protein, 344 aa, unidentified
MKYYAGLDVSLEETSLCIVDGEGTIVAERTVASQPGAIAEALRDTGFALTRVGLEAGPLSPWLHAGLRAEGFAVICIETRQTKAALRGMRNKTDRNDARGIAQIMRTGWFRIVHVKSGESQELRFLLTNRKTLQRKALDIENEIRGTLKAFGLKVGKVSRRQLAARVLELVADRAVLHRMVAPMLKARAALLEEFARLHRMVLDAVRDDELCRRFMTIPGVGAITALTFKTGVDMPGRFAKSKTVGAHFGLTPRKFSSGERDYQGRISKCGDAMVRSALYEAANVMLTRCTRWSALKAWAARIAKKAGAKRARVALARKLAVIMHRMWIDGTDFQWGEQTKAAR

SEQ ID NO: 448443 - protein, 338 aa, unidentified
MAIVYVGIDLAKNVFAVHAVDEAGKPVLVRPAVPRARLHELIASLPPCTVAMEACSGAHHWARLFAARGHTVRLIAAKFVTPYRMSGVRGKNDAADAAAICEAVQRPNMRFVPLKSQQQQSQLMVHRARQGYVQARTACINRIRGLLAEFGQVLPLKANTVRRQAGALLEDLPGWANTVIGDLLSELHRLDERIAQYDRHIAQIAREDERAQRLMALPGIGSTTATAVVAMIGNGHEFNCGRQFAAWLGLTPGQYSSGGKTRLGRITKAGDSYLRSLLILGARAVLARAKASTDAIASWALALQQRRGYWKAVVAVAAKNARLAWAVLRRGEAFKMPA

SEQ ID NO: 448444 - protein, 359 aa, unidentified
MTPGSCSGCFTSTTWEAPVSEQYAGRQIVGMDLHRRRSVLVRMTETGERLETVRILNDPERLAAVMARAGEAPEVVLEATYGWYWAADALAELGAQVHLAHPLGVKAFSYRRVKNDERDAADLADLLRMGRLPEAWIAPPATRELRQLVRHRAKLVGLRSNLKCQVHAVLAGAGAPVVMSDLFGVEGQRLLTRVELPTGARARVSSQLRLIEGLDFEVELFAKLVAGRLREHPGYRAIQVIPGVGPVLAAVFVAEIGDVARFPAAAQVASWAGLTPKHRESDTTVHRGRITKQGSRLVRWAAVEAVQRVPGHTRLGQIRDRIGERRGRNIGVVAAARELIGLVYYGLRDHHIRCLTRAA

SEQ ID NO: 448445 - protein, 412 aa, unidentified
MNAVGIDVSKGKSMVAVLRPLGVVVAKPFQVSHTAAELGKLANFLKSLDGETKVVMEHTGRYYEPIAQVIHDRGVFVSAVNPLLIREYGGNSLRRVKTDKADARKIARYGLDNWVELREHTPMDTIRYELKTLNRQFHLASKNRTACSNNLVALLDQSFPGVRGWFDNPVRKDGSQKWVDFAMTFWHVECVRAVSQAAFTERYRKWCKRNNYNFSTAIAERIHCEAKEMIAMASKSATTKLLIHEAASQLLNVSRMVEILRAEMNRVAAQLPEYPMVMGMYGVGESLGPQLMAEIGDIRRFAGKQSLVAFAGVDPMVNQSGMKESRSNKSSKRGSPYLRKTLFNLMSMLLQLAPSDVPVYQFLDRKRAEGKPYYVYMTAGANKFLRIYYGKVRDHLAAIDAIHHDSASVNPQ

SEQ ID NO: 448446 - protein, 349 aa, unidentified
MSVVCGLDLHRQQITFDVLETESGEVWRGRVWQPDRERFRRWLTCDVARRANGEPVVMAVEGCTGWRYVVEEIAAAGFEAHLAEPADTQAARGRKRHAKTDRSDARILRELLQSGDLPESWIPPTDVLEWRERVRLYKSLVDQRRVWIQRIHAELFQHGVAVPEAAIRSATTREWLTGDEVGLTPAGRQRVRVGYTMLEATDVEAQSLKRDLQRFGHHQPACRALVEATYGIGGLIAVAVWSELGDCRRFSRSEQVVRHTGLDVSVDASDRHRAHGHLTRQGPPTLRWALFEAAMNASHRRSPDHAYYTSVKDRHDGKLAAIAVARQFARRCYHILRNLDPDVVYAMPA

SEQ ID NO: 448447 - protein, 424 aa, unidentified
MKVVYPICCGVDVHKSFLVGTIVSTTSGVEPHYQKKRFSTFNNSILEFKQWLLDNDCHDVCMESTGKYWVPAFNLLEDEINVVIANPKWVKAVKGNKDDTKDSKWIGDLFRLGLVKGSYIPCKKVRILREYSRYRYKLVSCRSSEKNRYQNALTVCNVALDSVVSDIFGKSSSSIIDYLLEQSGTSINHEEIASKLLRSLKSKEDAVIESIEGYQMTDAQKYRMRLVRAHMDYITAEINDVDKMIEKMISSNPDFENAVQFLCTIPGVKRDSAITIISEIGTDMSQFSSSKRLCCWAGLTPGSNESAGKKKSVRITRAGVYLKPALVQCAHAAVKSDKSPYYKKKYESLVKRRGKKRAIIAIARMILTAIYQMLSTGEQWNPSDLYKIDMPVALVEKQKAKAIKQAKKILQREGLLPPDESLAS

SEQ ID NO: 448448 - protein, 392 aa, unidentified
MQYVGIDVASLKHDCTIITDQGEILKDGLTITNDSNGFEDLMDTMRGLGATPETTKIGMEETGIYHERIRTHLMRCGYNVYTINPALIFHSRKAEMLRSTKTDKVDALVIARYLMMHKGSLHSYTPSLYHLDALKSSTRIYHAKRETLARTKTELKRLLHSVFPEFKSHYDPLSQWALDLLESYPTPEDIAKMHEKTLIRILRTNGNRMETAKHIRMLAKQSVGQSDSMSRQLIRFAICDLKHFKAQIREIKAVLEEQMKPFSHIMSIPGVGALTGATILAEIGDIERFSHKTKLLAYTGIDPVIYESGKFKAKNTTLSKRGSRYLRSALFMAARAACVNTSIIKDNKFRRKYEAKIREGKHHYTAVFAAAKNLTYTIYGILKSGQPFEYDY

SEQ ID NO: 448449 - protein, 357 aa, unidentified
MKIVGCDLHARQQTIAMVDTETGEFTEKTLCHEGNAVRAFYAALEGPVLVGIEATGAMQWFLELLEELGIECRVGHPAKIRAQETRKQKHDRRDARLLLELLSEDRFPEIWMPSSEQRDLRTLLRDRDQWVRMRTRVQHTLQAIALNHALRQGRALWSATGQSALEALPLPPYTSQRRNKLLGLYAQLQKRIRELDQEVEAQARQRPQAERLLTHPGVGPVTALATEVFLGEPSRFATGNQVASYIGMIPCEHTSGKRQRLGKMTKQGNSLLRYLWTEATMHAVAKDPELKRFYRRKLIQKGMGKARIAAARKLGIRLWIMMRDQIDYEEFCRRGKSRQGGEAHAGMPDNNSGPAQQ

SEQ ID NO: 448450 - protein, 433 aa, unidentified
MKVMYERVAGIDVHKDMIKVAIRSPGEKPWTRKTEILEYRTFYGVLQEMARELRRRGVTHVVMEASGVYTEPVYYALAEQDFTEVTVVNPAHAKALKGHKTDAKDCARLAELFECGLLRGSYLPAPELKEVRDLTRYRIKTVQARTSEIQRLAKALESAGIKLGSVASEITGVSATAMIEALIDGERRGGVLADLAKGRMRSAGKLADLSMALTGRFTEHHALLCRLHRDRIASFGAAIADLDERIAGKAARWQREAALLKTIPGFGDVVTWVWLAEIGPAPHLWFSRHEKLASWVTLCPGNNVSARKRKSGRTGDAGTYIKPALIQAAWGAIRVRGRLQARYNRLVRRFGGDKNPAARKKAITAIAHTLLKIAYQVLKSGTPYQEPGADFYTRRESPAQRQAFLERQLQKLHPGRTITVTISPPETALTAGT

SEQ ID NO: 448451 - protein, 342 aa, unidentified
MGTITTIGLDIAKSVFQVHGIDATGEVVVRRRLSRGRILAFFEKLPRCLVGMEACNTSHYWARELIALGHDVRLMPAQYVKPYVKRGKNDAADAEAICEAVARPTMRFVAVKTPEQQSTMMLHRVRLMLNRQRTQLSNAMRAHMSEFGVVGPVGRMGLERLMAVIADREDLRIPPDARVCLEMLAAQLAVVKEQILENDRRIRASARETEVGRRLMEIPGVGPLLASAFVASIADPTVFKSGRDVAAWIGLVPKQNSSGGKERLGSISRAGNRYLRQMLVVGAMAVIRHAERHGTKRRWLIQLLARRAKKVAAVALANKTARTIWALMTNGERYREPTVALP

SEQ ID NO: 448452 - protein, 409 aa, unidentified
MDVIYQRCCGLDVHKRTVTACLLTPKPGGGCNQETRTFGTMTDDLLALADWLAQAGCTNVAMEATGVYWKPVYNILEVQFETLVVNAYHVKAVPGRKTDVRDAEWLADLLQHGLLRGSFIPDRPQRELRELTRYRTSLVRERASEVNRLQKTLEGANIKLASVATDILGATGRAILEALAKGTGEGPELATLARGSLRQKRAELERALKAETSDHQRLMIREHLAHINYLDEAIGRLNREIEERLRPFDHTLSHLQTITGVGRRTAETILAEVGTDTSRFPTHRHLASWAGLCPGNNESAGKQRSGRTRKGSPWLRSALVESAWAAAKTKQTYLSAQYHRLAARRGGKRAALAVAHSILVIAYYIMARGQTYNDLGGNYFDERDRRQVEHRLVKRLEGLGYNVTLEAVA

SEQ ID NO: 448453 - protein, 423 aa, unidentified
MKYALVRVLPEVPPGGVCAGIDWASADHAVCVVDLAGQVADRFAAAHDRAGIAGLIARLRGRGAAEVAIERGDGVLVDALLAAGLTVVVIGSRQVKNLRSRYGSSGAKDDRFDAFVLADTLRTDRARLRPLVPDSPATLALRAAVRARRDLVAHRVSACNQLRAHLQVAFPGAVGLFSELDSPLSLAFLAAFPGQQAAARLDEQALAAWLATVPRRGNTAPAGVLAARLAAAPRGAAGADAAQAAVTTQLAAATAGLAGRVRALEAEIAAQLAAHPDQHIFTSLPRAGTLRAARLLAETGDCRARYPDPWSLAGLARVAPVTRRSGTCISHEFRWNVNRQLRDAICDFADGSRHASPWAATVYAAARDRGKDHPHAVRITARAWVLIIWRCWQDGTSYDPAKHRALQDILTRQAAAGTPQPHR

SEQ ID NO: 448454 - protein, 363 aa, unidentified
MKKISKRQLAMETTKDKPGMTVGLDLGDRSSRYCVLNEAGEVMEEGRMQSTEAAFRRHFEGEPRQRVALECGTHSPWVSRLLKSMGHQVIVANARKIPAITGSQSKNDRNDAELLARFAAHDPRLLSPVQHRSLERQQDLNLIQVRSTLVRARTMMANALRGLVKSAGSRLPACSTQSLPVRATVAIPPALTAVATPLIQQMELLNQQINAMDGQIENLAGKYPEIPLLRSAPGVGPVVAAAYVLTLDRPDAATNRSAGAFLGLRPAQSQSGESDPQRRISKAGDSYLRSLLVQSGQYILGRFGPDSALRRWGLKLAQSGGKRGKKRAIVAVARKLAVLLHSMWRTGQSFQPFPHPPIDPTVV

SEQ ID NO: 448455 - protein, 347 aa, unidentified
MSKHSVPGSDVSGLLRRFAELRRKAAARTGQEFPIIVIQETGLDGFWIHRVLQSEGIESHVVDAASILTSRRRRRAKTDRIDGETLVRTLMAFKRGEPRVCSMARAPTPEEEDRRRVSRERRTLVGERVRHANRIKGLLFAQGVFGYEPLRKGRRERLEALRTGDGRPLPVHLKAQIIRELDRLEVVLVQLKTVGAERDALLKQVTDAESSPPAMLMQLKGIGPETAAVLWSEGLFRQFDNRRQLAAYAGLAPTPWQSGSIDHEQGVSKAGNPRLRTTMVELAWLWLRNQPASALSLWFHKRVRRLGGRMRKTTIVALARKLLIALWRYTIAGVVIEGAVMKPATTI

SEQ ID NO: 448456 - protein, 450 aa, unidentified
MSKLKPKSQSLPVINPNTAGIDIGGRFHVVAVPPDRSDKSVQTFKAFTGDIHNMARWLTKCRITNVAMESTGVYWVPVYEILEEHGFEVVLSNARDTRAVPGRKTDVGDAQWIQRLHACGLLKASFRPDATIAELRTYMRVRERMLDYAAAHIQHMQKALTFMNVQLHIVVSDITGVTGMKIVRAIVAGEHDPAILAKFRDPRCKADEQTICAALKGNYQPEHLFALRQAIILYDVYQRQVNECDVQIEAALDRLCINSSEPDEPIPKPKHRAKQANAMTFDVREKLYRLIGADLTQIHGIGPFLALRLISECGTDMNKWPTEKHFTSWLTLCPGSKISGGKVMSSHSRKSNNRVVAHLRLAATTVGRSDTALGAFYRRLSSRIGKAKAVTATARKIAILFYNAMKYGTKYKDPGAEYYEERYKERVLKNLKRQAERMGMTLQAKEECVS

SEQ ID NO: 448457 - protein, 355 aa, unidentified
MDSLRYIGLDLHRDTISAAVLDSDGTLMLQSVLATRAAAVTDFLSGIRGTLHVTFEECCHSAWLYDLLSSRVAKLVVCNPRKNALLKFGSKSDAIDARKLAELLRAGMLAPVYHGENSVLEIHHLARCYGMLTDDTTRIKSRLKAVFRSQAIACTGKRLYGNKHRDNYLKELGDGGQRRRADYLYQELDALQKLRRQARHELATACRKHPAAKWLQSVPFLGPLRTAILLGRVKTPFRFRTKRQFWAYCGLAIETRDSGEYHLIEGQIERKKKPGLVRGLNQNHNHDLKDLFKGAATTASACEGIFREFYLGLLQKGMQPEMARLTLARKIAAITLKIWKKGEMFNPEYLMPQAA

SEQ ID NO: 448458 - protein, 391 aa, unidentified
MSMYFVGIDISKYKHDCCIISAADQQIVSKFTVKNDKDGFEHLLTTLNSLSNPEDIKIGFESTAHYALNLELFLENAHHSFMEVNPVLIKEYKKSTTLRRTKTDSVDCESIARWLMTVEYKPHSKGFYHSYSLKSLTRLRDRLIRQRSFYLVKITNVLDHTFPEFKPFFNERLSKTAIYLLENYGSAEKMAHMNSASYDKLRCASRGKFSIQQFLRLKELAANTVGVNNSIFDIELNSLLTLYNSLCKEIKTLEAEITKLIEEVHPHYMSIPGIGPISAAVIYAEYGDISNFSNPGQMLAFAGIEPGINDSGTESHGGRMVKHGSSQLRYVLLNACLPLIRFDITFATYYAKKRAEGKKHRVAITHVAKKLIRVIYALERQDTDFCVQKLR

SEQ ID NO: 448459 - protein, 346 aa, unidentified
MRTISLDVHADYCQMAVLNKDAEVVLEMQVPTTREDIRRVIGGIPGPKHVVFEEGSLSGLIYDAVKDLVDEITSTDPTRNALISRSENKNDENDAVSLGLLTLNKSIRKIFVPEEPHRTLRSLLSYDNSLQASVVRVNNAMKALCRRWGIKCRGRGIRRRERRRELARELPNATLRWQLEGLGRQMDLLRLERTRVCRHRARITRSMSAVAQLKTIPGVGPIVAPTIVAWVVDPHRFRSRSALAAYAGIGIGGRVSDWKPTRRPRAMKRGNRQLKRVLFIGAEAAIKGANALAKRYQARIAAGWDHRKARRDIARHILFIACAIMNHGGEYDDGRVIVPDGVTSNR

SEQ ID NO: 448460 - protein, 353 aa, unidentified
MQIKSQIKSQIKSIGIDLGKTTFHLVALSTHSRVVVHKKFSRQQLLTYTANLPACLIGMEAGVGSHFLGRALRAQGHQVRLIPAQFVRPFVKSNKNDYRDAEAIAEAVERENMRFVPIKTEDQLDVQALHRVRERLVSRRTSVINQIRSFLLERGISFRKGPASLRRQMPEILENAEEKLSTRMRRLLDFLWQEWKHLQLQIESLNEDVEQIASQDEVCARLQQIPGVGPLVATAVVSPIGNGAAFHKGREFAAWLGLVPRQWSTGGKAKLLGISKRGNPYLRKMFIHGARAAVLRVKRQGSCLGQWMSGLETRAARNVVIVATANKLARISWAVLSSGEDYHPMHRAVSSAS

SEQ ID NO: 448461 - protein, 342 aa, unidentified
MEIKTLGIDVGKSWFHLVGCNRAGKPVARHKLNRGQLAQFVANLPQCLIGMEACPGSQHLARAFQRSGHDVRLIAPKFIKPYLKSQKNDFNDAEAIAEAVSRPTMRFVAVKSNEQLDLQAVHRIRERLINERTAVINQIRAFLIEYGLPVKVGRASLRRELPGVLEDAENGLSPRMRQLVAALRNHWNALEVQIAQHTREIELVARRSDDCRRLVTVPGIGPLGATALIAAVGNGAMFSKGRELAAWLGLVPRQQSTGGKPTLLGISKRGNRYVRMLFIHGARSCLKHLNRDNHELGLWMTQLEQRSHKNVVAVALANKMARIAWAVLVRQEVYRSSAAVAS

SEQ ID NO: 448462 - protein, 343 aa, unidentified
MQTITTVGLDIAKSVFQVHGVDAEGNVVIRRQLKRRYVLAFFEKLPSCLVGIEACASSHHWSRELQALGHTVRLMPPAYVKPYVKRQKNDMADAEAICEAVTRTNMRFVPTKTPEQQSGLVLHRTRHLFIRQQTSVINAIRAHLAEFGVIAPVGRKGIEELLHVIADRGDKRVPDVVRACLAALGSQLLSLKKQILDFDRMIMAWHRSNPTSKRLNCIPGVGPLLATALVANVADPKAFRSGRNFSAWIGLVPRQHSSGGRAKLGSISKQGDRYLRSLFVAGAFAVIRYAKLHGTKYRPWVAALLARRPTKVAAIALANKLARMAWAMMATGERYNYPAALRV

SEQ ID NO: 448463 - protein, 349 aa, unidentified
MEHYVGIDVSLERSSVCVVDVGGKIVAEAKIESHPDAIINFLRKLGLSIERIGLEAGPLSQWLHAGLTKGSFETVLLETRHVKAALSAMTVKTDRRDARGIAQLLRMGWFRPVHCKSPGSQEVRALLVARKQLLGKLLDVEFSIRGILRGFGLKMGVVTRTGFEGRVRELCAGQAMLEQIAEAMLAARAALRKEYSKLHKAMLALVRRDAICRLLMSAPGVGPLVSITFKTAIDDPTRIRKSKAVGALLGLTPRKYQSGETDVTGGVSCVGDEMARTALYEAANAVLSRVTRFSALKRWGMDVAKRRGTKRAKVALARKLGVVLHRMWMEGTSFRWTKEASKAPQVARA

SEQ ID NO: 448464 - protein, 352 aa, unidentified
MHASTVAIDLAKEVFELAFADAQGRIIERKRLSRRAFIRSLETRPPLRVLMEACGGAHGWARRFQRQGHAVRLLPARDVRPYVRGNKTDRNDVAGILEADRCAGIAPVPVKTPEQQGIQALHRLREHLKAERTATLNLLRGVLREFGVAVPLGSTKVPAAVRDALEDGDNDLPMALRHSLAEQIDRLSQLARDMLAIEQRLEEFASRDVAVQRYRTVPGVGLLTATALRASAGDLSRFRSGRQFSAWLGLTPREHSSGRQRRLGGLTKRGDVYVRTLLIHGARAVLQAARMKQRRGRDLDPLQAWALKVQDTRGHNKAACALANKLARRLWAMDHHGTPFDPRHVSERPRAA

SEQ ID NO: 448465 - protein, 404 aa, unidentified
MSVLSAPATVSTIVVAVDVGKTSAMVSVTDDARRPLMGPVEFAMTRSGLGAATQRVSALASSCSKIKVGVEAAGHYHRPVVDYRWPSGWEVLELNPAHVAEQRRVMGRRRVKTDGIDLEAITELVLAGRGRAVTEREALIGEVTAWAQHRSRRVATRTATKNQLLGQLDRAFPGLTVALPDVLGTKIGRLVVAEFTDPARLATLGMNRLIRFAAARDVQLRRPVAERLITAARDALPTRDAVVARRVLATDVCLLTDLDSRIEQAEAELARLLPLSPFKTLTSVPGWGVVRVANYAAALGDPARWPGPRQVYRASGLSPMQYESAHKRRDGSISREGSVALRRALIDLGVGLWLTEPAAKAYARGLKDRGKRGGVIACALAHRATRIAHALVRDHATYDPTRWS

SEQ ID NO: 448466 - protein, 391 aa, unidentified
MTKCKTETVNDLSRCLDPLDMDATLIAVIEMSQSSWLVAGLVPGVERQPLKKLAIDERALLNLLSRWRAEAEKKGHRITRTAVAFEAGHDGFWLARWLAAQGVETHVIHASSVAVTREHRRAKTDRLDTELLKRGFLGWLRSERGHCKMVAVPTLAEEDAKRPSRERETLVGEASRIITRVKAAFIRLGIRGFNPKLKAASARLGTLRTPEGEPIPPNTLAAIKRDLDRHQVVKQQIREIEQTRLKLLEKAPAKGPHAMVRLLARVVGIGVETADMLVQEVLSRNMRDRRAVARYAGLTGSPDESGAKRREKGLARSGNARVRRGMIQLAWRFLMFQKDSALAEWYRQRTANAPSMRKTFVVALARKLLIALWRLARDGVVPDGVRLRPTV

SEQ ID NO: 448467 - protein, 420 aa, unidentified
MSLDPHEEPAAIQTHIGAIFISLELSRSKWLITSLVPGGGQRMSKHWVDAGDLTGLLARFWAIRDKVLARTGKSYPIVVIQEAGLDGFWIHRSLVKEGIESHVVDAASIAVSRRRRRAKTDKIDGEGLLRALLAFKRGEPRVCSMVRVPTPQDEDRRRICRERKTLIAERIRHVNRIKGLLFSQGIGDYEPLRRDRRRALEAARTGDGRALGANMKAQIGRELDRLELLLGQIAAIEAERDAMLARQAEAEAVQGAQGAPARGQKPMDLNGPGAETVPEAEAAPVVQKLMDLNGLGAETVAMLWTEAFYRSFDNRRQLAAFGGLAGTPWKSGSIDREQGVSMGNHRLRETMIQLAWLWPIHQPNSALTRWYRERTKGATKLQKKKMVVALARKLLVALWRYVDAGVVIEGAVLKRAARAR

SEQ ID NO: 448468 - protein, 343 aa, unidentified
MHIASIGIDLGKTTFHLVALGERSKVLARKKFSRTQLLAHTANLSPSLIGLEACSGAHFLGSALREQGHDVRLIPAQFVKPYRKSNKNDFIDAEAIAEAVTKQNMRFVPIKTEEQLDVQAMHRVRDRLVQRRTALINEIRGFLLERGITFPVQPIHLRKNLPTVVEDAEQNLTPRLRWLRNRLWQEWKQTEIDSETVTDEIERISAEDERCRRLRQIPGFGPLVSTAMVAAIGNGAAFRRGRDFAAWVGVVPRQYSTGGKQKRFGISKRGNIYLRRMLIHGARAVLFRIKYDTAGLGQWVHRLRQRAPRNKVVVAIANKLARIAWAVLSSGKDYRHQTLQPAA

SEQ ID NO: 448469 - protein, 385 aa, unidentified
MSQPNDLSRSLTSLEQDSTIIAVIEMSQSSWLVAGIVPGIERHPLKKIEPSEEELICLLMRWRAEATKHGRTITRIAVAFEAGRDGFWLARWLRARDIEIYVIHPTSVAVSREHRRARTDRLDTGLLKRVFIGWLRGEPDHCHMAAIPTLAEEDAKRPNRERERLVGERTRIVNRMKSCLVRFGVRNFKPTLRKAPERLETLQTPEGVPLPPNTLLELRRDMARLRFVMDQIKQVEEARAQRLEQAPQEKSHAMVRLLARVIGVGIETADMLVHEVLARNLRDRRAVARYAGLTGAPDESGSKRREKGLAKAGNARVRRGMIQLAWRFLIFQKDSALARWYQTRTASVGKKRKTMIVALARKLLIALWRLVTTGEVPAGVVLRAA

SEQ ID NO: 448470 - protein, 338 aa, unidentified
MTIVMGLDQHRAQITAEWIDTSTGELSRKRIAPADRAGVRAFAGRFCGRELEVALEATTGWRFVVEELHAIGAQVHLAEPAETAARRGTKKRAKSDRADARHLRELVMVGRLPESWIPPEHLLDLRARVRLRHTLVDQRREWQQRMQAVLYHHGAPARSWLLGAESRAWLAELELPPAAREQLTIALALIDALDAQLVPLDQQLRDHAKRQPGCRALMRFYGIGPLTSITILAELGDARRFSSSREAVRYAGLDITVHQSDARRAPGHLSRQGPPALRWALFEAAQCARRPGSPDHDYYVEAAARLGGNRACLAVARKLLKRSYHTLRELGEEALAPA

SEQ ID NO: 448471 - protein, 348 aa, unidentified
MVYFVGLDVSVKETSVCVVDDAGKVILAQKVPTEPADIIAVLASLGASFGRIGIEAGPLSQWLVNALAAAELPVICVETRHMKALLKAQQINKTDRNDARGIAQMMRVGLFKPVHVKTLVAQEQRMLLTSRKLLQRKLLDLELDLRGTLRNFGLKVGVVGRSRYEVRIRELVESFPVLAAIAEPLLAVRRVMRQQLAVLHKMLLDTVRSDPVCRLLMTAPGVGAVVALTYRATVDQPQRFVHSRAVGAHVGLTPKRYQSGETDYDGRVSKCGDALLRTMLYEAAQVLLTHSGKWSWLKAWGVRVAQRRGMRRAIVAVARRLAVVLHRMWVDGSEFRWRKESAAVPSVA

SEQ ID NO: 448472 - protein, 393 aa, unidentified
MVTIIISYPICWEGVKYMSHVSGLNTNTIVVGVDVHKYSHTAFAIDCFGQALGIHEFSNDYLSEFVVWLDGLGERKNLLVALEDVNGYGCHIVKCLASEEIAMRYVPGILTERKRKQSIHREKSDSVDAERVAKVILTNYEETLPAKESIANQEERTISTNLDFLITERRSLVAGQTIMKNQLHAMLHQLQGDHYTDQFSKAFTPKAIKYFEQSLKESQKKETDSEKLALMASIQRRLKRLDLTAAQIKEIDDSMKKTSLSSPAVQALRVGVTGCGNITACTLAAEITTIHRFRTKAQFARYAGIAPIHKSSGNHKRLYTSPYGNRKVNRALHTMALYQISRKDDHPGKIYYQKKLSEGKTKLWALRCLKRQLANRVFQTLKNEYNTRTIPTP

SEQ ID NO: 448473 - protein, 345 aa, unidentified
MYRTRVGVDLAKKVIQVCVYKNKKVQSNVEMTPEAFLYWLINNKPVTIIFEACSSSNYWKQKAIEAGHDARLISAKLVSVVRQNQKTDKNDALAIVQATFMPDVTYIGGKTVEQQQLQSIKRLRELAVKQQDASQKQIIALLFELNIKISSRKGGIILAIESVLEDATNDLSAECRRAIFLAKEHLKGLFESARHYDDCINKSVAAHPECKKLMKLEGVGPMNAINLYIALGCAEIGTFSKGKDASACIGLTPIQHSSGGIVKLGSIGKFCKNSRLRSQLVCGATAAVQHAVKRKAKTKKDVWIQGLVERRGKKCAAVALANKTVRTAYAMLTKGTEYKAELLAA

SEQ ID NO: 448474 - protein, 321 aa, unidentified
MGSRVSTEQQVVDVGIDVSKATLDVAIEPTRERWQVANDEAGIQQLVQRLQQVQLHRIVLEATGGYELPALAALACVGLPAVAVNPRQVREFAKATGRLAKTDALDAQVLAQFAAAINPALRALPDAATRELAGLLARRRQLIDMRTAESNRLSMAVDQVRPEIREHMRWLDKRIHQLDRDLHDRLRASPLWRENDNLLRGIPGVGPVLTLTLLADVPELGGVTHRKLAALVGVAPFNTDSGKHTGARHIWGGRAAVRAALYMATCSAVRHNPVIRALYQRLVASGKRKKVALVACMRKLLTICNAVIASRTPWRYQPLDN

SEQ ID NO: 448475 - protein, 345 aa, unidentified
MKITTVGIDLAKNVFQVHAVDERGRAVMRKQLRRDQMTAFFANLPPCLIGMEACASAHHWARTLQQFGHTVRLMAPQFVKPYVKSNKNDVADAEAICEAVGRPNMRFVPIKSVEQQAVLSLHRVRQGFVRARTAQGNQIRGLLGELGLIIPKGIVNVAKRVPTVLEAAGEELPASFRQLIERLTKHLKELDRQVDELEAQIKAWHRGSELSCKLEKIPGIGPLGASALVASIADANSFDNGRQLSAWLGLVPRQDSSGGKPKLLGISKRGDVYLRTLLIHGARSAILAAQRKSVNTNVWLAKLLDRRHPNIAAVALANKNARTVWALLAHDREFRLDYAPEVSAA

SEQ ID NO: 448476 - protein, 342 aa, unidentified
MRSVLRGGRSGHVMSALVCGLDVHKDSTYATILNPEGKIVNQTRMNNERVLSYLSHFKVERVAMESSNQVAPLYRQLTKEGYSVMVSHPKKTRYIAEAKIKSDRVDSKAIAELARLDALPLAYMPDKETAILRENVRRRAFLVRERVKLRVKIKSLLTYEGLKWPSDHGLFTVKGEAWLHGLNLESVESYLRVLKPLDDEIRLVSRQLKGMADEDEDVKLLMTVPGIGYYSALLVKSEIGDVNRFPFGERLCSYAGLVPSTHASGNTVRHGGITKEGSKWLRWVMVEAAQAHVRMYDTAMTQAYHRIAERRGKRVAVVAVARRLLMCCYSVLKNRRPYQDQI

SEQ ID NO: 448477 - protein, 402 aa, unidentified
MNAVGIDVSKGKSMVAIMRPFGEIVSAPFEIKHTASDIHSLVELINSVEGESRIVMEHTGRYYEVLAHQLSKANLFVSAINPKLIKDFDNDSLRKVKSDKADSVKIARYALDKWQNLKQYNVMDELRNQLKTMNRQFGFYMKHKTAMKNNLIGILDQTYPGVNTYFDSPARSDGSQKWVDFASTYWHVDCVRKMSLNAFIDHYQNWCKRKKYNFSQSKAEEIYGKAKELVPVLSKDAITKLIIKQAVDQLNSASTTVESLRTLMNETASKLPEYPVVMAMKGVGTSLGPQLMAEIGNVSRFTHKSAITAFAGVDPGVNESGSYEQKSVPTSKRGSSDLRKTLFQVMDVLIKTHPQDDPVYQFLDKKRAQGKPYYVYMTAGANKFLRIYYGRVKEYLASLPES

SEQ ID NO: 448478 - protein, 341 aa, unidentified
MQITTIGLDIAKNVFQVHGIDGEEKVVVRKQLRRSQVMRFFQELAPCLVGLEACATAHYWARELVKLGHEVRLMPAKDVKAYVKRNKNDAADAAAICEAVRRPTMRFVPVKSAEQQAQLMQHRARDLLMRQRTRLINAIRAHMAELGITAPQGREGIKQLLALIADDEDTCLPIDARASLMVLAAQLQAMQTTIGSLERRIVARHRSSQDSKRLQSIPGVGIIGATAIAATVTDPMAFRSGRDFAAWVGLVPREDSTGGKRKLGPISKQGDRYLRRILVGGAVSILRRAKLNPERYPWVTRLLARRPFKVVAIALANKTARVAWALLAKGGTYRRPRLAAV

SEQ ID NO: 448479 - protein, 398 aa, unidentified
MTESSDYESVQLFIGVDVGKDTHHAVAINRSGKRLFDKALPNDENKLRSLISDLKQHGQILLVVDQPATIGALPVAVARSEGVLVGYLPGLAMRRIADLHAGEAKTDARDAAIIAEAARTLPHALRTLKLADEQIAELSMLCGFDDDLAAQTTQASNRIRGLLTQIHPALERVLGPRLEHPAVLDLLQRYPSPEKLASLGEKKLAAQLCKLAPRLGKRLAADIAQALAEQTVVVPGTNAAAVVLPRLALQLITLRKQRDEVALEVEQRVLAHPLYPVLTSMPGVGVRTAARLLTEVACRAFASAAHLAAYAGLAPVTRRSGSSIRGEHPSRWGNKALKRALFLSAFAALRDPLSRAYYTRKMSQGKRHNQALIALARRRCDVLFAMMRDGTFYTPQGS

SEQ ID NO: 448480 - protein, 413 aa, unidentified
MSVTPMDAPARVCAGVDWAKDDHAVCIVDADGEVLDRFMVEHTAAGLKRLVSRLLKAGVAEVGIERGDGPVVEALLTAELVVLVIAPNQLKNLRSRYGSAGNKDDRFDAYVLADVIRTDRRRLTPLTRSTPGTIALRSSVRARRDLVEHRVAAANQLRAHLQIVFPGVVGLFAALDSQVSLSFLERFTTQAKADWLTTNRLGAWLAKVGYSGRVEPQVLHQRLLTAPPGTTDTDAAAHAAITLAFVAVLRGLNAQIEVLAESIADQLDVHPDAAIVKSLPRAGTLRAARLLAEIGDARGRFPTADSLACLAGVAPSTRQSGKIKAVTFRWSADKELRDALCDFAGDSRHANPWAADLYNRARARNHDHPHAVRILGRAWANIIWRCWQDGATYHPDQHGALQRVLNEHAAQAA

SEQ ID NO: 448481 - protein, 350 aa, unidentified
MARSIVPEPDDVVVGVDTHADVHVAVALSGVGAWQGSIAVATTPAGFDELLRWASSFGPVRCFGVEGTGSYGASLARYLQELGEVVVEVDRPDRRTRHLEGKSDPVDAEAAARAVLAGTATGTPKAGDGRVEMIRSLRVARRSAMKARTQAANQLTALVLTAPPELRGSLRALPVVDLVEVASRFRPGALTDPTAAAKLALRHLGRRHASLSAEIASLDRDLAILVMQAAPALVALHGVGTDVAGALLVAAGDNPARLSSEGAFARLCGVAPLPASSGKTNRHRLNRGGDRIANNALWRIVLVRMSGEGRTRHYVERRTKEGLSKKEIIRCLKRYVAREVYRCLERVDGL

SEQ ID NO: 448482 - protein, 358 aa, unidentified
MRIIGVDLHTRQQTIAMLDPETGELVEKTLKHEGETVREFYSALPHPVLVGIEATGSMYWFLELLEELGIERQVGHPAEIRAAEPRKQKHDRRDAALLLKLQVENRFPSLWVPSAELRDLRALLRHRHQWVRMRTRVQNTLQAIALSHGLRRGQSLWSQAGQQAIASLPLAPHAAHRRTELQALNCKLGKQIDELGERVMDQALQRPGAKLLMTHPGVGPITALATDVFLGDPARFDDGKAVASYVGMIPSEYSSGGRQRLGGLSKQGNPLLRFLWCEAGIHAVRRDPELKRFYRRKLQQKGLGKTRVAVGRKLGIRLWIMLRDQIDYQEFCRRGQMRQKSGGARAGMPEGVHSPARS

SEQ ID NO: 448483 - protein, 353 aa, unidentified
MIVLGADMHKSSHTMAAVGAASGEFLGEKTIQVGDRGFAAALDWARGLQDERVWALEDCRHVSGALERFLVARGERVVRVATRLMAGERRGGRDRGKSDLIDAMAVGRAALREGVDRLPVAQLAGVELDIRLLVDHRERLVRMRTALYNDLLWHLHDLWPEQTFPACALLSKKWSTRIARRLARAEQTTRVRIARDELGHLRELSDTINLLHAEIADLVGQVAPQLLSEPGFGALTAGKLIGEIAGAQRFTTDAKLARAAGIAPIPVSSGNTNRHRLDRGGNRQINTAIHRVAITRARCHPETKAYLERKRQEGKTNREALRCLKRHLARRIWHLLQPPPPVLNNTPNINLLT

SEQ ID NO: 448484 - protein, 340 aa, unidentified
MDKVTTIAVDIAKRVFSLYWVDAQTGEIGARTMTRVKFEEFMRTREPSRVVLEAGGSAHYWGRWLARHGHEVRLIAPQHVRPFVRTNKIDGADARAIWEAASRPEVKWVAVKSEASQAVLALHRVREQLKQMRRMQSNQLNALLYEFGVVARGKIAQAQLRAWVAAGRVPELLAASLGEQIERIARLKREELQFTGAIERHNASDALAMRLLEVPGIGALGASALSAELAAGAKGFTNGRQYAACKGIAPRLSGTGGKVRAGAISKRGDPYVRTLLIHGARSVITHQRRAKRLSPWLSALLERRPLNVAVVALANKMARTAWALAAHGRSYQQNYGAQAA

SEQ ID NO: 448485 - protein, 387 aa, unidentified
MPQPNDLSRSLVTLDNNSTIIAVVELSQSSWLVAGMLPGIERQPCKKLEPSPERLLALLHRWQDEAVRAGRTITRIALAFEAGRDGFWLARWLAARGVEAHVIHASSPAVSREHRRAKTDRLDTELLKRGFLGWLRGERGHCSMARVPTIAEEDAKRPNRERDCLVRERTRIVNRIKSTLARLGIRNFKPTLRKAGERLATVHTPEGMPLPPNTVAELQRDMARLGFVVSQIRQIEEARQKRLEQQPETGPHAMVRRLARIVGVGVETADMLVHELLSRPMRDRRAVARYAGLTGSPDESGAQRREQGLARAGNARVRRGMIQLAWRFLMFQKESALALWYRARTADSRSGTRKTMIVALARKLIIALWRFVITGEPLEGVVLRPAS

SEQ ID NO: 448486 - protein, 396 aa, unidentified
MPATTRHARVPALPESTTVQAPLLYLALDLGERHWTLAFTVGRGQRPRVRTIPAGDLERLTTELAAARRRFGLPPEARVVSCYEAGRDGFWLHRAFLASGVTNVVVDAASIEVPRRARRAKTDRLDARKLVTMLVRYTEGERPVWHVVHVPSEADEDRRHLERERETLVADQTGLVNRIQGLLATQGVRLALRGDVPAQLAAVRRWDGTPLPPELRARLEREWMRVEAVRTALRALTTARHRRVTTPTPPAVDAAAVHLTRRLAALGAVGETTAWLLATEMFSWREFRNRRQVGGFVGLTGTPDQSGDRIREQGLTRNGSVELRARVIELAWGWLRYQPASALSQWYRQRYGGGNARLRRIGIVALARRLLIALWRYAMGGPPPAGAHLKDDAMVA

SEQ ID NO: 448487 - protein, 356 aa, unidentified
MNNITLLAIDLAKQVFQLHGTDAKGKAILKKKISSRGKFLEFIARLSPCNIYMEACGSSNYWGRKFIKFGHDVKLINPKYVKPFVKRNKNDANDAEGIAAAAMSPSMSFCNVKTEAHQDIQSTHRIRNLLVQQRTALVNQIRGLLAEYGDVTAKGVANIRKRLPEILGDNPDNLSCLMLSNISDLYADFQRLDKQIAVYDKKIENLFKGSETSKQLETIPGIGVLGSTILASMLASGSSFRNGRHFAAFLGLTPRQHSSGGKERLLGISKGGDTYARKILIHGARSVLLRVEKKTDSQSMWIKDLIIRRGSNKTAVALANKMARTAWALVNENTGYNPNHKPIIINKPKSKILKVA

SEQ ID NO: 448488 - protein, 355 aa, unidentified
MNSTKYIGMDVHTATISVAVRDAAGKLIMESVLETKASTIVQFIHGLRGELYVTFEEGTWAAWLYDLLKPYVTNVVVCDSRRNALLQEGSKSDRIDGRKLSELLRANLLRPVYHGENGLRPLKELVRAYLTISKDLTRVMNRVKAIYRGWGIPCAGQSVYHPRHRDEWLGKITRASVRRRAQLYYLQLDMLVLLRKQARQELLVEGKKHQAWKSLRSIPTLGPIRAAVLMAIVQTPHRFRTKRPLWKYGGFGVVTHSSADHRYVEGQLQRSKKPVSVRGLDSSHNHHLKDLFKGAAIQASTREGPFREFYEALVAKGMRPEMARLTLARKIATIALTVWKKGVAFDAKYLKPQTA

SEQ ID NO: 448489 - protein, 351 aa, unidentified
MIVLGADTHKRSHTIAGVGATTGELLGERTVQVGRAGFGALLAWARALGGERVWALEDCRHVSGSLERFLIERGERVLRIPTNLMAETRKSARQRGKSDAIDAVNVARAALREGLATFPAAHLDGPELDLRLLVDHRERLVIHRVELNNTLQWHLHDLWPELELPGGALFSKKWSTRIARRLSRAEQTMRVRIARDDLRRLRELTETIKALAREITQLIEQIAPRLLAEPGFGPLIAAKLVGEIAGAQRFATDAKLARAAGAAPIPASSGNTRRQRLDRGGNRQINAALHRVIVTRARCHQPTRDYIERRRGEGKTTRDAIRCLKRYLARQVWNLLRASPPNMTLTTPSIS

SEQ ID NO: 448490 - protein, 370 aa, unidentified
MSVRRILAKTIDTDLEYEAIGIDLAKNCVSAALLTTDGEVVCIDRLDYSELEKSAQVLTPTTFAMEPCTEMNYLVQKLEAWGHRCLVIGGKNVQNYVENHYSGQKTDLNDAQALAFLAQDTQLRTIKAKDMEQQKYASLTTLREQYIKQYRQTIVSLKGICQAWGLNISKGISGKARLKDLIENHAAFPEELKESLIDMVTHAQTAQKALNKITKTLEELAKNDKLCQLIQTIPGLGPICSCRLRAMIGDIKRFKNPKDFPAYYGLVPRSIVTGHNEKKGKITHRGDKTMRSLMVQGAGSVINMATKGKLKSKQLTKWILKKQKEKMPWGKLVCAVAAKLLRIVRAVLISNKPYNSKIAGVAKCSLPKGS

SEQ ID NO: 448491 - protein, 337 aa, unidentified
MVYGAIDLHMRYSQIRVIDGDGHIVRDQRVVTTADRLIGSFAPHGPMRILIEASTESEWVAQALEGAGHAVVIADPNFAPMYGDLQRRVKTDRRDVAALAEANRRGWYRATHRVSAAQRVVRQVLRTRRQLVQMRSGTISLIRSLLRQRGYRVGSGASETVPTRVARLALPDDLVHVLGPLLRTVTALSTELRALDAQLEQQAAADPVVARLRTVPGVGPIVALSVRAFIDDVARFPDAAHVSAALGLVPREDSSAERRQRGHISKAGPSEVRSLLIQAAWVCWRTCRQGPLRAWTDQLAARRGKRIAVVALARRLSRILFAIWRDQTVFERTRVAA

SEQ ID NO: 448492 - protein, 428 aa, unidentified
MNEEDHIRLKEFRQFRKEIRGSAEYLIVGIDVAKDKHHAFLGTATGKTLFKRLVFENDLEGFRKLLVQAEAMKVQEGLKKVVFGLEPTGNYHKPLGEHLMRCGQEVVLVSGVAAHENRKTVDGRWDSNDTRDAANVADLISQGKCLFYEFPVEGLQDLRNLLSLKRRLKRQEHGYRVRIRNHLVAKYFPELDRYFEQSEKTSLAVVRWCLDPSVIAGLEYPKFVEMVSSGPRRLSQENRLQAIWKMAVDSVGCEVGPAVAFEVQVMVEGLKQIREGIQDIDEKIYEVCSQFPEYEFLLSIPGFGPDISAKVLGAMGDPFRFQNGKQVLKMAGLDLSAERSGKTSPSAVPVISKKGKADLRYALYQAAFVASTRNQAFIVYYTNKLRGREREPGIKTKMRVKLSAKLLIIAWTLMKKKEPFNPDYLNLE

SEQ ID NO: 448493 - protein, 350 aa, unidentified
MQVITIGIDLAKHVFQVHGVDANDKVVFNKPLRRSQVLPFFAKLAPCLIGMEACASAHYWARELKKLGHDVRLMPAKDVKAYVKRNKNDSVDAAACCEAVRRPTVRSVPVKTPEQQAQLMQHRVRDLLVRQRTQAINGLRSHLAELGIVAAQGYDGLKMLLAIIADNSDARLPENARASLSALVAQIASCQAEIGAIEKRLLTQHRKNADSKRLETIPGIGVLGASAIVATVPDASIFKTGRDFAAWIGIVSREDSTGGKQRLGPISKQGDRYLRRILVVGAFAVIKQARAHPQKYPWLTQLLTRKPAKVAAVALANKMARIAWAVLTKKEIYRVRPTAETCASAPAMGR

SEQ ID NO: 448494 - protein, 349 aa, unidentified
MGEVSTIGVDIAKSVFQVHGVDADGTVVIRRRVGRAKILEFFSKLRPRLVGMEACATAHHWARELKKLGHDARLMPPTYVKAYLKRGKNDAADAAAICEAVTRPSMRFVPIKSVEQQSTLMLHRTRDLLIRQRTQLINALRAHLAELGLVAAKGREGLCQLVTVVTECGDERLPSNARFACQAIVGQLHAVQTQISGLDKRITQTHRANPDSKRLDAIPGFGVILSTAVVATMTDPKAFKTGREFAAWIGLVPRQNSTGGKDRLGSISKQGDRYLRRLLVVGAISIVRTARMWPDKYPWLIELLGRRPAKVVAVALANKMARVAWAVLAKGETYRAPTRLSNAAITVAA

SEQ ID NO: 448495 - protein, 347 aa, unidentified
MNFYNNTHPYYCGIDLHARSLYVCIIDQEGNTCLHKEITASPDKLQALLEPYMGNVVVGVECMHCWYWVSDFCEDLGVDFILGHALYMKAIHGGKAKNDRIDSFKIANLIRGGNFPLAYVYPKEMRATRDLLRRRMKIVRHGANLKAHVGNTTSQYNLPPNKVNLKNVSAREQLKCTFPDPVVQRNIDLDMVVLECYAKELSKIEWFLEQQARQHNPVHLHILKSVSGIGRILALTIIYEIGDIHRFESVQKFASYARLVKCKAESAGKSYGTQGNKIGNAHLKWAFSEAAVLYLRGNKKAQNYLQTLQKRMTKAKALSVLAHKLGRCVYFMMKNEKVFDESQFLKG

SEQ ID NO: 448496 - protein, 342 aa, unidentified
MPLPQNLIGVDMAADSFTMTPYNSVTTLYAKAQTFDNQPEGLDKLQTYLQEHGMDSSNTIFCLEATGVYVEPLSYFLVAKGYRVAIEAPHKTKRAFYPLGQKTDPLDSRQIAEYAHRFFDQLPFWKPSEALVEQIRVLLATREQFTEQRTANQNALQAIRRKVVKTPPAEKAFKATIDHLQKQIQQIDKEMKDRISGHPTFGPSVALLTTIPGVATLLAAHMLTLSDGFTKPLIARHIASHLGISPLACESGTSVKKKPKSRRGGPPRLRKLLYLAAMSLRTHQPQFKHYYLRKRDQGKVGKLVLNNIENRLLKIMCAVLRTRTPYIAGYKSVHPTLYAKAA

SEQ ID NO: 448497 - protein, 343 aa, unidentified
MKLQVLGIDLGKTVFHLVGLDSTGRVVIRKRCSRTQLLAFTANLQVQLIGMEACSGAHFLGRALRAQGHEVRLMPAQYVKPYVQTNKSDYLDAEAIAEAVQRPRMRFVPIKTAEQLDLQALHRVRERWVMRRTAVVNQIRSLLLERGLTLPKGRSHLDEQLPRILEDAELNLSDSFRVLLAQLKLELEQLAARIEEMDRVIQKTARENEACQRLTEIPGVGPVTATALIAAVGNASAFGKGRKLSAWMGIVPGEYSTGGKQKLLGISKRGNKYLRRLFVQGARSVLQQRHKQAPRLSEWLAQLLARTHQNVVVVALANKLVRMAWAVLCKNQRYHAPVLAITT

SEQ ID NO: 448498 - protein, 367 aa, unidentified
MKKISTRAAAQGRNISQQKLTIGLDLGDRNSWYCVVDEAGQIQLEQRVRTTAKALQEVFGTMPRSRIALEIGTHSPWISRMLSDLGHEVIVANARKVRLIGESRKKDDRLDAQTLARLARIDPELLYPVKHRSAQAQADLTVIRARAGLVRARTGLVNSARGLAKSYGERLRGCNVRNMNPEKAEGLSPELQAALEPLLDAIESLSERIVEYNERIENLAQQDYPQVALLKQVKGVGTLIALTYLLTLEDPHRFQKSRDVGCYLGLQPGRRNSGRSEPQLHISKEGDPYLRTLLVQGAQHILGPFGIDCDLRRWGLRLAERGGKSGKKRAIVATARKLAVLLHHLWVSGEAYEPLHNSSRTTVAAAA

SEQ ID NO: 448499 - protein, 440 aa, unidentified
MAVRVKEQEIFPNAAGIDVGASSHWVAVPAGSSDEPVREFGAMTDDLNAMATWLIACGVDTVALESTGVYWIPVFEVLEQRGLKVWLVDARQMKYVPGRKSDVQDCQWLQKLMSLGFLRAAFRPDTEVRELRAVARQRDILLTEQASWVQRMQKTLVQMNIQLTEVLSDVMGLTGGLIIRDIVAGERDPKALARHRHSRVKASEEEIIKALTGNWREEHLFVLRQSLGMYDDIARHLAECDTKLQAGLKNLGEKNVDVGKPPRFGSKQRKDYDARQLLANWAGVNLTRINGLGVTAVTKILTEIGPDLSRFSTVKHFCSWLGLSPGTKISGGKVLSSKTKRSVNRVRQVLKMAAMSLSRCDSALGAFYRRLCARMDKPSANTAVAHKLARMVYFMLTRGEEFVDQGQQRYEEQQHTRSVAALKRRALALGFQVIPVAVAA

SEQ ID NO: 448500 - protein, 315 aa, unidentified
MEDSQVFVGIDVSKSCLDLASRPTGEVWQVPNDAEGISALAQQLTGMSPSLVVLEATGGLEWALTAELAAAGLPVAVVNPRHVRDFARASGILAKTDALDAQVLAHFGQAMEPEPRPLPDAEAQELQAMVGRRRQLVEMITAEKNRRRTVIARIRPQVDEHIRWLEKSLADLDQDLDGFIRSSPVWRTKERVIRSVPGVGPVLSATLLANLPELGELSRGQIAALAGVAPFNRDSGMLKGKRTVWGGRRRVRAALYMSALVASRYNPVIKEFYQRLCSMGKPKKVALTACMRKLLVILNSMVKHGREWQPNLGTP

SEQ ID NO: 448501 - protein, 394 aa, unidentified
MKLVGIDVGKNSHHFCVMDKETGEFNVTPTSFSNNKEGFDFLINSLKPYSKKSILIGMEDTGHYHVALLKFLLSNGYTVALINPKTTDLTRKMEGGITKNDKLDTITICDVLDTPERKKQYRITKVDRFDLYEQRQLTRHHHNLKEELNIYCNRLQKSIDLVFPEFNTLFSSKYGVIYMNLLKTFGSAEAIASTDIRTIRKCFEIKGRGGRISLTPEKLKECAKNSIGISSEVETIQIKHLVNQITLIKEQIAEIDKKIEEFSITNNSPILSIPGISHFSGTSILAELGDIGNYSKPSQIIKFAGVAPYHYESSQYNAQHTGITKKGSKYLRKTLYQIILPVIKYNPVFKKYYLLKISQGKGHRCAQGHCIRKLLRIIYHLLETGQSFDPALLR

SEQ ID NO: 448502 - protein, 389 aa, unidentified
MKPDSQMTLDRHFRQCVGIDVSKDKFTACLQMYDRASDVGCHTMSIDFDNTKSGFNQFVKWSRKEAVKGFPLTYLMEPTGVYYEPLAYHLHKIGQTVYVVLPNKARSFCEAEGIKTKTDAMDARCLALMGCTSRKLKPWSPPAPIYRELRQMTRFHTDLSQIMTSVMNRMESLNHMEEADKTVRKNCQKLIDEIDTLMENNDKAIMQKITEDKELEARVKRIAKTKGLGVTTVVCIVAETEGFHLIENRKQLTSYAGLDVRAKQSGREDPKHAISKKGNAHIRAALYMPALVAVRYNPQIKTVYGRICQKHPKQKKIGVTAAMRRLLLLIYTLWKNGEEYDPMRDKTHTHQKKMKEEDTELEYEPEDCIGPKRDPADWNATDEHGNPPF

SEQ ID NO: 448503 - protein, 492 aa, unidentified
MKKSKAKQSVYRNQNSLIRALFERAGNSRKVLCVALDYAKRKHVALICEGNGDVLKSSFPVENNAAGIEHLLEEISATARHRKIPADQVFLGGEDEAAYVANFTQALRLKGYLVVRVNAYEAKENRENLLASTDGLDLLGIAKTLLSRRARVTGDAANANPAYRHIRDLSRCRRTLVRQQTAASNRIHALAEQLFPGFLNGSKSALTPFTEASLELMRERFSAPEIARRKPAALGNLLRRHRVHHPDQTAAEIILLAREALPPAAARVASLQRTLAATVDLYACLRRNALELRSEAALLLATTPYVMLTSIPGIGFVLAAGLAGELGEPSSLSRLDSLCAYAGIVPRTFQSGGPDSPAIQGHASPRCNRILKDWTVQSAQKIHLYGPPELKDRITRWNAEGRHGLFAGARHNLRLASALVKNEIPYLAPEGRGRHATPAQIETATQATWAILLKKWRTISGGPDLILDQAHPLGYWRNLMLEIHGIDLPGRP

SEQ ID NO: 448504 - protein, 378 aa, unidentified
MYGATHRGEPTVPNANSTHQGRIHLGLDVAKNSVAVAILRPDEVEPDTEKIAHDEVSIRRLIARFDDPRQLVACYEAGPTGYDLHRLLTSIGVRTDVVAPSLIPKAPGDRVKTDRRDSRRLARLHRAGELVAIRVPTIAEEGIRDLCRARQVVVEDRRRARQRLGSFLLRHNEIYRDATAWTAKHEEWIKSLHFADQATKSAFSFYRAAVAERDVTLSAITAELAPYFDRSPFADPVHRLAAYRGIDNLGALTIVCEVCDFRRFAHAGAFMGFSGLVPSEYSSGASVSRGHITHAGNVHVRTQLIESAWAYQHGPARGVTIARRQKGLSPETIERSWRAQVRLCSRFRRLGARKDSRNTVVTAIARELAGFVYAEMTA

SEQ ID NO: 448505 - protein, 408 aa, unidentified
MKKQKPKANTVQVDHRNIVGIDIGKRKHAATAVTPKGAVIASLRSFDNNKAGVDLLERQVLIPATGKSKPRIAMEATGQYWNALHDELQRRGYPCVVLNPIQTGNRGNKRIRKTKTDPADSALIARTILAGDAQATLVPDESIFELRLLVRHRWRMIRVHGVVLRYAIGLLDRVFPECDGIFCKPFLASMRELAREVGLTPKVLVANKTKAMKTLVKASRKRLTEETINELLKRAEQSIGTRQGDDVVNAQFRMAADYLDFVESQVQTINKALKERMAAMNSPLMSLGIGAEVAATILAESGDITRFPGPGEYAAFCGLDPSVHDSGDSVRARSRISKRGSPLLRWALYMSAPTMVTKHRDFAKIYERHLNQKRGHRFSMIAVAHKLARVIWRLFKDGRSFTKRPPKR

SEQ ID NO: 448506 - protein, 436 aa, unidentified
MSKSQNPTKEVIPIMKKRIYRRMPVNDFQPDSISHADLGGKLVFAIDVAKVDMVAALAAADGRVLHTICWKAPDQNPAVLSILRGFRTAGITVETVMEPSGTYGDVLRHQLEQDTFPVFVVSGKRTHDAKEIFDGVPSLHDAKAAAIIARLHVDGLSTRLHAEVPERRQLRAALAIMDLHQERYLQLVHRLESWLARHWPELPTLLDLTSSSLMALLARIGGPTDVAAAPDQAIKLLRGISHRLIADDDVAAIVASASTSVGVPMVGLERDALMAIADDAYRAHRAFTTAKTKVAELAATTPAAALAPVVGHTTAAAVFAEVGDARSYPCTRAFLKAMGLNLKEKSSGTVHGQIKITKRGPSRVRQLLWLAVFRWIQKDPVANAWYQRKKQRDGGRASRAAVALMRKLAKGLYHVGRGGTFDSSKLFDTRRLQVTT

SEQ ID NO: 448507 - protein, 418 aa, unidentified
MTRRDDSRIIRIVHPICCGLDVHKESVSACVIFPDDKGEEQCDVKVFGTFTDDLMRLRDWLAAHNCPVVAMESTGVYWRPVHNVLEDSVQVVLVNARDMHNVPGRKTDIGDSRWIAGLLRHGLLKSSFIPPQDVRQWRDLTRLRKKYVHTVGDYRKRTHKLFESANIKIDSVVSDLFGVTGRNLMQLLVADRKLTLSDIQTCVRGKLKGKEAELYRSIQGFFTDHHRFVLKMILETIATLEAQIEALDLQIRCAMKEHEALLDRMKQAPGIADVASREILAEIGPTLDSFRKDTALVAWSGLCPGNNESAGKRKSGKSPVRKHHLKTIMIEVAWAAIKKKDSYFKDKYYRLKARRGAKRAIAAIAHRILLGIYHVIKDGADFRDLGGDYLTLRNKSQKVFHLRKQALAMGFDLVPQTV

SEQ ID NO: 448508 - protein, 312 aa, unidentified
MFEGKVVHEEETANHQNAIISLIRHLEKDYGIDGSRMLICAEHTGQYTFPLACACKAAECKLWLENPAEIKYSSGIQRGKNDKVDAKRIAVYASRFQDKVQYYERPSEDIERLKQLESERSLYVTDLAKYKGQLKDQREYMPTALYERKVKRLTALMENLEQAIQAITNEMDEVITSCPVLFRQMELLMSIDGVGRVVATNMIITTEAFTRFDDPRKFNCYAGVAPFSYSSGTSQQSKARVSHRADKVMKRLLHMAAIAVTHRNGGELKKYYDRKVAEGKNKMSVINALRAKIVARMFAVIKRNELYKPILS

SEQ ID NO: 448509 - protein, 367 aa, unidentified
MLYLGIDQHKSQLTVNVRGEDGSEILKRQVSTRWEKVRAFFTDFSERAQPEGGFLAILEVCGMNPWLLAMLKEYACREIVVIQPRERSKQKTDRRDAGKLSHLLWVHRQQLLEAKHPFGLRRVQPPTAEEADDRQLTALRARLTKKRTAVLNGIHKVLRKHNLEQTCPTKVFQTKKVRRWLAEMELPPVDRLEMNLLLPQWELLDAQLEAVEARIAKRAEADEKAKLLQSMPGMGHYSALAIASRIGDVERFKRPDSLANYFGLTPGCRNSGEATQRLGSITKQGSRIVRYLLGQAVVKVLRFDGVMRAWFKGIKKRRGAKIARVAVMRRLATILWHMLKRKQKYRYDPPIKKHEEFVAFEGAMEGA

SEQ ID NO: 448510 - protein, 349 aa, unidentified
MRTFTPPAGTRFYAGVDLHARALFLVVLDQDGRVVVARNLPAAPEPFLRAVAPFRDGLLVACECMHCWYWLADACRDHHINFVLGHAWGMKAVHGCKTKCDRKDAEAIARLLKGGNFPPAYAYPRERRGLRDLLRARLRLVRQRAELYGHVHTARRQANLPPVSNDVKYKCKRAGCTADIADPFVRRRVETHLALLEPLDTTIRRLEAEIEDAAQQIFPTELAVLQSTPGVGPVLSLTILLEIDTIDRFDTRQQFCSYGRLCGAVQSSDNKRTGEGNRKAGNAWLKWAFSEAAVLSAQKDERIGGLLNRLAAKLGKAKGYSALAHKLGRAFYHMLHTREVFDVNRFVRH

SEQ ID NO: 448511 - protein, 406 aa, unidentified
MQVFIGVDPHKRSATIEVLDEHETVLATGRFPTDKAGYAAMRKTVAGWSDRAWAVEGSGGAGRPLAQRLLADGEHVVDVPAKLSARVRLFDTGHNRKTDAHDAHAVAVVAVRTPGLRVLAYDVELEALRMLADRREELTRHRVQTINRLHRLLSELTPGKAKKDLTALQAKAILAGVRPRDLAGKTRRRLAAELLADLVAVDKKIKASTKELKAMVAASGSSLMDLPGVGPVVAARVLADVGDVARFADRNRFASWTGTAPLDASSGEQIRHRLSRAGNRKVNHMLHIAAISQIRCDTPGRAYYRRKIAAGKTPLEALRCLKRRISDAVYRQLLADARRAEHSNQAGAGGTGPGGHCRASLTSSAADSHLLIDTSDQPLPDPPQRRYADPAPPRKRHLAPPLKSTG

SEQ ID NO: 448512 - protein, 344 aa, unidentified
MNNMHYIGFDIHKKMISFCEKMMDGSIVNQGVIRATRKSLNEWLEERKKPWVGAMEATLFTGWIYDFLLPHAEELKVAHPAMLKAITAAKKKNDAADAEKIADLLRCNLLPECYMAPEEHRNLRRILRYRNLLVREASKMKTKTATLLMEVGAEYNKRRLHGRKYFQELLDNLDYVPRSVLNLLQMSHDSVSFFDTLQKTLVRALRNDPQIRKRVELLMSIRGIGEVTALTWVLEIGDVHRFGRIRQVVSYCGLCSAQKESAGKESRGPLSKQRNKHLQTVLIEAAKLAPQWNPQLAVIHEREIGKGNRNRATLAVARKLVAYMMAVDKNQKKFIPQEVLEKAA

SEQ ID NO: 448513 - protein, 313 aa, unidentified
MIITLRCVGIDVSKHHLDIFDEGIGVSERVANAPHAITELVARWRCDALVVFEATGVYDLELRAALRAADIRFARINPARARDFARASGQLAKTDPIDARMLAAFARAMQPATEQVSTPARNALARLAKRRDQLVLMRAQEKNRRSEAGDRAMVERICRLIEVLDHEIAEIEADISALIKAEPEISDDAQLMRSLPGVGPVACMQLIAQMPELGHVGPKQAAALAGLAPFNVDSGAYRGKRKIGGGRKRVRNALYMAALNAVRRADRFKAFYAKLRQAGKPAKLALMAVARKLLTILNAIMRDRKAYMPAQQI

SEQ ID NO: 448514 - protein, 330 aa, unidentified
MEKVLQFVGADLSKKSIDLVINQTKHHLCIENSTTGFKQLIKWLRLCTKDLSDIILVMEHTGLYSYCFEKFLFEKGIHFAKVNPVEIKYSIGVVRGKSDKVDAARIAKYGAEKQNRLQIQTQISKALDDLKMLNTSRDKLVRTRASLKTSVEEFRNIGMGDREPALRAQLKIIKSLDKEIKLLDDQIQITINQESELKKTYTLLTSITGVGTVIATNVIVKTGNFKRFSNSRKFACYSGIAPFEHTSGTSIRGKTRVSHMADKSMKTLLDLAAKTAIRCDPEIRAFFDKRTANGKPKMSTINIIRNKVVGRMFAVIKRQTPYVMRLIEAA

SEQ ID NO: 448515 - protein, 355 aa, unidentified
MNSIKYVGLDVHRDTISVAVLNAEGKLVMQSVIATHATTVLDFLHGLRGTLYITFEEGTHSAWLYDLLVRRVAHLVVCNPRKNALLKAGSKSDSIDARKLAELLRAGLLSPVYHGQNSTAAVKHLGSSYAALTEDTTRIMGRLKALYRGQAIACAGQKPYGTRHRDEWLAQLTDSGLQRRARRLYQELDLLQQLRREARRDLILECRKHSEAKLLRTVPWLGPIRVALLIGRVQTPHRFRTKRLLWSYSGLGLETHSSADYGFKDGRLQRSRKNISVRGLNRNHNHDLKNLFKSTAISASTRKGPLQEYYAGLLAKGITPAMARLTLARKIAAISLRLWKKGEPFDPTKLKTQAA

SEQ ID NO: 448516 - protein, 337 aa, unidentified
MEYFAGLDVSMEETHVSVVDRDGKVILEARTPTAPKTIAAALAKGPAVERVLFETGRMAPMLFHGLTALGLPVVCVESRQAYQALRSLAAHKTDRNDARGLAHLARTGFFKPVHVKSLPSHAVRALLIARKKLVGQRVTLENQIRGLAVAFGVRLPRGLSSGFAEKAMAAGCGIPGLDGAMRGLLAARDAILKAIVAINTDMKSLERSSSACRRLMTIPGVGRLTALAFAAAIDDPDRFRRSRDVGAYLGLVPRRYQSGEIDYTGSISKCGDARLRTLLYEAANVMLTRYRGSLALKTWALDIARRSTMRKARVALARRLAVIMFAMLKHGAEFEPA

SEQ ID NO: 448517 - protein, 344 aa, unidentified
MTIVEDPCVITGGVDTHADTHVAAALDSLGGLLGVREFPATAAGYADLLGWLGGFGTVALVGVEGTGSYGAGLARHLAAAGIRVVEVDRADRQDRHRQGKSDPLDAVSAARAALSGRAAGVPKGRDGAVEAIRALMVAKRSARAERTQAINQARALILTGPDELRARFAGQRAAALAEAVAALRPRPGDAADYSLRVALRELGRRVEFLDAQIGRLDDLIIPLVTARAPGLLSLYGVGPDTAALLLIAAGDRPERLRSEAAWAHMCAGAPIPASSGKTRRHRLNRGGNREANHALWRIVITRMSAHPATRAYLERRTAEGLSKKEIIRCLKRYVAREVYPYVRG

SEQ ID NO: 448518 - protein, 337 aa, unidentified
MNYTGMDLAGKSSALCIMTKDGDILSEFGVSTTPDAICKALDPDRIGLLRVAMEACGISHWVSDVVEELGHEVVVVDPRSCKAIASSKRKNDRLDARTLAHVLRSNFYTETYRKGDQSRLWRAELAVRGKLVSMRTGLGNQVKGILRSWNIKIHGTGWAHYEERALSSDLPEALLPLIVPLLRLIETLNEKIKEMDRSLETKTRKNQTARLLMTAPGVGPVTALSYVATIEDPSRFKKSRQVGSYLGLVPSLYQSGEICHQGRITKHGDAMLRSYLVEAAHIILSNTKKWSWLKTWGLRVQKRSGPQKARIAVARRLAVVLHRMWVTQKPFEYSMVQ

SEQ ID NO: 448519 - protein, 399 aa, unidentified
MFAVGIDISKSKSVAAILNQDGSMHTSPFEFHHTQPELDAFIKYILNSNQSATILMENTGHYHYPVLKAFQEAGLPVCIVNAYQIKKFGDMDLRKAKTDKKDAVRIARYALEKSYSLVPYTSMEQKYEDLRFLARQYNQRMLTLKTNKVFLLNLLDETMPGITNILPLTSRTPETSLSVLFINRFKSYDRIKKMGKNRFLDAFEKIARKSRNRQTKTYGLAIYEAALRNITTRGENEYILAAQDQCLELVCESQKAADSIILKMQTLAETLPEYAVLRSMAGVGDRLGPLILAEIGDIRRFHSGKALNAYAGNDAPPYQSGTFESHNRHISKRGNAALRKYCFEVMQALKLTQPQDDPVYLFLLKKEQEGKPYNVAKMAGVNKFLRIYYARAMETLKQQ

SEQ ID NO: 448520 - protein, 356 aa, unidentified
MSEGSCVGLDVHARSVVAGVIDLGSGEVRSERVPPGNEGTVAWLRTLPAPVRVVYEAGPTGYGLARGCAEAGISCVVAAPSKIRPAVDRVKTDRRDAERLARLLRLGEVTAVRVPGPEEEAARDLVRAREDARGDLMRARHRLSKLLLRHGAVYEATAWTRAHDAWLRRNRFGGGPLAIVFDECYSRMIDAKSRRDSLDAAIAELAASEPYVDVVERLVCLRGVSTLTAFALTVELGDWHRFRPESLAPFLGLTPSENSSGERRRQGGITKTGNTHARRLLIEAAWHQRSAPRLSVTLERRRTGKSLAVRAQADSSARRLHGRWNALEARGKPRLIVVVAVARELAGHCWALATME

SEQ ID NO: 448521 - protein, 339 aa, unidentified
MKITTIGLDIAKSIFHLYAVNKMGRYVKKKQLKRQQLLPYLARLEPCVIAMEACGGANYWAREIEGLGHEVKLIAPQYVKPYVKGNKNDYNDAEAIAEAAQRPTMRFVPIKSVEQQDIQNLHRQRERIKKARTALVNQVRGLLAEYGIVINKGVAAVRKGLPDILEDAENGLTMRSRELFADLLEELRLLDERFKQSEKQIEASNRGNEVCQRLDEILGVGPITASAAYAAAGDGKDFVNGRHFSAWIGLVPGQHSTGGKPTLLGISKRGNAYLRTLFIHGARAVLRHSATKTDRFSVWAQALLERRGHNKACVAVANKMARMAWVIMARGETYRPAMS

SEQ ID NO: 448522 - protein, 387 aa, unidentified
MSDVDDLSRSLTAFDQDSTLIAVIEMSLTSFLLAGIVPGVGRAPLKKLGADEAGVVRQLHRWRDEATKAGRKIKRIVVAFEAGRDGFWLARWLRSRGIEAYVIHAASVAVPREHKRAKTDRLDTEMLKRAFLGWLRGEPEHCQMAAIPTLAEEDARRPSRERDCLVRERTRIVNRVKGALARWGVRGFNPKLRKAAQRLDSLITPEGEKLPPNTLAELRRELARLTLLREQIKTIELTRLQRLQQQTPLTGPHAMIRLLARIIGVGIETADMLVHEILARKLRDQRALARYAGLTGSPDESGSRRREKGLARAGNSRVRRGMIQLAWRFLRFQGDSALAKWYHARTKTAPNTRKTMIVALARKLLIVLWRFATRGVIPDGVALHPAT

SEQ ID NO: 448523 - protein, 349 aa, unidentified
MGALAVITIGIDPHKASLTAVAIDPSGTPLGRRRLLVHAGTLKQLTAWAAGWPARRFAVEGAFGLGRPIAQQLAAAGEQVLDVPATLAARARLLGTGGGRKSDAADAASVAQVALHCATLRTVTAEDQTTILRLLIERRDDLTGERTRILNRLHGLLRDLIPGGAPTNLSAAKAAALLRGVRPGTATAACRRQLARDLLGDLRRVDARLTDNKAQVRDALAVTGSTLTQVHGLGVVVAAKLLGHVGDIGRFPSQDHFASYTATAPLDASSGNQQRHRLNTGGNRQLNAALHTIAVCQARDPGPGRRYYLRKLSESKTPAEARRALKRRLANVIYRRILADQHRHQPACG

SEQ ID NO: 448524 - protein, 520 aa, unidentified
MPRRPRTRAAHSRKTFVLLKPSGELTPRVKAVGPEHFGIVAIDCAKARSRYLLADFFGQLLLPPTPLPHRQGDFRAAIDRIRQAMRQHDLRDVVVAIERTGEYHRPVQHAFRQAHFETRLVHPFTSKQYRQPADPDNKTDDADLAAIFRATTQGFGLAEPAWPDDYVTLHLLCRHRRDLVSKSTILRCQIREVLHAAMPGYAECFADPWDLPAALVLARHTTSAEAVRQAGLRGLQQLAAQAHIVCQQATLHKVMAWAEQAPPGHPQPLELRRILQALDDDRLAKTQEIRRLEGALAHRVVRTPYALLLVIPGINVVTIADLAGELGPIQCYLNANAITGRAGLMPSRYQSDLVDCHGPLRHRGHRRLRAVLMQTADNLVHCNHYFRARAEHWRRLGKDPRWLRVKVAKVFTRLAFALVGGRQLFPHPCRQSDHYLLGKLLAFHLEHRTDPAQVRQDLEAAVQQLPAKARADEAKPLQAYLDELAKRRRGPQPLADIIPVVLARLQGMMVQSTNGEGAGP

SEQ ID NO: 448525 - protein, 341 aa, unidentified
MEVSVLGIDLGKNSCSVVGLDGAGRVVVRRRMRRETVITFAAALKPCVVAMEACCGAHHMGRALAAHGHTVRLMSPEYVRPYVKAQKNDDRDAEAIAEAATRPTMRFVELKSQEQLDMQTLHRIRDQLVGERTSLMNQIRSLLLERGHIVPQGRAKLAVRLGEMLEAEEPILGFRIHRLVTDMRARWIALDERIADLDAEFAQAARTDERTQRLLTIPGIGALNATALVAAVGDARTFARGRDLAAWLGLVPRQATTGGKPRLLGITKRGSRYLRKILIQGARSSLPTMSKSDTRLGAWVRGLLSRAHQNTVVVALAAKMARIVWALLRHGRTYEPTVLAA

SEQ ID NO: 448526 - protein, 329 aa, unidentified
MEEILIIGVDVSKSTLDIFVKPAGLTSHIENNESGFKKWYQELQRINQSCSKPLVVMEHTGQYSYRFEAFLRTQGIGYCKMAALEIKRSLGMIRGKNDKVDAKRIAEYAWLRKDILLADPFCSEKTQRLKRLLSLRAIIVKDRAGYIVRLKEMKAAGVCTKIDLEGRLQQQLIGFLTTKIKLLETEIRTLITEDEAMKKTCQLLRTIKGVGWIIAAYMIGYTENFTRFTNARKFNCYAGLAPFAHESGSSIKGKARVSHLANKEAKTLLNLAASSAIRYNEEMRTYYQRRVQEGKRKMSCLNIIRSKIVARMFAVIKRQTPYQERPLAA

SEQ ID NO: 448527 - protein, 413 aa, unidentified
MDVLHPRCCGLDVHKSSISACILLREAGRVQKHQRRFGAMTQELQELAEWLRQFGVSQVAMESSGVYWKPVWNILEGQFTVVLANAQHIKNVPGRKTDQKDAEWIAQLLQYGLLRPSYVPCEIIRDLRDLTRMRASLSQEASRISSRIQKVLEDANVKLASVATNVLGKSGRAMLEDIISGEDDPEHLASLALGHLRVKIPQLRLALEGKVRSHHRFLLRRLVDQIQFVEHEIGLLDERLEEIAQQRPELSQAVARWDTIPGIDRVAAWALLAEIGDNMAQFPTAGHLASWAALCPGNHESAGKRLRGTTRQGSPWLCRMACQCAWAAARTKNTYLTSQFRRLAARRGKKRAIIAVAHTIIVIGYHLQKNQSNYEDLGGNYFDRIHSDGLKRYLVKRLQQLGHKVTLEPMEAA

SEQ ID NO: 448528 - protein, 343 aa, unidentified
MWYVGLDVHTRVSSFCVLDEHGRKLFSRTVHGSYSKVVQAMESVKQPFSVCFEASTGYGWLYERLSELAQRVMVAHPGQLRLIFRSKRKNDPIDAGRLAKLLYLDEVPPVHVPDGRVRAWRGLINLRSKLVVRRTAVKNRIRALLRSQAIKAPRSLWSKAGLKWLSELSWPSDFEALSRDLFLEELRSAQQAIVRVEKVLRAEADRRPAVQLLMTVPGVGIRTAEAVVAHMDGADRFGRNSAVGAYFGLVPCLDSSAGKDRLGHITRQGPAVARRLLAEAAWQSVRRSPSMRAFFEQVMDGQAKRKKIAIVACAHKLIRCMHAMLRDNRPWQETLEEATLCAA

SEQ ID NO: 448529 - protein, 425 aa, unidentified
MNCKQNQKINQVKESTLVVGIDIGSTTQYARAFDWRGIELGKVFKFSNSREGFESFKNWMRWIQDKNKKSDVIVGIEPTGHYWFDLGAYLEDESLLLVMVNPYAVKQTKELDDNSQSKNDNKDPKVIAKLVIEGRYSAPYTPDGVYADLRIMASNRKRLIRELTQIKNRFARWFAIYFPEYSDVFGDYESQSSMLLLKTVCTPEAIVELGAEKINQIWRDAKLRAVGMKRATTLCETAKRSIGLKKGSSAAEYEMKLLLQDYDYKKAQLESVMDEIESLCKKIPESEQMLAIKGIGIITVAGFLAEVGDARRFESPRQIQKLAGLSLRENSSGKHKGQTTISKRGRSKLRAVLFNAAIPLIATNPEFRALHEYYTTRANNPLKKKQSVIAISCKLIRIFYAILTKGVSYDAQKMMSDIHRQSVAA

SEQ ID NO: 448530 - protein, 358 aa, unidentified
MNFYTQQHKHSCGIDLHAKAMYVGILDQHGAKLVHKNLPTTPEAFLRLIAPYREDVVVAVEGMFTWSWLADLCQQEGMAFVLGHALYMKAIHGGKAKNDTIDAHKIAVLLRGGMLPQAYVYPAEMRATRDLLRRRCHLVHKRGELLAHIHNTNSQYNLTEMGKKLTYKANRAGVADHFSDPSVRKTIEMDVSLIDHYDKLLGDVELYITRTAKLHDVQTFTRLQSVPGIGQILALVILYEIQDITRFPRVQAFVSYCRLVKCAKESNGKRVGTSGKKIGNVHLRWAFAEAAVLFIRQSQPGKEYFAKLEHKHGKAKALTVLAHKLGRAVYYMLTREQAFDLQRFVAASPLRGEPEPTV

SEQ ID NO: 448531 - protein, 342 aa, unidentified
MNYYAGIDVSLELSSICVVDAAGQIVREAKVASEPEAFVGFLTRLGLPLTRIGLEAGPLSQWLYAGLATAGQAVVLLETRHVKAALSAMIVKTDRRDARGIAQLLRMGWFRPVHCKSPPAQEVRALLVARKQLQAKMRDVEFSLRGLLRGFGLKVGEISKGQYAARVRMLVAGHTMLERIAEAMLRARETLQTEFAKLHRAMLTIVRSDEVCRRLMTVPGIGALIAVTFTSAVDQPGRFSRSQAVGAHFGLTPRKYQSGETDITGAVSRVGDPMVRTALYEGAHIMLTRAVRFSALKHWALQVAKRRGMRRAKVALARKLAVILHRIWVDGSTFRWGREATA

SEQ ID NO: 448532 - protein, 391 aa, unidentified
MNKAWVGVDAGKEFHWAHVLDTSGRELLSRRVENDEAELLKLIDDVLSLAEELMWALDQPGGGAALLLALLWERNQRVFYVPGLTVDRARDAYRGESKTDARDAHVIADQARMREDLGELEPGEQELAELQLLLARRRDLVTDQGRTITRLREALLSLFPALERALDLNSKGPLSLLTHYQSPTHLKRAGHKRIASYLRNRGVKGSNKLGQKALSAARSQSVSLPAQEVASRIVAELAKDILGLKQRIESIDEELQKRFFARPEARILISLPGMGPILGAEFLVCVGDVSAFESADRLAAYAGLVPAARDSGKRVGNNKRMRGGNKILKRVFYQSAFSSLRSTPESRAFYDRKRAEGKRHTQALIALARRRVNVLWAMLRDGTTFESRSAA

SEQ ID NO: 448533 - protein, 392 aa, unidentified
MKYIGIDLHKKTIVLCVMNKERQVVQRQKFFCAETDRISEYFRGLGEFSFAVEATGTYEWLANLLSPLAQSWVLVNPSRFEIIAKSAQKTDRHDAHNLAEFLALGMLPKAYYPPARVREHRLLVRYRVQCRRRVSHLICRIRQVAARYNADRKDLLDSEVMEAFQQRADLSEADRFVLKRLLIEHRHALEYLEEAAAELSRFAKQASPAEKREREILQSAPGVGPIVTDVVLAELGEVSRFPSIKDVSAYAGLVPKLDESGDKAKQLKITKAGSRLLRWGMVQAAWQAVRTSDRWRGVFESIKRRRGAKRAIIAVARRLLGVLVSMLKQGKEYRWSLAELKYREGQQEKRRQRRIMKRQAAATKQATKSEVAPVQEEKPKRTRRTKKETVMA

SEQ ID NO: 448534 - protein, 467 aa, unidentified
MTPPKDFCLDPGPPAPTPTFPPSPVLSDALQICHPHAAGIDIGEAEHWVAVPPGCDPQPVRRFGTFTVDLDALADWLIDCGVTTVAMESTGVYWIPLFELLEARGVQVLLIDPRQAKRAPGRPKTDRLDCKWLQRLHAYGLLAGAFRPEDQVCVLRSYLRHRQMLLTSAAQHIQHMQKALQQMNLKLTQVVSDITGVTGMAILKAILAGERDPVILAKLRNSHCQHREDEIAKALQGTWRAEHLFALQQAVALYDFYHQQLALCDRQIKAHLETFADKSAGQPLPPKARRHKKTNEPRFDARTPLYRLAGVDLTTIEGIEENTALIILSEIGTDMHRWPSVKHFCSWLGLCPQHQISGGKVLSRRVRPGAHRVTVALRLAARTLHHSQSALGAFFRRMKARLGTPKAITATAHKLARLVYSLLQHGSAYVQQGLDAYEAQYRERKVTTMAKQAKALGYTLVPLAAQG

SEQ ID NO: 448535 - protein, 334 aa, unidentified
MSIVSTVGIDLAKNVFSVHGVDAGGVVLIRRTVARAKLTQLIAQLAPCLIGMEACSGAHEWARRFAAFGHSVKLMAPKFVAPYRKGGKNDGNDAEAICEAVARPSMRFVPIKSIEQQSDLTLHRVRQGFVEERTAMLNRIRGLLAEFGHVLPLRAAEVRRRVPELLEKLPTRVANCVRDLLEHAVRLEAKALEYEREIRAHVRTNALAQRAQTRLGIGPITASALVATVGNAHDFKNGRQFAAWLGLVPRQYSTGGKTRLGHITKRGDPYLRTLLVMGARAVLQGALRLNDPLSRWALALQQRRGYHRACIAIAAKNARIAWALLAKDTVIAAA

SEQ ID NO: 448536 - protein, 387 aa, unidentified
MPQPNDMSRSLATFDHDRTLIAVIEMSQSSWLVAGMIPGVERQPAKKLTPDEGGLLRLLHRWRGEAQKAGRTIDRIAVAYEAGRDGFWLARLLRAQGIEAHVIHPNSIAVSREHRRAKTDRLDTALLKRAFLGWLRGEREHCSMAAVPSLEEEDGKRPSRERENLVGERTRIGNRVKSTLARLGIRGFKPTLRTAAERLERLRTPEGEPVPPHTLAELRREMARLRLVAEQIREIETARLERLERQPNRGAHPMIRLLAQVRGLGIETADMLAREAFSRRLRDRRAVARYGGLTGAPDESGARRREKGLAKAGNARVRRGMIQLAWRFLRFQKDSALAQWYRARTADARGATRKALIIALARKLLVALWRLVTTGEVPHGVVLRPAS

SEQ ID NO: 448537 - protein, 373 aa, unidentified
MPEAVIGLDVGKSSHWACVATRDGEVLLSAPVANREDDLDSLFGRFPDALVVVDQSRNIGALALARARAAGMSAAYLPGLAAHGAARLFAGDAKTDERDAMVIAKTALGIPDALLPVGDPGPTIAAARALAAQRNFLTCENTRNKNRLRSILLESCPAFEALVDLSDGPQLRLMASLGGAWSVADAGPRRAAALTRGAARGKIEALVRSTTSSTRPDASVVAAEDRAVKLLARRISENSAEISALLEGDDTYRCLLTVPGIGPKTASELAISIDIEDFPSHDRLASYCGLAPRNRQSGTSISSVTASRQGNKRLKNLLIFSCNCLTRTEGRWGDYYTRCRERGMSHGKALKTLARKRLKVIYAVMRDRVPYAA

SEQ ID NO: 448538 - protein, 323 aa, unidentified
MQGKDMPVSDAMSAVYVGVDVCKDWLDVHVHPQGLRLRVGNDRLGLRRLKKTLAGLPVARVVMEATGKYHRAAQRSLHAAGLAVAVVDPRRARLLAQAIGQHAKTDAIDARFLATMGAMVDPPAREPPPRLIEHLAELVAARRAATADRAALSNRLTATTIAFLRTELRRMRASTERHIRRLDAAIAQLVESDPDLARRHAILCSIPGIGTVTAATFLAGLSELGQASAKQLAMLVGVAPIANDSGDRTGQRKVRGGRRTVRDAAYMAALSASRYNPALASFAARLKAAGKPAKLVLVAVMRKLVVLANTLIAGNRLWTPNPP

SEQ ID NO: 448539 - protein, 345 aa, unidentified
MQPMYYIGLDVHKQKISYCVKDSAGKIHDEGWIPATRFDLDRWMKRLPQPWNAALEATMFSGWIYDHLKPHAAALKVAHPLMLRAIAAAKKKNDRIDANKICDCLRCDFLPECYMAPTAIRERRRTLRYRNLLVRQMVQMKIKISTLLMEAGVSYNKQKLHKAGYFRELLATNPDIPEGLRPLLRLSREMVVRLGKTESALIHSLQQDRLLAERVERLMSIPAIGPITALTWALEIGEVQRFSSIKKAISYCGLCGDEQRSANSVQRTPISKQRNKHLQTTLIEAAKMAPRYSPTLALLYDRETQKGNANRATLAVARKLVAYLMAVDRGQCRFLVIDQETRTAA

SEQ ID NO: 448540 - protein, 334 aa, unidentified
MKKRYFMGIDVAKATFDFCLLSSAGACLWRGRFCNDARGIERFLVQLRARSWKLSQIHFALEATGVYGKALVAALHRADLAVSVLNPAQVKYFAFSVLRRTKNDTVDAEIIARFCRERKPLATRPLRPIEEQLKVLVHERESRVGEQTRERNRAKKDPFQIELPSLISRQRQQRLKQLAKEIAQLDAAIDSLIASDECLRTQSQLLCSIPGIAELTAAKLLSELAGKEFQSARQLAAYAGLTPAEFRSGYFLYGKTHLSKIGNAFLRKALYLPAAVARRWCKPLKPWIAILESRKLHDLAIRGAIMRKLLHIAFGILKHQKPFNPLLLSFPKTV

SEQ ID NO: 448541 - protein, 320 aa, unidentified
MELTIGIDVGKTGLDVYADGHGVALRFENTADGVALLALQLTRWREEGHSLSRILCEATGGYERGLTEDMAAHGFTVEIVHAVHVRNFARACGQWAKTDRIDAAMIARYGRTMPPRPKVAPPSPAHRDLRAMLARRDSLIAARIAETNRLDKRLPDIMRQSIERHVAWLKQELALLDRSLRRHVEATPVLRHAVGLLTSVPGIGLLTAAIIVAEVPELGKAALPQLAALTGLAPWNRDSGNFRGKRHIKGGRAVPRKALYMAAFASMKHNPQIRAFYQRLTIAGKPHKLALIACARKLLGFLNTVARRNQPWIENPTCQT

SEQ ID NO: 448542 - protein, 341 aa, unidentified
MSIVGAFDVHRRQLTFDYLDIETGEVRRGRIVPADREHLRAWLARFAGRDDVRFAVEGCTGWRYVVEELLAAGIEPHLAEPADTAALRGKKRHAKTDKADAAHLRAHLLAADLPECWIPPAHVLEARAVVRLYKDLLDERGGWHQRIAATMFHQGVPAGSSMDTAAGRAAAAEAQLSPAGRQAVEAGLRQINRLTGELDPLRRQLDLISRRQPGCAALRAAHFGIGAVTAVAIWAELGDVRRFGNSDDVVRHTGLDITVYSSDGKRSAGHLARQGPPLLRWALYEAAKCAARPAAPDYHYYSAVRDRRTGGLATLSVARKLARRCYHTLRGLGDQALTPAA

SEQ ID NO: 448543 - protein, 388 aa, unidentified
MIYVGIDVAKETHYAAIMDSNGVVFAEPFAFSNNADGFKKLTDKLLPFDKNDLLIGLESTGIYSENLIAFLYSNAYPLAVINPIQTSSLRKTSIRKTKTDKIDTFLIIKSLMVNSYHLYSEQDDKSMQLKSLCRYRKNIKKSIARLKTQLNGYINIVFPEYLHFFKSGIHIGTSYAILKLYSSPEEIAALHLTKLSNLLSSSSKGRFGKEEAVALKSLAKSSVGVKNKCINIQISQTINQIELFESQVNEIDDQIISLMQDTDSVITSVPGISYIDGAMILGEIGNINRFSSSSKLTAYAGLDPSVYQSGNFNASHSKMSKRGSKILRFALINASWQLSLHDKTFFDYYNLKRSQGLNHYAALGHCASKLIRVIFKLLKFNIPFSPQY

SEQ ID NO: 448544 - protein, 370 aa, unidentified
MDKVIKFFVGLDVHKDSISIAICEPGREPARFAGTIRHDVPTLLKVLRKYGEAAQVSMVYEAGPTGYGLYRELAAHGYECQVIAPSLTPHRGGDRIKNDRRDCLRLAELSRAGELKAIWIPDAAHEALRNLWRAREDAVNMRLKARQQLKAFLLRQGRVYPGKTAWSRMHLRWLANQRFEQSADQLAFAEYQHAVEDTHARVERLSGALEHSALTEQVASVVAALRALRGIDTVSAIGLVAEIGDIGRFATARQLMGYLGLVPSEHSSGGTVRRGAITKTGNAHARRLLTESAWNYRFAPRVSNELRTRQRALAQPIREHAWKAQVRLCARFQRLRSRGVQANKVCVAVARELAGFVWEIARMAPSIATH

SEQ ID NO: 448545 - protein, 351 aa, unidentified
MLLIGVDYHPSFQAIAFFVEETGEYGEQELNHSDGQAEKFYRDLKQRGISVRLGMEATGYSRWFERLVAELRFELWIGDPAEIKAKRVKKQKFDREDARLLLRLLRENNFPQIWVPDPENRDLRQLLWHRHRLVQMRTRIMNQLHALAMNEGYRWKKKLFSEQGRAQLEKLALGPWTSRRRQELLELLDRLNPTIEELTAAVEREARKRPEAIRLMTHPGVGSLTALAYVLIIGTPTRFQRGKQIGTYVGMIPCEDSSARKQRLGHITKQGSSLLRFLLVEAAQAAARVHPDWRRRYMHLAMRRHKSIAKIAMGRRLAVRLYWMWRNGCEYSPLLEFGSYAGQLGTRNGAK

SEQ ID NO: 448546 - protein, 355 aa, unidentified
MSHKLNSAIAVIGIDIGKNSFHAVGQDKRGEIVLRQKWSRGQVEARLANLSPCLIGMEACVGAHHLSRKLQALGHDARLMPAKYVRPYSKGQKNDFRDAEAIAEAVQRPTMRFVATKTTDQLDLQALHRVRERLVGQRTGIINQIRAFLLERGIAVRQGLRFLRAELPSILANRTDALSPRMLQIIERLADDWHRLDERIEGLSSEITALACQDRGCERLMTVPGIGPIISSAMVAAIGTGDAFSKGRDFGAWLGLVPKQISTGDRTILGSISKRGNRYLRALFVQAAWVVLVKVGPKHWERYGLKSWIETAKKRLHHNVLAIALANKLARIAWAVLHKGRAFECVKTNATPRPA

SEQ ID NO: 448547 - protein, 484 aa, unidentified
MWSEDWPSDAVWKNTHPCSRRLALTFTTPKIMAKKAKKIKTAKGLRLKIVNPDSAGIDIADGEMQVCVPEDRDGDNNRRFGSFTEDLHAICEWLHACRIKTVAMEATGVYWLSLYQLLKEEGFDVVLANPLQVKNLMEEKTDEADAEWLMLLHSYGMVRPSFQPENIVRQIRNITRHRATIINKAGQETQRMQKALEMMNVKLSTVITDILGKTGQSIIRAILAGNHDPVSLSQMTDKHCKASKETVAKSLEGTWDEDLLFMLRQSVECYDFYQGQLRDCDQQIESLLARYVSQIDNEGAKQLERVKKRRSQKNAVAVDMEMYAHMIWGTNVMAIPGMSTNSMLQLVAELGHDFTDKFDTCAKFCKWCNVVPNNKVTGGKLVSSHIPKRKNPVGLVLRVCANSVKAEKSEMGTYFRRMKAKSGHMQAIVATAHKMARILYAMVKNKQAYDPAKVGCDEKELLIRKIERTKRALQRLDDRLRDTG

SEQ ID NO: 448548 - protein, 421 aa, unidentified
MKPQAPEAFAAFVGLDWADAKHDICLQVAGSTRREFLRLEHRPEVIDAWVCTLRTRFNGQPLAVCLELNKGPIVSALQNYDFLVLFPVNPLTVAKYREAFTPSRAKDDPTDAELQVEILLKHRDKLTPLVPQSPTMRALAQLVEHRRRLVGDKVRLTNRLTSALKNYFPHVLQWFQEKDTAIFCDFLSRWPTLKAVQLARRATLESFFRAHHVRSADVITTRIEAIKNAVALTTDEGVIAPNTLLVYALVAQLRVTLQAIADFDTAIAQRAQAHPDFPLFDALPGAGAVFAPRLLVAFGEQRERFTSAEELQKYAGIAPVTERSGKKSWVHWRWQCPTFLRQTFVEWAAESIRHSFWAQVYYQQQRDKGKAHQVAVRALAFKWIRILYRCWQERLPYDESTYLQALHRRGSSLIQNLAKAS

SEQ ID NO: 448549 - protein, 309 aa, unidentified
MIAVGIDVSKELLDLGVHQEAKLQQYKNTPAGIAKLVRDLRRREGVRILVEATGGYEEAVLAACAAGGLWICRVNPRQVRDFAKATGQLAKTDALDARVLAEMMSVLSERLRRHEPTSEWGNELKSWLRRRNQVTEQIIANTQQLAMALPLIARGMKQTLAALRRERTVIDVAMKQLLAAHATPAIGSGKGMGPMFQAALLALLPELGHLDRRQIAKLVGVAPMNRDSGKHQGKRTIYGGRAQMRVALYMATLSAVRWEPELKAHYQQLRARGKLAKVALVACMRKMLGIVNARRRTELRLESLMACAA

SEQ ID NO: 448550 - protein, 342 aa, unidentified
MNHYVGIDVSLEASSVCVVDGNGNIVCEGKVASEPDALITWLKKLKLQLTRIGLEAGPLSQWLYAAMRQAGLAVELLETRHVHNALKTMPVKTDRNDARGIAQLMRLGWFRPVHCKSIAAQETRALLTARKLVQVKLHDIELSLRGILRGFGLKVGPTTPARFEARIRELVTGHPSLEAIAESLLAVRVTLRREFEHFEKQLHAMARCDTRARLLTSVPGVGAIVSLTFTAAIDDPARFKSSKQVGAYFGLTPTKYQSGETDIDGRISKIGDAWVRAALYEAAHIILTKPLKGCTALKSWGMKLARRGGMKKAKVALARKLAVIMHRMLADGASFRHVAAAV

SEQ ID NO: 448551 - protein, 321 aa, unidentified
MTQIERVVVGIDVAKDKVDACIRSLALRQTFQNTAQGHRKLVAWLGKHGVGQAVMEASGGYEREWRETLCKASIEVRIVDPKRVRSFALSAGRLAKNDPIDAQMIAWFAETFRQAPVQVHDAAREELAALTKARKALVDLQTRLQAQNEHAAPKLARKAYARVLKSIGAEIDELETIISARVKATPAFAERAEIIESVPGLARVSSAALIAGMSELGQVSDEVAAALIGAAPYDDDSGKRRGERHIKGGRRWVRNAIYMPCVSAATQHNPVIKAYYQRLIAKGKPPKVAFIACMRKLMVILNTMLARGEKWNPSRYAPPVN

SEQ ID NO: 448552 - protein, 432 aa, unidentified
MNESIPAASLEGVAAYIGIDWADQKHDVVLRSAAEPNKVEHRVIEHQPGALMEWIGQLQQRFGGHGQILVCLEQSRGALIYHLMGYGFLELYPVNPLQLARYRETFSPGGAKDDQPDAELLCELLYCHRDRLRAWKADSELTRKLAFFNEGRREAVDQRTRLSNAIKSQLKVYFPLALELLNQDTSTALAADLLLRWPSLEALQKQIPHRLRKFFYAHNCRGESTMLERLELVQQAQALTQDSAVIEPATVRVQMLARQLKNLLPDIARYDQKIAELFAAHPDRFLFENLPGAGRVLAPRLLSALGSDPNRWESAQEIATLYGVAPVRRASGKKSGKKGEKKASVRFRQACPKFLRQSFHEFAGCSIRYCGWARAHYEAQRAQGKGHHVALRALAFKWIRILFACWKQRIPYDPQRYLQALQQRASPYANAC

SEQ ID NO: 448553 - protein, 342 aa, unidentified
MDQYAGIDVSLECSSVCVVDASGMILREARVASEPEALIAWFRWSGFELERIGLEAGPLSQWLFAAMRQAGLAVELLETRHVRKAFEAMPVKSDRNDARGIAQLMRLGWFRPVHCKSMSAQETRTLLTARKLVQSKLQDVENSLRGILRGFGLKVGKTTGLGFAGRIEELVAGHPHLQVVTRALLSVRAVLRSEFAAFEKQTRKMAQSDARTRLLMSTPAVGPIVALTYVSAIDDPARFTSSKQAGAHFGLTPKKYQSGETDYTGRISKIGDSSVRTALYEAAHIMLTKPLKGCTQLKSWAMRIARRAGMRKAKVALARRLAVIMHRMLADGTPFNPAAAAT

SEQ ID NO: 448554 - protein, 347 aa, unidentified
MPMLADRVDYVIGIDCHKERHVAAIADGLGSLKASLSVSSDADGYRTLVKWADKNASGRRVWAIEGAGSYGAGLTDWLASREEWMVEVDRPKRPKRKAGIKSDEVDALRAAKDALAAKRLAEPRRRGGLEAVRVLKISRKQAVQVSAVAVVQLKALVVSAPEGLRARLRGLSAAQLVVACAAMRNQPSPSVEWTATRLAMRSLARRAQAAAADAAELDRELTVAVKAQAPQRLLGEVGVGTVVAAELLSVWSHKGRLHSEAAFAMVAGAAPVEASSGQVIRHRLNRSGDRQLNSALHTVVLTRWRQDERTQAYIARRRAEGKSDREIRRCLKRHIARHLFRLMEAAA

SEQ ID NO: 448555 - protein, 399 aa, unidentified
MNAVGIDVSKGKSTVAIMQPFGVVAASPFEVSHNGQELKELVERVKLLPGETKVVMEYTGNYYEPIAQYLHNEGIYVSVVNAMLLHNYSGNSIRKAKTDKKDAVRIAQYALDRWLDLREYIPDDEIRRSLKLLNRQYTTLCKVKTMLNNNFISLVDQSFPGVNKLFASPQRSSDGHIKWVDFVIKFPHCDCVRGIPRSAFKDKYYRWCNKNGYYYSDKKADTIYDYSKTLIATLTNSDYIASLIGQSATQLNCACETLSELQKQMTALSQQLPEYDVVMEMFGVGKVLAPQLIAEIGDTRRFHSRKAITAFAGLDAPPYQSGNIDVKSRSISKRGSPHLRKTLFQVVDVILKNSPADEPVYSFLDKKRAEGKPYKVYMMAAANKFLRIYYAKVNEALNT

SEQ ID NO: 448556 - protein, 351 aa, unidentified
MIIIGVDYHPSDQYIAFVDTETGEYGERRLNHSDGEAEKFYRELAARGISVRVGLEATGYSRWFERLLAELGIEVWIGNAAEIKTKRVRKQKTDGEDARLLLKLLRENNFPRIGVPSRENRDLRQLLWHRHRMVQMRTRIMNQLQALAMKEGLRRKKTLWSDQGRAQLEKLSLGTWTSRRRKDLLELLDRMNPSIEELTAVVEQEAKKWPEVLRLMTHPGVGPLTALAFVLIIGTPERFQCGKQIGSYVGLIPEEDSSANHQRLGHITKQGSSLLRFLLGEAAQAAARCDADWRRRYMHLAVRRQRNIAKVAMARRLAVRLYWMWRNGWEYAQWVAFGSHAGQLGTGHGVQ

SEQ ID NO: 448557 - protein, 393 aa, unidentified
MSNGSGVSRGDRNRNARLGRLRELVPVTNAIVGIDLADKKQMVVVTDHDSKVLARRTFRCRAWDLGLALDWAGSQAAWKGFAGATVSCEPTGHRWRVLGQLAADRGMPFVCVQPMLTSWARRSEDLTFDKTDEKDAVLIARLTAQLRCYVPEPADEIWGRLRHLGARREQLIVETTSQIQQIRALLECVWPASLDAARQPFRSVTWAAAMSVIVERDGGDLARTRRLGLARLEAATGRLIVARGRRKPCRRIVRQLFTALSDPAGVLAHRPGALERVALLLQDWDHAQRRLADTEARMLTVLDELELTDLVTSITGLSAIGAAAILAETGDPNRFATARALVKHAGLAPREKLSGTFTGRTKLTGQGRPGLRLAAWRAVWGAQRSNPVYRARY

SEQ ID NO: 448558 - protein, 346 aa, unidentified
MHYIGMDGHITTLEFAVVNEGGRLVKADRVATSVKGFIEFVKTVPPPRTIYMEEGTLAAWALETCVRFGEKLVITDPKKNHWIGSSGQKDDPIDALKLAQLGRGGYIKEIHHPVGQRRRFRELMIAYHDTVRSTTRIKNKIKARFRQNGIQCTGITVYSETYREEWKGKLPQETTLLLILDGLWRQLEQSEQTEKELLAAARAQAKHYPEIKHFEALPGIGFISAATISAILETPHRFADKKKVWMYAGLGIMTRSSGGKVYSEKLSTDYNRLLKYTLKQAAEAAIQDKDSPFRRKYLDMTLLHGIAPHRAKLTIARDMLATMWAMWKKGEKYNPEIREKAAYKQG

SEQ ID NO: 448559 - protein, 352 aa, unidentified
MNHHTESTPDLTTGIDLSDQTSAYCTLDAQGTILREGSFPTSLESLRQMFEGGARSRLVLEASTQAPWIARELENLGHQVIVANPRNVHLISKSAKKTDRNDARTLARIGRADPKLLAPVHVRKASSLAVRALIRARKHLVNTRTRLLCLVRAECKVQGTKLDCSRQRLVATARREMPEILRPALLPTLELIDELTARIRHYDSEVGRLCKEEFPETGALRQIRGVGPLVALAFVATIEDPTRFDDSRNVGAYFGLVPRSYQSGNWDPNLRISKQGDGTMRSLLVAAAAHILRQSSPDSTLKRFGRRIANRGNPRDKARARIAVARKLAVILHRLWLTGEVYEPMRGASDPS

SEQ ID NO: 448560 - protein, 349 aa, unidentified
MSKKLIPLDVHSEWSQMGVVEEETGEVILEMKVRTDPEELRRVIGGIPGPKKVIMEEGPMSGMIKDALDGVVTEVVSCDPTRNALIARAEESNDRLDARRLAVLCRNGSLHEVYVPPEPYRTLRSLVRHDRRLARDVTRSKNTIKALCHRHGIACRGVRVYRAAERKGLLKRLPSAALRWQLESAYRQLDFLRAERVGVHRVLVRQGRGLAVIRRQQSIPGVGPVVARTLVAWVVDPTRFKSLSALSAYAGLGLGKAVTNWQVVRRDRASKRGQRDLKAMLFVAAKAAIKGDNALARRYQARLAAGWEPRKAIRDIARHILFIACALWAGRKEYQDALVSVPSTIQSAR

SEQ ID NO: 448561 - protein, 356 aa, unidentified
MTKIKTLSFEGETIYCGVDIHKKNWKVNIRNSHMELEHFSQNADPDCLASHVQKRYPGANIKVAYEAGFSGFWPCRKLQAAGIDCIVINAADVPTSDKQKKQKNDTVDARKIAKQLSINNLEAVHVPTLTEQNDRSLVRVREQLVADQTRCKNRIRHLLHFNGLKVANGIDKEKYWTLAFIKALEELDCSDCSLRITLNLLLAELKDLRKKVLEATTAVRKLAATDLYKKDIELLRSICGIGPTNAMVIRTELGNIKRFKCFDHLCSYVGFVPSTDDSGKTKATRGITHRCNNRLRTALIESSWMLISKDPAMLMKYSAYCKRMDKNKAIIRIGKHLLSRIKYVLTKREKYEACIV

SEQ ID NO: 448562 - protein, 445 aa, unidentified
MEQSSTLFVGLDVHKDSIDIATADAPREGEVRHVGSIGGDLVSLDKSLRRLISRGHRLHVVYEAGPCGFVIWRHLTAQGLHCEVVAPSSIPRPPGERVKTDRRDAMLLAKLARNNDLKAVRVPDAVDEAVRDLVRAREDAVRECRNARHRLKALLLRNGIGYSGRSAWTAAHLRWLAKVTLVHAAQQIAFQEYLHAITEATARIARLEQALRDALPEWGLTPVVQALQALRGVQLIAAMTLVAELQDFLRFESPRQLMAYVGLVPSEHSSGPKRRQGAITKAGNSAARRVLVEVAWHYQHHARVSPIIAMRHDGLPQTVTDIAWKAQLRLTAKFKRLLARRVMKTKAIVAVARELAGFVWAIGREVQTSGWRGHKAPSASGAPARTAEPNTNTALQDEDHRRQSTQQSDQRPDRERDAAAATRGILGNVIGGPREHDCLRRDLRP

SEQ ID NO: 448563 - protein, 326 aa, unidentified
MQGKELSEQATVAKSSVGIDVGKSWLDIHVLPSAETLRVANTREGVRKLKRWLAGFDVALIVVEATGKWHRQVRRSLHTEGFAVAVVDPFRVRAFAKAQGILAKTDRLDARVLAMFAAVMNPALRPPAPEALEELAELVSARDSAVAEQTALKNQLAAAVASFLKRQLERRLARIAKDITALEHEIDKRIAADEALARRYVILTSIPGFGAIVAATLVACLTELGTCSRKQIGLLAGVAPIADQSGKREGARVIWGGRSAVRRVLYLAALSAKTHNPGMKAFHDRLIAHGKCAKAALIAVARKLVVLANTLIAEGRPWQPNPPKQA

SEQ ID NO: 448564 - protein, 342 aa, unidentified
MKDNITITIDLAKINFQIAVFNQAGNVIFNKSVNDKAMLKCVEKFPHAKIYMEACGSSHYWGRYFQKRNHFVGLLPAQIVAKYRAGNKSDHNDTLAIYETSQSKNKHIHLIPIRTLEQQDIAILHTYREGYKKQRNQIASRMRGFSQEYGVKFPLGINKLCQQVFSVLEDAENELTVIGRKVIKELYDELKHVIVLLNQVTKEIETLAKNNAACKKLVTLPGVAWLGASMIFAKFGNASHFKRGRDGSACLGLVPRHTGTGGKVRILGISKQGDTYLRSLVVNGARAVVINIKEKTDKLSCWIRDLLQRKSFNKVVVAMANKIVRMATAMLKSGEEYRQVIA

SEQ ID NO: 448565 - protein, 332 aa, unidentified
MDNFYFIGVDVSKKKLDFCVLFEGKVLREEQVSNHQQAVARLIGELKNDLEMDNEQFLICAEHTGQYTFPLVCACKSVECKLWLENPSQIKYSSGMQRGKNDKVDAKRIAIYASRFGDKVKYYDRPTEEIERLKQLERERALYVTDLAKYKGQMYDQKDFMPAALYRKKTKRMKGLIQELQAAIDAITAEMEKIIGSTEVLARQMELLMSIDGVGKVVALNVIIETEAFSRFDNPRKFCCHAGVAPFSYTSGSSQHSKNKVSHRANKNIKKLLHMAAVSVTHRKEGELKAYYMRKVEEGKNKMSVINALRAKIVARMFAVIKRNEVYTPIYS

SEQ ID NO: 448566 - protein, 342 aa, unidentified
MQIRSVGIDLGKTTFHLVALGASGRVLLKKKFTQRQLLAFTANLQTSLIGLEACSGAHFLGRALKQQGHDVRLIAAQFVKPFVKSNKNGFVDAEAIAEAVERKNMRFVPIKTDDQLDLQAMHRILDWLVSRRTAVINQIRAFLLERGMVFAQKPAKLKAAMGDVLENADNVLTPMMRNLIGMLWDEWKTVQQQIDELTNRLEQIAASDAGCCRIRQIPGIGPIIATAIVAAIGNGAAFRKGRDFAAWLGLVPRQYSTGGKAKLLGISKRGKIYLRKVLIHGARAAAMRIKRDRFPIGAWMNALEARALRNVLVVAMANKLARIAWAVLSSGEDYRPAVNAVA

SEQ ID NO: 448567 - protein, 338 aa, unidentified
MQKITTIGLDLAKNVFHVICCNEYGKVVRKKMLRRREVIPFFTQTSPCLVGMEACSGAHFWAHQLTALEHQVKLIPAQYVKPFVQGNKNDYNDALAIAEAVVRPNMRFVTPKTQVQQDVQALHRLRERRLQERTALCNQVRGLLAEYGLIMPKGVNVIRRRIPELLEDAENDLSGLFRRLLAQCYQQLQEIDKHIELYTQLLKEQNKQDEACQRLQTIPGFGPIVASVFHAVIGDGSAFRRGRDVSASLGLVPRQHSSGGANTLLGISKRGDSYLRSLLVHGARSVVQHAQRKDDRLSRWINKIRSERGYNKAAVALANKLARIGWVILSQHTVYRAV

SEQ ID NO: 448568 - protein, 408 aa, unidentified
MKISYFLGLDAAKHKIRAALSDGAERVLWQSDLAVSAGALRELLAKLEAYVPEPEQLLVLIEATGVFHLNWSAALTRAGYAVAVINPLIAHRLYHVKNSIRDNKTDPIDARGLCAIGRLHGQKLLALYRFGLKPEQLALQRLQTVREALRNALTNLQETYQSLLDLSFPELGGLLELDGVGIRELLSQAPTPAAIARMRPSTLEKNWMLRPKATALKALAADSIADPGLAAASAPALQAILQSVSEMETRLRQVDRQIDQLLRQSVEPHTKALVESMPGFGPTTVAKVLAYLPDELLHAGSHRQVAARLQAFMGNDPRLRQSGQWEGHTKMSKRGVEILRTAFFQAAFNCAQHDLELKSFYQRKRAQGKKHEVAISHLMRILTRRLVAVLRSGKPYSSNYNLTLQSVA

SEQ ID NO: 448569 - protein, 343 aa, unidentified
MDHFAGLDVSVKETSVCIVDDTGRIVREVKVASEPEALLSVLKNPAYHFKRIGLEAGPLSQWLFSALAEAGLPVICVETRHMRAVLKAQINKTDRNDARGMAQMMRAGLYRPVHVKTLRSQKLRMLLTHRKLLLSKAIAIDNDLRGTLRNFGLKVGIVGTVKFEARIKELVENLPDLAVLVEPMLVVRRVLREQIGILHRRLLAIVRDDEVCQRLMTVPGVGPVVALTYRATVDLPARFRNSKAVGVVFGLTPSKYQSGEINRTGAISKCGDEMMRCVLYEAAQVMLTRTNKWSWLKAWAMKIARHRGMKKAIVALARRLAVIMHRIWVDGTEFRWTREAAAT

SEQ ID NO: 448570 - protein, 350 aa, unidentified
MKTFIRIGVDLAKNFFQVHGIEHEGGLALTRKLTRAKFREFCSRLAPCRVGMEACGSSHYWARELRAMGHDVVLIAPAYAKPYVKRGKNDAADAAAISRRMHSIRPGEAMSWPEMRFVPIKSADQQAVLMLHKRRDLLVKQRTMGANALRGHLQEFGLIAAKGIHRIKELVALALADEGLPEEAKQAAILLAAHGDELDEKIDALEKKIARASAKNPTSRLLDEVPAIGPLIASAMTASFPDPSAFKSASDFSASLGLTPSQHSSGGKERLGGITKKGNRYLRKMLVVGCTSVLRVAHKYKGALADWIAAMKTKKPERVVAVALANKLARICWAIMSTGESFRTELYTRA

SEQ ID NO: 448571 - protein, 402 aa, unidentified
MNSVGIDISKGRSTVAVMRPFGEVVISPFEVRHTDSELSELARQLKSLNGETRVVMEATGNYHAPVAKLLHDAGLYVSVVNAKLVHGYGNNDLRRVKTDKKDAVKLANYGLDRWLTLPRYVPEEDTRLLLKNCYRQYRQYSKVQTVLKNNLISLLDTVFPNVNRLFSSPIRGDGSEKWVDFVAEFWHCRCVSEKSEKAFTNKYQRWCKTHGYNFSEAKAHTIHAEASGHIGIMPKSETTKLLVEQAVVQLRATSAALIALKREMLTLAAQLPEYPVVMGMFGVGPTLGPQLIAEIGDVRRFYSKKALVAYAGLDAPPNDSGDVTGRHKSMSKIGASSLRRTLFLVMGIYLQNAPLDEPVYQFMDRKRAEGKPFRVYMMASANKFLRIYYATVKAYLESLEQV

SEQ ID NO: 448572 - protein, 410 aa, unidentified
MELQTQCACGLDVHQATIVACLLSVLDNGKVKKQIRSFGATTRELIALREWLQSEGCTHVAMESTGVYWKPVYAILEGPFDLTVANAYHVKNVPGRKTDVKDAEWLADLLLHGLLRKSFVPPPPIRELRDLTRYRRKLVETGGEERNRLLKVLETANIKLASVASDVFGVSGMRMLDALVENKATPAEMAELAKGRLREKISELQPALEGRLEEHHRYLLKLQLARLRAVAKDLEELNKRIDEKLQPYRPQLELLMEIPGVDWTVAAVIIAELGVDMKVFGSPSRLSQWTGVCPGNNESAGKRKSARTTKGNCHLKTALVESAHSAARAKGTYLRDKFYRVKSRRGAKRAAVTVAHKILVAVYHMLDKQVSYNDLGDLYLDKLNKQHLTRNLVHRLERLGYEVRLQPVAA

SEQ ID NO: 448573 - protein, 430 aa, unidentified
MSSIVRTPHRRQAVPDPIHGVVVGIDVSKGRIDWRACCLGQWGSPHRVTQGEAGFLRLEQHLLAAAEGGQEVWVALESTGPYGQCLQEWLLDRGWRVVLVNPYHVKRSRELHDGNPRKDDVKDPGVIADLVWRGSYQRVRRLYGPYAELRVGFGEWCSLAKRRTALRNEAQALLELWFPEVVRLFANPLGKSVQALIGRYDSPWALLLAGRRRLHATLKQETHGRGVRYAEGIWKAAQGSVAVRQGQESRVRALRDLLGQLAYVEAQQVRLRAELEPWLAQTEEGAYLRSVPGLGLLTAAGVLGECGPLAEFHSVRALEKFVGMNLYRISSGRRKGQVHLAKRGRQAVRALLVQLAVGQMRAGRLGGAWVQQRKAQGHPSRKTQIALARKLLALCYALARNRVGFEATRWFAEAKTADGGAALQGTPTET

SEQ ID NO: 448574 - protein, 309 aa, unidentified
MKPYVGIDVAKATLDVAIGSAGEVVQVENDEAGIAQLIERLREIAPTLVVLEATGGYESLVAGALAGDGIDVAVVNPRQVRDFAKATGVLAKTDHIDARVLARFAEAVRPEPRPLPTEEAKELEEALRRRRQIVDMLTMEKNRLSIAATERLKKELKKHITWLEEALRRANDDIDTAVRKSPAWREKEDLLRSVPGIGPVSARTMLAELPELGSLNRKKIAALVGVAPFNRDSGTSRGSRVCWGGRASVRQVLYMAAVTAVRCNPVIRRAYLALRGRGKKHKVALVACMRKLLSILTAIVRDQRRWSPS

SEQ ID NO: 448575 - protein, 352 aa, unidentified
MNATTVAVDVAKNVFELAVADANWRVVEHHRLTRGQFERWFGNREVSLVIMEACGSAHHWARVLISRGIEVRLLPALYVRAYVKRNKTDAADARALLEAARASDMKPVRVKSVEQQGLQALHRTRSAWKGTRTARINALRGFCREFGLVVPLGASTGIAQIARYLADEHSAIPGLLRGSMRLMLEELRLLEARIAQLERELAEIAAASPACQVLSSVPGIGLLTSTAMVATVGDPRSFDSARRYASFLGLTPREHSSGDKRVLGGISKRGDRYLRMLLTHGARSVLRAATLARRAGRPVDRLKTWALEVQARTNHNKATCALANKLARIAWAVWVKHEKYQSPATPNDAPAV

SEQ ID NO: 448576 - protein, 314 aa, unidentified
MDHNTVYGVDVSKRNLVTAGYDAQTPVVVHNRPESIAAWLAGLPRGAAVAMEATGAYHQMLAHLAHAAGLRVYVLNPQTLKHYAWAIGQRGKTDQCDARMIARYAVHEQAKLRCWVPPARAADCLAQLLERRHTVVGVRQTLAQSLAMPMLKAPRESLLANFERILRRLDILIRHELARLPGMAALYERLKGIVGIGPVVAAQLVAVFNTLNFAQADSFIAYTGLDPRPDDSGDRRGRRRLSKHGPPLLRCLLYNAGMAAANSRLLKPVYKQLRERGLQTTEAIVILARKIARIAFALYKSGHCFDAQKHLKTA

SEQ ID NO: 448577 - protein, 344 aa, unidentified
MEHFVAYLALDWSDAKHDVCLIGAATGKKESFVLKHTPEALNEWATALRARFAGEKIAVCLEQSRGPLIYALLKYDFFVLYPINPTTLAKYREAFSPSRAKDDPQDAEDLVELLIQHRDRLKAWLPDDEKTRTLQLLVEHRRRLVNDRTRISNRMTALLKAYFPQVLLWFDDIRTILVCDFLLCWPTLESVKRVKPKTLEKFFHEHNSVRRETNEKRLAEIKEAVPLISDRAVINSSVLMIKALAAQMKTTIEAIREFDSEIEALCQSHQDFFIFASLPGAGAVYSSRLLAALGTDRNRWTSVDELLCFSGVAPVIERSGKSTWIRWRYFCPKFLRPILHRVRR

SEQ ID NO: 448578 - protein, 419 aa, unidentified
MRRLLERCAALDVHKKAVTACARILKPDGELEEVIVEFPTMAADLLALRDWLKQLGVTHVAMEATGVYWKPVYYALEDDFELLLVNAAHVKNVPGRKTDSLDAQWLCQLLECGLLRPSFVPPKPIRELRDLTRYRRSLIKERQQEANRLHKVLEDAGIKLACVATDVLGVSGRQMLEALISGTRDPEVLAELARGRMRAKLPMLRRALVGNFKPHHALILSHILAHLDYLDETIVTLSEEVERRLAPFAHKAENLATINGVGERVSQAILAELGPDMSRFSSDRHAASWAKICPGNDESAGKRRSGKTHKGNPHLRAALIEAANAAAHSKNTYLRAQYEQIKRRRGHKKAITAVAHSILVAAYHILKDDVPYQELSGDYFARRADPERIAKRLVAQLERLGHVVTLQTATAENVVATPA

SEQ ID NO: 448579 - protein, 340 aa, unidentified
MTITTVGIDLVKNVFAVHGVDQNGKAVLIKSRVTRTALPGLIAGLPPCVIGMEACSGAHYWARLFRQYGHEPRLMAAKFVSPYRMAGKSGKNDAADAQAICEAVCRPHMRFVPVKDESQQAMQCLHRTRQGFIEEKTATYNRLRGLISEFGVIAPQSTDALRHMVSAQKDSLPLQVQQCVDDLLEHVARIEANIAEYDRILFRMAKTDHRSQRLMELKGVGPTTACALVASIGNAHDFKNGRQLAAWLGLTPSQYSSGGKSKLGRITKVGDSYLRTLLVQGARSVLSGAEKRTDSFIRWVCSLVERRGYWRAVVAIAAKNARLCWASLHYGDDFRLYSAS

SEQ ID NO: 448580 - protein, 343 aa, unidentified
MDHFAGLDVSVKETNVCIVDDTGRIVREVKVASEPAALLPVLTTPTYHFKRIGLEAGPLSQWLFSALAEAGLSVICVETRHMRAVLKAQINKTDRNDARGMAQMMRAGLYRPVHVKTLRSQKLRMLLTHRKLLQSKAIAIENDLRGTLRNFGLKVGMVGKVKFEARIQELVESLPDLAVLVEPLLVVRRVLREQLGILHHRLLAIVRDDDVCRRLMTIPGIGPVVALTYRATVDVPARFKNSKAVGAVFGLTPSKYQSGEIDRTGGISRCGDEMMRVMLYEAAQVMLIRTNKWSWLKAWAVKIARHRGMKKAIVALARRLAVIMHRIWVDGTEFRWTREEAAA

SEQ ID NO: 448581 - protein, 415 aa, unidentified
MALKIVYKICCGIDVHKTFVVACIASTNDKGVTSYESHRFSTYTSGLKTLLQWLIDRNCKDVCMESTGKYWIPVYNILEKGCSIVLAHPKYVKAIRGKKTDKKDAKWIADLFKHDLVAGSFMPPSDIRQLRDLMRYRFKLTCFKSSEKNRLQNCLTVSNIQLGNVVSDTFGKSAQAILDKLLENPADTSFDLEPLVFKSLKKKLPELRDAIDGYITPEQAGKLKVIKSHYENLEARKAELEELILALAAPYQQELAILQTAPGISSDFTAIGIISEIGTNMEAFPSAKHLCSWAGLTPTNNESAGKKKSVRVSKAGCYIKPLLVQCANAVIKSTKHPEMRNRYLRLKKRRGHKKAIIAIARMLLTALYHMLKNGENYNPELYRKTDLPPAGREITIEQALMLIRNQGYKIKSATT

SEQ ID NO: 448582 - protein, 333 aa, unidentified
MSKSSQYVGLDVSLKETSICIIDDAGKIVWRGRVDSTPEAISTAVKQHAPNAVRIGLESGQLSSWLFHELKEAGFPVICVDARHAKAALSLKVNKTDANDAFGLAQIMRVGWYREVTVKGLDCQAVRALLVARAQIVSQITTLKNCVRGILKPFGRVLPKGLRSQFPGRVRAAIDGHPVLGAIIEPTLRVLEAMRTQLLVYDRAVIQRVGTVVALAYMTGVEDPARFKRSSSVAAYFGMTPRRYQSGEVDHAGRISKCGDGMVRGLLFEAAKVLLSRSARPSALKTWGEALGKCVGAKKATMAVARKLAVILHRMWTTGTTFQWNAEAASSAA

SEQ ID NO: 448583 - protein, 346 aa, unidentified
MGKSITDLASVTTVGLDLAKHVFQVHGVDAAGRVVVAKAVKRDKLLAFFASLPRCLVGMEACGSAHHWTRELIKLGHDARMMAPIYVKAYVRRQKNDAADAAAICEAVSRPSMRFVSPRSVENQAELMRHKAREMLVAQRTQLLNGVRGHLGEIGVIAPQGPRSARQLAGMIEACDERLPIEVCAALAELVVQLHRLDDAIDRLDKTIAKAAQADARARRLMTIPGIGPITASAIVASAPDVSGFSGPREFAAFLGLTPRQHSSGGKERLGRISKMGNRYLRKLLVVGAHAVLFHRKAHDDALRMWAKRLIDKKPFKLVAVALANKLARIVFAILKAETSYRAVPA

SEQ ID NO: 448584 - protein, 387 aa, unidentified
MYFVGIDISKFKHDCAIIDELCDTVMPSWSFSNDREGFSHFKALLDSLEGEKKIGLESTGHYGQSLKQFLESNGFAFMEFNPLLVSRFVRSKSLRNTKTDSIDALSIAQYVMTVEYKPYPSSFYHLDKLKSLTRFRNSLVRQRSRQLVELTNVLDKLFPEFKPFFKDKFSVTALYILAHYQTPERIANMNARSYEALRKLSRGRFTLSNFTQLKALAKNTVETQTDYLLDQMNILLELYSQLDSKVDEFDAQIKECVRGIDPPCLSIPGVGELSAAMILSEFGDFSKFQNPSKMLAFAGLEPGYFQSGQSEYTGHMVKHGSSRLRYALMNCCLPLISNEPVFAAYYTKKRSEGKPHRVALTHVAKKLLRVIYTLQTKNIRYDPTMIH

SEQ ID NO: 448585 - protein, 455 aa, unidentified
MKHEPEEIPDAEYELVIERVAAVDVAKASGKVCVRVPGKAGRRVSRVWDVAATTAAVTELAEDLVELGVERVTVESTSDYWRIWYYLLEAAGLEVQLVNARDVKNVPGRAKTDKLDAVWLAKLTEKGLLRPSFVPPTEIRRLRDYTRLRADLTHDRSRQVQRLEKLLEDALVKLSTVATDIMGVSGRAMIEALIAGQRDAKVLAGLARGRMKTKRAALIEALSGRFDDHHAELARMLLDQIDALTAQIDTLTARIEQLLAAMPEAQPVDPRRDGPTSGHPVGVTADTLAECARLTTVERLDEIAGIGEHNAQVIIAEIGLDMSRFPTPAHLVSWAKLCPRTIQSGPVTRGGRTGKGNPYLKGVLGDAAAAAAKTSTFLGERYRRIVKRRGKLKALVAVARSILVIVWNLLNDPTARFHDLGPDYHTNRIATERRMRNHIAQLTAMGYRVTLEPAA

SEQ ID NO: 448586 - protein, 339 aa, unidentified
MKLYAGIDLHSNNSYLAISDEEGKRYYKKRLPNQEDIILAELEPYRNDLAGIVVESTFNWYWVVDMLMDNGYKVHLANPAGIQKDKGLKYSGDKHDAFWLARLLRLGILAEGYIYPKEWRPVRDLLRKRGHLIKLRTSLINSLQGIISRNCGCQLPGKKIKQVRTNHVAPLLDANEDLALSGLVSKECIDYISQRIRDIEVSVESRVELLAPFRGLQTIPGVGRIISLTIMLETGDIGRFEKVGNFSSYCRKVPTSWTSNGKKKGSGNGKNGNKYLAWAFSEAAEFFRRYDPSARAFYNRKTAKKNFMVAHAALAHKLCRATYFIIRDGVEYDPDKLFA

SEQ ID NO: 448587 - protein, 347 aa, unidentified
MTQYKRIGIDTSKAVFTLHGIDQRDQPTLRINLRRSQMITFFRKLPPTEVAMEACCGAHYWARELTALGHAVLLIPPQYVKPYVKRGKNDRNDAAAICEAAGRPGMHFVPAKSLSQQAQGMVLKVRDTLIGQRTLLVNTLRGHASEFGVVAGKGVGRVGSLLAAIEQDATIPAEARDMIALLGQQIEHLNKKIKALEARLNATHKTNAVSQRLATIPGLGPVTALTLATEIDPAAFASGRHMAAWIGLTPKEHSTGGKQRLVGISRAGNERLRSLLVVCATSVIKAATMPASKQMTGWLRGLLQRKPRKVAAVALANKIARVAWAVMTYGTVYRRSPTDSEVSFYAA

SEQ ID NO: 448588 - protein, 343 aa, unidentified
MDHFAGLDVSVKETSLCIVDDAGRIVREVKVASEPEALLAMLTNPACHFKRIGLEAGPLSQWLFSALAEAGLPVICVETRHMRAVLKAQINKTDRNDARGIAQMMRAGLYRPVHVKTLRSQKLRMLLTHRKLLQSKAIAIENDLRATLRNFGLKVGVVGTAKFEARIKELVESLPDLALLVEPLLVVRRALREQIGVLHRRLLAIVREDEVCRRLMTVPGVGPVVALTYRATVDVPSRFRNAKAVGAVFGLTPSQHQSGESNRTGGISRCGDEMMRAMLYEAAQILLVRSTRWSWLKAWAMQIARRRGMKKAIVALARRLAVIMHRIWVDGTEFRWTREAVAT

SEQ ID NO: 448589 - protein, 342 aa, unidentified
MSEAYDGKQIVGMDLHRRRSVLVRMTEAGERLETVQISNDPEYLRAVMARAGEAPEVVLEATYGWYWAADVLAELGARVHLAHPLGVKMFSYRRVKNDERDAADLADLLRMGRLPEAWIAPPATRELRELVRHRAKLVALRSSLKCQIHAVLAACGVVVPMTDLFGAGGQGLLERVALAPAFQARLDSARRLIEALDFEVELFTKLASGRLRGDPGYTAVQTISGVGPVLAAVFVAEIGEVSRFRRAAQLASWAGLTPKHHESDTTVHRGAITKQGRRLVRWAAVEAIQRTDKHGRLGQVRDRIGARRGNNIGKVAAARELIELVYYGLRDGEIRCLNHRSA

SEQ ID NO: 448590 - protein, 346 aa, unidentified
MSQYVGLDVSLKEVSICVVDGSGKVLARSSLSTDPDAIAMFLAEAAPDAERVVHESGQLSTWLTRELAKRGVPVVCIDARVAHKALSARLNKSDSADAEGLAHLARTGWFVKVHVRSEASDRVRALIGARERLLRMRKELEAHIRGVLKTFGIRMGSVGHAGNRQSFRDQLAEAVADDPVLGLVAERMIPIHRTLCVSVETLEDELVALAGKSETARRLMTVPGVGAITALAFIATIDDPLRFRRSTDVGAFLGLTPRRYQSGEIDRSGRISKCGDGDMRRLLVSAATSLMTQVRRFSALKSWAVRLSGRKGFKKAAVATARKIAVILHAIWRDGTEFNWTKETAT

SEQ ID NO: 448591 - protein, 363 aa, unidentified
MFSERTSVGLDVHARSVVAAAIDGVTGEVTRTRLTPSYEHIQSWIADLPGPAAVAYEAGPTGFGLYRALTDAGVRCEVVAPSKLQRPAGDRVKTDARDALHLARLLRLDEVTSVSIPSVYQEACRDLVRAREDCRGDLMRARHRLSKLLLRHGIVYYEGAAWTDAHDRWLRAQAAPQLPTVATRMAFDSDYEHVLMLQARRRGLDSAIEGIAADCEFTPVVRRLSCLRGVGTLTAFALAVEIGDWNRFTGNTIGAFIGLVPSESSSGSTRSQGPITKTGNTHVRRLLVEAAWHHRTKYQARAVMRARWDKAPAAARARGHEGNRRLHNRWVDFLARRKRSTVANVAIARELAGWCWSLAVMND

SEQ ID NO: 448592 - protein, 486 aa, unidentified
MNSIVLTANVQPNLDVNYIGMDVHSDNVVVCVRRNTINSSGQLVGKTIKTKKVVIKNSQEPLVELLSKYADGQQHIMTAESTFNWYWLADIAEDHGWNFRLADPCTVSQANIKAANDETDAEYLADRLRTGSLKSTSVLPRQLRGVRDLMRHRLRVMQEVSDKKVRLSNLYHNHCAHPMLGKLLAALQDAYDEINIDAVLESGICNNGSELIIGDLLTGLREAETRLAKIEATVYARIDEIDSYKAERMLLKTSMKGCGDVLSAIIVTEIGDISRFRTMGDFVSYCRLAPTSKLSNGKSKGQGNAKNGNAYLSWALTELATLMARFNEPIRRYLERKQEKTGLRVVAVRALAAKLARCVYQVLRKKESFDLGLAFGSKPTHGQMTAAAEAAQTPPEPALPPVPAVAGEHHCPAEESDAPIVVKEPVPVKSKRSTRKKAVSAASSEPAVAAEGRQTARKADRVKARCALTATPPSCVGTSCVKSRRE

SEQ ID NO: 448593 - protein, 307 aa, unidentified
MKEEVVYCGIDVGKSHLDIALLQQRWQVANTQAAINGLVQQLKSESLNLQVICEASGGYEQALVRALHRASVPVTLVQAKRVRQFARAAGILAKTDCIDALVLARFGQAIRPVPTPSQPLHMARLRELDRERCHLSRLLVAEQNRLEQLSSPELRRLARSLIKKVEKQILLIDQAIAQLIGQDQLLRTKAKTLTSFCGVGERTAALLLAQMPELGRLNRRQVAALAGVAPFNRDSGSMHGKRCVFGGRRVVRNALYMAALSAARRNHILAPFYQRLLAAGKPPKLALTAVMRKLLIALNSALTHSPA

SEQ ID NO: 448594 - protein, 423 aa, unidentified
MKIVHPICCGMDIHKNIIVATIASTDSNGITSYEQSTFSTMNRDVIKLRDWLLSHNCRHACMESTGKYWIPIWNILESEIQLTLAHPKYTKAIKGKKTDKKDSKWIADLFKHDLIPNSFIPPADIRQLRDLSRYRYKLTYIKVSEKNRIQNCFTLSNIRIDSVVSDPFGKSARLIIDDILHHPEFKPEDAITSLQGKLKKKEQLIIDALQDIYVSSDQHLKMDIAYQHLDQIDAYIKIIEQSLEKLVQPYDSLINLLCTIPGLQRRSSISIIAETGVDMSQFIDAKHFTSWAGLAPTNNESANKKKSVRISHAGVYLKPLLVQVALNSIRDSSNNYFTLKYNILKKRRGHKKAIIAIARMILVSVYHILLTGEPFHPYDFDEPKYPIFKDQSSSHSLNEEDAINYLKSLGYSVNKPGLSSNNE

SEQ ID NO: 448595 - protein, 397 aa, unidentified
MGNEFAVCCGIDVGKWAHHVVAIDTETGEVLFDSKVDQSEREIRAALSPLCAAGKVRVVVDEPGPMSRLLFAVAKDMGMEIGFLTPRAMAKAIEMYGGDIKTDRRDATILAEVASGIPKLVKAVDEKTPERHRLAAIMSHDRELTAEVTRSANRLHALLLAVCPPLEELMAGKKIQGGLALLLLERYGGPCGLRTAGRGRAKRFVRSRKGFGGASGAKVDRVFDAISEQTLVLPGAEDLEDLIRMEARRLSSALESRKTVAKKRDAILEAIPEAEILMSMPGVGAVTCATFLAEVGDVTRFPTAARLASYAGLSPKVRQSGRSVNSVTKPRGGNRRLKRVLVLSASKSILFCDESRKYYERKRAEGRCYNSSITALARKRLDVMYAMLRDGNKYKKK

SEQ ID NO: 448596 - protein, 422 aa, unidentified
MLKIVYPICCGVDVHKRFIIATIATTNDENITSYLTKRFDTYTEDLVAFKDWLLEHNCKDVCMESTGKYYIPVYNILEDYVKVTVANPKYVKAIRGKKTDKKDSIWIADLFKHDLVPGSYIPPKPIRMLRELFRYRFKLVNNRSSERNRLQNCLTVSNIQLASVLTDMTGKSATSIINYITTCETFDPEYCKSLLQKSAKKKADDVIKSIVGYSISGEQSTKIDVCKKHQDNLDEHIKSIQDKMYELAKPYEKQINHICTCPGFQKNSAIYTIAEIGVDMTVFKSAKHLCSWAGLTPQNNESAGKKKSVHISRAGVYIKPLLVECANNAIRDKNNTYFKVKYDKIKKRRGHKRAIVAIARMMLTCVYHMLLKDEDFNPCDFNYSDIPEEVLENHKQKYIDNAIFLLQKQGFTITKDDVIYAI

SEQ ID NO: 448597 - protein, 370 aa, unidentified
MEKSVLYVGLDVHKMSVDVAIAEAGSGAEVRYYGRIGGDLEALDKVTRKLRVQGAELRFAYEAGPCGYQVYRHLTGQGWSCLVAAPALIPRRPGDRLKNDRRDALTLARLLRAGELTPVKVLDEDDEAMRDLTRAREDAISVERRAKQRTGALLLRHGRRYPGKTTWGRGHWRWLLQQVMDHPAQQIVLQEYLDAVRQATARVERLTGQIRELIPQWRRAPFVAAYQALRGVSLIVAVTVVAEVGDLSRFNNPKELMAYLGLVPSEHSSGAAVRRGHITKTGNGHARRVLVEAAWAYRLRARVTQPLLKRQEGLPESIRQLAWKAQLRLCARYRRLLARGKAKQTIVTAIARELAAFIWAIGQAVEFLTA

SEQ ID NO: 448598 - protein, 324 aa, unidentified
MNYAALDLHERTVQCVLKNQDGRIVKESKTVKDEGRILSFLEGTDASVVMESGRNHQHIYDVLKERGYDVTVAHPLMVKAIAYAKVKTDRVDARVLADLLRADMIPESYVPGRDIREIRDLVRRRHYMVKLRTMQKNKVHAELATRWLKYEGDPFTEDGKVYLRSLAIDAVNDYLETIEFLNRKIHQLDEKVRRVVESDRYAKLLMTVPGISYYSALLISSEIADIKRFPDHEHLCSYAKLSPGVRQSGETQHTSKSVGNSLMNWIMIQCTRVHVRKYDSAITRFYQQVSKRRGEKVAIVAAARKLMRAIYIMLKEEQAFRLDG

SEQ ID NO: 448599 - protein, 387 aa, unidentified
MPQSNDLSRSLAALDQDSTLIAVIEMSQSSWLVGAIVPGISRQPLKKLVVEERELLRLLHRWRDEATKAGRMINRITVAYEAGRDGFWLARWLQGQGIEAHVIHPTSVAVSREHRRAKTDRLDTELLKRAFLGWLRGERGHCSMAMIPTPQEEDAKRPNREREGLVGERTRIVNRMKSTLARLGIRSFKPTLRKAPERLTGLLTPEGVPLPPNTLAELRRDMARLRFVMGQIREIEAARLQQLEQHPEQGPHAMVRLLAQVIGVGIETADMLVHEILSRTLRDRKAVARYAGLTGAPDESGARHREKGLARAGNARVRRGMIQLAWRFLMFQKDSALAQWYRARTADARGTTRKTMIVALARKLLIALWQLVTTGEIPQGVVLRAAA

SEQ ID NO: 448600 - protein, 356 aa, unidentified
MTISTKYIGLDVHKESISIAVRNSVGKVLMDCVIETKASTILQFIDGLRGDLHVTFEEGTSAAWLYDLLKPHVTKLVVCDPRKNKSMREGNQNDKIDARRLAELLRLNHLNPVYHGEHGLRTLKELVRSYLTVTKDLARVMTRVKAIYRSWAIPCSGKQVYARCHRAEWLGKITEPGVHRRAEFYYQQLDALRVLRQEARRDLLAESKKHKAWKRLCQIPAIGPIRAAVLLGILQTPHRFRTKRQLWNYGGLAIEMHSSADHRSVDGELQRSRKNVLVRGLNRNCNHDLKNLFKGAAAVASSKPGPFEEFYAALVAKGIRPEMARLTLARKIATIVLIVWKKGVSFDPQYLKPQTV

SEQ ID NO: 448601 - protein, 341 aa, unidentified
MATVRVIGLDIAKSVFQLHGIDGDGATVLQKRLRRARLLRFFATLPPCLIGIEACATSHFWARELGKLGHEVKLMPAQYVKPYVRRQKNDMADAEAIAEAVTRPTMRFVGAKSPSDQSAMMLHKVRLMLTRQLVMVTNALRAHMAEFGIVAPIGRGGVVRLLALIDDDADAQIPTEARRCLQMLAVQLKLIKLQILENDRQVLAQARATELGRRLMAVPGIGPLVASALIAGVPDPSMFRCGRDLAAWIGLVPRQNSSGGKERLGAITKAGNRYLRQMLVTGAMAVIRRARQGTRHTWLAQLLARRRPKVAAVALANKTARIVWAMMTSGEPYRAPMAIAA

SEQ ID NO: 448602 - protein, 382 aa, unidentified
MRLFVAIDVSSEKLDVCFLDSHDTVLKEICLSNDVNGANAIKEDVLHFHQLYNYKKIVIGMESTSVYSFHPSMFLTEDKDLRALDVEVVVQNPKAIHRYKKLFEEDKTDKIDAFRIADFLRIGRYNKFLIKEEKYVALQRLTRSRYQLVHQQTECKQHFLENLYYKCNTLSKELNTSVFGATMMEILSYSLSLDEIAEMDLEALATLLQKKGKGRFSDPEDLAKTIKKAIRESYRLGKVVQDSVDVVLATYARLIQTLKKQIKEIEKSITAFFEAIPEARYLTSVPGIGVVYAAGIIAEVGQIERFENEAQLAKYTGLYWKKSQSGNFESERTPMTRTGNQYLRYYMVEAANSVQLREATYRAYYLEKYDEVPKYKHKRALV

SEQ ID NO: 448603 - protein, 323 aa, unidentified
MTNVRNYVGVDVSKKTLDVSIPQENGTYLHKKISNDAVGFKSIIKHLSIDFCVVMEATSSYYMPFAYYLHANQIAVSIVNPLTVNHFCKMRMSRAKTDKKDASMLAQFGKSETPKLWKPKSDHLLELQQLQAVLDNFTNQKKSFANQLEAFNSSGKMSKSVKKIIEDQINYLKEKIKETESVMVTITEKHHLELYKNLQTIPGIGKRTAMLLIVITDGFTKFEQAKQLVSYVGLCPRLYESGTSIKGRTRICKMGMSRIRQLLYLCSMRAMRTNKQCRELFERLKQNGKNGKLAIVALANKIVRQAFAVGTGNIAYDANFYSK

SEQ ID NO: 448604 - protein, 322 aa, unidentified
MNPFFLGIDVAKAKLDCALLLPEGKLRHKTVPNTPEGFDTLRVWLRKSGAEPVHVCMEATGVYWEGVAEYMAALDSVCVSVINPSQIKAFGASELVRTKTDRVDAGLIARFCAERRPPPWQAPSPTEQALRAMVLRLDALQRMRTQERNRLKVARATVREGIEAHVHWLDTQIEALAKKIRDHIHQDPGMHDKHELLMSIPGLGERTIAVLLAFYGGPDRFGNARQAVAFAGLDPRHHESGSSVKVPPHMSKIGHAFMRKALYMPAMVALNRTDWGSRFHQRLTTAGKPPMVIIGAMMRKLVHVAFGVLKSRRPFDPSLHGA

SEQ ID NO: 448605 - protein, 454 aa, unidentified
MTSIGTTHDPTTIRARAGIDCAITASHQCELIEYRDDGTEKTTRTTIPSTAAGMDALTRMLTAVSVPVDVIAEPTSMTWVGIHAAVGTAGARFYLIGTKHSARLRAAVAGKNKSDVIDAHLLAKALDLFDLEPLARDEGGAEAIKRSALSRADARVHLDQCWRRLRSYVAATVPDIDKILAGSRTRTLAVLGRWPDLRALARARRATVAGVLREHSYCGGRHEQIADQLRGAASDWVRILDGYYDLGFWQIKVAGMLEDIDDATRRFDRYSEQLQQLWHAFYGPDELLLSVPGTGPVTAATIRGWLGDGSRFARAEDFAAYCGFTPSNWSSGTMEHKHRAITKEGPSALRMAVFLAANAARRSDPQLARFYHRLMVEQGQHHNKAVCAVARKLAERIWVVVDRCQPYQYRDDDGVVIDVAQARSIVRERYAVPEQIRARHRSHTTAQRRARLVA

SEQ ID NO: 448606 - protein, 304 aa, unidentified
MNGIGIDVSKRQLDVGTTDGETLQVCNNRSGFSELDVWLKKRPVSQIVLEATGGYERPVLDFLHAVGHPVVRANALRARRQAQGMGQMAKTDRLDAYALAQMAALVKLPAYQPLEPWQQKMREFVRARRQAMHALTIARQQLEMVGDRELRRLLQANITRLQTLVERLGKQIAEQVTQQPQLAVLKSMKGVGPGLQAALASYLPELGKISGKAIASLVGVAPMSHDSGTMRGKRSIHGGRAEIRQVLYMASMSAMRHEPQLRDFYQSLRARGKEGKVAIVAVMRKMLVILNARVRDAENGLVPA

SEQ ID NO: 448607 - protein, 425 aa, unidentified
MPYRIAGIDVHKKMLAVVVADVEVEGDFHFERQKAGTTPSDLRGLAAWLVAQEVEEVVMESTAQYWRPVWEALEQHWRPQRRACAGGRRLSGTLHLAQAQSNRGPGGRKKDFPDAERLVKRLVAQELTLSFVPDTEQRLWRTVMRRKYQITRNRVQLHNRLEALLEEAHIKVSSIVSDLLGISARRMLQALADGETDPTALAVLAAPRLRATPAQLCDAFQACPTLHPVYRRLLKLTLEELRVIEDHLGQLDQQMADLLAAHHDAVQRLAEIPGLGVDSAQQIIAEVGATAATFPSPKHLASWMGACPGNEESAGVNYSHRCPTGNRQMRRVLNQAANAAVKAKGTIFSVVYRRIVPRLGHAQAIGAITHRLCRLIWKILHERVRYEERGPAVSVEAKKVRARKMIRELRGLGYRVELVAPSSLV

SEQ ID NO: 448608 - protein, 345 aa, unidentified
MHYIGMDCHIKTLDFAVINEAGRLVKAHSIATSVNGLMEFVKTVPAPRIIYMEEGTLAAWALETCVRFGERLVITDAKKNHWIGSSGQKDDAIDALKLAQLGRGGYIKEIHHPVGQRRRFRELMIAYHDTVKSTTRIKNKIKARFRQNGIQCRGVTVYSKTYRAEWRGKLPQESTLLLIMDGLWRQQEQSEQTEKDLLAAARRQAKYYPEIKHFEDLPGIGFISAATISAMLETPYRFADKRKVWMYAGLGIMTRSSGGKLYSERLSKDYNRLLKYTLKQAAEAAIREDNPFRRKYLDMTLLRGIRPHRAKLTIARGMLAIMWAMWQKGEKYNPEIREETACKQA

SEQ ID NO: 448609 - protein, 393 aa, unidentified
MICVGIDVAKDKYDCFILSSEGEVLADVFTIPNNAEGFDTLLQTIRRCARPEDKIKVGLEATGHYSYNILGFLLNEGLDTYVINPLHTNLYRKSLSLRKTKTDRVDARTIAAMLMSDVDLKSYTDTAYHNEELKSLTRYRFDKVRERAKLKQSVSRLVTILFPELEKLVSTLHMASVYALLSEFPGAKQVSEAHLTHLKAVLYDASKGRYGSDMATTLRDAARCSVGSVMPAKSLELRHTIRLIHELDAEIEDIEAAIQSMMGEIQSPITTIPGMGVRMGAMILAEIGDFSLFDSPDKILAYAGMSPSTYQSGQLSLSGTYSHMEKRGSRYLRYALYNATKYVCLWNPTFAAYLAKKRAEGKHYNVALSHAIKKLVRLIYALEKSKRPYSTAA

SEQ ID NO: 448610 - protein, 411 aa, unidentified
MDVVVQRCAFLDVHRDTIMACARTPDGAGGRREETVQFRTTTSQLLALADWLVARDVTLVGMEATGVYWKAPHWILEEAIDEVWVINARHMRNVPGRKTDVADAAWGAQLIEHGLVRPSFIPPRPTREQRDLTRYRKSVIEERGRETQRLHKVLEDAGVKLSSVASSVLTASGREMIDALIAGQRDPEVLAQMAKGRMRSKIPELKDALAGRFNEHHALLCRTMLARIDQADATINELTARIEALLDPHEAAVSLLVGIPGVSNRLAQVILAEIGTDMSRFPTPGHLASWAGMCPGNNESAGKHRSGRTRHGSKWLGIALVEAAHAAGRSKNTYLSSQYARIRGRRGAGRAAVAVGHSILVICWHLLSTGETYTDLGGDYFDKRRTSTAHQRRLVAQLEAMGHKVTLEPAA

SEQ ID NO: 448611 - protein, 434 aa, unidentified
MMRGNEQEPSLKEKRRCAMKMPPPAPSSEGAVIKYVCGIDIGSQCCVGCICRPDKSVVIKSITFANAREGWQIWEEKLKQLDAPAGEILIGMEATSRYGENLYQELEQRGYVLRLLHPGQTHHFHQQRGLRAKTDRLDAMTIARALLSGEARMGYVPDEQVATYRELVRLHTQLADTAASYQNEIQALVVVLFPEFTQVFADPCLPTALAVLKAFPSAQALVEAGVEALVQVLRAQPAAHYGRPTAKKLVALANQSVSSGRARAGRSTSLRILCDQLEHTQANLARLNTEIEQLLNTDPGVKGLQQVPEFGPKTLAVLRAELGDVQRFSRIDEVIAYGGMDIEIKESGLWKGKAKLSKHGSGLLRRVLYMSALRCIHRKESAFGAYYQRLVQRGLKKGSALMAVMRKMLAVAAHLLMHEDEEYDPSKVCGSAAG

SEQ ID NO: 448612 - protein, 391 aa, unidentified
MDSSGATLARARLPEGVAGMTRLHAMIASLAGDRAEEEDVQVLVGIETDRGPWVQALTAAGYLVFGVNPLQAARYRERHAVSGAKSDAGDAHVLADMIRTDSHQLRQVAGDSAEAGAVKVVTRMHKTLIWERTRHVQRLRHALADYFPAALEAFEDLDAPDTLELLARAPAPGEAARLTLAQISAALKRARRRKIGEKAAAIQAALRTGHLGQPAVITAAYAASVRALVAVLATLNEQVKVLEGQVETHFGAHPAAEIILSQPGLGPILGARVLAEFGDAPDRYASAKARKNYAATSPITRASGKRKIALARYVHNDRLIDALMAQAFASLQASPGARAYYDKQRARGSDYNAALRQLANRLVGILHGCLKTGTLYSEETAWSHRFEGLAA

SEQ ID NO: 448613 - protein, 448 aa, unidentified
MSKLHVGLDVSQKSVAACFVLDDGTEPVKRFSFEHNPAGVDKLVAKINTTAEEIGIDQVMIGMETTGLLWWHLSEALRNSERLEHLQPQVYAINAKLVAHFKKAYVEMDKTDPGDAFVIADRLRFGRLPKLAEPDERYLAIQKLTRHRFHLTHSLAREKNRFLTHLFLKFSGFCQEEPLSDPFGAASSALLTEFFSVDEIAQMPVEDLTDFLVEKGKNRFPDPEAVARATRQAARNSYRLSKCLADPVNIVLAMTLENIRFFEKQIAAVEKPIAKELAAFPGAQVLLSVPGLGPVFVAGIIAEVQDVNRFDTDAQLARFAAIVWKKNQSGAFEADDTPMMHSGNEYLRYYLIEAANSLRMHNEEYAAYYQTKYREATTHQHKRACVLTARKLVRLVHTLLRKGQLYQTPDQRKEARAVLPAGMTPGELARHVVRRRQAKRRFRVHLDH

SEQ ID NO: 448614 - protein, 456 aa, unidentified
MAEQELDQAEEEPAELVARAAAIDVAKDSGMVCTRVPHESRAGRRVQKVWSVPARFAAVTELADHLRCEGIERVVLEATSDYWRIWLYLLEAAGLQVWLVNARDVKNVPGRPKTDKLDSIWLCKLNERGMLRPSFVPPEEIRDLRALTRLRTTLTAECSRHKQRAEKILEDALVKVSAVVSDLFGKSGRAMMRALVAGERDPKVLAGLALGRLRPKQAQLAEALTGRFRDVHAYEIGLLLDLVETLEARITELDGKIEAHLAALPGVPPACASCGLIGGGHAPGCGNYGARLLSLVQRLDEITGVGVVTAQVIIAELGLDMGQFPTAGHASAWAKLSPQTIQSGARTRAGKTGKGNRWLRGTLGDAAMAAGKTDTYLGERYRRIRRRRGKQKAIVATARAILEIAYLLISNRDTRFCDLGAGYYDRLDPQRQTRNKIRELERLNPGMKVTLAVAAA

SEQ ID NO: 448615 - protein, 350 aa, unidentified
MTRYIAFDVHAESTTCVVLSSAGKRVKEEVVETSASALISFLKTIPGRKQLVIEEGTQSAWLHETLSPFVDEFVVAIVDESNGAKNDSRDSWRLAEQLRIGAIQRTVFKRPQELAALRAAVKAHRLLTSDVVRVKNRLRALFRSRGVAVTEEVYQPNARSVKLACLPQHVRYQAEMLGKQLDLLEPLRDEARGRLREEAKEVPSVERVATLPGFGVIRAATLVAATITPNRFRTTRQFWSYAGLALVTRSSSDWVRHEHGWKRAAVNQTRGLNRNRHPWLKDVFKAAATTVAAMPNHPLHADYQRLLQQGTKPNRAKLTIARRLASAALAVWRKQEAYEPNKHKSLIAKP

SEQ ID NO: 448616 - protein, 416 aa, unidentified
MKIVRPICCGMDVHKNIIVATIGITNKKTRITEYIQETFSTLNSDLLNLKQWLINHKCFDACMESTGKYWIPIFNILEDEINIYLTHPKYVKAIKGKKTDKKDSKWICDLFKHDLIKFSFIPPKEIRALREISRYRYKLVGMRSSERNRYQNCMTVSNIGIGSVFSDPFGKSAQAIMKEVLESDIIEDEKILKCIHGSCKNKDKILDSIKHCNIETDQRFKMNESMTHMEELQVHIDNCEIEMMKRAAPMFDQFMHITQLPGISTLSAILIISEIGVDMKQFESDKQLTCWAGLAPANNESANKKKSVRISKAGQYLKPLLVQCALGAIKDKEGYFGIKYSRIKKRRGHKKAIIAIARMMLVSIYHMILTGETFNPSDYESFRNPKPPIKQQVLTEESAIEFLKKSGFDVSKLTKP

SEQ ID NO: 448617 - protein, 392 aa, unidentified
MIYVGIDVASQKHDCFLLRDTGEVFSKTSFTIKNDFEGYKKLHNSILQFVESTKDSNVRIGLESTGHYSKNILLYLIKQGYQTTLINPILTNMDRKASTVRKTKTDKIDAEAICKFLDKNRFDFKPYTLLSYHIDALKSLTRQRFSLVKQMTQQKLIFQRLVNVIFPEFLSHFSNDYGESVLNILYSYPTPKKLAKAHKESITKLLHSRCKITSSEILELAKNSIGQSEDYLGFELKHTIDMIRFYQSQIEIYNKQIEIELNETEYGKIITSIPGVGIITGAMIISEIGDINNFTTQDQLLAYAGLDPSVYESGQFESSHNKPSKRGSKYLRWAIHQASSVIWQHDNTFKDYYLKKIKEGKHHYVAIGHIDKKLIRVIFSLLKNKSMFIPQK

SEQ ID NO: 448618 - protein, 311 aa, unidentified
MNNTIGIDISKDTLDAHRLADGQHKQFLNGKTGHAQLVKWIGKQSDPLIIFEATGAYHRQLERVLCTHIIPFVKVNPKQARRFAQASGKLAKTDRVDCEMLAKMGAALQLMPKPFTAENLYDLKELLSARRALIKDRTAAKARKATVINALIKQQLEKRLRQIKNDIAKIDALMLDVAREDQYMSERLDILFSIPGIGVITALMILVDMPEIGALNNKQVASLAGLAPMSQSSGKWMGKARIQGGRPNLRNAIFMPALVAMRHNADLKTKYDQLVTAGKEKKVAITAVMRKLLVLANALLRDNRKWAEKAA

SEQ ID NO: 448619 - protein, 453 aa, unidentified
MTKSKTVDHPDLKMVNPQAAAIDIGSTMHMAAVSPDADIMPVRAFGTFTQDLHDLADWFRSCGVTSVAMESTGVYWIPAFEILEAHGFEVILVNARYAKNVPSRKTDVSDAGWLRQLHSYGLLRGSFRPEAEIATLRAYMRQRERLTEYAAAHIQHMQKALMEMNLQLHHVVSDITGATGMRIIRAIVDGERDPEVLAAFRDIRCHSSLDTIKAALVGNDREEHVFALTQSLELYDVYKAQIETCDRRLEAAVGALTVRADNGVVPLPKARIKGKQHNAPSFDVRAALYGVLGTDLTQIHGLGPSLALKLVAECGTDLRAWKSTKHFTSWLCLAPGNKISGGKLLSSRTRRSSSRAAAMLRLAAVTIGRSDTALGAFYRRLSSRIGKQKAVTATARKIAVLFYNAVRHGMTYQDQGAAAYDERHRQRVLSNLQRRARTLGFALAPIPETATVS

SEQ ID NO: 448620 - protein, 479 aa, unidentified
MKPQSTPSFTAFVGIDWADKKHDFCIQAAGSDQRVFGTLDHSPEAIMQWACSLRDRFGGPIAICLELAKGPLVYALQRCEFLVLFPVHPSTLAKYREAFVPSHAKDDPTDAEMALDILLRHPDKLQPLKLQSVAMRTLTALVEKRRSLVNDVIGTTNRLASTLKQYYPQALDWFEHRDTLIFCDFLSLWPTLKHVKRARRSTLESFFHLHNVRRAYLVEERIQGIRAATVLTEDESVIRLNQMVVQALVEQLRALLRAIDHFDAEIDAVGKSLPDYDLFAALPGAGHILAPRLLVAFGEDRDRYTNAAQIQSYSGVAPVVERSGNKCWVHWRIACPTFLRQTFVEWAGSTIPRSFWAGAYYQQQRQKGCSHRVAVRALAFKWIRIIYRCWKTRTLYDESVYLKALKLRGSPLLANVSESAKNDLTECLRPRSSYSKLGEIGHSLRVCCNTSHKPFITESFRIAWISGYGNFLARRQAFP

SEQ ID NO: 448621 - protein, 353 aa, unidentified
MSGIVRTPHRRQAVPDPIHGVVVGIDVSKGRIDWRACCLGQWGSPHRVTQGEAGFLRLEQHLLAAAEGGQEVWVALESTGPYGQCLQEWLLDRGWRVVRVNPYHVKRSRELHDGNPRKDDVKDPGVIADLVWRGSYQSVRRLYGPYAELRVGFGEWCSLAKARTALRNGAQALLELWFPELVRLFANPLGKSVQALIGRYDSPSALLLAGRRRLHVTLKQETHGRGVRYGEGIWKAAQGSVAVRQGQESRVRALRDLLGQLAYVEAQHLCLRGELERWLAQTEEGAYLRSVPGLGLLTAAGVLGECGPLAEFHSVRALEKFVGMNLYRISSGKREGQVHLAKRGRQAVRALLV

SEQ ID NO: 448622 - protein, 346 aa, unidentified
MHKSTLIGVDLAKSVFQLAMADKHYRITGSKRLSRTQFYQFFVQHAPAKVVMETCGTAHYWARTLIAMGHEVVLLPAQYVKPYVRRNKTDRNDAMALLEAIRNPALKGVPVKSEHQQALQSLHRLRAQCMQTRNARINALRGILREFGVVVPMGPRAAVKTALAALEQLPALLKPSLCAVLEELHSLERRMKEIEAQLKQEVKADPVLQQFMQISGVGLLTATATRATVQTPKQFKNGRQFGAWLGLTPREYSSGNQRYLGRISKRGDKYLRTLFVHGARSVMVRIKIRQRSGQSLTYLQAWAAQLEQRVGHNKATVALANKMARILWATWMHQRDFDGDYAKAIH

SEQ ID NO: 448623 - protein, 428 aa, unidentified
MDRRNNQAKEVAWQDIQLFGGLDWAQDHHDIVAVDARGRVVVELTIQDTAEGWAQLRETLLASAAGGPSAVAVAVETNNGPAVERLLALGCAVYPMNPKAATRYRDRKAPSGGRNDRLDAFSFADALRTDGHAWRALKADEPLTQELRLLCRDEVGLIEQRTALVNQLRAALREYYPAALDAFDDWLCPGAWSFIEQFPTPAALVAAGRRRWEKFLHAHRLYRPETYPRRMEVFARADRFAGPAAVTKAKSRLAVALAGQLRVLHKQIADYRAAIEALFAQHPDHDIYDSLPGVGKKLGPRLLGELGDDRDRFADAEGLQGHGGTAPVTISSGQKRFVKLRRACNKWLRSTVHLWANLSRAECVWAAAYYDRKRQEGKNHATALRCLGQRWFKILQRMRQDHRPYDEAVHLRNMTRRGAWKLALDSEQ

SEQ ID NO: 448624 - protein, 401 aa, unidentified
MKRLSGGIDIGSDNHHIIIMDDEEQILYDQKIAHKFSEFYKAVREFREIEKREGGIISFAIEGKNGYGAPFDRILIESGFTLYNVDNLKLKQFRNVFGAEWRNDKRDAKMLAKMLKLRDYLDAENEKAFIAVEKATKINEKLKILSRHQQTLIDEKIRLQNRLRKRLLEVCPEILEIGDTDSKKMLRLLVRYPDFSRYKRLTMGALLKIKMIGKKQASLMLESLRNTKYVEELADIYKTIISSHSRRILELKEEIEMLDKKLEKLGEKSSEVKRLKSISGVGTKLSSRLVGEIGDINRFKNERQLAIYCGVACIDDESGKHKRTRVVYKANKICKATMIEIAGCTIRYVSESATYYAKKRTEGKEHNHALRCLARQLIKVIFKMLKEDRDYILKEEMEKAA

SEQ ID NO: 448625 - protein, 410 aa, unidentified
MSYMVAGIDVHKTMLMVAVADATQPELEFKCRRFGTTTSELRHLRAWLEEHGVIEVVMESTAQYWKPVWLELEPGFQLQLAQAQSNRAPKGRKTDFRDTQRLVRRLIAGELILSFVPESEQRQMRMLTRRRVQLTRDKMRLQSQLECLLEEMRLKLSSVVTDLLGASGKRILEAIAAGESDAEKLAELGDDRLQCGREQLRDALDARVNELQRGLLRLYLEQLALIERHMEAVTLMAAGMMHAHQEKIERLAEMPGIRAVAAQQILAEVGPEAAAFATAGQFSSWVGACPGQQQSAGVNHNGRCPKGNRYLRRVLCQAAQAAVKKKNSWFQAVFRRLIIRLGYAKAIWAVVRRMTVVIWKILHEGAHYEERGQPTSPKAAKRRAQRMVQELRKLGYAVEIKPLQPTVSVV

SEQ ID NO: 448626 - protein, 507 aa, unidentified
MLDFFFIILTNGFSLNDYTMENNAFLGVDVAKGSADFLLVNARKETLEEGFMLDDCAEGRKVLCRLIEKWFASGITHLYCAVESTGGYENNWFTLLCSLSASYDQKNKTLRVARVNPRPVKACGKAGMLRTQTDQTSALAIASYLIGFPENVRYSPHTGQSDDPVWLAARGQAGLIRMLIKQKTQLSSQLEKLLYTRLGETMIYCRNGIPGWLLRLVSRYPSREHLQRAGAGKLAKIKGLSPDKAKSLLGKLNGDQPATPVIACHTIKATARGILHLQKQIDTQQTFLIDQFSEHPDVRLLESITGIAVTSAVRLIVEIEDVSRFDSSKAFCAYFGVHPTWRESGDGHWKTGMSKQGRAQVRGMLYMSSLTAIRWDPDLKKLYHRFRKENRMNHYQAMGVLMHKLLRIIYGVLKNQTPYDRQVDRENRRQSKEKQQAYQKKIAQNKAVQKTTRQRFMSNRADSTEDAPISRRAWKKRKQEASQSSLVEEYAGSPPADNPKRIPTENI

SEQ ID NO: 448627 - protein, 436 aa, unidentified
MRKIRINAAGIDIGAKKVFVYVEGQKVKVFFTFTEDFELLCMYLHEHKIESVAMEATGVYWSILYEMIEEAGIDAWLVDGRQTKQVPGRKTDIKDCQWIQELHSLGLLNRCFVAKDDVKEVRAYHRLREDHIRSSSMHINHMQKALTEMNIRLKEVLSQIHGASGIKMIEAILKGERNKNLLLSMCNSQIKKNKKEEVLKALNGRYTKPGLFALQQAFEAYNFYQNQISQCDKQIERIIHKMGKGSKNENLLEKRKSIRHNKPEVKDLGANLIDIFEGKDATVISGITDYTWMQLLSEVGTDLSRWPTQKHFTNWLGLAPGQHWSGKMKRNKRKKGHPKAGQIFRKIGQSLITSKKIALGAFGRKLRARKGPAIAIKAMARKLAELYWRVMVKGIDYAEYGIKKYEEQLLAQKQKSVERLAKELNLQLSYMQPHTE

SEQ ID NO: 448628 - protein, 366 aa, unidentified
MKKTSTVRVNGNMIFKGHKLTIGVDLGDRWSNYCVLDEPGEILLEQKVATTPEGMKQTFERIPRSLIAMETGTHSPWVSRLLKELGHEVLVAHAQKVNLISKSTRKDDRHDARTLARLARIDPELLGPVRHRSAQAQIHLTVIRARAELVRARTALVNAARGLVKSYGQRLPKCGTRQVSRELGAGLHAELREVLEPLLKEIESLNERIQEYEVRVEKIAKESYPQVELLKQVKGVGTQIALTYVLTLDDPHRFPKSREVGGFLGLCPGRRDSGESQPQMRISKEGDRYLRTMLVQGAHYILGPFGEDSDLRRWGLKLAARGGKNAKKRAVVAVARKLAVLLHRLWVSGEVYEPLRNSQKAMRAVA

SEQ ID NO: 448629 - protein, 336 aa, unidentified
MKTFVAVDFHKSYSYGSIMNQAGEILKQGRFANHPEALGKFLGEFAGPDCSAVLEATRGWSVMHDWLEDVAGQVTLAHPLKVKAIAEARIKTDKVDAQTLAHLLRCDLIPAAHVCSPQARLLRRVLRHRMFLVSVRTMAKNRIHDLLDRYPLIRAQWQAEELFSKLGITWMRQIELPAPERLILDSELQMLEHLNLLVKEAEAYLQEVGSRDVRVRNLMTIPGIGKTLAMLVVAEIDDVRRFARVESLHAYAGLVPSTYSSGGHTQHGAIIKTSNKYLRWAMIEAVWPAIRTDVGLSQFYHRLAARKPTNTARVATARRLLTIVYRVLTENREYRP

SEQ ID NO: 448630 - protein, 420 aa, unidentified
MSFKILKFNCCGLDVHKTWIYACIGITDSNNRTEYKQSRFSSFSKGLHELCNWLAKYNCKDVCMESTGKYWIPVFNILEQHDIWVTLSHPKYTKPMKGNKTDRKDAKWICDLYMCGMVKPSFIPPADIRDLRDLVRYRFKLTCMITGEKNRAQNCLTVSNLKLDDVFSDVFGKSSRSITEQILQHPGEKFDVSPYVDSRCKTPIAEIQAAVDGAISKEQAVKLRQCLDHIDELQKHISEVEQEILRLSDKYEAALNLIRTVPGFDKNPMTSIQVLSEIGGDMSVFPTAKHLVSWAGCCPRNDKSDRKIKSTRISRAGSYFKPVLVQVANGLLRSKKHPEITDRYKRIKARRGHKKAIIAICRMLLTAIWHILSDLKPYTAEGFRESRPVNESKVLTTSQALNLLKQRGYIIKDDLTPAMN

SEQ ID NO: 448631 - protein, 394 aa, unidentified
MKIYVGIDIAKLNHFAAAISSDGEIILEPFKFTNDADGFQLLVSKLESFDKNSIIIGLESTAHYGDNLVRYLVAELYQVCVLNPIKTCQMRKNNIRKTKTDKVDTYVIAKTLMMQDDLRFVSFYDLDMMDLKALGRFRQKTIKQRTRLKIQLTTYVDQVFPEIQYFFKSGLHQNAVYALLKEAPSPKEISSMHMTHLANLLKVNSHGHFTKEQAKELRVLAQKSVGANDSAISIQITQTIQQIELLDSQLDKIEAEMTDIMKFNDSVIMTIPGIGYINGGMILGEMILGEIGDIHRFSNPNKLLAFAGLDPSVYQSGNFQAKTTRMSKRGSRVLRYALVNAAWNVVRNNATFKAYYDAKRAEGRSHYNALGHCAGKLVRVIWKMLTDELEFNLE

SEQ ID NO: 448632 - protein, 401 aa, unidentified
MQPHLCVGIDVGCRAHRVGIARPDGSILEEFDISHSDAGFSDFFRRVEEHRCELSLPVAVAMEGYNGYARPLDRLVQEKGYRLFNVNNLKLARFKEVFPGAAKTDAIDARKILELFRLKDQLPLAMDAIQEVIPSSQVNEKLKRLSRRRRRLVIEKMRVLNRMQADLQAVCPELLAATNAADNLWFLRFITSREDLRQLARLRSATVMKIQGVGVKYAERIRTWQRKARFSNEVEYVGPMIIQDARRILELHQQIRALDDTLEELADQSEIACRLSTIPGFGKTSIAELAGEIGTMQRFDSEAGLALYLGMCPLTHQSGDITWARIPRQVNTRCKAAMMTTVARHIGCVPESRAYYDRKREQGKTHNQAIRALGRHLVRVIWAMLRDGRDYEIREDIHPET

SEQ ID NO: 448633 - protein, 315 aa, unidentified
MSDGPRFVGIDVAKAQLDVAVRPSGERWAVPNDAGGVVTLVERLQALQPTLIVLEATGGLERLATAALATAGLPVVVVNPRQARDFARATGQVAKTDALDARALAHFAEVIRPTPRPLPDAQTQELRALLGRRQQLIGMRTAEQNRLAGTSGRLAQDIEAHIAWLNTRIATLDNDLETTLRASPLWRENDDLVQSVPGIGPVCARTLLLELPELGTLTRQQIAALVGVAPLNGDSGTLRGRRTIWGGRAHVRTVLYMGTLVATRFNPQIKVFYQRLLAAGKIKKVALTACMHKLLTILNAMLKHRTSWQTQDVQN

SEQ ID NO: 448634 - protein, 337 aa, unidentified
MTIIRIGLDTAKHVFQVHGVDENEQTVVRRQLRRSEMGKFFNRLAPTRIGLEACGASHYWARLLRGLGHEVVLLPPQYIKPYVKRGKNDANDAEAICEAMSRPAMRFVPIKSAESQADLMLLGVRDLLVKQRTAVINTIRGYAAEFGVIAAKGPVKVSELLQQAHAEEANVPALALDMLRLLAAQLDTLDVKLKLIETRLMALHRENPLSQCLASQPGIGPIGAVSFAFRVTDPKSFRSGRHFAAWLGLTPKDNSSGGRRRQGRISRQGNEALRKLVVLGATAVIRFARPGHASPWLLNLLARKPKKLAAIALANKMARTLWAMMVSGELYRRPHPA

SEQ ID NO: 448635 - protein, 362 aa, unidentified
MIIIGCDFHPSGQQVFCVSRETGEVVAEKWLSHSGDEVDQFYGCLPPGSEVGVEASGNMLWFERKLAKYGHKLRLGDAAKIRAKETRKQKHDRRDAELMAQLMLKDDFPELRWTPSVAERDLRQLLMHRHKMVRMRAQVKNQLQHIALNQGEQKKWRLWTKPGRDLLGKLELEPWRSGRRDELLELLDTLDGYCGSLDQAVEQAAQQNADACLLMSHPGIGPVISLALVLTLGDRSRFENSRKLVSYLGLNPAENSSNERRRLGGISKQGNPFMRLLLIQGAQTAVRGDTELGHQYRRLAVRKNKRLAKVMVARKLVVRMFWILKTQKSYPELVRMRGSSRNSVVTTTDDLSERPASPFGQA

SEQ ID NO: 448636 - protein, 401 aa, unidentified
MVSDFRKGRYNLMKIFVGIDIAKLNHFAAAISQGGEIILEPFKFTNDADGFQLLVSKLKSFDKNSIIIGLESTAHYGDNLVRYLVTELYQVCVLNPIKTCQMRKNNVRKTKTDKVDTYVIAKTLMMQDNLRFVSFFDLDMMDLKALGRFRQKTIKQRTRLKIQLTTYVDQVFPEIQYFFKSGLHQHAVYALLKEAPSPKEIASMHMTHLANLLKVNSHGHFTKEHAKELRVLAQKSVGANDSAISIQITQTIQQIELLDSQLEKIEAEMTDIMKFNDSVIMTIPGIGYINGGMILGEIGDIHRFSNPNKLLAFAGLDPSVYQSGNFQAKTTRMSKRGSRVLRYALVNAAWNVVRNNATFKAYYDAKRAEGRSHYNALGHCAGKLVRVIWKMLTDEVEFNLE

SEQ ID NO: 448637 - protein, 409 aa, unidentified
MERIVERAAGLDVHKDVIVAEVHLPGGRADQGRFLATTPGLVVLRDWLLARGVTRVGMESTGVYWKAPYYMLEDAMEVWLLNARHMRNIPGRKTDVADASWICQLIEFGLVRPSFVPPAPIRELRNLTRYRKAQIEERTREAQRLDKILQDAGVKLSSVASDILGVSGRAMLAGLVSGTTDAEVLADLALGQMRHKIPALRAALTSRFSTHHAVIVSAILTKLEFLDELIAGLTTEIEVVIGPFSHQVELLDTIPGVSPRTAQGLIAEIGADMSVFNTASRLASWAGVCPGHHESAGHSRSGKTRKGPKWLGIYLHDAAMAAIRAKNTYLGAQYNRLRPRLGHAKALVAVEHSILVAIFHMLDRDQPYHDLGADYFARHNDPARRARRLISQLETLGYSVHAEPPPTAA

SEQ ID NO: 448638 - protein, 454 aa, unidentified
MRKPQVVPDEDHEVVYERVAAVDVAKASGVVCLRTPDPARPGRFVNRIWDNVPAMRAQIAELGAELLRCRVQMVTLESTSDYWRIWYYVLESIGLAVQLVSASQAKNLKGRPKTDKLDAMWLARLTQWGMLRPSFVPPAAIRRVRDFTRARQDLVAERTRCLQRVEKLLEDAMIKITSVAKDGMKAKSVVAMVAALAAGQRDPRALADLAKGPLRAKRDQLAEALDGMFDSHHGMIARSLLDQVAFLDRQITLMEDQAIAALAGVPESWGVDADGQTGPQAGTSPDSPVLAAAHRLAEIPGISLWLAIVIIAEIGLTMTCFPTPAHLVSWMGLCRSAASSGTRHGKGKPKKGNSYARAAAGQAAIGAARTATFLGERYSRIARRRGKAIAQAAVARSIMIIAWHLLNDPQARYRDLGPDFYASRINRDKKIRNHIRGLQALGLTIAITGDEQAA

SEQ ID NO: 448639 - protein, 346 aa, unidentified
MLHAGLDLSRKRLDFHLLDREGVTVEVGAAPPDADGLRGLAARLGRHGEPIRAAIESMNGARFVHDQLELAGWEVEIADAQKAKGLAPLACKTDRIDAWVLAELSRRELVPAIWLPDPAVRGERERARWRLHLVRHRSSLKQRVHALLLAHGKPCPVSDLFGVAGRGLLERLELPEPWQGHIHASLRLIDELDQEIDACERELRRLGADHRYVPLLMTVPGIGSVLAYTIAAEIGDISRFASPRKLAGYTGLCPRVYQSGDSDRRGSLSKQGPRYLRWALVEAATHACTHAAYRDRYQRTKTRLGKQRGAKIAQVDLARTLTEAIWYMLTRNQPFAPANATDPLAA

SEQ ID NO: 448640 - protein, 322 aa, unidentified
MSVSVLGIDIAKQKFDAALLVDGKTKHKTCKNSAEGFETLMLWLEKQGIKKIYVCLEATGSYGEDLAIYLHEAGHTVSIVNPARIKGFAQSELIRTKTDKIDAALIARFCLAMKPDPWIPPSPEIRFLRALVRRVDSLIDMRSQEKNRLSTAHESVITLIKEHIAYLDEEIEKIRRQIADLIGQNPHLKRRKELLDSIPGIGKATIPHILAELDDLEKFNHVRQMVAFIGLAPKETLSGSSIKGKPRLCKIGHARLRKALYMPALVSIQCNPVMIAFYNRLKEKGKNGKVIVCAIMRKLVHVIFGVLKSGKMYDPNYKPASA

SEQ ID NO: 448641 - protein, 293 aa, unidentified
MKKLFIGIDFSKEKLDATIILACGMNEIGSREYGCFPNNTTGYRKLCNWVKTNAWNTIAEEWLFCGEDTGSCSIGLSKWLYGKGYDIWIENAYAIKHSSGIQRVKNDKADSAIIAEYAWRQQDKVVPFEPLNESLAQLREIFLYRHKLVGQRVAMELRKEDKSQSNKSKAISFINRKSKHLIAEINKTIAECDKAIDSIIEADEELKENYAIITSIKGVARQNATCMLVYTNNFKKFGYDPRKIACYYGVAPFGKQSGTSVNTPAHTSHFANKLIKSLLGLSLIHISEPTRPY

SEQ ID NO: 448642 - protein, 338 aa, unidentified
MFVIGIDPHKGSHVAAVLDPAERVVDQVRVRADGQQRDRLLAFAARFEPRCWGVEGAAGVGALLAQQLVAVGEHVVDVPAKLSARVRVLDTECSDKTDSHDARSAAIVALRHPRLRIVQREDHSVVLRLLAKRHHELVAQRTRAICRLHAVLGHFVAGGLPRRLSAARAAQELRRIRPVDAVGIERRRQALELLTEIRRADSDLVQLKDRITDAVAASDTTVTGVHGVGPIIAAYLIGYTGDACRFPTAAHYARYNATAPIAASSGPNPRHRLNPRGNRQLNHAIHMAAVTQVRNDTAGRAYYLRKQAEGKSRKEAMRALKRRISDAVYRQLRADATH

SEQ ID NO: 448643 - protein, 411 aa, unidentified
MRRVIGIDIHRTFGEVVFWEDGKLRRAGRIDMTRTALEGFGKSLLASDEVVIEATANSMGVSRVLEPFVARVIIANPLQVKAIAQAHVKTDKIDAGTLASLQAAGYLPQIWTPDASTERKRRSAARRYQVVRHRTRLKNEVHSILHAHLIPKCPHADLFNARGRAWLSAQPLPEDERAAIDRHVRELDRLAEDLALFDREIAQDAIDDPAVNRLMTITGVNLTVAAGIVAAIGDIGRFKSPQKLVSYFGLNPRVRQSGLGAAHHGRISKIGRSHARAMLVEAAWAAAKAPGPLHAFFVRIRARRGHQIAAVAVARKLTVLCWHLLAKGEDYQWARPALVANKTRAMQLQAGHPQQKGSRRGPAYAYNIKALRDREMMIAAQAERSYERFVAQWKPRRPKEARGRLSSAGHK

SEQ ID NO: 448644 - protein, 337 aa, unidentified
MKLYCAADLHSNNHFLTIIDEHDKRVLEKRLPNDLAVTLHTLEPYRADSSGVAVESTFNWYWLVDGLMEAGYPVMLVNTAKARQYEGLKHTDDRYDAFWLAQQMRLGILPTGYIYPKEQRPLRDLLRERRRLVRQRTTHVLSTQSTVWRHTAVRLPSKVILGVSKKPWPQLSDANVELGVRAHRATIKVLTTQLEGIERAVLKSLAPRPEYQMLLTVPGIGPVIAWTIVLEAGDLRRFVNVGHFASYCRCVDSKRTSNERKKGENNVKNGNPYLAWAFFEAAHFAIQFLPAAKRFYERKATQRNPILAMKALAHKLARACYYIMRDKVPFDAARLFA

SEQ ID NO: 448645 - protein, 329 aa, unidentified
MQGRGRKGGDLRRKQGAGAGVFIGIDVSKKKLDVAARPSGEQWSVGNDEKGVVELCERLRQLSPTIVVLEATGGLELPVATALAVTRVPVAVVNPGQVRHFAKALNRLAKTDAIDAQVIAQFAEAVRPEPRPIADMEAQRFSELLTRRRQLVEMLVSEKNRLAVATTKPVKQRISYHLHFLKEELKSLDQEIDTQIRASAVWREKDDLLQSVPGVGPTVSRVLIGELPELGTLTGKEIAALVGVAPFNHDSGNLRGQRHIFGGRAYVRTMLYMAAVSAARCNPVLKRFYAKLRAAGKPAAVALTACIRKLLVILNAMVRDQRPWAPEAA

SEQ ID NO: 448646 - protein, 358 aa, unidentified
MQRKEFTFKGQKVFIGIDVHKKSWSVTTLLEVGTPKTHSQAPDAKMLFDFLNKHFPDGDYQAVYEAGYSGFSTYYALQSHGIDCIIVNAADVPSSQYENVMKTDPIDSIKLAKALRAGLLKGIYIPPLDKLDDRSILRFRKTIQAEIARYKVRIKHVLHSNGVRIPERYDRATHLSAHYLHWLRNDVTLLYSSRVSLDLLIDQAIISRKGLLAANQEIRRLFKSPKYNERAECLCSVPGVGPICAMSLLTEIVDFNRFSNERQFASYLGLIPLCHSSGEHVLTGEKSFRGNKKLGPIIIEASWKAVISDENLAGAYMNYKKRGLKPQEAIIRIARKLSNIILSVMKSGQKYISHAALQ

SEQ ID NO: 448647 - protein, 430 aa, unidentified
MKSNTQNAKIEAITEKTLVLGIDVGSEMHYARAFDYRGIEYSKKPFKFSNTEAGFVTFKEWILDLKERHEKDKVIPGMEPTGHYWFNLGKFLQDNEMKPVLVNPHHVKKSKELDDNNPTKNDRKDPKVIAGLVREGRYMIPYLPDGVYADLRTASNIRFQLQAELTRIQNRISRWFNIYFPEYKTVYGKSDAKSGMLILKTAPLPEDILTLGIDGVNQIWRDAKLRAVGKARAKILIEAAEHSVGSKEGAVSGKMEIRMLLEDYESRNTRLQEVMVLIEELVRKIPMTEKLLEIKGVGIRTVSGFLAEVGDISRFNNPKELQKLAGLALVENSLGKHKGETTISRRGRKRLIYLLFEVAMSLVSKNQEFRELHNYYTTRRLNPLKKMQSLMAIAAKLIRVFYAILTKGVDYDPKKMVSDIKRPAVYLQAA

SEQ ID NO: 448648 - protein, 443 aa, unidentified
MARKNQKRFEIVHPDCAGIDVGGGEHWVAVDPEKCKDPVRKFSTFTDDLIALADWLESMDVNVVAMEATGVYWIPLFEVLDARGFEVYLVNSRATRQTSGRKSDVLDCQWIRQLMTYGLLSGAFRPADQICSLRSLVRQRMNKIRDQAKTINRMQKALTQMNIQLANVISDITGVTGLKILRAIVQGEHDPEKLAAFRDGRIRADQATIARSLHGNWRAEHLHALGQELACHDFLEKQIGECDQAIAQTLSRLPVLEENTAIPSKSLRSPHRTSDDQRNLHRALNKIMGVDLTAIPTIGIDTALVLASELGPDLSKFPSSQHFCSWLGLAPPTRISGGKPLPGKAPKVINRAAQALKQAASNARQDKSFIGASHRARLTRMDTCCAIKATAHQLARLIYAMLTKGQPYVEKGLEAFEEKSRDRQLRALERKARKLGMQVVKAA

SEQ ID NO: 448649 - protein, 387 aa, unidentified
MPQPNDLSRSLVTLEQDSTLIAVIEMGQSSWLVAGIVPGIERQPLKKLAADQDGLLQLLHRWRKEAAQAGHPIKRIAVAYEAGRDGFWLARWLRAREIEAYVIHPSSVPVSREHRRAKTDRLDTELLKRAFLGWLRGEPKHCSMAAIPTVEDEDARRPSRERESLVGECTRIVNRVKANLARLGICGFRPRLAHAPKRLETLRTPEGTAVPANTLAELQRDMVHLRFVKQQIKEIETARAKRLEQASGGGRDAMVRLLARVVGIGIETADMLVQEVFSRKLRDRKAVARYAGLTGAPDESGQKRRERGLAKAGNARVRHAMIELAWGHLLHQKDSALAEWYERRTVDARGGTRKTMIVALARKLLIALWRLVTTGEAPAGLLLRPAA

SEQ ID NO: 448650 - protein, 275 aa, unidentified
MSQSSTLYIGMDVHKDSIAVAYVAQDHGAEVTYLGTIGTRQCDIDNLTRKLQSKAKQLVFVYEAGPCGYWLYRYLTKKGHRCWVVAPSLIPKKAGDRVKTDRRDAGQLARLMRSGDLTPVYVPAVEDEAIRDLSRAREDAIRDLKTAKFRLKAVLLRHDIRYTGRATWSPAHLRWLSEVVCATPAQQIVFQEYVRAVHEHTERLQRLEQELQEQVKSWRLQPVVEALEGLRGVQFTVAVTIVAELGDLTRFENPRQVMKYLGLIPSEYSSGERRR

SEQ ID NO: 448651 - protein, 406 aa, unidentified
MNYLGIDVSKSTSRYVLLDNDGEKAAKPFTLDNNSQSFTQLLERLKELNLQSDNILIGIEATGIWWENIYCFMTEQKFKVIVLNPHQTNKFREALRLKAKTDDIDAYVIAGLLRSGEYAASYIPEETIQILREIVKLRHQLVTNRQSFERQAQALLGLLFPEYEKTAIKNPFSVASLAILKAYPTAKHLAETKPKNIEKIVRHIKGNNFNIKEIQTLIETAQNSIYSGRAKDARGMNLNILLTHVETLHHSIAQLDKRIDDILSPQSPDDALSFPGANLLSIPGVGPKTLAAILSIVGSDGSAYPDGKNFIGYIGFFPQIYESGETRRDNIISKRGPSYIRRALYIAAVACLKHNAEFKSLYDRKVSQDKTAKQALIYVAKKLAHLCLSMLKSGEFYNPSRVFMPA

SEQ ID NO: 448652 - protein, 404 aa, unidentified
MQGTVAGIDWASEEHALCVVDAMGHKLAGELFAHDEAGIRALVARMRSLGVGRVAIERPDGLLVDRLLEAGFTVLPVHPNALKATRPRYEAAGGKSDGFDAFCLAELARTDSHRLRALAPDSDETKALRALTRTREDLVKARVRLGNELRAQLQAFWPGAAEIFFDVDSQIALAFLERYPAPADARGLGEKRLEGFLARHRYSGRRPAAELLARLRSAPEGRAGALEAEARRGAVLGLVAALRPIVAQIAELTSQIGGAVRAHPDGQVFLPLFKDPKSTITAARLVAEIGDDRARYPTSEALAADAGMAPVARESGKRKVAAFRWACDKRLREAVACLADSTRHHHPWAREVYARARSRGLDHPHAIRVLGRAWLRVLWRCWQDEVPYDPTKHGNLRRLQPAGG

SEQ ID NO: 448653 - protein, 315 aa, unidentified
MSESGREVFIGIDVSKEKLDVAVRPTGEFMSFSNNEDVISCVVDFVKFFTPSLVVLEATGGLETAAVGMLADKGLPVVVINPRQVRDFAKATGKLAKTDAIDAHLIARFGEAIRPERRLLKDQEAQKLTALITRRRQIVEMITAEKNRLHAAPKWTSKDIQTNIAWLEKCLKKVDKDLKNLLKKSPVWREKDEILQSTPGVGPVLSMTLLSGLPELGNLNRKEIAALVGVAPLNRDSGLFRGKRMIWGGRANIRSVLYMSATCAMRFNPTIRIFYERLRLAGKLHKVAITACMRKLLVILNTMIKNRTYWSTVQP

SEQ ID NO: 448654 - protein, 459 aa, unidentified
MRTLGIDLAVRAEHRAVVADEQGAYVTPVVSFHTTPVELDRLLAQARASAPGCELQAVMEATGMSWFPVAVYLRRQGVRVYVVNSQQVADLRRYYKRHAKSDRIDARVLARLPLVNPDQLHPLSLAAARMLACQRGCRELDRLAKQTTASLNRLRAIDRWAWPGLETTVFPDPFNPAGRWFRQYWYDPRPLLAAGAPRIRQQWQESGLNPADSGAWAEALVQLAQQVQTLYGSEGAYLDYAFLQAEAQREQARLQTAEEAHHTLQLKTVRRLYRQLHPSRHLETIQGVGQDGAAVYASFIGDPQRFGSVRACRSWSGLIPDSRQSANTEAKGLHITQAGPNLVKKFAYLDAETARQWDPQLAALYYDQMVHKGKHHNQALCAVATHLLDRILVVLREDRPYALRDVAGRPLTPTQARELVLRDYVVPDEVRRRNNKRARQARADRRAEHKQKREIAPVG

SEQ ID NO: 448655 - protein, 339 aa, unidentified
MQLYAGLDLHSRNTFIGIMDKEFKRVFGKRVLNKLPVILETLAPFHDQLKGIVVESTFNWYWLIDGLMDAGYQCVHLANPSAMKQYEGIKHTDDQHDAFFLAQMLILGILPQGYIYPKKDRPVRDLARKRLFLVRHKTAHILSLQSLIARCCGQRVSANDIRKFTVEDLQQLLKEEYIVLSAQANLDTIVFLKQQVRQLEKAIQKKVKLSKAFQQLMTVPGIGLILAMTIMLEVGDIGRFPQVGNFASYSRCVSSQRLSDGKSKGHGNRKNGNRYLSWAFTEAAHLSRRYNERFRSYYNRKVAQANTSLATKALSNKLARICYYIMRDQVAFRDNLLSQ

SEQ ID NO: 448656 - protein, 465 aa, unidentified
MSRRSKSNRSHSDRVKKRIAGHLEKINLFAAGIDIGSESHFVAVPEELDEQPVRSFGCFTADLEAMADWLVKLGITTVVMESTGIYWIPAFEILESRGLDVKLVNARHVKNVAGRKSDVLDCQWLLQLHTYGLLNGAFRPDEQVCSLRSYRRQRDTLVGYRASHIQHMQKALRQMNLLLDNVVTDITGKTGMTIIRAILNGQRNPVELARYRDKHCKKSEEEIAKSLKGHYRDEHVFALRQAVELYDTYDEKIRACDKALEQKINTFDSKDDKDSQKPSTPDKPSKKRKSRCAPDFDVRSELNRVSGVDLTDIDGIDENTALKIVSEIGLDMSRWPSAKHFASWLGLCPGTKISGGKVLNRKTKRLPGAAATAFRLAAYSLTRSKSALGAYYRRMRSKLGAPKAITATAHKLARLVYSMLKHGSQYVDEGQEYFEQRYRERVLKTLKQKAKDMGFTLTPVETAVG

SEQ ID NO: 448657 - protein, 393 aa, unidentified
MVCVGIDVAKDKHDCFIISSEGEILADVFTIPNNAEGFDTLLQAIRRSTRPEDKIKVGLEATGHYSYNILGFLLDKGLPTYVINPLHTNLYRKSLSLRKTKTDRVDARTIAAMLMSDVDLKSYTDTVYHNEELKSLTRYRFDKVRERAKLKQSVSRLVTILFPELEKLVSSLHSASVYALLSEFPGAKQISSTHMTHLKAVLKKASQGRYGQEMAETIRNAARSSVGSVMPAKSLELQHTIRLIRELDAEIEDIETAIQAIVDEMQSPITTIPGMGVRMGAVILAEIGDFSRFDSPDKILAYAGMSPSTYQSGQLSLSGAYSHMEKRGSRYLRYALYNATKHVCHWDPTFAAYLAKKRAEGKHYNVALSHAAKKLVRLIFAMEKSQRPYCAAA

SEQ ID NO: 448658 - protein, 383 aa, unidentified
MTTAIDTRDVCCVALELSKTSWVCAFAVPGESKVAIHKIKAGDTDRLMAVLTGSKARAEQQLGRPLQIVLCYEVGYDGFWLARYLIARAIHTIVFDPASFLMPRRSRVAKTDRLDAEGMTRILRRWLSGDREMARPVQIPSVEQEDAKRIERERKYLVEERISIIGRIKGLLALHGIWLVKKNIGKGLRQRLDAMKTGDGRPLAPFLRSEIERMLTRYDLISRQIADVEADRKAALNNEKGVFPHADKVRRLTTLGAVGETTATVLVAEIYHRTFLTRRQVASFVGLAPSPYKSGEVDRDRGISKAGSKLARHMLVELAWFWLRYQSNSQLSQWWHSRFGNQGMRGRKVGIVALARKLAIALWRFVEDGIVPDGATLKVRHAS

SEQ ID NO: 448659 - protein, 353 aa, unidentified
MRVYIGVDLHVRTQTVCWCDTTSGEQRERLLDHGRDDVRAFYAQFVAPAMVGVEGAGYSLWFHRLIEETGHQLVVGDAQAIRQLARRRQKNDRRDAQLLLDLLLRGDFPVVHVPSPASRDVLALLRYRHRLVRIRTMLRNGLQAVALSHQLRLGPRLFTVRGQQQFTILPLQGAYAAQRQHSLALLESLEERVQAIEEELEVRAQQEARVMRLRTHPGVGLLTGLAVVHALDPVQRFDRARRVAAYCGLDPKEHSSGDTQRFGHISKQGNRLLRFLLVEAAHAAIRKDEELRRFYFRIESRKNSAVALVAVARKLALRLYCMLREEIDYDEFRRRGRDARRARVGPSSVARRD

SEQ ID NO: 448660 - protein, 361 aa, unidentified
MKSTTIIAFDQHAAPTMAAVLLSGHRTPALHPLTSDIPTILRFIARVQRQGAVMCCYEAGPCGFELQRALTAHRIPCDVIAPALIPRRPGDRIKTDRRDAGQLAVLYRAGALTAIHIPTDQEEAARDLLRCREDIRADLLRARHRLSKFLLRHGRRFTATKKAWSKRHDHWLRAQAWPLPPLDQTHRAYLRAVDETLARLRDVETDLRALLDLEPLRPRVQRLRCFRGIDDLTALTIAAELGDPRRFATAPSTMAFVGLVPSEHSSGTKRAQGGITKTGNAHLRRVLVESAWHYRHHPFVSATLRARQHGAPADVIARAWTAQHRLHRRYGRLAARGKPKQHIVTAVARELTGFVWAALTQ

SEQ ID NO: 448661 - protein, 388 aa, unidentified
MIDEKGHKRGSLRVSHTKAGLSKLTTFLEQIIGTASKEEMACIIETTHGLLIAHLLEEGWPVYPVNPRTVDRRRAASGAKTDTIDAYLLAKTGRADLADLHRLVPDGEKVAELKTLTRDQDSLIQMQTRLVNQLTACLKAYYPVALDLFGKLQQRSTLLFLRTYPTPQAATAASVQQIQELLKQARHPQPISSAASIVQRLHEPHLQADAVTTRTKSRLMLVLVNQLLPLIEQIAQYDKEIDTLFLTHEDHELFESLPRAGQRLAPRLLAEIGDERARYRDASSLQALGGTSPVLFQSGTYSKAHRRLACIKPLRNALHQFAWQTTQSEPWAQAYYQRKRAEGKSHTVAIRALANVWTRIIFAMWLHHRCYQAATFEQAQQQHARRAA

SEQ ID NO: 448662 - protein, 411 aa, unidentified
MSHEITWLFVYGSPRVIIFTSEVIFMVFVGIDVAKDKHDLYAVDSDGVVLCDNFTFANSAAGFASLLERISVWGKIKVGIEATGHYSSNLLSFLKAHDFEVVVFNPLSVSRLRSAASLRKTKTDKNDSRYIARLLLTGVANPYQSQSYNISVLKSMTRARFRLFQEIQPLKNRFRRLLHVLFPELQGFFSNLYGNTSLNLLSVLPSAKDIAECNILKLTKILSEFSRGMLKRGRAEQLKSLAQNSIATYNYGDAFELKQTVRRIQFLSSQMSEIESEIHSVMTELNSPITSIPGIGNLLGATILSEIGNIKNFDNPDKLLAFAGCEPSTYQSGKYTATNTPMVKHGSRYLRRALYCAADMAYVNSPSFRSYIDRKRAQGKHYYVAMSHGMKKLVRIIFAVLSRNIPFSEPA

SEQ ID NO: 448663 - protein, 327 aa, unidentified
MVYLGIDVSKAKLHTCLRREGEDKQKTKVVTNSRDGVTALIDWLARQGTVPTQVHAVLEATGVYHETTAEALHAHGVTVSIVNPAQAKRFAQGLAVRTKTDAVDAGTLARFGALVRPAPWTPPPPEVRTWRALLARQQALSEDLRRERNRLEKAGATTMPPPVLDSLADSLAFLEQALAKLQQEIDHHLDGHPQLQADVALLTSIPAVGPKVAHQLLALLYARPFQSAEQLAAYLGLVPVERQSGTSVHARARLSKAGPARVRATLYMAAVVATRYNPHIKALYERLLARGKAKMAALGAAMRKLVHLCFGVFKTRQPYQADYAPEA

SEQ ID NO: 448664 - protein, 315 aa, unidentified
MTSAPIFVGIDVSKRYLDIAIRPGGLKFREANDEAGLLALIPRLKELQPQLILLEASGGYEMLAAASLRRAGLPAQIVNPRQVREFARSTGKLAKTDKIDAAVLAHFAQVLQPPLRPFPEGQQQELADLLSRRRQLVEMLVMEKNRLATASTVQVRKSLKSHIQALTSQLQELEEDLKDFLRQSPLWLTKDQLLQSVPGVGPGTSLSLIAWLPELGVLTGKKISSLTGLAPFNRDSGAWRGKRTTWGGRARVRPALYMATLAARRFNPVIRAFYQRLLAAGKSKKVALVACMRKLLTILNAVLKHQQPWRCPALT

SEQ ID NO: 448665 - protein, 343 aa, unidentified
MEKRYIGIDLHRNQFTCCMRLENGREYLSQWRLEDLPRFAKKLRPDDELAMETTGNTRLFYDAIAPCLARIAVVDTNQFRVISRSVKKTDSNDARLLALYLSKGLLPEVRMKDKQHGQLASLTQTRDTLVKLRSTLKNKVNNILSARGINLVKEALSSEKKLREVLALPFDSLMQIELRVIVQQIRSLNQSIEELEKTIAEEASKLKGHKNLISIKGIGKITSAILLSVIGDVTDFPDESRLASYFGIVPRVANSNETDRSGHIHKRGSKLARTALIQSALIALKYSPYLKNFYQRVKTRRGAGKAIIALARKFLGIIYRTLKNNWVFEDFPNFVLAEPMDAA

SEQ ID NO: 448666 - protein, 314 aa, unidentified
MLATPTFVSADVSKAHLDIAFPATARIWRTTNDAAGIAALQRRLGKLEHPHMVCEATGGYTRLLARRLAEQGVAFSKVNPRQVRDFARASGRLAKTDAIDAAVILSFAQVMQPPAMTPPAAAQLRLSDLVRRRRQLVDMLAMEKQHRALPEDPEIVASIRGHLDFLAEQIEQIDHSIDRQIQNDLELAHRAELLRTIPGFGAITAATLIAEVPELGRIGKKQIAALLGVAPMNRDSGQMRGQASIAGGRRSARCILYMATIVAIRVNPVIKPFYKRLRQEGKAPKVAIVAAMRKLILAANAMLEQNRPWANGQA

SEQ ID NO: 448667 - protein, 356 aa, unidentified
MGTISLGVDLAKCVFAVCEMDAAGRVVRRREFKRDAFALHLAQLPAGTVVAMEACSGAHHWARRCLAYGLIPRLMAAQFVRPFRKNSLTKNDANDAEAIVTAARQGNMRFVPVKDIDQQARLAWHRVREGYKAEHLAIGNRLRGLMAEFGIAIPKSDVALRRALADLDAYVELPGEFKELLRALAAHWVQVRAAMAACDARIERHAREDVRCTRLRALVGVGPLTADAMVASIGNAREFKNGRQLAAWLGLVPTQHSSGGHARLGAISCRGDGYLRTLLIQGARSSLERAKRASPDKATPEQVWIRSLACRMPFGKVIVAIANKHARQLWAMLANDVDYDPHAYIHHPLQQHAAVT

SEQ ID NO: 448668 - protein, 343 aa, unidentified
MTHPPQLILGVDTHKDVHVAVLLDRLGRYLAAASFGTTDAANTDLVAWTRRHGQVTTAGVEGTGSYGYRLAQHLTDQGIDVVEVNRPDRARRRRKGKSDPVDAEAAARAVLAGDARAVPKARNGAVGELRALVVARRSAIKARTQATNQIRALLVDGDDELQGRLRPLRKIHLARACAQLASAAGLRLALGSLGRRWLALDDEIASLDAVITSTLRRTAPRLLERHSACVQTAAQLLLTAGDNPDRLHSEAAFAAMCGASPVEASSGKTIRHRLNRGGDRAANSALWTIANNRLMHDPRSRAYAAKRTARGSSRKEILRCVKRALARELYPLILDALALPRLP

SEQ ID NO: 448669 - protein, 346 aa, unidentified
MTVKCMAGIDLHSNNLFCAIMDLEGKRVFEKKLPCELESVLLALKPFKKRLVKIAVESTYNWYWLVDGLQDRGYPVVLANPAAMEQYNGLKHADDKSDGFFLAEMARLNILPTGYICDRTIRPVRDLLRRRMGLVQKRTGLMLSLKSLHTRMTGRDLSTGRIKALAPEDADKLFEHPADQLITRLDLQLVEQLGRSIQEIETQILAEAKRMSRYQVLQTMPGVGRILGLTIMLETVDPQRFAGPGEYASYCRCVDSRRLSNGKKKGENNRKCGNKYLAWAFVEAANFAQRHDPACRKFYDRKKAQVNGIVATKALACKLAKAAWHMMSNNTHYDGGRMFPKVKKNQ

SEQ ID NO: 448670 - protein, 425 aa, unidentified
MAIKKKANLSAVLYNRLVNKHCFIVGVDVSKSQNTAYYTSNQVEIEGKIRFANYSQGFKKFLDHIRTKARQIGAEQIIVALEPTGSYSLPLIYFLDRQPDILMVGVNPVLIKRFRQLPDNSPEKSDDKDPILLTQIVGLRSVITVRAPKGHHHKLRQWVRARFQTVDDRTALLNQLHAVVALVFPELLMLFSTLKRQTVLALLQHYPTPADILRLGLEELAAFLHRHSRGQLGQKRAQALVEAAKESAGLEDCEGYVAYIHSLVQRIQTLNQLIEEYEQQIDELLAELPLAQFLLSVPGVGPIVAATLLAEFDGFQNFRYTDQVMKFAGLNLCRRQSGKYVGEIKISKWGSAFVRRALFLAVTGMVAPGGLFYQQYQAYLRRGKQKKQALVALMRKLLRILFALARDRAYFDPTRLWKHELRLAA

SEQ ID NO: 448671 - protein, 419 aa, unidentified
MSFKIIKNNCCGLDVHKTWIYACIGITDSHQRTEYKQARFSSFTKGLNELCDWLAKYNCKDVCMESTGKYWIPVFNVLEKHDLWVTLSHPKYTKPMKGNKTDRKDAKWICDLYMCGMVKPSFIPPADIRELRDLVRYRFKLTCMITSEKNRAHNCLTVSNLKLDDVFSDMFGKSSRSITEQILQHPGETFDVAPFVDGRCKTPIEEIQAAVDGALSKEQAVKLRQCLNHIDELEQHKSEIEREIFRLSEKYTAALDLMRTVPGFNKNPLTAIQVLSEIGGNMSVFPTAKHLVSWAGCCPRNDQSNQKIKSTRISRAGSYFKPVLVQVANALIKSKKHPEFVSRYRRIKARRGHKKAIIAICRMLLTAIWHILSDLKPYTPEGFLEQRPVKEDKILTTSQALNLLKQRGYTIKDEPAAAS

SEQ ID NO: 448672 - protein, 424 aa, unidentified
MKVTYQTCCGVDVHKSFLVATIIKTTAGIEPSYQKKRFSTFNNSILDFKSWLLENECHDVCMESTGKYWVPVFNLLEDQINVTIANPKWVKAVKGNKDDTKDSKWIGDLFRLGLVKSSYIPCRLIRILREYTRYRYKLVSCRSSEKNRYQNALTVCNIALDSVVSDIFGKSSSSIIDYLLEQSGTTINHEEIASKLLKSLKSKEDAVIESIEGYQMTDAQKYRMRLIRAHMDYITAEINDIDKQIESLISSDPDYDKAIRLLTTIPGVKHDSAITIISEIGIDMSQFCNSKRLCCWAGLTPSNNESAGKKKSVRITRAGVYLKPALVQCAHAAVKSDKSPYYKTKYESLVKRRGKKRAVIAIARMILIAIYRMLSTGEVWNPSDLYKIDMPAPLAEKQKAKAIKQAKKLLQKEGLLPPDEPLAS

SEQ ID NO: 448673 - protein, 343 aa, unidentified
MTRFVGLDVSQKITAICIVDNAGRRLWRGQCPTVPEQISVLVRRHGGDDARIGIETGAMTPWLVHELRNLGLEVVCLDARHARAALEMQINKTDQNDAEGLAQIVRTGWYRSVHVKSFDSHRARALLGARTQLIGMTTRLSNHIRGVLKTFGLLPGAMRGLPFDRKVEALLLDRSDVALIVRPMLVAWRQLREQIAVFDKAIRVLVRLNSSCRLLMSVPGIGVLSALAYVSTVEDPGRFSRSRSVGAHLGLTPRQYQSGEVDRSGRISRCGDTLARTLLYEAAVVILTRLKKASSLKDWGHAIARRSGNGKARVAVARKLSVILHSVWRSGQPFRWSEHAGAA

SEQ ID NO: 448674 - protein, 341 aa, unidentified
MRTLYVGMDIHKNFIQAAAMDEAGNIIKEQQFKSDAKEIKRFVKSLKTQKVHAAIEATCTWYHVYETLDALGVETTLVNMRRTKTIAESKIKTDKLDAKTIAQCLRTGFIATAYIPPKTIMEQRNILRHRMSLRKEITRYKNKIHAILLRNGIQHSDYSDLFGPGGMRFLRNLTLPDSEQYSLASYLNIIETLLHEKTQTAEKIETLCKHNQQAMLLTSIPGISYYGAMIILTEIGEIHRFPHPKKLCSYAGLVPRTIQSGDHVYHGRILKECNQNLKWILDQCTHIHIRHCPNSSITRLFYRVENKKGRNKAIVAASRKLLTCIWYMLMKNETFKYSNDD

SEQ ID NO: 448675 - protein, 350 aa, unidentified
MIIIGCDYHPGVQQIAWVDTDTGEFQETRLQHREQAEKFYRELAIGGVQVRLGMEASGQARWFERLLAELQMELWIGDAAEIRARRVRKKKTDREDARHILRLLVEDRFPRIWVPSWENRDVRQLLWHRHRMVQMRTRIMNQLQAVALNEGLRCKKRLWREKGRQQLESFPLAAWGSRRRRDLLELLDRLNPTIAELTQAIEAEVANYPAAQRLMTHPGVGALTALAFVLIMGEAERFQCGKQIAAYLGLVPEENSSGESRRLGHISKQGSGLMRFLLVEAAQVTVRSNGEWRSKYFHLAMRRGRKIANVAMARRLAVRLFWMWRKQWDYEQLKKFGPHAGQPGMSDGVK

SEQ ID NO: 448676 - protein, 368 aa, unidentified
MAVAGIDPHRESFTIAVVNEVGVPLETVSWPATPAGFESGAEFLTSHGVSVVGVEGSGSNGRHVAAALTVAGFDVREVPPRRSVQWRGGERRSKTDRIDALSVARVTGSDPDLGPAKVVLDAAFGELEVVRSRRVSVIDHLKRTLADADRQLAELPPALTSEVGSKGDTRTRLRRLLATDPVSDNRAVAARLGWLGELSDEIRQLDAKARALANQMGALLDEHGSTLTDIYGLGPVSATEIVLRVGDPTRFETESAFARWNGTAPVAVSSGEGDGPPRRHRLDLGGCRAVNSSLHIVSITQSGRDPLAKAFLARKRAAGKTGREARRSHKRRLSDVVIRRMWADHKTTTATTPATPITAEPTAEPLAA

SEQ ID NO: 448677 - protein, 345 aa, unidentified
MERYIGIDTHRDSSTICVLSAAGKRVRRDIVETNGLALVSYIRKLSGTLHVCVEEGTWSEWLYEILSPHASELVVYQNVWTPGAKSDAIDAHGLAEKLRIGQAGPGVFKAPKRYRNLREWVRVYQALTQDTTRAKNRLKSLLQRRGVQCLGTSIYDPQQRDQWLEQLPAAMRLPAKLLGIELDCVTELKAEAEAALVKASHRVRISKILETAPGIGPIRAAVLIATVITPHRFRSKRQFWSYCGFAVVTRSSADWAPTKGGWIRVQAVRTRGLNRNHNPTLKAIFKGAAFTAIHQTKTDHPLRVAYARLLDSGTRPPLARLTIARKIAATVLAMWKNEEVYKAVS

SEQ ID NO: 448678 - protein, 388 aa, unidentified
MNYVGIDVSKYKHDCFIITDFGDVINEGFTFTNNAEGFGRLQKELEQCGKDNVKIGFEATGNYGINLKLFLEQMGYEYMEINPLLVKEYIRSNTLRRTTTDKLSAKAIAGYISEKKYRPHPTSFYSKFALKQLTRLRSGLVTGRSRYLIQITNVLDCIFPEFKPLFGNKFSVTALYILSNYPSPEAIANMNSRSYDILRRKSRGKFSMDKFVKLKTLAKNTVGVFDECYRIELEMLLDLHSQIDGKINELDTEITEIIEQINPPTLSVKGIGAISAAVIVSEFGDFSRFDNPNKMLSFAGLEPGYFQSGTAEHNGRMVKRGSASLRSTLMNCARAIPLHNEVFAAYYRKKLDEGKPYNVAINHVAKKLVRLIFALETKGEMFDATKLR

SEQ ID NO: 448679 - protein, 343 aa, unidentified
MQTITTIGLDIAKSVFQVHGVDASGQVVIRRQLKRRSVLAFFQKLPPCLVGIEACASSHHWSRELQVLGHTVRLMPPAYVKPYVKRQKNDMADAEAICEAVTRANMRFVPTKTPEQQSCLMLHRTRHLFIRQQTAMINSIRAHLAEFGIVAPVGRKGVTELLNVVADPGDERVPEIARACLAALGTQLFSLKRQIGEFDRMILAWHRSNQTSKRLHCIPGVGPMLATALVASVADPSAFRSGRNFSAWIGLVPKQHSSGGKNRLGNISKQGDRYLRSLFVAGALAVIRYAKIHGTKHRPWLTALLARRPTKVAAIALANKIARMVWAMMARGERYKEPVALAR

SEQ ID NO: 448680 - protein, 368 aa, unidentified
MKKRSSSRQNPKSAVKAKRSKQSVTIGMDLGDKTSRYCLLSDEGEILREGQVATTKAGMAGTFGRVGRARIAIEVGTHSPWVSRLLRSFGHELIVANPRQVKLITESSRKDDRLDAQTLARLARIDPQLLRPIQHRSEKAQTALMVIRVRAALISARTSLVNTARALGERLPKCDADQMGVPQAESLPPNMQRVLEPLLKEVESLTEKIKYSDREIEQIARIDYPETALLQQVGGVGPLIALTFVLTVEDKDRFQKSRDIGCYVGLRPRRSDSGQSQPQLRITKEGDPYLRTMLVQGAHYVLSRRGPDTDLKRWGLHLAERGGKRAKKKAVVVVARKLGILLHRLWATGEVYEPLRNQNRRMERKKAA

SEQ ID NO: 448681 - protein, 345 aa, unidentified
MKITTVGIDLAKNVFQVHAVDERGTVVLRKQLRRDQMTAFFANLPPCVIGMEACGSAHHWARTLKSLGHDARLMSPQFVKPYVKSNKNDVADAEAICEAVARPNMRFVPVKSIEQQAVLSLHRVRQGFVKARTAQANQIRSLLGEFGLIMPAGISHIAKRVPSLLEDASNPLPASFRQLIARLTEHLKDLDILVGEFEAQIKAWHRSCELSMRLEKIPGIGPLGASALVASIADANSFANGRQLSAWLGLVPRQHSSGGKPALLGISKRGNVYLRTLLIHGARSAILAAQRKTVNTNVWLAGLLGRRHPNVAAVALANKNVRTVWALLAHGREFRPNYVAQPLAA

SEQ ID NO: 448682 - protein, 352 aa, unidentified
MLYVGLDIHDKRVAICVLGETGQVTRRAQVRSIDEMMRILEALPDRFEVCYEASCGYGHYHDLLSPIAARVTVAHPGQLRLIFRSKDKNDRKDAERLAKLLYLGEAPAVHVPSGDVRTWRELITCRGRVIAKRTRAKNSLRTLLRCAGVVPPGRPALWTKKGREWLRRLELPTASQQLRRDLLLEEIEALARQAGRIEENLNQQAKHSPAVLRLRSTPGVGVRTAEAVAAFIDDPHRFRDAKAVGRYFGLVPSQDQSGDRNRLGHITREGPAVVRQLLAEATWQAVRRSPTVRAYFERVRRDDPQRKKIALVATAHYLVRVMWSLLKHGTTWEESVAPADEPKRVVPAVAIA

SEQ ID NO: 448683 - protein, 355 aa, unidentified
MDNAKYIGMDVHKESISVAVRNSAGKVVMECVIETKANTILDFVDGLRGDVHVTFEEGTWAAWLYDLLKPHVSRLVVCDPRRNAFLQEGNKNDRVDARKLAELLQNKQLRSVYHGDHGLRTLKELVRSYLTITRDLSRVMTRVKAIYRSWAIPCSGKQVYGTRDRREWLGKIVEAGPRKRAEFYYRQLDALRLLRHEIRRDLLAESKKHKAWKRLGAIPSIGPIRAAVLLGILQTAHRFRTKRQLWTYSGLGIEVHSSADHQVVKGQLQRKKKQVEVRGLNRNYNHDLKNLFKGAAVAAATKPGPFEEFHAGLLAKGMRPEMARLTLARKIATIVLIVWKRGVCFDANHLKPQTV

SEQ ID NO: 448684 - protein, 408 aa, unidentified
MAKLVLNPNVILSREGSVPRLNILLLGEILRSTQDNGMDSPFADGIECAKLEESTTSNQHKGGVSMKGTTMGIDLAKNVFEVYVEAESGAVIERKRLSRKRLLPWLANRPPSLIGMEACGGAHYWARELTKLGHEVRLIAPQYVKPWVQTNKSDQADARAICRAVQEPGMRFVGIASEAQQTVQALHRVRSRYLDNRTALVNQTRGILLEYGVTIPKGVASVRKMLPLLLTEDRWSALVRQFVADHRAELEEWDAKIQAVTAQIKRENAQQPICQRLEQARGIGPLGASALWAKAAGQSYQNGRHVAAALGLVPKHTGTGGKVRLGGISKRGDRYLRQLLIHGARAVVRQVGEKPDPLSCWIRRVVARRGVNKAVVALANKNARVAFAIISHDQTYDVTKMCGAVSCK

SEQ ID NO: 448685 - protein, 350 aa, unidentified
MKIVGCDFHPSYQQVAVFDTLTGEVEERKLIHADGQAEQFYQELEAPALIGIESVGNAQWFVRLVESLGHQLWIGDAAKIRASYVRKQKTDKRDAGHILKLLLENRFPRIWVPNQQQRDLRQLLLHRHKLVGVRTRLKTELQHLALNLGIQKKRQLWSVRGRAELEKLPLEGWTKHRRQDLLALLRVVEPQIEELNKAAAEAAAASPQARLLMSQPGVGPLTALAFVLTIGEVARFARSKQLASYLGLIPSEHSSGSKRRLGSISKQGNVFLRTLLVEAAQSAVRHDPLFRKEYKHRCHHKPKGVAKVAAARKLAVRLYWMLKTSKPYPEVLHLEGSPRHPVAAKVSPSC

SEQ ID NO: 448686 - protein, 344 aa, unidentified
MQITTVGLDLAKNVFQVHGIDATGQVVVRKSLRRSQMLPFFAELPSCLVGIEACGTSHYWARELIKLGHEVRLMPPAYVKPYVKRGKTEEADAEAVCEAVTRPTMRFVPVKSPEQQAALSMHRTRDLLVKQRTQLINMIRGLLAEFGVDIPKGLERALLMARQIVDSKAPEVPMEAAKIVATLSQQALDTHVRLREIDRDLAVWLRGNDVARRLMTIPGIGPIGATALAASVTDPQQFRSGRQFAAWLGLTPLQKSSGGKERLGRISKMGDKYLRKLLIVGMTALVRRAKYNPGKIDPRLADLLARKPTRVATVAMANKTARVIWAIMARGETYRTGHQPALAA

SEQ ID NO: 448687 - protein, 326 aa, unidentified
MQGKEASEQETKVKSSVGIDTSKCWLDVHVLPSGERLRAANNHTGIRQLKRSLSRFDIALVVIEATGKWHRLLHRSLAASAIPVALVDPYRVRMFAKAQGILAKTDRLDARVLASFAAVMSPPQRPPAPQTLAELAELVVARSSAVEAKIALKNQFAAAACIFLKRQLERRIVQASDDIAVLDREILARIQADDGLARRYAVLTSIPGFGFAVAATLIACLAEIGSLTAKQIGMLAGLAPIADQSGERNGIRVIWGGRPAVRRILYLAALSAARFNADMKAFHQRLIASGKPPKVALIAVARKLVVLANTLINQNRTWQPSHPKYA

SEQ ID NO: 448688 - protein, 368 aa, unidentified
MNTDKYVGLDVHKDTIVAAVAEGGRDGEVRVYGTIANDLHALERLLARLGGEGIRLHIVYEAGPTGYVIYRRLRQRDIPCLVVAPSRTPQPKGVRQKTDRRDALQLARLHRAGELSGIHVPDAVDESVRDLTRARADAVHDLTRAKLRLKSFLLRLGYRYTGKANWSEAHQRYLRELVLPLPALKAVLEEYLLTITQRMAQLDRLDHLIAAQVPQWRMYPAVQALMSLRGVQLNAAAVLVAELGGIRRFRHPRHLMAFLGLVPKEHTTGDSRKLGSITKTGNAHARWILAEIVQHAFLPPKVSSHLALRQQGQPPAVKELSWKAQTRLHQRARHLLGRGIMKPKVTIALARELCGFVWAMLHLVPAPQ

SEQ ID NO: 448689 - protein, 249 aa, unidentified
MQKNKEYVGVDISKESLDMAVYSTGEIRSFGNDDASIAKATTWLKQVNSAIIVMEATGGMEVSLYITLQEANLPVAVINPRQIRDFAKSMGILAKTDKVDAKVLARYAATIQPEVRPLPNEEARRLNTLVTRRCQLVEMITAESNRATITRNKTMKQRIHAHIDWLKQELAGIDKDISQMIKENPVWHAKDKLLQSVSGVGPVLSATLIAELSELGILNRKKIAALVGVAPFNRDSGKHRGKRSLGRAM

SEQ ID NO: 448690 - protein, 356 aa, unidentified
MNQLTTVGLDLAKDVIAACALDLHGAVVQRRVLKREAFQRWAEQLPVCTVAMEACGSAHTWGRWFAARGHTVRLIAPQFVAAFRKGGKNDAADAEAVAIAARQPTMRFVPIKTIDQQTILAWHCAREGWKEERTALMNRVRGLLTEFGIVIARSSDRFLAELPRLTEDPRLPDAMQGLLLEAREQLASLHARLARCEAQITNHARSNTAAQRVSALLGIGPITSSALAATVPDTTTFKSGRQFGAWLGLTPKQHSSGGKTRLGRISLRGNVYLRTLLIQGARSTLQSALRADLSRASRLQRWIIELYGGRGYHKTLVAIANKHARIVWAILAKDERYDASAWQRHPMAQALPAASS

SEQ ID NO: 448691 - protein, 354 aa, unidentified
MLIIGCDYHPGFQQTACVDSETGEFQEQRLRHSLEAETFYRGLKDQGKNVRVGMEASGQARWFERLLAELGFELWIGNAAEIRAKRVRKQKTDRQDAQHILKLLLEDRFPRIWVASWENRDLRQLLWHRHRMVQMRTRVMNQLQAVALNEGVRRKKGLWREAGRKQLETFALAPWASRRRRDLLEMLDRLTPMISELTQAVEQEASKYPAAQRLATHPGVGPLTALAFVLIVGKAERFRCGKQVASYLGLVPGEESSGDRQRLGHISKQGSTLLRFLMVEAAQVTVRSDPEWRRKYFHLALRRGRKIAKVAMARRLAVRLYWMWRKEWDYAQWKKFGPHAGQPGTGVGVQSNTE

SEQ ID NO: 448692 - protein, 321 aa, unidentified
MKPSQHAIKALDQVLGLDIAKANVVLFDPVSGRTWTVANTLPSLIKALKPFADHQLMVCEATGGYERAALEAALHVGLRAHRADAAKVKNYIRSHGGAAKTDAIDARWLSRYGQERGESLAAWQAPPASREALASLVRLRQDMVAQRTAAKNRRSAPGSSLAAEFLDQQLHFLDKQIEALDRAIARQLKTDTQLASAHARLRQHKGLGPVAATALLALLPELGSLNRKQAASLARLAPHPNESGKLYGRRRTGRGGRSGIKPALFMAALSAARHNPNLKAFYQRLIAAGKPKKLALTAVARKLVVLANANLKTNPTPINPN

SEQ ID NO: 448693 - protein, 482 aa, unidentified
MAKRKLSTFERLQPGRLNRQQRRELGRRIAAADPGLAVVHPDAAGIDIGNASHFVAIPPERDPVPVREFGAWTAALHEMARWLTAHGIRTVALQATGVYWIAVQDVLEQAGLEVYLVNARGTKNLPGRKSDVQECEWLRKLHAYGLLRNSFRPPEEIRAVRTIWRQRDRWVKEAGRAVQHMQKALTTMNVQLANTISDLSGVTGQAILRAIVAGTRDPWALAKLRDPRIAASAEEIAHSLQGTWREDVLFELRQALEAYDFYQQQLAACDRELAKHTAAVPSRARPAPPEGPDGAAPLPPAKPARRAKSRRKDQPGFDLAGELHRTMGVDLTRIDGIDVLTTQVVFSEIGPDFSAFPDENHFASWLTLTPRRDISGGKVIRHVPAAGRNRVANALRMAAQSLCRSDSYLGARYRRLRARLDGPVAVKAMARYLACLIYRLVTKGQAYVDRGAAHYEHKRQERERLALERRASNLGLKLVPAA

SEQ ID NO: 448694 - protein, 338 aa, unidentified
MKLYCGMDLHSNNVVVRVIDTNDKTLYKKKLPCELDIILRALNPHKNSIEGIAIESTFNWYWLVDGLEEHGYKIHLVNTAAVKQYEGLKHTDDDSDAFWLAHLLKHGILPTGYIYPKEQRAVRDLARKRSQLVQNRTTQILSLQTLYIRNTGRPLSCDAIKKLTVADIENQFTDTNVILAMTSNLVIYEALKQQVNVLEKAIVNQIKLDPRYQNLTSIDGIGKILALTIMLETGDISRFDSVGNYASYCRLVDSIKFSNGKKKGKGNSKNGNKYLSWAYVEAANFCIRYNEHAKRYYQKKSAKTKRVVALKALAHKLARASYYVMRDNVEFDSRKLFC

SEQ ID NO: 448695 - protein, 368 aa, unidentified
MKHYIGLDVSLKTTSICLLDEVGKIVHEACVATDPQEIFSAINELKIDIAIVGLETGGTSHWLVKELKKYNLPVICIDARKMAAAISIRTNKTDKNDAQEIANALRTGYYKEVYQKQDNSMATMTLLTVRRLLIDQRTQTINCIRGLLRAQGKLNCGSSQNQRKFVEKVRDITQGLFEEVRMSINALLDVYQSICHEIEKIDLKIETITKDDADVQLFKTVPGVGAVTALTFKLTIDDPSRFKKSRSVGAYVGMTPRQYSSGETQKQGSISKTGSSELRMLLAESAMCMIYNTKSWSRPKLFGMKIKKKHGHKKAVVALGRKLAVIMHRMWMDHQPFEYGDIEQKEIEKVLKVTKREKKRPSKIYSVV

SEQ ID NO: 448696 - protein, 342 aa, unidentified
MNHYAGIDVSLECSSVCVVEANGKILREAKVASEPEALIAWFRSCGFSLERIGLEAGPLSQWLFAAMRQVGLAVELLETRHVRKAFEAMPVKSDRNDARGIAQLMRLGWFRPVHCKSMSAQEIRTLLTARKLVQSKLHDVENSLRGILRGFGLKVGKTTELKFADRIEVLVVGHPHLQMIAKALLAVRAVLRKEFAAFEKQARKMAQSDARTRLLMSTPAVGPIVSLTYVSAIDDPGRFKSSKQAGAHFGLTPKKHQSGETDYTGRISKIGDSSVRTALYEAAHIMLTKPLKGCTQLKSWAMRIARRAGMSKAKVALARRLAVIMHRMLADGTPFNSAAAAA

SEQ ID NO: 448697 - protein, 344 aa, unidentified
MAQLNTIGVDLAKNVIQVSVVTPRGKELSNKALTRKKFSEFLVTQTASLVAFEACATAHHWARIAKEAGHTVRVLPAVSVAPFRQGHKTDQNDALAVAEAAIRPHIKEAPLKSLEQQGLQAIQRSRDMLIRDRTAMSNHIRGLLLEFGIAIPKGFCHLHRAVPDILEDGENGVPDMFRPTLNLMHDRLVQIKRDIDQLTQQIESLVRANDACQRLLDIEGVGPISAVLLYATLGSGEAFHNGREFSAYLGLTPKQYSSGGKTNLIGISRYVANKRLRAVLIQGARAYIHRIKEPKTPKDKWLLAMVDRAGYGKASVALANKNVRTAWAMLTRGTEYNRLEGLAA

SEQ ID NO: 448698 - protein, 390 aa, unidentified
MNYLGIDVGKFSHSACLLDETGRKNIFQIPSNKQGFEKFGQLVKSLKVDELLVGMEATGHYFLNIYEFLLGLGLSDENVAVLNPLQVKAFRNTNLRGAKSDDIDATRIAILLRFGDFQRCNVSVDKLMNLRELTRLRSELVANNGDIKRKIISVLDRIFPEFPTVFSNCFGKTALHLITEYPTPEDLSSLSLTKLEKTIKKLSKRGISQGKIEELHHLATNSIGIKLGVEAFKIELQILIARLKMCQEQIKDLEEKISKIVSQFPNHIFSIPGVGQSTGATILAEIGDINNFQSSTKLIAFAGLDPKLKESGKYQGRTPISKRGSKYLRNAIWQSAMVATRVDPMFKKIYQDKRNKGKTHKYAVTATANKMAKVIYSILKNNRSFKEQVS

SEQ ID NO: 448699 - protein, 345 aa, unidentified
MEHTTIAVDLAKSVFQVAISHHAGQVTAEYRLRRSQMLPFFAQQPAATVLLEACGSAHHWARQVQRLGHTPRLLPAHDVHRYVRRNKTDRADAKALLEANRNDEIRAVPVKSIDQQAVAALHVLRATWLSTRTARLNAARGVCREFGISIPVGAKRVIPAVRAQLTPDGVLPPMLHPVLEAMCTEIANLEAAILSIERQLATLAEQMPDVIRLQTIPGIGLLTASALVAKIGDASRFPDGRHFASALGLTAKEESSGMQRRLGAISKRGDVYLRMLLIHGARSVLWNARTKRDRDPLRVWALRTQDRRGHNVATVALANKLARIVWAVWTRRCDYDDKRRPPLSA

SEQ ID NO: 448700 - protein, 319 aa, unidentified
MQRTFIGVDVSQDHLDAYARPTALRQRFANTAAGIADLIAWARPLAAERIVFESTGPYQKAAVGALLAEGLPAVVVNARQVHDFAKAMNYLAKTDRLDAAAIAHFGEVARTTVRPLESQEMRDLRELYDRRGQLVRMLAVEKNQRHAATVAGASPRVLRSIEKHIDYLEGHIRDLEERMDRIIEGSAAFQARDEILQTITGIGPQVSRTLLAYLPELGRYSRQAITALVGLAPFNDDSGTYTGARHIRGGRRKVRVGLYQAAVAAIRHCPRMKAFYAGLKARGKASRLALIAVARKLLVLANALIRDMVPYRAPANSVC

SEQ ID NO: 448701 - protein, 438 aa, unidentified
MSNLDQAAVNREFAAHIGIDWADQKHFWTMRTADGKTQRGELDNTPEAVQVWAAELEQRFGGRPVAVALEQARGAVIAMLCKYAHLVLFPIHPNTLANYRKAFRPSGAKSDPRDADLALELLVSHADKLRRLEPDTVETRKLQFLTEERRRLVNQQTSETQRLIGWLKQVFPQILPWFEDPACAMVGELLLRWPTLQALKKATAKTLRTFFHRQNCRSAERIEERIAQIRQAVAATHDAALLETGILCIQNSVHLLEQMREGIAEFDHQIAETYRQHPDRAIMESFPGAGPALEPRLIAAVGSRRERFESAQSVACFVGIAPVKEASGQQRWVHWRWACPKFFRQTFHEWAGCSIRTCQWAREHYDQQRDKGKGHHAAIRSVAFKWIRIFYRCWRDRVPYSEQTYLKAKAARAPKPHPAVSMQWESCGGFAKLSELPS

SEQ ID NO: 448702 - protein, 341 aa, unidentified
MKLIRVGIDLAKNVFQVHGVDRSEKHVWRRRLRREEWINIVRERAEPSCEIGMEACGGAHHWARQLQKLGYNVKLLAPQFVKPYVKSNKHDAADAEAICEAMARPGMRFVPVKTVEQQDIQAMHRVRASLVEQRSAKGNQIRGLVAEYGLVAPRELLHLRRALPRWLEDEGNGLTARFRWLLRGLRDELVALDERIAQLDDEIERIAQSEPAAKRLMQLRGVGPIIATAMLATVGDARQFRNGRQMSASIGLTPKQHSSGGKERMLGISKRGDAYLRSLLIHGARAVIRTARAKDDPLSKWVIRLADRSHPNVAAAALANKTTRIAWAMLTRETNYQAAVN

SEQ ID NO: 448703 - protein, 393 aa, unidentified
MICAGIDVAKDKHDCFILSSEGEVLADVFTIQNNAEGFDMLLQTIRRCARPEDKIKVGLEATGHYSYNILGFLLDKGLDTYVINPLHTNLYRKSLSLRKTKTDRVDARTIAAMLMSDVDLKPYTDTAYHNEELKSLTRYRFDKVRERAKLKQSVSRLVTILFPELEKLVPSLHLASVYALLSEFPGAKQVAGAHLTHLKAILSDASKGRYGRDMAVTLRDAARCSVGSVMPAKSLELQHTIRLIRELDAEIEDIETAIQSMMDEMQSPITTIPGIGVRMGAMILAEIGGFARFNSPDKILAYAGMSPSTYQSGQLSLSGPYSHMEKRGSRYLRYALYNATKYVCLWDPAFAAYLAKKRGEGKHYNVALSHAAKKLVRLICALEKSQQSYRNAA

SEQ ID NO: 448704 - protein, 397 aa, unidentified
MSAVVGIDVGAYKHAAAVCRTGEREAERSVFRLSADRAGFNELDRWLGRQGTVERVVLESSGHYYWLLASHLHRRGYGVAVVNPLQAKYFAKSRLQRSKSDPADARTLAALGMSEEPRVTDPLLGAEAKEAARFWGGLVKEQTQVRQKLLRLVEIGFPELKECFEDPLCQTALAVLREAPTARVAARKRVSTLADTTRPGGRRRLGENKARRLHDLAANTIAPPELDAQMSFEVGMLIQQFDLLDKQIEIAEQRVAEVLDLELARRLQTIPGVGPALAASFIAEIGDIWRFDDFDQLAAYAGVHPKELSSGTKGQNPETSWRMAKTGNSYLRSAAYKMAVVGTQHNPVIRAHYLRKRAQGKSAMNAIGHCMSKALAIVWGVWRSGRDFDPTLGGPKA

SEQ ID NO: 448705 - protein, 404 aa, unidentified
MKQEPRRLAGIDWASRAHAVCVLEPGGGIRARFDVPTTGKSFAGLIKRLAKLRVGDVAIERPDGPLVEAMLKEGIRVFVIAPRMLKALRQRYGATGAKSDPGDAYVLADVLRTDGHRLKPIQADAPETKVLRALTRTRKDLVEARVALVNQLRAQLELCFPGAIGLFNELDSAVSIAFLRRYPTALRARALGEARLAAFLRRIGYCGRRPVGELLARVKEAPAAGIAGAEAEGRGVCVLALLDAIETCNAQARELEAEVVERLELHRDAHVFTSLPKAGRGVRAASLLAEIGDARERFPDEESLGALTGVAPVTRASGKARSVGFRWACDKKLRNALIDFADDSRHASPWAARVYTDAISRGKRHPHAVRILARAWVRVIWRMWQDREPYDVTKHGGAAMLQAA

SEQ ID NO: 448706 - protein, 433 aa, unidentified
MSKRNHLKEHLNKKLQAITFSTLVVGIDIAKKNQWARFIDCRGIEHGKALQFENNKNGFEKILATIIELCKMDNFTNVVIGMEPTGHYWKTLANYLLKQGLIVVLVNPYHTKKSKELDDNSQTKSDIKDALTIAKLVKDGRYFETYLPHDIYSELRGLTATRISMLKRLKSIKNTIIAVLDEYFPEYESVFKCIFTGKASRHILETCPIPALILELGEEGVLAEIKSAVKRTVGRKKAKQLFAAAQTSIGVDYGESSAAFRIKQYMTELKMLETQLVEVEKEMEGALEKTGLSEYLLSIPGGGVVSMASVLGEMGDPLRFENPRQMSRMAGYNLVEDSSGKNKSGTCISKRGRKNLRCVLYKMALTMVAVNPEMKQLYAYLKTRENNPLKKQQALVVVSKKILTMIFTLSKKKEYYNPEHVFGNVRKRQLKAA

SEQ ID NO: 448707 - protein, 372 aa, unidentified
MNYSTVYVGIDAHKNSFSLCCYTNEKEKAEYPQKVDGHYSKVINYIESMRFHYGDDALFICGYEAGCLGFTLYHQLTDHHVTCVILAPTTMLQQKGRKRIKTDKRDAALIARCLAHHDYSSVHIPTEQDEQTKDFIRMRDDHKLALKKVKQQILAFCLRHNYRFDGTKKYWTQAHLKWLRELAPNGLYAEILKEYLLTYNTLTDKVERLDKRIEELASDDAYKENVSKLSCFIGVKTVTAMAVLTEVGDFERFSSARHFASYIGLTPGENSSGDDRNRLGITKAGNRHVRSLLVEAAQCYGRGKSTYKSKALRERQEGNPPEVIDYADKANERLRRRYYRMVLKNNKKSNVAKTAVARELACFMWGMVTGNI

SEQ ID NO: 448708 - protein, 385 aa, unidentified
MPTTDAAAERHATNSFDRATLLVALELSRSRWLATSLSPGSAKRSNHTVAGGDGSALLDLLTQLRSKATRRVGMPVDIVVIQEAGLDGFWIHRLLVANGIESHVVEPASIAVPRRHRRTKTDAVDGEMLLRTLAAFKRGETRVCSMVVPPTPAEEDRRRLSRERRTLIKEQVEHGNRIRGLLASQGIRHYRPLRRDCRERLAALHTGDGHPLPPRLTAEILRELDRLELVRQQIAEVEAARDALLKSQEGKAPVKLLLRLTGIGPEFATVLWLEGLFRGFSNRRQLAAYAGLAPSPWRSGRIDREQGISKAGNPRLRTSMIELAWLWLRYQPESALSRWFHARVQDHRGRIRRIAIVALARKLLIALWRYVSQGEVPEGARLKIA

SEQ ID NO: 448709 - protein, 362 aa, unidentified
MGPAEAPTIRRSCACKRLQQSVSISPSFDIAKSVFQVHGVDAAGQVVVRRQLKRRQVIALFQKLRPCLVGIEACASSHYWSRELQALGHNVRLMPPAYVRPYVKRQKNDMADAEAICEAVTRANMRFVPTKTAEQQSGLMLHRTRHLYMRQQTSVINAIRAHLAEFGIVAPVGRRGIEELLRVVADPSDKRLPEVVRVCVATLASQLLSLKKQILDFDRMIMAWHRSNQTSKRLNCIPGVGPLLSTALVASVADPKTFKSGRNFSAWIGLVPKQNSSGGRDKLGSISKQGDRYLRGLFVAGALAVIRYAKIHGTRHRPWLTALLARRPTKVAAIALANKLARMAWAMMATGERYNYPASLKV

SEQ ID NO: 448710 - protein, 443 aa, unidentified
MSRKQRKHIRGKRGERFLQIVRGMDRARILCVSLDISKYFHLVMMHNAYGEIVTPSFEIDIFRSGFEHLCQVIDETSARIGAEVVLIGMEPTGHYFENIARHLRARYEHVYLINSLAAKENRAQKMMHYQKTDEEDAAAIGDLLCRGEGTPYRPNKGIYLEMQHIDRVRVAKLKMRSALKNQIIGHLDRIFPGMIITNKEAQKRRRPLFTANLWSCQMPQDLVHVCPDPRQLSQMSPQELIDAFHAQGYRMGPQWAAKIIAFARQTLHPDPEIIAVRSRLLQRDLVLLKQIEGHIAELEDRLLALLAQTPGYIWTRLKGISSIQAASLMAAMGDPSHYDYAAQVFRRSGLVSGRNDSGTRQKKGKGKHVTKVGDVYLRRALNNLVETFSLHQPTLSDYRGRLKSVKPHPGVARVATIRKAVGILFAIQRDQRIDGLLVKPQEG

SEQ ID NO: 448711 - protein, 364 aa, unidentified
MDTHKKQHQVAWVHPDTGEIQEFTVANSVREIERMIKRLRKQAAGEIHVCYEAGVCGFVLKRRLEKLGCMAKVIAPSLVWRRPGDRVKTDRRDAKKLLAQFVAGQLTEVFAPDPAQEADRELTRCRESAQTDLKRARQRLNSLLVRHGYIYPEGNLWTNKHAQWLKALVFDQPKLRTVFEEYFSEVEHCLGRVESLDKQVQSLAQSERYRSAVGVLRCMRGIDTLTAMTLLTEIFEFGRFDSPRALMAYLGVTPSEDSSGESRRPGAITKTGNRRVRRILTEAAWHYRHPYAVSKTLKLRRKDQPAWAVDLADRAAKRLYRRYRHLIERGKSAPVAIIAVVRELAGFVWAMLRQLQQQTQSPSP

SEQ ID NO: 448712 - protein, 347 aa, unidentified
MKNTTIAIDLAKSVFEVGISDRPGHVARNHRLSRAEVSAFLAAQPPATVIMEACSSSHYWGRKFQGLGHDVKLLPPFYVRPYVQRSKTDRTDVKGMLEAWRNSDIRPVPIKTESQQQLTSLHRVRSTWMAARTMRMNSARGLLREFGIVFPAGASTLPDRVQLLIEDADAAVPMVLRDLLQELVLEIGELESRIKTVEKHLQALASQTPVVERLRTIPGVGLLTATALVGFVGDVARFPSGRHFAAYLGLTPREHSSGGRQRLGRISKQGDVYLRMLLIHGARAVLQGAQPKSDPDRFRSWALEIQRRRGHNKAAVAVANKMARIVWAVWKFGKPFQSRSQNDDIEI

SEQ ID NO: 448713 - protein, 304 aa, unidentified
MATAQLDMALRPSGERWAVPNDASGVMTLVDRVPALHPTLMVLEATGGLERAVTSALATAGLPVVVVHPRQVRDVARATGQLATTDALDARALAHCADVIRPTPRPRPDAQTQELRALLGRRQPLIGMRTAAQNRLAGTNARLTKDIAAHMTWLNAAIATLDDDLETIRRASPLWRENDDLLQRAKGIGPVCARTLLRELPALGTLTRQQIAALVGVAPLHCDRGTLRGRRMIWGGRAHVRTVLYMGTLVATRFNPQIKVFYERLLAAGKVKKVALTACMHKLLTILNAMLKHRTPWQPQEVQS

SEQ ID NO: 448714 - protein, 405 aa, unidentified
MKQLPKLHYAGIDWATKTHAVCVVDQAGQIRARFQVPNTGKGLTGLIKRLGSLGVAGVAIERSDGPLVEAMLEADLRVVVVTPRQVKSLRSRYRASGAKSDPADAYLLADVLRTDGHRLAALAPDSEPTKILRALSRTRKDLVEARVALVNQLTSQLEGCFPGAIGLFSELHSPTAVAFLRRYPTGHAAAALTQASLAALLRRLHYSGRTPVSELLRRLQTAPAAGISPAEAAGRAVCVLALLDAIQVTSRQERELEAEIIERLEVHADQHIFTSLPRAGHGVRAAALLAELGDVRARFPTEEALAAQGGAAPVTITSGKRRVVKFRWACDKKLRAALLDFADDSRHASPWAAKIYAEAIQRTRHHPHAVRILARAWIRVIWRIWQDGVAYDPTKHRGAVKLLAT

SEQ ID NO: 448715 - protein, 347 aa, unidentified
MKQYIGCDVHKKYSMFCSLSEEGEVGKPVRVENKKEDIKAYLKRLPKGTPIAVETTSSWYWLVDEIEREGHKPFLAQAGKAKKMMGRLDKTDKLDALGLAILLRNGTLPYTWIPPKEVRDKRELTRTRMTLARIRTKLKNRIQATLSKHNLKNEEVSDIFGKKGRTLLEKMVASLPPETKYSTLSLLKLLGEVEKEILYLQEEMERVVERSVEAELLKTLPGVGPILSTVIAMEVGRIERFPSPQSLASYSGCVPRVSSSGGKTCYGKTRPDVNRYLKWAFVEAANVCVLQRERLKKRHVIKLYERVKLKRGHGKAVVALARHLAEATYWVLKRKEPYREPKDCFSS

SEQ ID NO: 448716 - protein, 409 aa, unidentified
MQQLLERVAGLDVHRKTIAVCVRVPGAGGERAQHVRTFGTAAPDLLALRDWLEAHQVTQVAMESTGVYWKPVFYVLEESLTCLLVNAAHVQKVPGRKTDVQDCVWLAQLLEHGLLRGSFVPPPPLRELRDLTRYRKVLIQERTREANRLHKVLEDAGIKLAAVASDILGVSGRDMLHALVAGTTDPAILADLARGTLRKKLPALRHALTGRFRAHHAFMVSQHFGHLDYLDEAIASLSTRIEEALRPFAAEQQRLDSIPGVAQRTAEVLIAEIGVDMRQFPTAQHLASWAGLCPGQNESAGKHKSGRIRPGNRWLRMTLIEAASLAARSRTTAFGARYRRIARHRGHKKAVVAVAHAMLITAYHLLDRHLEYREPGIDYFERRHAERTTRRAVRALERQGYRVMLEPAA

SEQ ID NO: 448717 - protein, 338 aa, unidentified
MYYTGIDLHKKTSFLTTIDKDGKIVFRANLGNKEELILDYFTKLDDETRIVIESTGSWYWLYDLLAGNGFNVVISNPLKTKAIGAAKIKNDKVDSHMLAQLLRTNLIATVHVSSLETRKLKELMKHRARLVRDITRNKNRINMILMKNNIQPAVSDLFGKKGIRFITEAPLPEYHREQADTYLLIYNQLREQVDALTKRIRSIADNNTMAQLLITIPGIGYIIAMYIVAEIEDISRFPSYRNLTSYAGLVPSLHASGEKERRGKITKQGSRYLRTALIEAAQAIARTKKSKLNVFFRKRIVRAGYQSAIVATAHKILQYVYYVLKNQTPYSEEYPVSA

SEQ ID NO: 448718 - protein, 364 aa, unidentified
MDETIWLGLDVHAGSITICKLVGQSDKEQSWTIPNEAKDVRRTFTRLKQEGQIRACYEAGPCGYHLFRQLQGLKVDCRVIAPALIPRKAADRVKTDRRDAIKLARLYRAGELTTITVPTTSQETARDVVRARESIRRDLTAARQRLSKFLLRHGRRFSGTAWRGVHRAWLRAQDFTDADRVVFDHYHAQVLHLDDRLAALDREILSLARSEPFKPIVDRLCCLKGIAELGAMVVVTELYDLRRFSSPRQLMSFLGLVSSEHSSGEKTHRGRLTRTGNGHVRRILIESAWAYRYRAGRSARLRRALEGQPAAVVAISEKAEHRLTKRYARLIERGKARPHACACVARELCGFVWAMALADGRVVV

SEQ ID NO: 448719 - protein, 370 aa, unidentified
MAQPTPLFVGLDVHKDSIAVAHAQGHSADPPVFVGTVGTRQADLTKLVRRLQAKTADLVFAYEAGPCGYGLYRDLTAQGFRCQVVAPSLIPKKPGDKVKTDRRDAVELARLLRSGDLTRVYVPAIDDEAIRDLCRARDAARLTLKNAKLRLKAFLLRLGRHYVGRADWNDAHRRYLAKVVCPTPVQQIVFQESVRAVDEQVDRLARLEAELLERAPAWRLYPVVQALQALRGVQWLVAITVVAELGDLTRFDSPRQLAAFVGLIPSEYSSGPARRQGGITKAGNGRARRALIEGAWAYRHPAKVSEHIQRRIDGLPKPIQDLGWKAQVRLCKRFRRLTARGKHPNVAVTAIARELIAFMWAIAKAVPVTV

SEQ ID NO: 448720 - protein, 324 aa, unidentified
MSLAYLGLDIAKATYQATLLSQGKRFRREFNNQPAEFGRLSHWLHKHGAVQVHACLEATGRYGEDLALYLHTQGHQVSVVNPLRIKAYAQSQLTRNKTDRLDADLIAQFCQTQTPDLWTPPAPEVLELRELVHHYDSLQALKVQVQNRRQSGVKSAVVQAQLDSQLRLLEQQLTDLRQQINDHLDQHPDLRRQADLLESIPGIGALTAAKLVAEDPLRFASARAFAAYAGATPRQGLSGTSVHRPARLSKLGDADLRRAVYFPAVVACRYNPLVHALSDRLAERGKCAMTIIGAAMHKVLRLAYGVLKSGQPFDPNFAQLHFAA

SEQ ID NO: 448721 - protein, 428 aa, unidentified
MSNQEIIRREQFCQIVKEIRGSSEYLVVGIDVAKDKHHAFMGTAAGKSLLRRLIFENNIEGFARLLTTADAIKSQNGLSKIVYGLEPTGNYHKPLARHLIRCDCDVVLVTGQAVKNNRHLLDGRWDKNDIKDAANIADLVSRGRCLYYDCPSPSIIEIRSLLSLRRRLKREEHGLRMRIRNNLLAQYFPELDRFYSACESESLSIIRYFLDPDTISAMEFGEFFHLVTRTRRGTAQTLRLRKIHGLAIESVGCPMGPAGEYEADLLVEKLNQVRQQIKKTDDLIKDFCLEFYEYSYLLTIPGFGPYISARVLASIGDPFRFENRKQLVKMAGYDLCADRSGRTSDKAIPVISKKGNGELRYALYQAAKVASARVDQFRIYFTKLLRGRERERGIKTKMCVKLAAKMLVIAWTLMKKREPFDPAYLNIE

SEQ ID NO: 448722 - protein, 450 aa, unidentified
MSPLALDVVTKTDKTPVLGRMLSKYVGRKTSSIENGITKARNHSRQRGNIMRVVFGIDVSKASSEVAILVNGEKVHGYTIPNDAIGFNRLLGDLKTVHQPEIVFEATGVYSRRLQAFFEDNSYTYTRLNPLESKKQLDSLRVRKTDKIDAEKLAMSQFILNRKPSYVQEALYQELRDLSRFYQNLTEDIVCAKNRLHKVLQITFPELENILSAPTGEQYWNLVITFPCNSFVLESDDATLTAIIRQSTAKRISEKRVTYLVDKLTKLANQSYCAVKKTSPMMEEVKYYAGELLRLSEHRQGVVEEMVTLAQSLPEYEILLSIPGIAETTATSIIGELGDIRRFHSANQINAFIGIDLRHYESGNFLAKEHITKRGNPYARKILFKCIHNIASASHTNPCHIADFYEKRKRQSQVTSTKPHTIASIHRLIRTMYYLITHNKLYDYTSIQNR

SEQ ID NO: 448723 - protein, 462 aa, unidentified
MRRRDERETWENRREQLEGLPIIRRNVAGIDLGSERHWVCAPTPNAQGREITSFGATTPELIRMAGWLKERHVESVAMESTGIYWIAPHEVLEAQGLQVLLVDTRQLARVPGRDKKTDPTDCEWIQRLHSCGLLRGSFRPEEAVCMLRTLVRDKANLVAESGDWVRRMQKNLDQMNVRVHRAVSDIDGVTGMAILRAIVEGERDAQKLAKLRDRRCSKTEEEIAEQLSGHWREDHLFSLQQALKMYDAVQERIAAYEKEILRKLGDMERDEHHEQTAPPLPNPNKAKTIKHRGQEAKRQALYRMSGVDATHIDAIGVETVEVVLSEYGPDLSRFPTEQQFVSHVTLAPRVPKSGGKPVKKKKRNSASTRVAAALRMAALSLRHSQTALGAYYRKMAQRRSGDIAVFATARKLAILIYRLLRWGQTYVDEGAEAYEDRYRQRRIGHLTATAKQLGYQLIPVNA

SEQ ID NO: 448724 - protein, 362 aa, unidentified
MEKIAHQSVGIDISKDSFTCCICKRDDKMSLNFSKVSEFKNEKTGFNRFVKWVRKQTEKGVPMNYVMEATGVYYEPLAYHLNKLKQEVHVALPSKIKYYFKSLNVKTKTDINDARVIAQFGAERKLSVWQPPLPVLLSLRDLTRMYEQFQVQKTAFSNMLHSKEHSNEVNKFVLKSNKSIIFSIEKQLKKCEEEIQKLIASEDWLNEKVKKLTTIKGVGFMTVAIIVAETLGFEQFYNIKQVASFAGYDVVERQSGTSINGKSRISKKGNSHIRRALHFPALIAKRYNEDLKNTFNRIQDRTPHKMVGYVALQRKLLTLMFTLWKNDTEYIENYEANKKVAPCNQEATQDSEKITSLDVVEM

SEQ ID NO: 448725 - protein, 458 aa, unidentified
MASRKKKSGRPVAAALAEINADVAGVDIGATRHWVCCPTREDGLANVRDFGSTTAELDALVAWLVAERVTSVAMESTSVYWIPLYELLESRGIQAMLVDARQVHNVPGRKSDVLDCQWIQLLHSRGLFRGSFRPADAICRLRAYQRQMGNLVAERSKYVQWMQKALDQMNVQVHRAVTDITGETGMNIIRAIVAGERDPAKLAEFRNHRCKQTPARIAECLTGTWREEHLFNLGSALEMYDMIEGQIAAYEKRLLDEVAALSPPERVNEEVPPHPNPAKERTIIRREGGPMRTGLWRLSGTDLSRIDGISHNTAQTIVTEVGFDMSSFPTEKHFVSWLRLCPRLAISGGKPLRKRKNALGSTRVAGALRMAAVTLNRSQTALGAYYRRVSRHKGASVAVFATARKLAQLVYRMLRYGQDYIDIGEAAFDARFAQRRLDGMKQAAKDLGYDLIQLPIAG

SEQ ID NO: 448726 - protein, 380 aa, unidentified
MIIKYSLGLDISSKDIKACICVIDDQQNVKVKSTRTFSNHKKGLDEMDQWINRWYCQDTASLTVCMEATGVYHENCAYYLYEKGYSVSIVLPNKAKKYLQAIGIKSKNDTIDAKGLAQMGAEQNLEKWEPIGTFYYELRVLTRQYQSLKESLTVESNRLHAAMASARQISFEIKQIKKHIAFLEAQIAQLEKEIKRFINSNQDLKQKFDKVMKIHGISVISSATVIAETGGFLLFKNYKQVVSYAGYDVVENQSGNHVGKTRISKKGNSRIRRILHMPSLTAFSKQESVFGQLYQRVYDRTGIKMKAIVAVQKKLLVMIYYIWTKDIDYDIEYNGNTPAEYPMEPSLPRQEMKKAITSMASHDKQHRLEPVESSLCNANL

SEQ ID NO: 448727 - protein, 437 aa, unidentified
MKNCNTNLNAITEKTLIVGIDVAKETHVARAFDYRGAELCDGIYFRNTREGFLSFTGCIESLKETYNKDSAIIGLEPTGIYGNVLIAYLKAEGYNVVYILGMQVKRAKEIEDNSPSKNDFKDAKVIAKLVKDGYYRKIRTFTDEITELKEATQLAHQITKKLVRSKCQIRDCMTEYFPEFTTVFLSVFKDTGSNKPYEASKTAFATLRLFPMPDQINAITAEQIVSAWRAAGVIKGIGIKKAQHLKRVAMDTVGLKASESVHIKIKMLMEEYDLLVSQEKEIWCRIKALIENNADYRALMQMPYMTTKQAAYLLAEVGDFRDFSHPQQLVRLAGLNLKECSSGKNRGTSEISKRGRPGLRKILYLTVLQQLRHAAPGWYQLHKRYTTRSKNPLKKMQSIIALCCKFLRVVWGMLNNGTVYDPGMLIGKSGLLLPNVA

SEQ ID NO: 448728 - protein, 379 aa, unidentified
MHTTARSAQPTTIRSDLSAIFVSLELSRSTWLITSLSPGNGEKMSKYSVPAGDVSGLFARFLKLSEKSRAKTGHTYPIVTIQEAGLDGFWVHRVLEKEGIESHVVDPASIATSSRRRRAKTDRIDGEALLRTLMAYKRGEPRVCAMVRAPSPEEEDRRRICRERKALIVERVAHVNRLKGLLFSQGITNYEPLRKDRRERLAELRTGDGRMLPAHMKAQICRELDRLELLLEQIRAVEDERDTLIAAQAATATPSPVTMLINLKGIGAEFAAILWSEGLFRRFDNRRQVAAYAGLAPTPWQSGSIDREQGVSKAGNPRLRATLIQMAWLWLRHQPNSALAQWFNERVRRSGRGRDTDFSVPPAQIRTCGTTAYGSCLGS

SEQ ID NO: 448729 - protein, 366 aa, unidentified
MRKVQNFIVKGKQIFIGLEDSKRMWKLCVRCEGMIIHETSMPAKYDSLRSYLKNRYPGCRIEVMYEAGFGGFWLHDRLESDGVACVVTPAHKVTQEKVNKVKTDKIDARRLARNLEYGDYTRCHVPDRERREDRQISRTLDQIQKDIVVTKNRIRRFLDFHGLNEGFPAGSWTETAYEQLKVLHLPVSLQLSLDAYLQLLAELKRIRAALKSQLRAFCQKDRYQALVVSKASCVGIGWLSAIRFTLEWGELSRFGSGKQFASFTGLTSREYSTGETIHRGHITGHGNGQVRGWLIQCAWRALSRDPVLSEKFNAVRNNSGSKKKAIVAVARKLAVRMRALELAYQRFGMRCMTSPALCLRARRVVC

SEQ ID NO: 448730 - protein, 331 aa, unidentified
MSVHVGLDVGSRTTAMGWRDKGRSAGAWEIAQTPKGRKAAVKKLLALKPLSVVMEATGIYYLDLAMELSAAGLPVSVINPKSSRNFARLMLQHSKTDAIDAQLLAEYGERMTPRLWSPPSLAQLELRAIGRHINRLTCHRTRAKNELHALQATETTSAMLIEDEEEAIEMFSTRIERFRLAGRVIIANSPTLQSQFNHMVAAPGMGDVSTFAVLAELTTLPVTLKSSQVSRHAGLDVRLTQSGTSIDKPGRLSKCGNAYLRSALFMPAMCAVRCDPYVKAFYEALVGRGKRKMQAICAVMRKYLTGLWACMHAGEDFDTAKLFSEKHLIKA

SEQ ID NO: 448731 - protein, 442 aa, unidentified
MRLLNANANEHPLRIKLSAHIRTGIIMELQRNKVCGIDVHKRFLIATILSRDGKKDTQRFSVTLEDLLRFRDWVIENGCEQVAIESTGIYWHPVHSVLEGKTDLIVANSYKIKHTPGRKTDVNDSEWIAELCLNGMIEPSRIFPKDDRELRRLTRAREGYVKQMTQEKNKIHQSLDSACIKLASVISDIFGKSGMYLLNCVLEGRDIDEIIEGIPSGRLKKKADQIKESIKSRLEISQVILIRGSLSLMRSIQERIDELDGEISARIQYRKNDLAIAMSIPGTGFVSATAILAEIGNYIDFKKPEQLAAWCGLVPSLYQSAEKTILGGITKQGSKHIRRMLIQVAYAISRTKDSKLKKFFLRIQAKKGSKVAAVALARKVLCILHHLLTNQEMYLEDRDKKNLRQKPLTSPCPIEMSIQEMIDCIVRAGYVVTKSDSRGGFG

SEQ ID NO: 448732 - protein, 347 aa, unidentified
MLIIGCDYHPGWQQICWMDLRTGETGEKKLGHTQGEAERYYRALSGPVRIGMESTGNCQWFTELVVSLGHELWIGDASRIRAAEVRHQKTDRRDAALLLKLLVENRFPRIWTPSVEERDQRQLLLHRHKLVEMRVRVKNELQHLAMNRGIARGRRLWNKSGEKVLRELPLLPWASRRREDLFKVRAMLDEQIAALDAAVQRVAEENERARLLMTHPGVGAVTSLAFVVTMGDVSRFPRGKQVGSYLGLIPREHTSGGKQRTGSITKQGNRFMRTLLVEAAQSVVRYEADFRREYLHRCHGREKGVAKVAAARKLAIRLYWMLRSNTGYPEIVRVESSSRVPLDSQPA

SEQ ID NO: 448733 - protein, 419 aa, unidentified
MSFKILKNNCCGLDVHKTWIFACIGITDSNKRTVYKQACFSSFTKGLQELCHWLAKYDCTDVCMESTGKYWIPVFNILEKNNIWVTLSHPKYTKPQKGNKTDRKDAKWICDLYMCGMVKPSFIPPADIRELRDLVRYRFKLTCMITGEKNRAHNCLTVSNLKLDDVFSDIFGRSSRSITEQILQHPGETFDVAPFVHGRCKTPIEEIQAAVDGAVSKEQAVKLRQCLNHIDELEMHKSEIEREIFRLSDKYEDILTLIRTVPGFDKNPMTAIQVLSEIGGDMSVFPTAKNLVSWAGCCPHNDQSNHKIKSTRISRAGSYFKPVLVQVANALIKSKKHPEFSTRYRRIKARRGHKKAIIAICRMILTAIWHILTDLKPYTAKGFLEPRPVSKEKVLTASQALNLLKQRGYVIKDEPIFIS

SEQ ID NO: 448734 - protein, 360 aa, unidentified
MRCERTFVGLDVHAWSVTGHGLDAVTGEVWQRKLTPDPADIESWLRTLPQPVAVTYEAGPTGFGLARHLRGAGFSCPVAAPSKLQRPWGDRVKTDARDAELLARLLKLDEIVEVVVPTVAQEAARDLVRAREDVRGDLMRARHRLSKLLLRQGIVYTGGRSWTGRHDTWLRDQRFDQSARQLAFDAAYETMLLTVQRRDRLDAAITAMAENSEYTDLVHRLGCLRGISTLTGFGLAVEIGDWHRFTGNTIGAFLGLVPTEHSSGQSRSQGSITKTGNSHARRLLVEAAWHHRKTYRHPGLTMRTRWEQAPPTARARGHEGNRRLHQRWQTFTARRKKPVIANVAIARELAGWAWSLAVLE

SEQ ID NO: 448735 - protein, 330 aa, unidentified
MKNWNVILGVDVSKLSLDICCAERRLHIKIENCSKGFKQFTQWCRLNGINLNEVLVLLEYTGGYEYRFLQFCESINIAYCRIPGLEIKKSMGMVRGKNDKADAYRIGQYGEEKSKRLVPSRPLNNSILDLRQLMSYRKRVVREKAGQLATLKERIHMYGQRKADPIIKLLKMQIKNNSVILAMVEGQIKELIGADDAMSKNYRILKSIKGIGPINAQMSIAYTENFCSFTDGRKYAVYVGVIPFEHSSGTSIRGRRRVSHMANKELKQELNQAAKSAMQHDPEIKSYAERKLKTKPYNLVLNNVKFKLIMRMFSLVRREEMYVENYKISA

SEQ ID NO: 448736 - protein, 482 aa, unidentified
MKKRNIYQNQSQELLSLFEAAGNSAKVMCVPMDYAKKDHLVMFCNGHGDILRKPFSVKNTPEGIAYIDDQVTRSCRRRGIQKKHVFFGGEDANSFAKNFVSTLRSKGFLVANVNAHDAKKQRGNVQASTDRIDLMGIATMLLNCRANCGPAQSGIYRNLRTLVRHRRKLVQMLTEVKNRVHGIVDELFPGFLNEKNSGIIPFTQSSLYLMEDRFSPKQIRRRRRQKLIEILKRLGTSKAQHTAVKLQQYAAKVLHAPVEYVDTMQLSLTQHVKHIRCLKESVAQMEKEIALNLAQTQGAFLTSVRGIGLVLAAGVTAEIGDLNEQKPLNNLASYSGIVPRVKQTGGTDGKTYTGPVAKRCNRILKDYVVKSAYHLGLHGPQDLMTDYKRRDASGQHANFGMGRRYLRMAINLMRTSQVYLPPNLRKDDYTLEERAGYYLMSWPYLKEKWKKVGALEAAFAKDRPLGLWRQIVQELYDIKLKL

SEQ ID NO: 448737 - protein, 338 aa, unidentified
MSNLKNFVGIDISKLWFDAALIKADDPSQIIHHQFVQNSEGYCKMMEWLSKSGIKPDKYTLFCMENTGLYNTGLVNHLVDIKAQLWVEMPLRIKKAGGFERGSDDRTASVKIACYAMRFRDNVKIWEPADSNMERIKNLIVQRDRVINAITQLTVPVKELKDCGCSAEAKQMERAQKAAITGLQKAKLSIEGLIAKTVEQDEKVFKKVKLVQSIKGIGPVTAVALLVYTRSYDRFESARQLACYCGVVPFKKESARSVRYKPAVSPFANKKLKKLLHLCALSAIKNDNELRLYFERKVNEGKNKMSVINAVRNKLVHRVYAVLRDERFFEDNYVRKCA

SEQ ID NO: 448738 - protein, 434 aa, unidentified
MMRGNEQEPSLKEKRRCAMKMPPPAPSSEGAVIKYVCGIDIGSQCCVGCICRPDKSVVIKSITFANAREGWQIWEEKLKQLDAPAGEILIGMEATSRYGENLYQELEQRGYVLRLLHPGQTHHFHQQRGLRAKTDRLDAMTIARALLSGEARMGYVPDEQVATYRELVRLHTQLSDTAASYQNEIQALVVVLFPEFTQVKASPCLPTALAVLKAFPSAQALVEAGVEALVQVLRAQPAAHYGRPTAKKLVALANQSVSSGRARAGRSTSLRILCDQLEHTQANLARLNTEIEQLLNTDPGVKGLQQVPEFGPKTLAVLRAELGDVQRFSRIDEVIAYGGMDIEIKESGHRIGKAKLSKHGSGLLRRVLYMSALRCIHRKESAFGAYYQRLVQRGLKKGSALMAVMRKMLAVAAHLLMHEDEEYDPSKVCGSAAG

SEQ ID NO: 448739 - protein, 344 aa, unidentified
MEYYVGLDVSLRSCALCIVDSKGTVLFERELPCEVGDIAECLLEFPHPIEHVGFEAGSMSQHLFFGLTAEGFDVVCMEARQVSAALSAMRNKTDKTDARGIAQILRTGWFSPVHMKSREAHGLRALLSTRKALLKKTMDLANEVRGLLKIFGVRLPKTVKHGSFDSVVRPMIEIDDVLAHALVPLLDARVVLYQHYLELDRRVKRAASQDDVCMKLMTIPGVGPIAALSFKSAVDDPTRFKRSSTVGSYFGLTPRRYQSGEHDNPGRISKAGDRDVRAVLYAAANALLMRTMASSQIKSWGMRLMRTKGRRRAVVAVARKLAILMHRMWIDGSEFRQDQVGGMA

SEQ ID NO: 448740 - protein, 354 aa, unidentified
METQTNFDRLQLYVGIDVHKKQWSVSIFTDAAHHRTFSQPPSPEALKTYLDRHFPQASVICAYEATKLGYWICRTLISFGYKCLVVNAADIPTSNKEMTNKTDPMDSRKIGKALRAGLLTPIHVPSQITEGDRQLFRYRKRLLSDLTRVKNRIKDKFLFTGTTIPEEFDNANWSKAFLQWIKTAQLPDTSTRATVDYLLEQYHLIRLHFLKVSVEVRKLQRQVRYKSQAKLLRSIPGIGPLTTVELLCEIEDINRFECFKKFNGFVGFKPGSHSSGEHDWKGRMTYRRHKSLRSSLVECAWTTLQKDPVMLNRYNELTKRKTGKRAIIIIARKLLSRIYYVLKNQKPYELGVAK

SEQ ID NO: 448741 - protein, 383 aa, unidentified
MLLPILRDARLWRAPCIKVRPRRRRVAGAVSVESPVAPGVFKPVPELGASTVDFVIPNGRLGRTASPHAQGWEPRSMFVGIDVAKDRLDVHVRPAGEAFTVARDGEGIEELVGRLSKTAPALIVLEATGGFETIVAAGLGAAGLPVAVVNPRQIRDFARATARLAKTDALDAAVIAHFAEAVHPPARPLADEQSRLLGELMARRRQLIEMIGAESNRRRMLTIRRTLKSVDRVLATLKAQLEQIDDDIDTAVRGTPAWREAEDLLIGVPGIGPRIARTLIAELPELGRLGRREIASLTGVAPFNRDSGTLRGRRTIAGGRPVVRAALYMSVLVSIRRKLPLALTYHRLRAAGKPAKVAIVACMRKLVTILNAILRDKKPWATA

SEQ ID NO: 448742 - protein, 384 aa, unidentified
MQASTVDTPTGGHCGTIFVAIELSQKSWLVTLHSPDRDRISRHKIEGGDHAGLLTLIERMRERAARTLGAVPAVVSCYEAGYDGFWLHRLLLAAGITNYVFDPSSIAVDQRARRVKTDRIDGERMLRTLMAYLRGEPRVVRIVRVPSVEQEDARRASRERGRLTKEQTAHTTRIKALLRLLGMAVGNPRRRDWLTWLVKQRDWQGQAVPPQIMAEIKREHARLMLVREQLDALAQAAADLTPAAAQMAQRSELLLRLKSLGPAFATTLTSEVFYKDFIGVRSRASYFGLTPSPWQSGGIDRDQGISKAGNPRARCAAIEMAWLWLRHQPDSNLTQEYRRRTLNASKRIKRVAIVALARKLIVALWRYLTTGLVPEGAMLKTAEV

SEQ ID NO: 448743 - protein, 366 aa, unidentified
MEKGTTFVALDDSKRKLVVAILRPGPSEPEQRELPKEPHLIRRLFQRLAREGRVRTCYEAGVSGYDLYRQIVACGVECAVIAPALTPRRPGQRIKTDRRDAAKLVRLFRAGELTPIHVPNEAEEAVRDLVRCREDVRRDVLRWRHRLLKFLDRHGRLYVTGKNWSQRHWTWIRAQHFDLPVLERTFEATLFALEQALARRAALDREVAALAGSEPYRTPVGWLRCFRGIDTLSAMILIAEIVDFQRFRQPRALMAYLGLVPSEYSSGDTQRRGAITKTGNTHARRALVEAAWHYRHRPSVAGALRHRIEGQPPAVVSHAWRAQQRLHRRYRHLVGHGKRPPIAVVAVARELVGFLWAAMTQPAVAA

SEQ ID NO: 448744 - protein, 386 aa, unidentified
MPQLSDLSRSPVALEQDATLIAVIEMGQSSWLVAGIVPGIERQPLKKLAPDQDTLLQLLYRWRKEAIQAGRTIKRIAVAYEAGRDGFWLARWLHTHGIEAHVIHPSSVPVSREHRRAKTDRLDAELLKRAFLGWLRGEPKHCSMAAIPSIEDEDARRPSRERASLVKECTRIVNRVKANLARLGIRGFRPALSRASKQLQTLRTPEGSAVPANTLGEMRRDIARLLFVKQQIKEVERTRVKRLEQTHGERRTAMVRLLARVVGIGVESADLLVQEVFSRELRDRKAVARYAGLTGSPDESGRKRRELGLAKAGNARVRRSMIELAWGHLLHQKDSPLAQWYRKRTADARGGTRKTMIVALARKLLITLWRMVTTGEAPAGLLRRPA

SEQ ID NO: 448745 - protein, 344 aa, unidentified
MEQVSIIGLDLAKRSFQAHGALADGGVAFRKKLSREKVLAFFAEQPRCVVAMEACGSAHHWGRAIRDLGHEVRLIPPAYVKPFVKRQKNDAADAEAIAEAAVRPTMRFVAVKTEEQQGRAMLFRTRDLMVRQRTQLINALRGHLSEHGVVAAQGPANVKVLAEAVEDQGQGTSLPLLVVELARVFLDQIEGLSKRISELEKVTVHEAACGETTRRLQTMPGVGPITALAIETFAPPMDVFKRGRDFAAWLGLAPRQHSTGGKQVLGKVSKMGQRDIRRLLIIGAMAVVRSASRKGAPEGSWLQRLLARKPKMLVAIALANKMARSIWAMLAKAEDYRVPVAAAA

SEQ ID NO: 448746 - protein, 428 aa, unidentified
MTVRNCTSAKDFLQFKKEIRGSRTHLIVGIDIAKDEHRAFFGTAYGKTLLRRFTFKNDIEGFGKLLESVRLVKETHRLSEVVFGMEPTANYHKPLGDYLIGCGHRVVLVSGVAVKRNRELLDGRWDKNDTKDAANVADLLSQGKCLFYDYTPVLIRDLRNLLSLKRRLKKQEHGLRIRIRNCLLAQYFPELHPYYSKWEPEILSVVRWCLDPSVIAGLEYDQFVKLVCPGSNGVRKQGRLEWIWKKAVDSIGCAAGEASEFEAEVLVEELRHIREVIKETDAKIKDVCKRCPGYDYLLTIPGFGPDVSSKVLAAIGDPFRFNSASQVLKMAGMDLNAERSGKSSDTAVPIISKKGSGHLRYALYQAAFIASTRNKLFKKYYAHILTGREKEKGIKTKMRVKLAAKLLVIAWTLMKKREPFVLEYLQIV

SEQ ID NO: 448747 - protein, 327 aa, unidentified
MDEFVMGLDVAKHTLDAISLFNGRPEYLQVVNQPEGFRQLQVWVENHGYRQGKVCLEATGQYGFAAAKYLYTCGFKVSVVNPARIKAYAASRLQRSKTDKVDAKLIAEFCQKENPPTWSPPRPAQTELKGLVHYLDDLMGQKRQEKNRTEFGMSVELVANILNEHITFLDEKIKSIRKAIRHLIQQDPQFKHDFQLLMSIPGVGELTAARLLAEIPDIRAFKTAHQLTAYAGLNPRQFQSGSSIHRKSRISKTGNANLRYALYMPALVAYRCNPLIKIFCLRLLNSGKPKMVVMCAAMRKLLVLAFGVIKSDSPFDPNYAKLEVVFA

SEQ ID NO: 448748 - protein, 327 aa, unidentified
MTASVASHNQIFIGIDVGGLSFEAAWHRGGSTQYQNRPDAIAAFVARLSAEKQIIRIAVEPTGGHEKALVKALRGAGLPVEMVHTSRFAAYRKLIGAKAKSDTSDARLLAAYAAAPEEVRGRKAGHVVLPQDDVREQLAELAARRDQLKHMIHAETCRLSTVRSPSIRDEITAHLQALRQADRKTHDAMMQLVRQRDELRNAKRLLQTIKGIGDKTALTSIAAVPELGLISNKAAAALVGVAPFARQSGTMKAPARIHGGRALVRNAFYMAAVTASRHNPVLAPFYARLIAAGKPVKVALVAVMRRLVVYANAVLRSGQPWKGAEIG

SEQ ID NO: 448749 - protein, 347 aa, unidentified
MNSVGIDLHRKRSHVAVIDADGTQVLSRRIVNDPASFLELLEGVDGESKIALEATYGWEWLAELLEEAGYELHLAHPLRTKAIASARVKTDAVDARTLAQLLRADLLPEAYVAPRELRDLRDLLRHRVALTQLRSALKNRVHALLAKHGILHGYSDLFGQGGSEFLAALELRDPPRRRLESLLALIGDFDREVGVATGEIDALAKHDARVDVLCQIRGIGRYTAMLVIAEVGDISRFGSARKLCAWAGLTPTIRSSDGKARLGHITKQGSRPLRWALVEAAQHAGRGGGPLRDNFERIAKRRGRKIAKVALARKILTLSYYGLRDGEIRCLARRCRPSAEVFMAASS

SEQ ID NO: 448750 - protein, 312 aa, unidentified
MDTTFIGLDVGKASLDVFISGRNKTETVSNTPSALATSARRLSSLPNPHVILEATGGYERLAHELLTQAGIAVSIVNPAQVRQMARGMGRKAKTDAIDAAVLAEFGRIRCPDPTPLPCEEQRRLEELLTYRRQLIDERVRLNNQIPHFRDPMVKASAAERFDAILADIVRIEKVMQEIVQQTPHLQALHALITSVPGIGPISAFTLIAQLPELGKLTRKQIAALVGVAPFNRDSGKFKGHRSIRGGRPQVRTVLYMAALVAMTHNKSFKEFRDSLVSRGKPKKLAIIACVRKLVTVLNAIVRDAKPWKAKAA

SEQ ID NO: 448751 - protein, 362 aa, unidentified
MKKNSTRPKKSRSDRNLPMQTIGMDLGDRNSRFCRLSADGQVLEESSVATKSAAMRKMFGPMRRSRVVLEVGTHSPWVSRLLTELGHEVIVANPRQVHLISASSRKNDRVDARTLARLARVDPELLQPIRHRSRQAQEHLMVIRVRATLVEARTGLVNAARGLTKALGERLPSCDADQMSMEKAASLPMALQESLRPLLEEVASLTQKIHALDAQIEQIAREEYPETALLTQVFGVGTLIALTFVVTIEDKHRFAKSRDVGCYVGLRPKQGASGENDPQLRISKEGDVYLRTLLVQASQCILSRRGPDTDLKRWGLQLCARGGKNAKKRAVVAVARKLAILLHRLWVTGEVYEPLRQQAAAA

SEQ ID NO: 448752 - protein, 429 aa, unidentified
MEEVDDAELVVERVAALDLGKAGLEACVRVPHTHRPGRRMQELRGYGTTTAQLLEMAAWLRQWHVQRVVMESTSTYWKGVYYLLEAEGFDCWLVNAREVKNVPGRAKTDRADALWLAKVAERGMCRPSLVHPREIRRLRDLTRYRRALVQDRTREQQRVEKLLEDAQIKISAVLSNLHGVSGRAMLEAPIAGERDPRTLAQLAKGQARKKIKALEEALCGFFTDHHATILQMMLDNIDRISAQIAALDTRIEEAIGPFSSQAARLAEIPGVDAVAAAELIAEIGVDMTRFPSAAHLVSWAKFCPQTHQSAGKSKAQARGKGNPWLAGTLGRIAFANSRSDTFLGTRYRRLARRRGAQKAIVATGNSVLTVVYHLLSDPDASFIDLGPGYYESRINKHRRARDLATQLQALTGQHIAIRDGKAVITDTAA

SEQ ID NO: 448753 - protein, 411 aa, unidentified
MSLPESSFYVGVDWAAETHAVCVLDAAGKIQTEFTIAHTADGFADLLRRLGRLTDDPMDVPVAIERPDGRLVDALLEAGYPVVPVSPNAIKTWRDGEVLSGAKSDAGDAAVIAEYLRLRAHRLRPATPFTVETKALRTVVRTRDDIVEMRVAATNQLAALLDAHWPGARAIFADIESPMALEFLTRYPTAAHAQRLGEKRLTAFCVKHGYSGRRPAAELLHRLRQAPAGTTDDTLVEAVRDAVLALVTVLKALGAARKDLDRSVAAHLGEHPDGPIFTSLPRSGQVNAAQMLAEWGDSRVAYDGPDAVAALAGLTPVTNQSGKHKAVHFRWACNKRFRKAMTTFADNSRHASPWADQVYRQAIARGHDHPHAIRVLARAWTRVIYRCWLDGTPYNPVKHGNANEINQPTAA

SEQ ID NO: 448754 - protein, 328 aa, unidentified
MVWTLLFERCGGILAGTALYKQEGFRQQITTIGLDLAKSVFQVHGIDHEGEAVLRKKLRRGQVLKFFATLPPCLVGMEACGSAHHWARELSAQGHQVRLIPPHYVRPFLTTNKHDAADAEAIAEALVRPTMRFAPIKSIDQQAVLMLHRSRELLVKQRTMLINAVRGHCSELGMIASQGASRVNDFIVLIEDPDDTRLPAFAREALGVLIAQLHAVKEAIRTLERKRQAWPRSQQASQRLTTIPGVGVITATALVATIGDGSQFKSGRHLSAWLGLVPRQHSSGGKSRLGRISKRGDGYIRRLLVHGSRAVLRWQRGAPKQPSPWIGA

SEQ ID NO: 448755 - protein, 347 aa, unidentified
MIGVDPHKASHTAVAVSVAEEQLGQLRVRASAAQAERLLEWAAAWPERTWAVEGAAGLGHLLAQQLLSAGERVLDVQPKLGARVRLLTAGNANKNDPNDARSVAVAALRSPGVREAAPDDHAAVLKMWSKRHRDLGRTRTQVVCRLHAVLCELVPGGVPKKIIAAHAVRLLASITPAGAVDAARCDLAAAFIEDLQRIDAHLRDTRKKLTAAVRASGTSLTGLFGVGPVIAATIIGDVGDVSRFRSRDHFASYNGTAPIEVSSGSRKIHRLSRRGNRRINHAIHMAAITQVRQPHSEGRAYYDKKLAEGKTHREALRSLKRHISDAVFTRLQADARRATVTRGPAAP

SEQ ID NO: 448756 - protein, 343 aa, unidentified
MQSISTIGLDIAKSVFQVHGVDAAGQAVLRRQLRRRHVLAFFQKLSPCLVGIEACASSHHWSRELQALGHAVRLMPPAYVKPYVKRQKNDTTDAEAICEAVTRPNMRFVPTKTVEQQSCLMLHRARHLFIRQQTAVINSIRAYLAEFGIVAPVGRRGVEQLLEVVADTADRRLPEVARACLAALGSQLRALKAQILEFDRRIMVWHRSNATSMRLDAIPGVGPALATALVASIAEPGAFRSGRDFSAWVGLVPKQNSSGGKDKLGSISKQGDRYLRSLFTAGALAVIRYAKIHGTGHRPWLTGLLARRPTKVVAIALANKLARMAWAMMARNERYKEPAALAA

SEQ ID NO: 448757 - protein, 355 aa, unidentified
MDSTKYVGMDVHTEAISVAVRNSAGKVIMESILETKANTILEFLQGLRGNVHVTFEEGTWAAWLYDLLKPHVTKVLVCNPRKNALLKDGNKGDKIDARKLSELLRLNHLKPVYHGEHGIRALKELSRSYLTISKDLGRVMNRLKALYRSWGIPCKGQQVYAPRHRSEWLNKITEAGVRRRAEYLYQQLDALQPLRQQVRRDLLAESRNQPATKLLRKIPCIGPIRAALLIALIQTPHRFRTKRQLWNYSGLGIETHDSAQYRFVRGELQRSKRPQQLRGLNKNHNHDLKNIFKSAATMATISAGPFHDFYEALLVKGRKPTMARLTLARKIAAITLIVWKKEVSFDGKHLKPQAA

SEQ ID NO: 448758 - protein, 386 aa, unidentified
MMTMTRTEESTAVAITSGPTLLLAFELGERIWKLGFTTGLGQRPRVRQIPARATDRVLEEIARAKVRFHLPPDAAVVSCYEAGREAFWLHRWLVAHGVRNHVIDSSSIEVSRRARRSKTDRLDLEGLLNLLARFQNGEHRAWRIVRVPTVVEEDARHLHRTREALQQDRTRIINRLKGLLTTQGLALRLDAHFRTQLDTTRLWDGTPIPAGLHARLQRTWAQLEFLNRTLADVDSERAAPVPTLPTTLSRYVTSLPTLRGIGPIGAWTLATEIFGWREIKNRRQLGGLVGLVPAPYQSGDSTHDQGITRAGNKHVRRLMVQLAWSWIRYQPDSALTQWYQRKFGRGSRRLRRIGIVALARRLLIALWRYVEHGECPDGAMVKGQAA

SEQ ID NO: 448759 - protein, 450 aa, unidentified
MRSKRNRVAQLPVIEPNAAGIDVGATQVFVAVPADRDPESIRSFETFTVELEKLADWLQQCRIQTVAMESTGVYWIPLFQILEKRNIRVRLVNAHHVKNVPGRKTDVEDCQWIQHLHSVGLLRGSFRPDDEICAIRSLWRHRDNLIQLATVHLQHMQKALDQMNLQIHHVISDLAGATGLAIVDAILAGERDPHKLAKLRDWRIRANEETIMKSLVGDYREEHLYVLRQSLECYRKYQEMIQVLDVEVRRRMVRLPSKVDPAAKPLAKERNPRKTPRRTEPLDLRLELYRAFGVDLTQVPGINALTAQVLLTEVGPSLARFSTAAAFCSWLRLCPEPRISGGHVLSSKTRPTKNRAALALRLAAQALHKSQTYLGDYFRRMKARLGPPKAITAVAHKLARVVYHMITRQQEYDMTVFQEQERRVQDRKRNRLCMQAREMGFDLVPIETVP

SEQ ID NO: 448760 - protein, 349 aa, unidentified
MVMLADQVDAVIGVDTHKHSHTAAVVTPTGGLVADVTIPTGAFGAKRVIAFAREHAPGRRVWAIEGTGSYGSGLTTYLLEQGEWVVEIDRPARPARRNGAKSDELDAVRAAREALSREHLAQPRRRGDREAIRVLVCTREGAVLSRTRAIAHLHGLVVNAPEGIRNQLRKLTTDELLERCARLRTGPSQSVEHRSTITALRSTARRALACEAEAADLESALELIVERVAPGLLDEPGVGVMSAARLLNAWSHAGRIRSEAAFANLGGVAPIPASSGQTVRHRLNRAGDRQLNRALHTIVLSRLQHDEETRTYAARRLAEGKTPREVKRCLKRFAARRLFKLLEHSAEAA

SEQ ID NO: 448761 - protein, 318 aa, unidentified
MNIIGLDISKDTIDATLHKTNGSIHYIKFKNNDDGLKQFRLWIKGNRIRKAYIGMEATGIYYEKAADMLSSYYTVYVINPLKIKDYGKSRFNRTKTDKADSNLIADYIKRHQDTLIPYQIPKNKALQKLINLKNQLQQHQKQIKNRLHSTEEDFIRNIHQDLIDTIQDKMEQVKIAISEQIKKQTDYNHYRNLQTIPSIGKDTASVLYAQLTEKHFKTANQFVSYAGLSPAIIQSGTSVRGRGRLSRYGNRRLKSTLYMPALCAYRFNAFPKLINNLKKAGKPKMVIIVAIMRKLAKLAYYIVKTGQPYDAERHRLNQ

SEQ ID NO: 448762 - protein, 371 aa, unidentified
MAQSSKTLYVGLDVHKESIAVAYAPEDRGAEVVSLGPIGTRQCDIDKLIRRLESKGAAMVFVYEAGPCGYGLYRYLTGKGLACQVVAPSLIPRKPGDRVKTDRRDAMTLARSMRSGDLSAIYVPGIEDEALRDLSRGRDDAMQDLKRSKRRLKSFLLRQDIRYEGRATWNAAHLRWLAEVVCPTPPQQIVFQEYLRAVSEQHERRQRLEHELHEAVKGWRLYPVVEAIQALRGVELTGAIILMTELGDITRFDNPRQLMSYLGLTPSEYSSGERRRQGGITKAGNSHARRALVEGAWAYRYPAKVSRHLQLRLEKLPTEIQAISWKAQVRLCKRYRQLTARGKHVNQVVVAIAREMAAFAWAIARLVPLAS

SEQ ID NO: 448763 - protein, 316 aa, unidentified
MSQSDVFVGIDVAKAQLDVALRPTGDTWTAPNDEAGLAHIVERLGPLRPALIVVEATGRLELPLLGALMAAALPVVVVNPRQVRDFARALGHLAKTDRLDAHVLALFAERVRPTLRPLPDPATQELSALVARRRQVIEMLTAEKNRCGQAPPALQPDIAGHITWLETQLQQLDDALGRQIRNSPGWRAQDALLQSAPGVGPVLSRTLLADLPELGRLTRKQIAALVGIAPLNRDSGTLRGMRTCWGGRAPVRAVLYMATVSATRCNPVIQAFYRRLCAAGKAKKVALTACMRKLLTILNAMMKHRTPWRTQVSQCA

SEQ ID NO: 448764 - protein, 360 aa, unidentified
MQGHAGFSGSDLVVVGVDTHKAFHVAAVIDSVGGLLGSTTVPATAAGYARLVAWARSFGRLERAGVEGTGSYGAGLARHIAERGIAVIEVNRPDKSTRRRRGKTDAIDAESAARAVLSGYAHGTAKSADGPVEMLRMFKLAKDSAMKSRTQAINQLRAVLVNTEPSLRESLSGLGTTRLVQRCARLLPGDGGDALAASKYILRLLARRIQNLTAEIEDLQREIHRVVTAHRPQLLEGYGLGPDTAATLLITAGDNPDRLRSEASFASLCGVCPVEASSGNTSRRRLSRGGDRRANAAIYRIALSRLRWDQRTQSYLQRRIAEGKTKREALRCLKRYIARELYPLLLGQPNTGPERLPEAA

SEQ ID NO: 448765 - protein, 365 aa, unidentified
MKKGSTVMATSKRNFDQKLTIGLDLGDRSSWYCVLDEAGEVIGEQKLGTTPKAMKEVFAAIPRSRIALETGMHSPWVSRLLSELGHEVIVAHARNVRLIGESRRKDDRFDARTLARLARIDPQLLSPVKHRSAQAQADLTVIRARASLVRARTALVNAARGLTKSYGERLRGCNPRNMDTEKAQALSPELQAALGPLLQALESLSERIAEYNQQIEKIAKQSYPQTALLKQIKGVGTLIALTYMLTLEDPHRFRKSRDAGCYAGLQPGRRNSGQSEPQMHISKEGDPYLRTLLVQGAHHILGPFGPDSDLRRWGLQLAERGGKAGKKRAIIATARKLAVLLHRLWISGEVYEPLHNTNRTRLAAA

SEQ ID NO: 448766 - protein, 342 aa, unidentified
MTNFNTKYQSVCGIDIAKNVIQIYQVNQDGECKNFQVKRKEFLQLFENREPSLIGMEACGGSQYWARELQKLGHTVNLMAPSAVKPYVSGFKSDRKDAIDIFNAMLAGVRKVAVKTEAVTDLATLLGIRARRVRARTAKVNMVRGYLMEYGIIMARGLRQFKNSIADSLLQLERAQASNMVKEEFKFLVDEVDKETEAILRLDREINSLAKQCKNFEHFLTAPGVGLITAATMCVKLSDPQVFKNGRQFAAYIGLVPQHYGSGGKNVNTTIPIKCNKELRGLLVQCAQSIRRTKNKSSWVIQIEDRKPNSVATIAVANRLARRLWAIASKGEDWKRMDINFG

SEQ ID NO: 448767 - protein, 332 aa, unidentified
MENFYFIGVDVSKKKLDFCVMFEGRVVHEEETVNHQGAIISLLHQLEEDYGISGCQMLVCAEHTGQYTFPLACACKAVECKLWLENPTEIKYSSGVQRGKNDKVDAKRIAIYAKRFQDRIQYYERPTEEIERLKQLESERTLYVTDLAKYKGQMKDQKDYMPKKLYERKMKRLQALMDDLEEAIQSITDEMDEVITSCPVLSRQKELLMSIDGVGRVVATNMIITTEAFTRFDDPRKFNCYAGVAPFSYSSGSSQHSKARVSHRADKVMKRLLHLAAVAVTHRVSGELKKYYERKVAEGKNKMSVINALRAKIVARMFAVIKRNEKYKPILS

SEQ ID NO: 448768 - protein, 339 aa, unidentified
MNILFLGIDLAKNVFQLCGLNQAGKPVYTKRTGRKELLQTLANIPACLIGIEASTGAFYYWQREFEKLGHKVKVISPQYVKPFVRGQKNDGNDAQAIAVALMQPTMQFVPPKSPEQQDIQALHRARQRIVNHRTATVCQIRGLLLDRGIPIGSAVSRARRAIPLILEDAENGLSSRMRRTIAELYDLFNDLGRRIHFFDKEIETVFRQSEACQRIAKVKGIGPETATAVVAAIGKGTEFKNGRHFAAWLGLVPRQHSSGDRQVLMNMTKKGDKHLRTLFIYGARAVVRVATNNNDGHMNQWVNQLKERRGFNKTTVAVANKNARIIWSMLRNDTGYQVV

SEQ ID NO: 448769 - protein, 458 aa, unidentified
MAGQARKRMIAAQLVEDEDYRLRHEKVAGIDIAKAKGDVCTRLAPAGGGVRRRSRVEEVPATVPEIAALAGRLLDDGVELVSMESTSDYWRVWFHVLEAAGLRVQLVSSSQARQLAGRPKTDRLDAQWIARLTEMGLLAPCFVPPPEIRELRDWTRARLHLVHDRTAEWQRLEKLLEGALVKVSSVVSALAGNKTARAVVEALIAGERDPERLAGLALGRLRGKRRELAAALEGARFGEHHARLARMHLDRIDALDRHVAVLDDEIAACLEAIPAAWGVDSAGAPCPDPGEGAPVLAAAARLAEIPGMSPALAMAVIAEAGLDMSRFPTAGHLVSWAGLAPSARQSGARSRKPGKGQGNAYLRGYCTQAANGAARTDTFLGERLRRLSRRAGGARARCAVARSILVIVWHLLKDPQARFTDLGADWHQRKTDRDKKISGHLRQLRALGLEVTVTEAAA

SEQ ID NO: 448770 - protein, 341 aa, unidentified
MKLIRVGVDLAKSVFQVHGVDRSERTTWRRRLRREDWIDVLRERLEPGGEVGMEACGGAHHWARELQKLGYRVKLIAPQFVKPYVKSNKHDAADAEAICEAMGRPGMRFVPVKTVEQQDIQAIHRVRASLVEQRSAKANQIRGLVAEYGLVAPRELLHLRRALRRWLEDEGNGLTMRFRRLLRGLQDELISLDERIAELDREIEEIAKSEPAAKRLMQLRGVGPVIATAMLATVGDARQFRNGRQMSASIGLTPKQHSSGGKERMLGISKRGDAYLRSLLIHGARAVIRTARAKDDPLSRWVIRIADRRHPNVAAVALANKTTRIAWAMLSRETNYQPAIQ

SEQ ID NO: 448771 - protein, 343 aa, unidentified
MQVSTIGVDLAKNVFQVHGVDSAGKVVIARQLRRKQVIDFFSKSPACLVGMEACGTAHHWAREVSKLGHTVRLMPPSYVKGYVKRSKNDAADAAAICEAVTRPSMRFVPIKSADQQALLMLHRTRDLLIRQRTQLINALRAHLAEFGLVAATGREGLAQLAAIITDESNREALPSAMKQALQAIVDQLAALELQIGTLDRAIHAHHRANDMSCRLETVPGIGVIGATAIASTVTDPNDFKSGRDFAAWIGLVPRQHSTGGKERLGGISKQGDRYLRRLLVIGATAVVRHARQHPQKHPWVIRLLAKKPAKLVAVAVANKMARIAWAIMAKGGYYRAPELAAAA

SEQ ID NO: 448772 - protein, 345 aa, unidentified
MSSISGRQVVGVDLHLHRSVVGIIDADGGECGWVRIDNDPEALVRECRKAGRGAPVAIEATYGWYWAVDALQAAKFEVHLAHPYGMKAMRSRKRVKTDPRDAYELANLLRLGSLPEAYIAPPELRELRELVRHRQQLVKTSTAVKAGVRALLAKHGIRLAVTDLDGDAATEILAALQLPGTYAIRLAAQRRLMLMLAQEIDACEHELADRLRHHPGYCKLLGLKGIGPVLAAIFVAEIGDITRFDTAAALCCWAGITPRHYESDRTVRRGHISKEGCKLVRWAAVEAIQRNCEPAVKQVKDDIIARRGTGARNIAKTAAARRMLEAVYYTLHDGQARFLTRAEAA

SEQ ID NO: 448773 - protein, 399 aa, unidentified
MVSIGIDISKGKSTVCFLKPYGEVLHKPFEILHTESGLNHLSELIISLNEEVKVVMEATGSYHVPVLMYLKERGIFVAVVNPLVMSKYANQSIRKGKTDKLDSIKIANYGLDYWFRLVDYAPTTSIYEELKVLNRQYLSYLSMRVHAKQALTNLLDRTMPGIKTQLMNRSDVPDRDKLCDFVKEYWHFDNVTNMTEEQFIVSYNNWAKTNRYQASSVKARKIYIIAQDSVPTLSSCILSTKLLVLEAVHVLHVIDTTLVLLLSQMRTLVKSLKEYETVMAMPGVGEILGPRIIAEIGDVRRFHSASALVAYAGLDAPPFQSGTYMAGKRSISKRGSSTLRKTGFEIMMYLKSVKPCQDNAVYLFMLKKESEGKPLRVAKIAALNKFLHIYYARVKEIYN

SEQ ID NO: 448774 - protein, 355 aa, unidentified
MQKYKVSFKGQNIYVGIDVHLKTWHVTTLTESGYKYSFAQHADAKELFDRLNKKFPEAHFMSAYEAGFCGFSAHYALTEQGIENIVVHAADIPTTGKEKAMKTDAVDSEKIAWALKRNELTGIYIKDKRYMDDTNLIRLRQRFITDLSRQKNRTKHLLYTQGVTYPERFRKNGTHWSRNFMKWLREEVELLSEQKLSLLLLCEQVENTRKAILKVTREIRRLSTTDRYRENYDLLMTVPGLGLITSMSMLTELDNDIVRFPNERRFVSMLGLIPTCHDSGEKKVSGEKINRGNKHLGPLIVEASWVAIYRDYQLGAYYSNCCQTMKPHKAIIKVARKLACRAYAVLKNKKGYVLT

SEQ ID NO: 448775 - protein, 319 aa, unidentified
MATENNQPQLPITYVGIDISKDTLDVSAGGNHRTFKNSPAGFRDLLNWLRKSQVEQFHIVCEASGGYERHLVHALLEASVPVSVVSAARARSLARSLGLHAKTDKIDAGLLVRFGEITKPKSRTRLDGTSRALTELVDFRRQLLDQISILKNQQEHLPPGALTRSSNRLLRSYEAELKVIEKSIDELMKANPVLWENYQRLTQVQGVGRYTALGVLAYFPEIGKLSRKQAAALAGVAPYSKDSGNRQGRRSIYGGRTKLRASLYMAALTASRSNPVLAPFYARLKANGKASKAALTAVMRKLIVLLNHLIKHPDFSLAS

SEQ ID NO: 448776 - protein, 391 aa, unidentified
MILVGVDVAKDKHDCYIMTSEGEVLFKSFTIANNMEGFNQLYEKILSVIDNFDNVKIGLEATGHYSYNILGYLLDKGLTPYVINPLHSNLYRKSLSLRKTKTDKVDSRIIASMLMSDVSLKPYSNTLYHNEELKSLTCYRFTKVQERAKLKISISRLVTILFSELEKLVPTLQMNSIYALLYEFPSAHAISKAHLTRLTNLLNTTSKGHYTKDKAVLIREAVKNSIGSNMPAKSLELKHTIKLIKELTSEINEIEEEIKIIMNKINSPILTIPGICLSTGAQILAEIGDFKNFSSPDKLLAFAGLSPSTYQSGNMYSSNAKMEKRGSKYLRFALFNAAIYVSYWEPTFSQYLKKKRVEGKHYYVAISHVVKKLVRVIFHLEKTNERYSTVV

SEQ ID NO: 448777 - protein, 346 aa, unidentified
MQIIRVGVDISKSVFQVHGVDGRDKPVWRAKLKRSSWLGVLSAKLEPGCEVGLEACSGAHHWARELQTRGYRPRLIAPQFVKPYVKSNKTDRNDAEAICEAMARPSMRFVSVKSVEQQDLQALHRVRSTLVGQRTAKANQIRGLVAEYGLVAPVGVAPLRQAIPLWLEDGENGLSAMFRQLLNDLWADLRELDERVWALDKQIELIARGHRVARRLLKLRGVGPLTATAMVSALGNGTDFRRGRDFAVWVGLTPRMHGTGGKDRLLGISKRGDAYLRKLLVHGARSVIRHAVDLDDPLSAWIKRLLSRKHVNVVTVALANKTARLAWALVRHGEEYRPELAVTAAA

SEQ ID NO: 448778 - protein, 419 aa, unidentified
MRVHRNCCGLDVHKRMIAACLIREDGEGNSVTEKRLFGSMTRELHELAQWLCSAQVTAVAMEATGVYWMPVWNVLEPYGLQLLLINPEHYKAVRGKKTDLKDGTRIAELLQDGRLEGSYVPPVTIRVLRDLTRYRIKLVQYQSSIANRIQKLLEQCNIKLASVASDALGVSAMAMLRALAQGETDAVRMAGMAKKQLRKKIPQLQLALEGCVLPHHRLLLTEMIEDLDHVGAKITRIEDTIERHMRPFQEAVNRWLTVPGIKHRLAWTLVAEVGPTVEAFPSAADIVSWAGICPGNNQTAGKRKTGTTRAGNPWLRRALCEAAWAASRSKGTYLQAQFRRLAALRGPKRALIAVANSILTAGYYMLQRATTYQELGPDYFDRRNKVRATHRLVKRLEALGHRVILEPHFTAYPLKASSS

SEQ ID NO: 448779 - protein, 399 aa, unidentified
MESIHPNGERIKRFRELKATLRTQRDRLLVGIDVAKAAAVAQIRLAHTRILERQVVLPMTTAGFTAFWRRLERHQRVTGAQVIVVALEPTGTYHQALAAFLVAQGADVVLVDNHVARLNRRTLDRTWDKHDAKDAANLCDLLEQGKVLFYSQLAEPLASLRRLVRLLRRARVELGACKTRWQNTLRPALGPVGDPLPPAVAAALPAPLRAWCPAAERPGGPGRRRALPPGLTAELADLAARGTAVQQRIAALEATLTRCAAPLPATGLLDSLPGVGETLAAILVAEIGEITWYTKFSQLRKLAGLDIIRLQSGQWAGTARISRCGRPLLRWALYQAALGASRTPAWRAKRAALLAKRQGDPHAFFKANVELAAKLLRLVWGVWRSGRPYTSAWALPPAA

SEQ ID NO: 448780 - protein, 331 aa, unidentified
MAGQRVRPEYTIGVDISQEECVWVVLEGATQTVKAKGEVKRSPKALASWAAKLYEQWPQALVVVEATGGLERLVRRAAHEAGFGVVVANPKRVQRLRESGGWAKTDGQDAQALAIWGWLFAYPQPQPGEAEERMRDLMLRREQVVEMLRRERVRYQRAQDGFVRQQIQEMIAVLEEQLEEVEEEIEEQWAAWEEAEPQVREDLELLQSVPGVGRWTALTLRLFMPELGHLDAKQVAALSGTAPMARDSGKRRGRRRIHGGRRRIRGALYMAALTWIRRKRGPLWEFYNRLRQQGKPSFVAIVALMRRLLVILNAMLRDRTPWTPEKAMAKT

SEQ ID NO: 448781 - protein, 343 aa, unidentified
MEHYAGIDVSLKESSVCVVDSSGKIVLETKVASEPEALLRHFADLGIAVRRVGLEAGPLSQWLHGSLVGAGFEVVLLETRHVKAALSAMTVKTDRKDARGIAQLLRMGWYRPVYAKSTDARDVRALLVGRKLLQGKLLDVELSIRGILRGYGLKVGVVSRGRFEARILELIEGHAMLETVIGAMLQARASLWNEFTRLHRAMLKIARADRVCRQLMSAPGVGALVAVTYRTAVDDPMRFAKSRTVGAYFGLTPKKYQSGETDIDGGISRVGDAMVRTALYEAAHIILTRATRFSALKRWAMEVARRRGMKRAKVALARKLAMVLHRMWVDASQFRWSKDTVTA

SEQ ID NO: 448782 - protein, 410 aa, unidentified
MNPLYVGIDVSSKSNVAYLMMPDGSKHSNFSVPNSRDGSRQLVKRILSAVTSESLTDVVIGLEATSVYGDNLVCFLREDGSLAPYNKKIHVLNPKQVNKFKLSYNDLPKNDYVDSFVIADCLRFGRINKEVYLDDYRYAALKNLTRARFFAVQNLIREKQRFMNQLFKKYSTMTQEKVFSDTFSTTALAVYESFESAEALANMDLHQLTDFIIEKGKNRFPDPDSVAKAIQKAARSSYRLPKTVNDSVNQVLSISISSMRAMESQIKAFDKAIAEQMALIPNTLTSVKGIGPVYSAGIIAEIGDINRFPAQASLAKYAGLVWSQHQSGDFEAQNTHLIHSGNRYLKYYLCEAALSLVRCDAEYRSFYHRKYKEVNKYQHKRALALTARKFVRLVFRLLKDNCLYRAPESN

SEQ ID NO: 448783 - protein, 417 aa, unidentified
MNTMKLQPFAAFVGIDWADTKHDVCIQSADSLRREFAVIPHKVEGIDEWARSLHRRFSGPIAIALELSKGPIVYALQKYDYFVIFPINPSTLAKYREAFQPSRAKDDPTDAELALDLILRHPERFEPLQPQSVEIRKLAALVEQRRRLVSDRVRLTNRLRSTLKQYYPQTLDWFNRIDTKLFCDFIERWPTLMQVKRARTTTLTTFFRAGNTRNPALLETRLASIRSSQHLTLDEAVIAPNKLHVLMLVGMLRVILDAIKSYDQTIAELAPEHDDYYLFSSLPGAGPSLAPRLLVAFGEQRNRFKSAAELQKYSGIAPVTERSGTKHWVHWRWRCPNFVRQTFVEWAAQTINKSYWAGEYYYQQRKKGSAHQSALRALAFKWIRILYCCWQTRTPYDEATYLKALQRRGSPLVAKAV

SEQ ID NO: 448784 - protein, 444 aa, unidentified
MTVNTVGLDLAKDVFQVHGISANGRVIFNKTVKRAKLLQFFEALPPCVVGMEACGSAHHWGRELGKLGHDVRLMPAGYVKPYVKRGKTDAVDAEAICEAVRRPTMRFVELKTEDQQAILAIHRTRDLVVRQQTQIVNMIRSILREFGHILPTGVGAILTFAKRHLGGDHPDMPELANGILGTLCHQLVGLNTRVVGYTRMIEQHAMMTADARRLMRIPGIGPITASAIIATIGDAKQFRTGRDLAAWLGLPPPEQIQRRQGAAREDHQEGRPLHQEAADRRHDVARLDGQEASRACRSLDAVTAPATVGGERPRSDHWAARPGKDRGSGDPRVRRPAICSIPTRAGCPGRGADKMDHAVLRLLLPPVDSAPFARRAQCIFTPRSTDPSWRPKVLNGPGNRDSWATCNGSVRCPATRPTRTRRSTPVSRPWIWSDRNRPSRCSAN

SEQ ID NO: 448785 - protein, 435 aa, unidentified
MEEVTDEPLYRDRVCGIDIGKAGLYATIRVPSDTSPQRRMSETRSFATTRRGVLALADWLRSWQVPAVVMEATSTYWMGPFFRLEAEGFECVLADARQVKNLPGRPKRDPSDSSWLAQCFERGAVRPCFVATAEFRVIRLHTRYRRDLINERTREKNRAEKLLETAAIKLSSVITDLHGVTGRDIMDHLIAGERDPKVLAQMARTRARAKITELQHALEGAEFFTGHHARLLKTMLQRIDQIDDQIDGLTAVIEELLAPYEEQLAQAESMPGWGRRSAEDAVAETGVDMTRFATGGHLVSWAGRAPLDKQSGKRKGQARHKKGNTYLGGVLGETAVCAGRTQTREGARYRKLARSRGKNKACVAVGNTQLKVYHTLLSSPGMRYADLGPDYYQRRAQNRRTIDYHVRELEALGLEVTLCRIPEPEPGQAATTPAA

SEQ ID NO: 448786 - protein, 344 aa, unidentified
MSEAFIIGLDIAKYVFHAHGVDERGRAIFSKRISRKKLLDFFAAQPSCTVALEACGGAHHWARQLSQLGHEVRLIPPAYVKPFVKRQKNDAIDAEAICEAAQRPNMRFVAVKSEQQQAAGLVFRTRDLLVRQRTQLINAIRGHLTEFGWIAPKGPSHVAMLAGLIEEEEMASSLPEAARVMLRLMLDLLADLDGKIADLDKEIARRAREDEVSRRLMTVPGIGPISATAIAALAPPAETFAKGRDFAAWLGLTPLQRSTGGKHKLGSTSKMGERTLRRLLIIGSSAVVLQASKRGAPKGSWLEQMLARKPRMLVTVALANKTARIIWALLVKKENYRAPVVAKA

SEQ ID NO: 448787 - protein, 364 aa, unidentified
MPAPVLKRPRKPHGVFHGEGVILGVDTHKDVHVGAVLTMAGVLLATHSFATTSAGYQALLLWAYRFGEVSAAGIECTGSYGSALMKYLHTQHVLVFEVNQPDRALRRKAGKTDAVDAEAAGRAVLAGRSLSTPKDGIGGSENLRQMRLVKSSAVKARTTAINQLKGLVVGAEPGLRDELRGLTTKALTRACAVMLPTSVERMLMAELAHRISYLTDELTRLKTVMTQTVTACVPELLQRSGIGYDSAAALIIAVGDNPERMTNEASFAALCGVSPVEFSSGQTTKRRLNRGGNRQANAALYRIVLTRLRWDPRTQEYLKNRTEKGKSKRDVIRCLKRYIARAIFTIIKTIPDQPKHRTLVDLTP

SEQ ID NO: 448788 - protein, 349 aa, unidentified
MPEHLAGVEYVVGVDTHKASYTAAVVSRAGAELEMLTVASDAFGHKKLLAFAQRVGDGKRLWAIEGTGSFGRGLTTFLLQQGEAVAEIDRPARPARRNGAKTDALDATRAAREALARGHLAQPRRRGLREALRVLVRTRTTAVRAKSVAVCHLKSLIVTAPGALRDQLRHLSDGRLAPKCARLRTTVAQSAEHRATVAAIRATARRILFLEAEAEDHASAIELLVQQLAPQLLDEPGVGPLTAAELLIAWSHPGRVRSEAAFAQMAGVAPIPASSGQVTRHRLNRCGDRHLNCALHQIVLARWMHDAETRAYVTRRTEEGKSPKEIKRCLKRFVARRVFRLLEASPIPA

SEQ ID NO: 448789 - protein, 415 aa, unidentified
MKFEKETSGIKRYLGFDIHKEYALVGGQNAGQEWVMPPRRIGLEKFREWAQANLRPGDAAIIETTTNVWDVYDIVAPLVSYVVVAHAGGVREIAEARVKTDKKDIERLLKLLIADIVPEVWVPPVHVRELRGMISYRNRLVKTSTMIRNRLQSLIHRHNLILPKGMLRDKAWWEAQQMSALEKIQIRQELAMLDEMEQHKAEVDGELGRQSLGEVWGKQAMRLLQLSGFGAIISMTVLSAIGDISRFESAKYLVGYSGLGPGVHDSGKEHIEKRITKSGRKELRWALVEAAWRAIRISPYWKEQYEKYLRRMRKPNQAIVVIARKLLVVVWHVLTKEETDARVSEEELAYKMLVLSWDLNEDVRLGLTYKQFAKYALMKLGVESDITRFVRKNVPRRLAAREEVLARMEELGITQ

SEQ ID NO: 448790 - protein, 333 aa, unidentified
MHYVGIDVSKRSLDVCLLAEGSKGSRKTKTLSNGQDSAQNLAKWLILQKCELSQTHVIMEATGIYHEYLACGLHQMGILTSVINPCRSREFAKVMGIFTKTDAVDAYVLAFYGCLKQPEAWTPPEEEVRKLRALLQHRDSLLNDKLRIDNRLNTLKSTEAVQEVMDSLSLVNQYLKSEVARIERLISSHIAQHPGLKRDLKLLMSVDGIGKQIGWNMLAVLRGNNFKSAEQLAAYLGVVPVERRSGTSVHGRARLSKIGSSNIRAKLYIGALTAISKNSHIKALYERLLAKGKMKMSALGAAMRKLVHLCYGVLHTQQPYDEKYKAKIIKFSS

SEQ ID NO: 448791 - protein, 437 aa, unidentified
MICAAVERCAGIDVGKKWLSVCIMIGPLNGEPRIEKRRFGVNVADLERLREWLCQEAITHVVMESTGSYWKPVFNVLEDSVKVYLANPHEVKARKGHKTDDKDGWWLAHLLRHAMIYPSFIPSRAIRELRDLTRRRERLHEVGTAEKNRVQKVLEDANVKLGNVLSDVFGASGQLMLDALLKGEGKPEEIAQFAKGRAKKKIPSIIAALEGHQMSDHHRKMIRYSLAHMEFVEEQLEEIDKDITAQIHKAGLDRQCQILQTVPGVQERSAANILAETGGDMKQFPTQRDLSSWAGLCPGNNRSAGKSRSSRPTGGNPWLRGALTECAWAAAAKKNCFIKEKFWRLTTKHAGKKSPALVAVAHTILQLVYDVLRSGEPYRDRQLPALSEQQKERMICHHVRRLGKLGVRVYSNRPGPATEPEKKTPRAKRTREAIENK

SEQ ID NO: 448792 - protein, 365 aa, unidentified
MRKISTMRTAGKNIFRGQLTVGLDLGDRSSAYCVLDGAGEILLEQRVATTPEAMRQAFEKMPRGRIAMETGTHSPWVSRLLTALGHEVIVAHAQRVRLIVKSRRKDDRLDARTLARLARIDPQLLSPVQHRSAQAQLHLAEIRARAALVSTRTALVNAARGLVKSYGERLRKCHTQQVGREMAGELSMELRQALEPLLREVESLNERIQEYDRRIEKMAKERYPETALLQQVKGVGDLIATTYVLTIEDPHRFRKSRDAGCFVGLQPGRRNSGESEPQMHISKEGDEYLRTLLVQGAHYILGPFGEDSDLRRWGLKLAARGGKNGKKRAVVAVARKLAVLLHRLWVSGEVYEPLRHSQKAMNAAA

SEQ ID NO: 448793 - protein, 396 aa, unidentified
MAAIWAGIDAGKTHHHCVAIDESGRRLLSRRVANDEPELTELLADVLALADEVTWAIDLADGGAALAITILLNQDRPVHYISGRAIHRASEGYRGEGKTDAKDAAVIADQLRVRRDLHPLHGGDDTIIDLKLLTSRRMDLVTDRTRTVNHLRAQLTGVFPGLERAFDFTNTGPLTLLTGYQTPAAIRRIGAKRLEAWLRNRHVLRPDRLAEIAVQAAERQHTSLPGEKLAAQLVYTLAKEVMAYNQQVTEVDKDIEVRFRDHHAFDVITSMPGLGIILGAEFLAATGGDMAVFGTADRLAGFGGVAPVPRDSGKISGNLRRPQRYNRRLQRVFYTSALFSIRHCDESRRFYERKRAEGKRHTQAVLALARRRVNVLWALLRDGRCYELSPPNTLAA

SEQ ID NO: 448794 - protein, 390 aa, unidentified
MSSTSNSTAIRVDLGAIFVSLELSQSKWLVTSLTPGGGEKMSKHLVKAGDIGDLLLRFAELRRKALVRTGQIFPIVVIQEAGLDGFWIHRVLLQEGIESHVVDPASVAISRRRRRAKTDRIDSEALVRTLLAYKRGEPRVCAMVRPPTPEEEDRRRIARERKVLVNERVAHVNRIKGLLYSHGVGAYEPLRRDRRERLDELRTGDGRPLPPHLQAQISRELDRLELVLAQIKDIERASTDMLTAEALAFPGAALLLGLKGIGAAAAAVLWGEGLCRHFDNRRQVAAYAGLAPTPWQSGQVDHEQGVSKSGNPRLRTTLIQIAWLWNRHQPDSALTLWFKCVFRRIRPGVSVESAHRFGESAHPNCKLVGAGAEPWIYVMKVVGLVAKHRP

SEQ ID NO: 448795 - protein, 342 aa, unidentified
MEEYVGFDVSKEETSFCVMDKAGTILAQGKALSDPQSLFEALREHTLCPERIVLETGTLSGWLARGLHECGLPVDVIDARQAHAVMKLQHNKTDANDAHLLAEIARTGFCRPVSVNSEAAQKQRILIKARSHLVRQRRDTQNAIRGFLCALGIRFAKGSGKLAGRVRSALEERPDLKAIIEPLLASAEALKIQIKRLDDEVAHEAKASPASRLLMTVPGVGPVTALAFAATIDDAGRFARSRTVGAYLGLTPRRHQSGEMDYTGRISKYGDSLLRHLLYEAANSLLTIVRKSHPVKDWARRIRKRSSHKKACVALARKLAVIMHRMLITGEAFRWPEKEMAA

SEQ ID NO: 448796 - protein, 341 aa, unidentified
MGVKTYHVGVDLHRNNFTYCVRDSNGEETVGKEEIGNLKKFARRLGKHASVAVEATGNTWMFCRVLKEHVGRLVIVNPNQFKVISRSVKKTDKNDAKKLAEFLEKDMLPEVRMKDELQAKVASLTQTREKLVQLRTVLKNKINNLFASQFIQLKREELSSEKGLRKVLTYHFDAISDVELRVMVDQIRSLNKSIAELEKAIEESGSKMDGFDNLKSIKGIGSKGAATLMSVIGNVNDFSSAKRLAAYIGIVPRVSDSNDTSHHGRITKLGSKIARTTLVQCALIAKRYNSYLFHFHEGIKMRRGGAKANIALARKFLEIIYRTLKNHWIFEDFTRFKIAKT

SEQ ID NO: 448797 - protein, 449 aa, unidentified
MSKQGRSKRSSELRRINPRAAGIDIGSASHWVALDPSLTQQPVREFAAYTDGLHALANWLIEHGIKTVAMEATGVYWIAPFEVLRDRGLDVCLVDARATKQVTGRKSDISDCQWIQELHSYGLLKQAFIPGVEVATLRSYVRQRDRWVADAARAIQHMQQALELMNVKLTEVVSNITGATGLAIIDAILGGERDAEKLSQHRHPRCSRSQQEIARALLGSWRQEHLFALEQARDHYRYLGERIAACDARIDAVMEAFARGEERGPEPPKPSKRDSSPHPLRFDAHGHCYDMAGVDLTAIDGVGVNTVLTVLAETGADMSPWRSERAFGSWMGLAPNPRKSGGRVLRSATRPNAQRAATALRLAARSLSNSKSALGAFYRRLRARIGAPKAITAAAYKIARLFYRMLKTKRPYKDVGQAAYDERFRARRLRSLHRVAAELGFQIVAAGGT

SEQ ID NO: 448798 - protein, 493 aa, unidentified
MGTCELESGDVALAAIPIRKMTIGIVQTLLLIIDWRITMPKRTTGDRAELKPVNVGAAAIDIGSRMHMAAVNPASTDVPVRSFGTFTQDLHDLADWFKACGVTSVAMESTGVYWIPVYEILEQRGFDVILVNARYAKNVPGRKTDVSDAAWLRELHSYGLLRGSFRPDAEIATLRAYLRQRERLVEYAAAHIQHMQKALMEMNLQLHHVVSDITGATGMRIIRAIVAGERNPDVLATYRDVRCHSSIETIRAALVGNDRHEHVFALTQSLELYDVYQAKMLDCDRKLEVLIAALNNKGAKPVGKLSKPRIKTKQVNTPTFDVRSALYGLLGVDLTEIHGLGPSLALKLVGECGTDLRAWPSAKHFTSWLCLAPGNKISGGKVLSSRTRRSSSRAAALLRLAATTVGRSDTALGAFYRRLSSRAGKSKAVTATARKIAVLFYNTLRHGMSYRDPGADHYEQQYRNRVLANLQRRAKSLGFVLQAIPGNANPAVS

SEQ ID NO: 448799 - protein, 343 aa, unidentified
MHGVTTIGLDIAKSVFQVHGIDAIGKVVIRRQLKRRYVLAFFQKLVPCLVGIEACASSHHWSRALTALGHTVRLMPPAYVKPYVKRQKNDAADAEAICEAVTRANMRFVATKTPEQQSCLMLHRTRHLLIRQQTAVINAIRAHLAEFGVVAPVGRRGVEELLDIATASSEERVPEVARACVGALGVQLRLLKAQILEFDRQIMAWHRSNETSKRLDEIPGVGPALATALVASVADPKAFRSGRNFSAWIGLVPKQHSSGGKDRLGSISKQGDRYLRSLLTAGALAVIRYAKIHGTRHRPWLAALLARRPTKVAAIALANKIARMAWAMMVKGERYKEPAALAA

SEQ ID NO: 448800 - protein, 340 aa, unidentified
MKEVKTIGIDLAKNIFQFHGADENGKVVFKRKLTRKKVIPFLSNIECCLVGIEACAGSNYWAREITKLGHSVKIIAPQFVKPYVKNDKTDENDAEAICEAVTRPNMRFVPTKKVEQQDIQTIHRVRERLIKARTALINEVRSILHEYGITMLVGRSRFKNSLPTILANADNELTSMTRDVLEQLSKEYFTLEERVSYYEDKIKMIHKNHPESQRLITIPGVGILGATAIIASVDPNNFKNGRELAAWLGLVPKQHSSGGKSKMLGISKRGDSYIRKLLIHGARASLNWLKEDSVGRRNDWLRKLSARKSKNCAAVALANKNARVIWALLSKQENYKIIAA

SEQ ID NO: 448801 - protein, 408 aa, unidentified
MPDLEQAVRFGAIDWAKDAHAVSIVDERGAEVLAESFPHTEAGVCALTRVLADADVLRVAIERPDGLLVDRLLGAGLCVVAVHPNKLASARERHSASGKKSDGFDAYVLADLLRTDGHRFPSLRPDGDETRALRALSRTREDLVGARVALANQLRAQLEAFWPGAAVIFSDIDSPIGLAFLHRYPSPEDACRLGPRRLEGFLARHGYCGRRSAEELLARLRQAPEGAGAEAEVEARRQAVLSLVACLRPLVEQIGLLESEIAGAVRAHADGAIFRSLFRSGATVTAARLIGEIGDVRERYPSADSLAADAGMVPVSKSSGRSRVVSFRWACDKRLRAAVACLADATRHHHRWAGSVYRRARARGCDHPHAIRILGRAWLRVIWRMWQDRVPYDPALHRGLQQLNPAGG

SEQ ID NO: 448802 - protein, 312 aa, unidentified
MTQTICGMDVSASTLDARIGRDGAWRRFEATAEGLDALIDFCRGHQVGLVVMEATGGYERQPFARLWAGGLPSAIVNPRAVRDFAKAVGFLEKTDRIDAGVIAWYAETRRIVPCRPASATQQRLAALTTRLRQLTELRVGQTNQRRLVTDPDALASFEAILGVIARETRALEARIAELISADPMWIALDTAFRSIKGVAERTVARLLAELPEIGTLSNKAVSKLAGLAPIASDSGKRTGKRPVRGGREGVRSILFVVAELVRRYDPDFAAFHRRLSDAGKPKKLIRIALAHKLLVRLNAKARDARTKCAAAT

SEQ ID NO: 448803 - protein, 418 aa, unidentified
MLWTGGEEIVSIIAVINRTMDLPMRKPRPRNRSQRKPNDLSRSLAALDMDRTLIAVIEMSASTWLVAGIVPGVERQPLKKLEPDEHALLALLQRWRGEAERSGRTITSIAVAYEAGRDGFWLARWLLSQGIEAHVIHASSVAVSREHRRAKTDRLDTQMLKRAFLGWLRGERDHCKMAAIPTLAQEDARRPGRERESLAGEASRIVNRLKSALARLGVRKFNPKLKKASERLTDLRTPEGEPIPPNTLDEMKRDMERRQLICAQIRKIEQERLKHLARAPDTGPHAMVRLLARVIGVGIETADTLVQEALSRHLRDRRAVARYGGLTGAPDSSGSINREKGLSRSGNARVRRCMIQLAWRFLRFQKDSALAQWFFHRTGNARGMRKTMIVALARKLLIALWRLVHEGVIPEGIVMRPA

SEQ ID NO: 448804 - protein, 377 aa, unidentified
MSLQEDGRNPSQRKEYVHHPDLLLVGVDVSKAKHHACMGTQTPMSCRKFECTHTREGFRRFEQPLKAHRDQNRRQRLLIAMEPSGIYWQALDERLNSWGYGVCLVHCQAVRHHRKTMPDGTRKTDEKDAASILDLLRQGKCFLPVARAPALQAASRLLRRPRALKKRGSHLRHHLRAAIPLTLPALHPLVQALTQPTALRFLQVNPTPTSMLRNGQRHFLETWQPRSRCGPGRPEKFQQLYDLAPHSIGLSDPYGSEEFALTALAHDVADALATHQLWLAQASALLAPRTDCQGLLPLPRIGPPTAAAILPAMGALSPDTNGTQRVTLAGLDIRVFASGSRLRKRPKIAHGGRAYLSYWLSHDALRLVAQEPHCTAY

SEQ ID NO: 448805 - protein, 351 aa, unidentified
MKKNSKQEQWRQETGMVIGVDLGDKESQVCVLGAGNEIRHEVRVRTTTPALQQFFGSVKPSMVVLEAGTHSPWVSRLLEEMGQGVMVVDPRRLKLISASDAKNDRNDARTLARVAAAMPELLRVVKHRSAEAQKDLTVIRSRARLVEVRTKLWCSLRGLSKSLGHRLPRRVSREALGEWAEILEPLYQAVEDVRGRIAEYDKQIQRLEQKYPAAARLQQIAGVGPLISLTFVLTVDDHLRFGKSRQVGGYLGLRPRQRDSGESQPQLGISKAGDRYLRSLLIQGAQYILGRFGPDTDLRRWGLKLAQRGGKNAKKRAVVAVARKLAVLLHRLWVEDSEYQPLRQSQAVAAR

SEQ ID NO: 448806 - protein, 416 aa, unidentified
MSDRDRVASIDIHSKVLMVVVGSREGEAISPQCKLERQRFGTMASDRRRLLAWLQAQGVKEVVMESTGQYWKPIWWELEPYMRLHLAQAFSNRAPRGRKGDFRDAERLLRRLVAGELILSFVPDPEQRAWRTMTRTKVQLARERVRLYSQVDGLLQEMRIKLANVLSDLFGASGLRILHALAAGETDPKKLAALGDDRLKCTEGQLIDALTGNVQATQQKLLELYLQRLQLIDEQIAKLDGMIAQALKAHQEVVARLAEVPGFGPDSAQQVVAEVGVQASAFPSAANLASWVGACPGKEETAEKNHSSRSAKGNKYMRRLLTEAAQAAVKAKGSHFQALFRRLLPRLGYKQALWAVAHRLCRLVWKILHDGVRYIEQGEYRDPKAKKQRAQALARALRKLGYDVQLTPAQPATANA

SEQ ID NO: 448807 - protein, 410 aa, unidentified
MEILIACCAGLDVHKDSVEVCVRELQAHSEFRQQTRHWGTTTRDLMEMAQWLKAERVTHVAMESTGVYWKPIFNVLESEFEVLLVNARMIKHVPGRKTDVADCQWIAQLLQHGLLKGSFIPPRWQRELRDLTRQRAQLTDERSRTSNRIQKVLEDANLKLGSVASDVVGVSGRLMLEAIVKGQDNPEQLAALAKRRLRTKIPQLEEALYGKLTEHHRWMLRLLLDQLQTTEQFVTRLDERIAELTRPQQPVLEKLDAIPGIDRRIAEVLIAEIGPDMAPFPTDLHLASWAGMCPGNNESAGKRRSSKTTKGSRWLRQAMVQAAWAASRKKDSYFQAHARNLMRRRGRKRGLVAVAHSLLLVIYHILKRGTEYRDLGHDFLDRIREQHLIRFHVKRLEQLGLSVTVAPVAA

SEQ ID NO: 448808 - protein, 406 aa, unidentified
MLFVGDDWAEDHHDVEIQDETGRRLAKARLPEGISGISRLHGLVGKFLPEDGDAAGVKIGIETDRGPWVAALVASGYQVYAINPLQSARAREGQGVSGAKSDAGDAHVLADLVRTHSHQLRTVAGDSEQAGAVKVLTRMHQTLIWDRTRQVLRLRSSLREFFPAALEAYEDLASRDVLELLTKAPEPDSAAALTRAQITAALKRAGRRDREVKTTAIMVALRTQHLTQPPFIAAAYGATVRALAALITTSNEQIAALEGQVEACFGRHPDAEIYLSQPGLGSVLGARVLAEFGDDPTRYAGARARKNYAGTSPITRASGKKKVVLARYVRNNRLTNALHLQAFSALNRSPGARAYYEALRDRDISYNAALRQLGNRLVGILHGCLKTHTCYDEATAWTQLTQQAAA

SEQ ID NO: 448809 - protein, 351 aa, unidentified
MQNSDETLKEVVLGVDTHLDAHVAVVLDRLGRHLGESRIPTTLGGYGQLLRWAQGFGVLRCAGVEGTGSYGAGLARFLRKSKIAVFEVERPKRRHLRREAKSDSRDAEAAARAVLSGEAAGVPKSGDGRVEMIRVLRAARRSAVKAKTQAANQLRGLRVTAPEKLRDRLRGLPTKELVAVAARFRLGCDPIVLDVEAATKLALRSVARRYEALSEEITGLEMQLDRLVREVAPDLISLPAIGTDHAATLLLVAGDNPERLGSEASFASLCGVSPVEASSGKVVRHRLNRGGNRDANRALHMICMVRMGQDQRTREYVARRTREGKSKREILRCLKRYVAREVYRILVPTVA

SEQ ID NO: 448810 - protein, 330 aa, unidentified
MFYLGIDVAKAKLDCSLLLDPASAKRKSKTFTNNKDGFVNLLAWLGKFEIAPVNLHAVMEGTGVYHEQVALALTDAGATVSIVNPAHIKDFGRGIAVRTKTDSMDSLVLARYGAMLQPAAWTPPAQEARVLKALLARRDAIAQDLRRELNRQEKADATDTPELICQSLHESIKFLKNQLNRLQQDIDDHVNRHPNLRRDYELLTSIPGVGQRVGNSLLAIMQCQQFRSAEQLAAYLGLVPVERQSGSSILGKARLSKAGPPRIRAVLFMAAVVATKRNPHVKALYERLLAKGKAKMAALGAAMRKLVHLCFGVLKNQTPYQANYENTACA

SEQ ID NO: 448811 - protein, 430 aa, unidentified
MSSFLTMKEGCAMKVVYPICCGVDVHKTFLVATIITSQGITPYYSKKRFSTFNNSILQFKQWLINNDCFDVCMESTGKYWVPIFNLLEDTIHVTIANPKWVKAVKGNKDDTKDSKWIGDLFRLGLVPGSYIPNKPIRILREYTRYRSKLVACKSSEKNRFQNAFTVCNVALDAVVSDMFGKSASSITDYLVSTDSFDPEYCSSLLQRSLKKKADTVIESIEGYQMTKEQKERIVMVRSHLEFIHQSIATLDEKLEKIVAHYESAITLLCTIPGISRTSAITIISEIGNDMSQFANSKRLCCWAGLTPGNNESAGKKKSVRITRAGVYLKPALVQVAHAAVKSNISPYYRVKYERISKRRGKKRAIIAIARMILTAIYHMFITGELFNPSDLYKVDMPQKMVEKQKEKAIKQAAKLLISLGLIKATDISAA

SEQ ID NO: 448812 - protein, 342 aa, unidentified
MVFLNPNSCMGLEPEPSKEGSWMMAQDGLVVAGIDIAKDKVDVCIRAVSQQQTFPSTTEGRRQLISWLRKHKVTKAVMEASGGYEREWAKALRVKDIEVRIVDPKRVRHFAKSAGRLAKNDVIDADTIAWFAETFGEAPGQAHDAARETLQQMVNARLGLMDMKTMVSNKGEHDVPEAVKKGHARLLKAIAVELANIEAAIAAMVKATPHFAARAEIIESVPGLAGTTSAGLIAMMPELGEASNEAISALLGVAPYDDDSGKRQGGRQIKGGRRQVRNLFYMGCMGAATRHNPPLKAFYERLVAKGKKKKVALVACMRKLIVILNIMIARGEKWDASRYAVS

SEQ ID NO: 448813 - protein, 416 aa, unidentified
MDTMYERCCGLDIHKKTIEACFRSGKKKTHMSFGTTSAELRKLTMWLVENDCQSVAMESTGSYWKPIFNILELSGTDMEIIVVNARHMKNVPGRKTDVNDAEWIAELLQYGLLRPSFIPDREQRELRELSRYRKSLVGERAREINRLQKMLEGGNIKLTSVVSEVTGYSSRRLLDRLLRNDEPMTEDVISGLVHTSLAGKSKELETALDGLLSELQKELLIKVLDHIDDMSRRIADLDDFCRKQMKKYEDALDKLDEIPGIARRTAETILIETGLDMSRFPTAKHFARWAGLAPGNNESAGKRSSGRTTKGNPTLKSTLIQSAKVAARKKNSFFKARYQKIAAKRGANRASVAVAHSMLIAIYHILKSGERFKDLGEDYYNQFNREKKKNYYLKKLTKLGVNLKEATLSISIQTAT

SEQ ID NO: 448814 - protein, 334 aa, unidentified
MKREFIKQNVGIDVSKDDFKVALCVLMSDFHSVVRGSRTFKNTHKGFEELQSWLKNKSDSALPLSFTMEATGVYYEGLAYYLHEQRYTVYVVLPNQAKKYGQSLGLKSKTDKIDAAVLAQMGLKHNLRTWQPVSSHLLGLKQLVREREALVQNRVSAHNRLHAYTHQGKPNEDSIVRTRQYIEFLKQQIKQIEKEINDFINRDKSLKSKIKYLTSIPGVGLLTAVIIVAETNGFETFENIKQLTSYAGLDIRIQQSGKWKGHTKITKQGNSHIRKALYMAAVSKTTNCVFTKQFYERLAKKKGKNMIALIAVMRKLLGLMYSLWKNEQMYKIPA

SEQ ID NO: 448815 - protein, 322 aa, unidentified
MSLPNPLCVGINVSRATLDIATTSEFAQFTTGNDADGFDAIVAELRKHSVALILMEATGGLEAAVACSLQAEGFDVAVVNPGQARDFARAMGYLAKTDRIDARVLAQMAEVINRHPERERFIRALPDAERQVLAAIVVRRRQLITMLVAERNRLHPAHPQSRKSINIIIQALENELARIDEDMNRHIQSHFKELTERLSSIKGVGTMTAAALLAEVPELGNLSRREISVLIGVAPVNRDSGTMRSRRTIFCGQAGARAALYMAALVATRFNPVIKAFYMRLFAAGKAKKVALIACMRKLLTILNAMLRKNEEWNESYHHVAP

SEQ ID NO: 448816 - protein, 421 aa, unidentified
MPNIEIGVDSMVKENFIYVGIDLHKETHTAVMIDCYNQKLGEITFPNRPADFPKLVTKVKKCNTDAKEVVYGLENAYGYGRPLAVWLIDKGYFVKDVNTAISHRQAKHRGAMYRKSDSDDAEAIALATLNMLDKLPDACPNDAYWSLGQLVHRRDNIMKQRTRLVNQLHEQLCIAYPSYKQFFNDISRPTALYFWEHYPSRKYLKGKSVEDLRAELVPVSHNKCSTRTCEKILDAIAGDKVKNNAYQDARDMVTLSIVSDLQHYDKQLAEVDKMLEQMYKMLGCTLTTIPGVNVITAVKILAEIGDIKRLSNANKLAQFAGIAPLHLSSSGKGKDLATKQGNRRLQATIYFLAIQMVHISSKGTPRNPVVRAYYEKRKAEGKTSQQALICISRRLISIIYGMLKSGTEYRMPVVENAGENR

SEQ ID NO: 448817 - protein, 306 aa, unidentified
MLRPDGRHRTKKFANTTKGHDELVSWLKGHKIDHAHICIEATGTYMEPVAECLYDAGYIVSVINPALGKAFAQSEGLRNKTDTVDARMLAEFCRQKRPAAWEAPHPLERALRALVVRHQALTDMHTQELNRTETAREVQRPSIDAHLLWLEAELKRLEKQIKDLTDDDPDMKHRRKLLESIPGIGEKTSAVLLAYIGLKDCFAHARQFAAFAGLTPRRYESGSSVRGTSRLSKAGHVSLRRALYMPAMVATSKTEWGRVFRDRLAANGKKGKVILGAMMRKLAQVAYGVLKSGVPFDAARHNPVAA

SEQ ID NO: 448818 - protein, 342 aa, unidentified
MDHYAGIDVSLEQSSVCIMDAGGKIVREEKVASEPEALIAWLGSLGFGLVRIGLEAGPLSQWLYAAMRGAGLAVELLETRHVRDAFKAMPVKSDRNDARGIAQLMRLGWFRPVHCKSIGAQETRALLTARKLVQSKLRDVENNLRGILRGFGLKVGKTTECRFAQRIGELVAGHPSLEMIAQALLSVHAVLLREFKTFERRARAMARHDAKARLLMSTPAVGPIVALTYVSAIDDPARFKSSKRVGPHFGLTPRRYQSGQTDVTGRISKIGDATVRTALYEAAHIMLIKPVKGCSQLKSWAMRIARRAGMKKAKVALARKLAVILHRMLVTATPFNAAAAAA

SEQ ID NO: 448819 - protein, 339 aa, unidentified
MNDGVFDHYIAVDWSVKNMAIARMTKKSNKITAIDVASDLLELQVYLKRLEGTKILAIEETTTSQWLYTELKDYVNKIMICDPTRNKLLDDGPKTDKIDATKLVCLLRAGLMKEVYHSADKFIYLRRVVSAYDDLIKSGVRLKNQRYSLLRACGLKGDEEKDVKLSSSDEQYVLECLDRQIETYEKEKKGYENEFNKLARKHPEIRHQKSLPGIGAINAVTIISRVVTPYRFADKGHYLSYCGLVKLDRVSGGITYGKKNPRYCRRLKSVYKIGALAAVSGNNPINDYYEYLIKQKGYPAHNARNKVARKLAILSLGIFKSGRKYEPYNNKYRINKENN

SEQ ID NO: 448820 - protein, 427 aa, unidentified
MKYTQNEKIMQITENTLIIGVDIASDVHYARAFDYRGIELDKVIKFNNDIQGFKVFSDWITKIATNNHKQHVMVGMEPTGHYWFTFAQYLEENNIKIVLVNPYHVKTTKELDDNSPTKNDRKDPKTIAMLMKDGRYMEPYIPKGIYSELRNATNTRWQLVKKLNSIRNQVKRWIKIYFPEFNNVFADWEGKAALIILKHFPTPEKITKLDAPEIIATWRKEISRAVGIKRATKLIKAAKASVGIKEGLIAAENELHILLEEYELLMKQHQNTMNLIEKLTMQIPGVKEILKIKGVGLKTLSGFIAEVGDIERFDHPKKVQKLAGLNLKENSSGKHKGQTTITKRGRKRLRSILFSTIMPIVAKNKEFQQLHKYYTTRKENPLKKKQSLIVLCCKLIRVFFVILKTGVKYDPVKMMNDIKRPTLQEVA

SEQ ID NO: 448821 - protein, 411 aa, unidentified
MELLVPRCAGLDVAKDEVVACVRVPDGQGGRRQEVRAYPTFTSGLEALAEWLAAEGVVQVVMEATGQYWKPVWYVLEERGVALMLVNARHVKILPGRKTDVADAAWLAELLEHGLLRGSFVPPAAIRELRDLTRYRKRLIQAHTAEVQRVQKTLEDAGIKLDSVAADVLGVSGRAMLAALVGGERDPEVLAELARGRLRNKLPQLRQALRGRFSDHHALLLRLALGHLEHLEGAIAALDTEVDRVIAPFARARDQLDTITGVGKRAAETIIAEIGVDMTVFPTAGHLASWAGRCPGNNLTGGKRRSGKPTKGNRWLGKVLTECAWAAARSRDTYLSAQYWRLARRIGKKKAAIAVGHSILVIAWHLLANDCDYADLGGDYFVGRDTDRARQRAIAQLQALGYRVTLEPLAA

SEQ ID NO: 448822 - protein, 395 aa, unidentified
MNKSVHYLGLDVHKETIAVSIAPQNSTEVRRYGIIGGTLEAVDKLVKKLAQENVELHLVYEAGPCGFVLCRHLRSRGIHCEVIAPSLIPRKASDRVKTDRRDADQLARLYRAGELTAIHVPDQEDEAIRDLVRARTSGMTDQRQARNRLKGFLLRLGFRYTGKSSWNDAHKRYLSGLVMPQGPQQIAFQEYLHAINDATDRLERLAQAVEDALPGWKWEPVVRALMSLRGVQVLTAMTLVAEVGDFSRFADPRSLMHFFGLTPSEHSSSDKRVQGGITRCGNAHCRRVLTEAAWHYRLKPKVSETMQKRQEGQSQPVRRIAWKAQQRLHKRFHQLSAKKQSVVAATAVARELAGFVWAIACEVKPAAQPAVPEIIRTCRGKVYRLDPEKKFQKRK

SEQ ID NO: 448823 - protein, 343 aa, unidentified
MNKLNAIGVDLAKNVIQVSVLSPSNRELRNSALTRRKFAEFLGRQRPSLVAFEACATAHYWARTAQRHGHQVKIIPAKVVAPFRQGHKTDENDALAVAEAASRPNVKLAPLKTVEQQGMQAIQRSRELLVHERVALSNHIRGLLMEFGIVIPQGFASLYRHVPEVLEDGENELPDLYRPTLSLLYGRLCDLREDLERLNCEIETLVQQNPVCRRLMALEGVGPISAVLLYATLGTGEAFANGRQFSAYLGLTPKQFSSGGKVNLVGISKRVANRRLRAVLIQGARAYVYHMKEPKTTKDRWLWAIVERSGKCKAAVALANKNVRTAWAMLTQNTEYQRYPLAA

SEQ ID NO: 448824 - protein, 409 aa, unidentified
MRYYVGVDWADQTHAVWVVDERGTKITARTVPHTAAGFSEWGRELDEWRAQGIERWAAIERPDGRVVDFLLDHGVVVYPVNPKALDRARDRFRQSGAKSDPFDARVLADFLRTDHAHLQALQPSSDPAQELKLLTEDCQRHIRQQTRLVNQLTATLKAYYPRALEVAELTTALAREFLQAYPTPEALTVLTQRQWQRWARGRRLSEARIGALWAVLQQPQLPVPAHVVRAKARLMQSLVEQLTPVVAAIAQYRTVIDDFFARMPAAQWARTLPIGKRGITAPTLWARLGDAPGRWESFRHLQAQAGAVPVTKRSGKQRVVHFRFACDKSLRHVVDQVAFLSLLSSDWARAYYDRQRARGHSHYQALRALGAKWLKIIFVMWHRHVPYDEQYHLATMTRQQLQQRQKTIA

SEQ ID NO: 448825 - protein, 343 aa, unidentified
MNAITIGLDLAKSVFQVHGEGAKGEIVFQKKLRRAQLEAFFGKQPRCMIGLEACGSAHYWGRALRALGHEVRLIPAAYVKPFVRRNKTDARDAAAICAAMGRADMRYVAIKSVEQQAMRAVERGRELLIKQRTQLSNCLRGLLAEMGIIAAQGRLGFAELRELVRVGDARVPEPLQATLEALGRQIDSLAGDIDGLEARILAAAKENPDMRRLCAIPGVGAITAHAIVAAIGDGKRFDSARDFAAWAGLTPRESSSGGKTTKLGVTRQGERRLRSLLALGASTILRGARANTGRATPWQRAILARRPVKVAVLAQAAKNARIAWAVLTSGEAYRRPAPQAKAA

SEQ ID NO: 448826 - protein, 410 aa, unidentified
MNEIGKRYIGLDVHKHYLIALGVDEDLQVVLPARRVELAHLEAWMKKTLTRQDEVVLEMTTNTWQLYDELVEYVGRVTVVHPPHVALITRSQVMNDKIAASILARLLAKGLLVGIWVPPQEVRELRGLVAQRQKMTRLATQAKNRLHAVIQRHHLKPPAGNPFGKSNNGWWQALSLGKLEKMNLQSDLETLQFAEKQQSRLQEEMTNIVAENEEIGRLLHLSGFGVITAVTVYAAIGAIRRFAEPKHLVGYAGLGARVHDSGMTTRTGRITKAGRRDLRVALVEAAHVAANTHPHWKAELARLQPRLGYNKAIVAIARKLLVIVWHVLARKVADRFAESEKVSQKMLRFAYEVGKENRPGRQTAAGFARDRLDVLGLGQELTSISWGSKKPIPLPPSGLGKKERSDVPNR

SEQ ID NO: 448827 - protein, 415 aa, unidentified
MQFIILGGTNMYNAVGIDVSKGKSTVAVLQPGGIVVKKPYDVSHTASDLKDLTDYIRSLDGETKVVMESTGRYHEPILHTLSGAGLFVSAVNPHLIKNYGNNTLRNNKSDPIDSRKIARYTLDNWTELREYSSMDTTREQLKTLNTQMSFFTNQKVAAKSNLISLLDMTYPGVNDLFDSPTRDDGSEKWVDYAASFWHVDCVRKISLNAFTERYRAFCKRHGYCFQPSKPEELYNASKELVPVFPKEKEYKEMILMCIKQLNVISANVERTRQKMNQLASTLPEYSTVMGMCGVGPTFGPQLIAEIGDVSRFTHREALTAFAGVDPGVNESGKFKSKSNKASKCGSARLRKTLFLIMSCLLQTQPIDDPVYCFLDKKRSEGKPYHVYMTAGSNKFLRIYYGKVKECLRAQAEADN

SEQ ID NO: 448828 - protein, 355 aa, unidentified
MSSEKYIGMDVHQATISVAVRDPQGKLLMESILETKASTILEFLGGLRGTLFVTFEEGTWAAWLYDLLKPHVSEVLVCNPRKIPLLKQGNKSDKIDARKLAERLRLNDLKPVYHGESGVRMLRELARSYLTIVKDLTRVMSRVKAVYRSWAIPCAGRDVYYRRHRSQWLDKIQEPGVRRRAVQLYQQLDMLQQLRQQARRELLAESRKHTITAKLRQIPSLGPIRSALAVALIQTPNRFRTKRQLWTYSGLGLETRDSGEYQFVQGQPRRRKKQVFVRGLNRNYNHDLKGLFKAAAVRASVQAGPFQDFYQRSLSKGIKPTMVRLTLARKIAAVTLTLWKKGENFDAEKLKSQAA

SEQ ID NO: 448829 - protein, 360 aa, unidentified
MLQEAELSGEADSENNLGGSSPTMYYIGLDVHKKTISYCVKDAAGRVHREGRINSTRCELDAWVRTLPQPRMIAMEATIFTGWIYDHLLPHAEQVKVAHPLMLRAIAAAKRKNDRIDAAKIADCLRCDFLPECHMASTAIRDRRRILRYRNLLLRQAVQMKNRVSGLLMETGVSYNKLRLHRMGYFQQLLSTSEEISESIRPLLKLCREHIDRSIRLDTALLRSLERDPLLSERLRRLRTIPGVGPITALTWALEVGDTSRFHSIKQAISYCGLCSAEKSSADKTMRTPISKQRNKHIQQVLVEAARLAPRYSEELALLYERERQRGNSNRATLAVARKMVAFMLAVERRNTDFVPVAAV

SEQ ID NO: 448830 - protein, 352 aa, unidentified
MKRQGKGLDPGEVLFVGVDLHKMRWHVTIRTADLELWSGSIPGKWESLRLQLDQYRGCAIQLVYEAGCFGFWLHDRLMEYGVECMVTPPSLVPQEYGNRVKTDRRDSRKLAHLLAKGLLKRIFVPGKKECYHRQVVRRRRQLIGDRTRVQNRIKAELRFYGINLSEPVGKWTKGYVENLNRLSFEDRFMQESFNRLLEQYTFLTGQIEKQNALVRELSEMEMYRERVGILKSVPGIGTLAAMELLLELQDVSRFRQADQLAAYVGLTPSQYSSAEKVRMGRITKIGKHSVRALLVQAAWQLIRKDQAMREKYERIKIRSGAKRSIVAIARTLLLRLRRIWLDATPYRLALNA

SEQ ID NO: 448831 - protein, 338 aa, unidentified
MKLYGAIDLHSTNNVTVVINEQDQVVYQKRLPNDLSLIAQQLSSYRASLQGIVVESTYNWYWLVDGLMEKGYRLHLANTAAIQQYNGLKYTDDHSDARWLAHLLRLGVLPEGYIYPKQERVVRDLLRKRGQLVHQRTANLLSIQSLISRTTGNSIGAKYIKALDIQHVDGVLPNPDLVLALKANLAVMNSADAQIEILEKTVQDRVKLRPQFRFLKTVPGIGPILALTIMLETGEIERFASVGNYASYCRCVGSRKISNGKRKGSGNTKNGNKYLAWAFVEAANFAIRFSSRIKSFYQKKKSKSHAIVAIKAVAHKLCRACYYIIKDQVVFDITKAFA

SEQ ID NO: 448832 - protein, 341 aa, unidentified
MKQAITIGLDIAKHVFQAHGADAAGHVLFRKRLTRAKLLGFLAAQAPCVVAMEACAGSHYWGREISKLGHTVRLIPPAYVKPFVKRQKNDAADAEAICEAAQRPSMRFVPVKDEEQQANGVVFRARDLLVRQRTQCINALRGHLSEYGYVFRQGITHAATLIAHVEDPNSFLPESARVILRLLVDTFSALEAQIKELDAEINRRSRADPVAQRLMTIPGVGPIAATAITALVPAAGSFRAGRDFAAWLGLTPLQKSTGGKQKLGAISKRGERTIRRLLILGASAVIRQACRRGAPAGSWLAQMLPRKPKMLVTVALANKMARVVWALLVKGGVYRAPAAAA

SEQ ID NO: 448833 - protein, 449 aa, unidentified
MWLATKIQLTAKYFLKEDELVTRISAGVDVSKNRSTVCIIDQDGKFIMRPFLVWHSTEELDFLADTLKRLNGEVRVIMESTSVYQYPIALQLKERGLFISIVNAYEMKQFANIDFRGGKTDKKDSRTIASYGISYWDKLVEWQIPKDTYFNLDLLNRTYMNAKKHRQIILQELQHYIDCAMPGMDKELHSLNLSTKKDFMLDFVEKFWHRDEIVNMTEAEFTEVFTAWAKKKGYRPVEGKAAKIYAIAKSCIPYYPANPTVKTILQCIVDKLSGVNRTLVTIVTQMIEEAKKLPEYQIVREMPGVGDPLAARFFGYAGDIRRFKNSKALVAYAGIDSPPDESGDFSSTHRHITKKGSKVFRDTGYEIMMALRAQKRTWEKVRKNPEVYDYMLKKEAEGKPRKVAKIAALNKFLRIVYARIKELYDNMALAERAKAKTKSKTKAKTKATA

SEQ ID NO: 448834 - protein, 360 aa, unidentified
MTTYYIGADVHSNSTELAIEKRNKIVARYSVPTTIPAISNVLDSLQGKKHLAFEEGPMAGWLYRNLNQKVDKLIVCDPRRNKLISSDGDSDDKIDAGKLALLLRGGYLRAVYHSDNDQRAELKHWVNLYHDRVRDAVRNINKIRARCRMFGLTIPRSALRDPAHRLKWLFKINHPALAKQLKMLWIGYDATAKQARIAKRQLSVLGKNHDIIKLWDRLPGIGLIRATTLFAYLDTPWRFKKKNKLWRYCGVGLQRAASGTDKKGRPKPARLRLPWAVNRTLKNAVLGAAISAINQKDNVFKDYYERMVQDGVITSNARHAVARKMLTVMWGMWKTNSRFDEKLLYLSSELSKPTASVSSR

SEQ ID NO: 448835 - protein, 346 aa, unidentified
MKKIFIGIDFSKEKFDATVIKAEGVEERAERQHEVFDNKVSGFRRLLRWVKSVVDEQDTGLWLFCGENTGGYSRALCNYLYGSGYDMWLENALSIKRSSALQRTKSDKADAGIIAEYAMRNYDQMRLYKPLDKNLERLREVFLYRHNLVKLKASMTVRKGEKKQTQEKSDISRFMAMSSKHLISEFNKKIAECDMRIEKIISEDEELRRNFEIITSVPGVGTQNAVCLMVYTDNFSRFDFDSRKIACYYGVAPFGRQSGTSVNTPPHVSPFANKLIKALLTQAALASIHFCPQMAIYYHRLVEVGKKKPVAVNNVKNKLLHVITAMVRNGEKYNPDYDYHAALEAA

SEQ ID NO: 448836 - protein, 350 aa, unidentified
MIIVGCDYHPGVQQIAFVDTETGELQERRLEHREAAEKFYRDLAAQGMKVRVGMEASGQARWFERLLAELNFELWIGDAAEIRRKRGRKQKTDRQDAQHILRLLLKDDFPQIWVPSGENRDLRQLLWHRHRMVQARTRIMNQLQAVALNEGLRCKKRLWREHGRKQLEAIRLAPWANRRRQDLLELLDRLNPTIAELSQAIEQEAEKFPEARGLMTHPGVGPLTALAFVLIIGRADRFQCGKQIASYLGLVPLEDSSGSRRRLGHITKQGSSMLRFLLVEAAQVTARSIPEWRSKYFHLMMRRGRKIAKVAMARRLAIRLYWMWRKGWDYEQVKKFGSHAGQLGTGDGVQ

SEQ ID NO: 448837 - protein, 465 aa, unidentified
MTIRSVGIDFHQGQHRVRCLDDRAQPCDSFSFQTNPEGLAALEKHIFKDGSNPIVVFEPAGIPWLTVAAYLRSRHPDCRLLKAKMQKVAALRRYLKGPVKSDRIDALTLAKMPFIDPEQMEEVYLPSAEIHALQRLTRQRKRLQSDIAGRKVRIEAIFDGYLPSVRKTFSSPWSIQARAFLRTRFNPFAVVRDGEKALVTFLSKAAPRDKIGRTESHQIFHACQAVANVCKAAEQATTINEEFFVELQDEVARELRLMETEEAESESIESRISEIYHKLHPSNNLCTIPGVGEHTAPIFLATIGDPARFRNQSAFANWTGVVPRSRQSSNMEAKGLRMTKAGPSIIRMALFQSGDIGRRWDPQMAAIYYRQMVFHGKNHKQALGAVMSHLGARVLKVLSEDRPYELKDIDGKSVTRDHARRLILTKYHVSEDIRKERRRRNSKIGKMRETAANRANEAAEAPQPV

SEQ ID NO: 448838 - protein, 391 aa, unidentified
MIYIGIDVAKDKHDCFITNSDSEVLFKAFTIFNNLDGFNDLYQKIESVMDDVTKVKVGLEATGHYSYNLLGYLIDKGLPTYVINPLHTNLYRKSLSLRQTKTDKVDARTIASILMSDVNLKSYSDISYHNEELKSLTRYRFDKVKERAKLKTSVSRLVCILFPELEKLVPTLHMASVYALLSEFPSAKHVATAHLTRLTNLLSKSSKGRYGKDTAITFRDSARASIGSNMPAKSLELKHTIKLIQELDSEIDEIENEIKIIMDEINSPILSIPGINYRMGAMIIAEIGDFNRFDSPDKILAYAGFSPSTYQSGQLDGAYAHMEKRGSRYLRYALYNATKYVCHWDPTFAAYLAKKRAEGKHYNVAISHAVKKLVRVIYHLEKTKQQYIKAA

SEQ ID NO: 448839 - protein, 338 aa, unidentified
MPLYSGIDLHANNSVVVLLNEQDQVIYQRRLANQLPALLEALAPYQADLIGVVVESTYNWYWLVDGLMEAGYRVHLANPAAMQQYSGLKYTNDQSDARWLAHLLRLGVLPEGYIYPKAERAVRDLLRKRAHLVRQRTAQVLSVHNLMVRNTGVRFGAKQIDEFTPSELASLLPNTEQVLAVTSSLTVLHCLGQQIKTLEKAVQKRLKHTPAYTQLQTVDGIGPILAQTIVLETGDMRRFPTVGHYASYCRCVGSTKISNGKRKGQGNIKNGNPYLEWAYMEAAQFAIRFSPTVQRFYQRKQARSHLMIARKAIAHKLARACYYIMRDLVPFDVHKAFG

SEQ ID NO: 448840 - protein, 387 aa, unidentified
MPQVNDLSRSLAAFDPISTLVVVVEMSKTSWLASGVVPGVERQPLKKLEPDATALLRLIERWRIEAVRAGRPIRRIALAYEAGRDGFWLARWLIARGIEAHVIHSASVAVSRERKRAKTDRLDAAMLMRVFLGWLRGERGHCGMVAIPTMEEEDARRPNRERESLVNERSRIVNRMKSALARLGIRGFKPHLRKAPERLAGLRTAEGTGLPANIIEEFRRDMARLALVREQISSIEKTRAERLERAPDTGPHAMVRLLARVIGIGIETADMLVREILSRKLRDRRALARYAGLTGSPDESGLKSREKGLAKAGNARVRRGLIQLAWRFLMFQKDSALARWYRTRTEGPSGARKTTMIVALARKLLIALWRLVTTGEVPDGVELRPAA

SEQ ID NO: 448841 - protein, 321 aa, unidentified
MQTIPVTVYAGVDVAKATLQLHLQGRQAEFSNQPAGLVQLCQQLKTIPHIHVVCEATGGYERLLVQAMHQAQIPVSVTNPAQVRAAAQAQGQRAKTDRIDAALLTDYGQRYQPKPTSPTTASQDQLVALTQWLMQLVQAQALAKTQAEHHEAAFVCGRHAKLMAHYQSQIVAVEKQIRALLAQDAQLQQRVDCLDEIKGVGARTAWLVLAHMPELGQINRQQVAALAGLAPWTRESGTMKGMRCIGGGRPEVRLALYMAALSAARCNSVLKPFYQRLRAKEKPAKVALTAVMRRLLVYMNHQLKALAATQISTKPDHAKIP

SEQ ID NO: 448842 - protein, 407 aa, unidentified
MRRVIGMDIHRTFAEVVFWEDGKLRPAGRVSMSRSGLEGFGRSLGKQDEVVIEATGNAMAVVRMLSPYVARVIVANPLQVKAIAHAHVKTDKIDAGVLASLRAADFLPEVWLPDPDTERLRRLVARRNQVVRHRTRIKNEVHAILHAHLILPCPHADLFGRLGRIWLAQQVMPDDECAAIERHLRELDRLSEDLGVLDTQIAQTGSAGPAVKRLLTITGVNLIVAAGLVAAIGDVRRFTSPQKLVSYVGLNPRVRQSGLGLAQHGRISKRGRSHARAMLVEAAWAAAKAPGPLRAFFLRIRARRGHQIAAVAVARKLAVLCWHLLTKSADYQWARPALVANKLRAMELQAGQPARKGNTRGTAYAYNVKALRDAEIELARHAEQAYERFVSHWQRRGTAKQRTGAAK

SEQ ID NO: 448843 - protein, 408 aa, unidentified
MGRAAEVVAPSSSIRSDGGCPVVQVNDLSRSVTVFDPLSTLVVVVEMSKASWLVSGIIPGVERQPLKKLEPDATALLRLIERWRSEAVRAGRSIKRIALAYEAGRDGFWLARWLIARGIEAHVIHSASVAVSRERKRAKTDRLDAAMLMRVFLGWLRGERGHCGMVAIPTMEEEDARRPSRERESLVNERSRIINRMKSALVRFGIRGFKPHLRRAPERLTSLRTAEGTDLPANIIEELRRDMARLALVREQITSIENTRAERLKRAPDTGPHAMVRLLSRVIGIGIETADMLVREILSRKLRDRRAVARYAGLTGSPDESGLKSREKGLAKTGNARVRRGLIQLAWRFLSFQKNSALARWYRTRTEGPSGARKTTMIVALARKLLIALWRLVTTGEIPEGVELRPAV

SEQ ID NO: 448844 - protein, 369 aa, unidentified
MVDSIRSIDCQVIVGLDIGDKFSTIIVLNPDGEILDEGRVRTTAEALTARFQGLPRARVAIEVGTHSPWVWKLLEECGHEVLVANSRKLRLIYQNDKKSDKVDAEYLARLARFDPKLLSPIQHRGLETQQDIAVVRARDTLVKTRTVLINTIRGSVKSIGERIPSSSAHNFHKKIADSIPQELRPALTPLLETIEEVTTRIHALDNRIEELCETKYPQTKALMSVTGVGPLTALAYALVIGNPARFKKGRDVGPYLGLVPRRQESGDLQPQLRITKSGDKLMRRLLVGSAHYILGPLNQGDSDLRRHGEAIAGRGGKNAKKRAAVAVARKLAVLLHRLWVSGEEYEPLRNSKRRARTKRQTPAQAPAPR

SEQ ID NO: 448845 - protein, 366 aa, unidentified
MDGPRTSFGPGWEGLLTRGKSTMPTIIGLDLAKQVFQVHGVDDVGTMVLRKRLRRSEVTRFLAALSPCLVGIEACGSGHHWARELRRFGHNVRLMPPQYVRPYVKTNKHDAADAEAICEAVQRPSMCFVPIKETDQQAALMLHRTRELLVRQRTMLANAVRAHAAEFGLVVPKGIQRIPELQTLIASADPEVVPELAKSVLLTLASQIEALTVRVLALERQLMEWHRGSAASQRLTTIPGVGPITATAIVATVANAARFNSARQFAAWIGLVPKQHSSGGRERMGGLSKHGDGYLRRLLVHGARAVIRWQRRVNARPLPWLAALLGRRHVNVAAAALANKNARIAWALLTRNEMYAANRQGLAAAQ

SEQ ID NO: 448846 - protein, 381 aa, unidentified
MKRNKKLTPTSRKQTEAQAEVIKLGIDIHKTKYVVIRQIDNQAPQSPQSFSPADFLVWVQRQRLLAKRVVSCYEAGCFGFVLHRKLAEVGVENYVVRPRNWDEYGSSVKTDARDARELCGHLDRYLAGNDRALSVVRVPTEEQEQARSLSRQRETLAKERKRLQNVGTSSGLYYGIEVPATWWKPKVFAKLCIDIPEFLKLILEPFQQVLEMIDKQLRETTAREERKANRKIPVGLGALTTSILDQEFVDYTRFSNRGQVSSFTGLCPGESSSGNKRQQGSINKHGNPRIRHMLLEAVWRMMQFQPDYKPVLHWKTKMANEPFGAAKKKKMAVAIARQFAVDWWRIQTGRIQPEDVGLRVEFPSAYSTRALREGRVSKVYA

SEQ ID NO: 448847 - protein, 345 aa, unidentified
MPVVTVGLDLAKTVFQAHGVDAAGQTVLRRRLGRSELLAFFAKLPPCSIAMEACSSAHHWARELVRLGHDVRLIPPQYVKPYVKRNKTDAADAEAICEAAGRPSMRFVPIKTRDQQAVLVLHRSRSLLVRQRTASINAVRGLVGEFGLITSKGRYRMSELRQRMNAMTPDHLPEIACQAINTLFDHIDVLEEQIAAVERQIVEWHKSNEDSLRLATAPGVGPITASAIVAAVGDGRQFQSARHFAAWLGLTPRIHASGKKERIGRISKGGDRYLRALLIHGARAIVGTLFRKNVTPRPWLLALAARRPTNVTAVAVAHKTARALWAMLTREEKYRKPIAAAPSAA

SEQ ID NO: 448848 - protein, 351 aa, unidentified
MLIIGLDYHPSVQQIAFLDLESGEFGERQLNRNEGEVEEFYRELKQRGISVRVGMEATGSTCWFERFMMELGFELWIGDPLQIRRQRVRKQKTDRRDAHLLLKLMLEDRFPRVLVPSPENRDVRQLLWHGHRLVQMRTRIMNQLQAVALNEGVRRKKGLWGKQGRAQLESFLLAPWATRRRQDLLELLDRLKPIIADLNTAVQEEAERRPEVRRLMTHPGVGPITALAFVLILGTPKRFQCGKQIGSYVGLIPSEASSGGCRRLGHITKQGNTLLRFLLVEAAQATVRCEPEWRRRFMHLALRRDRRIAKVAMARKLAVRMYWMWRKGCDYQQLLKFGSHVGQLETGNGVK

SEQ ID NO: 448849 - protein, 340 aa, unidentified
MTVYAGLDLHATNTYVAMIDQENKVLYKQRHRNELPAILAALDPFKEDIKGVVVESTFNWYWLVDGLMHQGYVVHLANPSAIKQYEGLKQIDDRRSSLWLANLLRLGILPSGYIYPEEERPTRDLLRKRLQLVRHRTSHILSVKNILARNLGLRMPSADVKKLTDAEIKRLFPGKEMQAAVFSSIGLVRHLGDEITKIENMVLKKVKVKKEFAKLMTLPGIGKILALTIMLEVGNIRRFPTVGDYSSYCRCVKSIRTSAGKVVGHGNRKNGNKYLSWAYVEAAQAARRFHETVRSYYEKKMAKTNKIVAVKALGHKLTRASYYVMRDQVDYDPARLFGQG

SEQ ID NO: 448850 - protein, 421 aa, unidentified
MKGLRAKRVKMVKEGTLIATVDIGVASNTGYCTTLDGRSTKSFRFDNTKEGFEKFWYMTIASKNRFGCDEVLVGYESTGPYAEPLVHYLANRAVRIVQVNPMHTKKMKEVNDNSPLKTDDKDPRVIADIIRLGRALSIVVPEGDAASLRRLNNARERHVGEQTALLNQLQQLVFLIFPEFKIVLKNIKGKTAQHILKRYTLPERIGALSKEALGEEMRRRSMGKFAIRDAESLIGLARETVGIREGLAGIFMDIRHILMQLEAEGRFISEIEAEMEAILGRIPYSVRLLSIKGLGIVSVAGLIGEVGDFSKFSTQSEIMKLAGLDLYEISSGKRRGQRRISKRGRSLLRKILFYAAIQMIRKNGIMYDYYARLTSRGMERMRALIAVSRKLLRIIHAIVRDNRDYVGQYQAPERRVIKMAA

SEQ ID NO: 448851 - protein, 360 aa, unidentified
MSFNGTSVGLDVHALSVVAHAVDEKTGQVERARLCPDHGEILGWLRQLRGPVRVAYEAGPTGFGLARALAEAQIECTVAAPSKLIRPSGDRVKTDARDAAHLTRLLRLGEVSAVTVPEREVEAARDLVRAREDARADLMRVRHRLSKLLLRQGRVYSGGHAWNGVHEIWLRRQCFDDPHTAAAFDHHFDAVLSATAARDRLDEQILEVAALPRYADMVNRLGCLRGISALTGLALAVEIGDWDRFTGSSIGAYVGLVPSEYSSGTSRVQGSITKAGNAHVRRLLIEAAWHHRAAYRNPGPTMRARWAKVTPALKARGHAGNRRLHQQWCRFNERKKPHVVANVAIARELAGWCWSLATLG

SEQ ID NO: 448852 - protein, 377 aa, unidentified
MWCGVSALNPKKSKMNATAALPVVGVDLAKSVFQLAVADGSWRVIESHRLTRSQFERWFANRAVGLVVMEACGSAHHWARWLNGLGVEVRLLPAAYVRAYVKRNKTDAADACALLEAARCAEIVPVRVKSIEQQALQGLHRTRSLWMGTRTSRINALRGFCREFGIVIAQGSRLGVEQISRALADPHAAVPMLIRGTMTLLVEEIRLPEVRIAQLERELSTLARQSPACTTLLSIPGVGLLTATAMVAATSGEVSHYRDARHFASWFGLTPKEHSSGSTRHLGRISKRGDRYLRMLLTHGARSVLRAASVTVQAGKSVDGLRQWALGVQRRSNHNKATCALANKLARICYATLRDHEPYGSVRLNQKLARTAVALPA

SEQ ID NO: 448853 - protein, 341 aa, unidentified
MDKIASQPVAWCGIDVSAQQLVVALQRGDRAVQHRTFPNRSVGHQALIRWLARSTGTVRVCLEATGLYSLDLALSLHEVSSIELAVLNPKAVCRFAETLRRSKTDPADALVLLDYARRMPWQSWQPPSATALMLRSITRRFAALTKQHTMETNRVHAAEASKTVPRCVRQDLKQSLRQIECRLKRLQSEARELVRRDAKLEQRYTLLRSIPGVGESSALQIMGELEVLPPDLDVRQWVAHSGLDPMHHTSGSSVHRAARISRAGNRHLRRVLYMPALVGVRFDPHLRTFYEHLLERHKTKLQAIIAAARKILHAIYGMFRSGSRYDGSKLFPLLQPATQAA

SEQ ID NO: 448854 - protein, 427 aa, unidentified
MAKGKIDPEPEFAAFVGIDWADRKHVWCLQAADSAKRETGELEHKVEAVEAWVAELCQRFGHRPIAVAVEQVKGALVFLLNKYECLHIFPVPSTMTAKMREALYPSGAKDDPRDADLLLDILWQHRDKLRRLSPDNEATRRVQNLVEERRKLTAEKTAQGNRLTSYLKIYFPQMVEWFEKLDMPLVCDLLERWPTLEELQKVSTEELRTFFRQHHCHRGLRERRILAISGAIPAKGDRAVIEAKSAVVKVIVQLIRSLLQGIAELDGKIEEVAAEHPDFFIFESLPGAGAVMAPRLLAAFGSQRDRYSCADELQTYSGIAPVTERSGKRKWVHFRWACPKFLRQSFHEWAGHSIVQSAWARAYYQQQRDRGSDHHAAVRALAFKWIRIVFRCWKDRVAYDESKYLAALAKRGSPLDKLVVVGIGTSL

SEQ ID NO: 448855 - protein, 343 aa, unidentified
MQTITTIGLDIAKSVFQVHGVDAGGQVVVRRQLKRRYVLMFFQKLSPCLVGIEACASAHHWSRELQALGHTVRLMPPAYVKPYVKRHKNDATDAEAICEAVTRANMRFVPTKTPEQQSGLVLHRTRHMFIRQQTSVINAIRAHLAEYGIVAPVGRHGVEELLTVVADVNDRRVPEIARACLSALGAQLRRMKEQILEFDRLIRAWHRSNEMSMRLEEAPGVGPVLATALVAAVADPKSFRSGRNFSAWIGMVPKQHSTGGKNRLGNISKQGDRYLRGLFVAGALSVIRYAKIHGTKHRPWLTALLARRPTKVAAIALANKIARMVWAMMARGERYKEPVALAR

SEQ ID NO: 448856 - protein, 338 aa, unidentified
MKVKFQHFAGIDVSKSKIDVCIIVNRESSEILHNCFDQSKKGFNGLKKWLEQVTDKQTEKVLICVENTGLYDDALLYYLNASALSVSLENATNIKRSVRDNRAKNDKVDARNIALYALKHHDELSLWEKPREQIAYLQQLLSERSRLVNALKMLKQAQQEQRVFSWSRVVRSKPYQSGIKGLQKDLEQIEMDIWQLVKNDKDLLQMFKLIISIPSVGKITAYHFICYTNEFKQVKSGKQLASYCGVVPFERSSGSSLKKKPRLSHQANKVLKTLLHLCAVTAIKMKGAFAAYYRRKIEEGKNGLIAINGIRNKLALTIAAVIRNNEPYNENYLSTLIR

SEQ ID NO: 448857 - protein, 429 aa, unidentified
MKIIYPRVCGIDVHKKFIVAVICISESVEPIYLKKRFSTFHNDLIRFREWLIQNDCQNVCMESTGKYYIPVYNVLESHISNIVVANPKWVCAVKGEKDDDKDAKWIADLFKFGIVRSSFIPQKDFRILRELTRYKYKLVNMRSSEKNRYQNALTSGNCKLDMVFTDVFGKSASNIIDLILSDNPYTDEDILSKVHKNCKASPDMILNSINGTDLTPVQKSRIELVNDHIKQLSSNIQRLDKLIDLMIEPYEDYISFLCQIPGVSRNSAIIILSEIGVDMNQFTSTRRLTSWAGLTPSSNQSAGKKKSVRISRAGVYLKPCLVEVAHAAVKDKNHPYYANKFNKISKRRGKKRAYIAIARKILVAAYHMLLTGEIWNPADLSEVETPVEQRIKYVKNNLKSDIKQLLDIGLTVEELTLMIQQNANIIATQ

SEQ ID NO: 448858 - protein, 349 aa, unidentified
MRKLYVGIDLGCKTCAGAVRDSKGKVLETCGFPTSAENLIDFVSNLKGEVRVLIEECELAGWVYRTLLPHVHSVEVSDPRHNAWIAKGKRKSDPVDAAKLSELLRGGFYRAVHHPEEEEMATFKIAVQHYDQMTKTTTRLQNQIRARFRQQGMVFEGKGLYGASGRQKAIARVKSEAIAEILLQDFRLLDDAQKERAMARALVTKLSRNFPVIKRLERIPGVATISASRFVAYVQNPHRFNTKGLVSFSRLAVVKRESGESLIGREHLSKEGNGSMKALSRTVFNGVIRTRRMNGIKDYYLKSLRRTKNETHARLNTQRKILAVMNAVWRDETEYSDHLVTGDGAKRPL

SEQ ID NO: 448859 - protein, 348 aa, unidentified
MDIVKQAVGIDVSQKELVVCLGRMDSDFTPELYAHKVFNNTEHGFKTLLLWVKKHTLESVKLRFVMEATGVYHESFAYFLDEKGYELSVVLPNKISNYIRSFNLKSKNDKSDSRAIAMFGLKRKLDSWNRPKPIYREMKQLTRERDQVLHERTMVKNQLHAEKVEAHPNKRSIERLNERIKLLNSQEKEIKTEISDLIKTDNLILEIVGIICTIPGIGLVTAAIILAETNGFELIKNKRQLVSYAGLDVRERQSGTSINGKARITKRGNKHLRKALYFPAWTAIRHDERFKLTFSRHVSKHGIKMKAGVVIQRKLLELVFALYKTRKPYDKEYLNEYEEGMENKVAVV

SEQ ID NO: 448860 - protein, 349 aa, unidentified
MKSITIGMDLGDKKHSACVLGKKGIAIDNCILDNTAESLRSFFSNYKGATVAIEAGTHSPWISRLLSSIGCNVLVGNPRKLRVIWDSDGKTDVRDAEMLARIARFDPALLYPINHRGRQAQIDLEKLQARDILVKNRSSLINHVRGSIKGLGARLPSCSAESFHRKCGECLPDELCDTLKPVVAIIEQISSQIKEFDRQIEQISKERYPETELLRAIQGVGPVTSLAFVLTLEDPSRFANSRQVGNFLGLTPRRDQSGEIDKQLRITKAGNPYLRRLLVGSAQYILGRFGKDCNLRRFGLRLAARGGKNAKRRAVVAVARKLAVLLHRLWKNGEVYDPLYKPQRLAKAA

SEQ ID NO: 448861 - protein, 364 aa, unidentified
MTTIARSAGERRVLGGVDTHKDVHVAAVIDDVGRILDTAAFASTRDGYRRLLAWLGGFGELVAVGVEGCGSWGAGLSRYLAARGVSVVEVNRPNRQNRRRRGKSDTVDAEAAARAVLAGDATVTPKAGTGPVEALRQLRVARAGAMKARTAAANQLHSLIDTAPERVRAQLRDLTFKKKIAFAARWRPTRTATPDGASRYALASVARRWQALAAEIGELGRRIKTILDDVAAPLVAVHGVGYDTAGQLLVTAGDNPDRLRHERSYAALCGSSPVQASSGKPDRHRLNRGGDRHANSALWRIVIVRMTSHQPTKDYIARRTAEGLSKQEIIRCLKRYVARELFPHVQKVIAPTILEPPMNTQRAA

SEQ ID NO: 448862 - protein, 344 aa, unidentified
MVIIGIDAHKRSHTLVVCDEQGRRLAERTTGTSSAEHLALLAWTARFGEVGVWAVEDCRHLSRRLERDLLGAGARIVRVPPKLMAHARDGARTYGKSDAIDALAVARAALREPSLPLARLEGEERELRLLVDHREDLVAERTRVINRLRWHLHELDPDLEARQRSLHHLRTLERLAAALAGLAGLVARLARTLTARCRELTLEIAELGREIAARVETLAPSLLALCGCGALTAAKILGETAGIERFRSADAYARHNGTAPLPVSSASRAHHRLSRTGNRQLNAALYRIALTQAQWHPQAKALLARRRAQGDSKREALRVLKRRLSDVVYRALMADAQARMPLAA

SEQ ID NO: 448863 - protein, 401 aa, unidentified
MGAYAGVDWAAEEHSLLIEDERGLVLLEDTFAHTEQGVSDLCRLLVRRRVVRVALERPDGLLVERLLDAGLTVLALHPNQVKAARARFRAHGGKSDRFDAFVLAELCRTDAHRFRALVPDTDETKAIRALTRAREDLVETRVALANQLRAELERFWPGGKQIFADIDSQVALAFLERYPSPVDATRLGEKRLAAFLARHGYSGRRTPRELLERLRAAPTGRAGDAELEARRQIVLALVAALRPLVERISQLTADIAHAVRAHRDGEIFRSLFRDPKSVVTAARLLAEIGDCRDRYPTSETLAADGGMSAVAVESGKQAHAAFRYACDKRLRDALATLSDSTRHHNPWARRLYRDARARGHQRAIRTVGRAWTRVLWRMWHDRQPYDPTRHRALQRQIAIEG

SEQ ID NO: 448864 - protein, 409 aa, unidentified
MERQVERCGGLDVHKETVAACVRVGGRTGQAEQHVQTFGTTVGELLVLRDWLAAHGVTHVAMESTGVYWKPVFYTLESDFTCLLVNAAHIKQVPGRKTDVKDCVWIAQLLEHGLLRGSFVPPAPIRDLRDLTRYRKAVIQDRTRVANRLHKALEEAGIKLAAVASDILGVSGRAMLAALVQGTTDPAVLADLARGRLRGKLPALRQALANRFRPHHAFVLGQLLTHLDYLDEAIATLSTEIERVMAPFAEPLRRLDTIPGINQRTAEVILAEIGPDMRVFPSARHLASWAALCPGHHESGGKHKSGKTRKGNRWLRTALIEAAAGASRAKHSALQARFRRVLRHRGPKKAVVAVAHALLRMVYHVLADGTVYREAGADYYDRHHSQRVTRRALQALERQGYRVTLEPAA

SEQ ID NO: 448865 - protein, 345 aa, unidentified
MPIVGGLDIHRKQLTFDYLDTATGEVKRGQIAPADRAHLRAWLARFAGRDDVAFALEGCTGWRYVAEELAAAGVTAHVAEPAGTAFARGRKRHAKTGKTGSRHLRELLAEGRLPECWIPPSRILECRALLELYHDLRAEHTAWVQRIHAVFFRQGAPALGEAALRTGRDLQALGAAAAAHLSPAGQLQVAAALAVLASLEAQLAVVRHQLLAAARHLTGARVLAGQLYGVGPATALALTCWLGGAGRFSSSRKAVRFAGLDITVCSSDSKRSAGRLSRQGPPVLRWAVYEAGKTHARASAPDHRCYAQVKDRQDSKRAALSEARKILRQACHILTGLGDDALTAA

SEQ ID NO: 448866 - protein, 348 aa, unidentified
MLADQVDYVVGVDTHRDEHVLAVVAAPTGAVVAQRSVAATSRGYAQAFQFVAEHAPAARVWAVEGAGHYGAGLARHLGDRGEAVLEAARGSRGERRLQGKVDKLDAIRAARTVLSTETLALPREGQRREAPRLLMVARRSAVDVRREALVQLRSVIVTAPDELREELRGLPVGRLLERCSRFRRSTSRTPDAQATAIVLRTLARRVRAATEEAAELQTEIIAHVRALAPRLLDEPGVDPIVAAQVIVSWPHEGRVRSEAAFARLAGVAPIPASSGLTTRYRLSRGGDRQLNRALHPVILHRCLHDPAARDYIARRVAEGKTRRDATRLLKHYLARHLYRVLNQEPTMT

SEQ ID NO: 448867 - protein, 423 aa, unidentified
MDRVVERAGALDVHKEQVTATVRTPGERGGRREQTREFKTTVRGLLGLHDWLTTHGVTVVAMEATGVYWRPVWHVLEGDFELLLCNAAHVKNVPGRKTDVSDSQWLCKLLEFGLLKASFVPPKAVRELRELTRRRKTLVRDRAREANRLHKTLEDTGIKLDCVASDILGVSGRLMLDALLAGQRDPAALAQLAKGRLRVKGPALVEAFEGTRFSAQHALLIGGILRHIDFLDTEITALGDAIEAHFQADREREDSERPFELAVQIACSLDGIQQRTAQMLIGEFGTDMTRFPTDKHFASWAAQCPGNHQSAGKRRSGRTRKGPKWLDGALHDAAMGAIRVKDGHFARKYRRIRARSGHKVAIGAVKHAILIALYHMLKNGEMYRLPTPNPAAELKRRERTTKRLLSQLEGLGHTVTLQGATAA

SEQ ID NO: 448868 - protein, 348 aa, unidentified
MTMVCGLDLHRRQITFDAVHVESGEAWTGRVWQPDRERFRRWLHDDVTERCGGGPVAIAVEGCTGWRYVVEEVVAAGFEAHLAEPADTQAARGRKRRAKTDRSDCRLLRELLQDGRLPASWIAPTIVLEWRERARLYKTLVDQRSTWVQRIHAELFQHGVALPETSIRWARTRELLEADGLEISPAGRQRVLTAYRMIDALTIESRPLKADLQRFGRHQPGCRALVDSQYGIGGLLAVVMWSELGDCQRFARSEQIVRHSGLDVTVDQSDRRRAGGFISRQGPQTLRWALYEAAKNASHQRSPDHEYYADVKDHLNGKLATISMARKLARRCFHVLRAVDPDKVYATP

SEQ ID NO: 448869 - protein, 419 aa, unidentified
MSFKIIKNNCCGLDVHKTWIFACIGITDSNNRTEYKQARFSSFTKGLNELCDWLAKYNCKDVCMESTGKYWIPVFNILEQRSLWVTLSHPKYTKPMKGNKTDRKDAKWICDLYMCGMVKPSFIPPADIRELRDLVRYRFKLTCMITGEKNRVQNCLTVSNLKLDDVFSDVFGKSSRSITEQILQHPGETFDVAPFVDSRCKTPIVEIQAAIDGAISKEQAVKLRQCLDHIDELNKHTSEVEQEILRLSDKYESALNLIRTVPGFDKKPLTAIQVLSEIGGDMSVFPTAKHLVSWAGCCPRNDQSNQKIKSTRISRAGSYFKPVLVQVANALIKSKKHSEFTNRYKRIKARRGHKKAIIAICRMILTAIWHILSDLKPYTPECFLESRPVKEEKVLSTSQALNLLKQRGYIIKDEPLAVF

SEQ ID NO: 448870 - protein, 413 aa, unidentified
MSPGLLLSEIPGDRLVVAIDPGKVSNRVWLTSGERGLIGQPVSLPVLRDGVDELERLIASSGIDGAPVIGIEATGALHRAWAAEVERRWPGSLRLFAPSQTQAARAQLGSRRFKTDDRDCAALVWLLRQGAGRPSAPTAVEALLGAVRHRRQLVDARRVAQQRLHDQLNALCPGLSAPVGHGRALKLEDASGGAVLACAAAFAGRAPSPRSLLARAPGRLSEANAHFWAARWKRLLAPPPDAELRAQRLGRDVERWLGLREDIAALEAQIGELLAGTDGQILTTLPGVAAVRAAAFAAHTLPIERWPTAEQLYSATGLAPASYQSASVTRRGRISRQGLPEHRDALMAIAWGLAQHSPAFAERDREYRARGFRPIQARVALARHACRLAWRLLHSQQPYDDRRYDRARHRRGR

SEQ ID NO: 448871 - protein, 331 aa, unidentified
MQAGEGIIGIDISKDSFDLVLRGTGREQHRVFTNDPKGFKSLVAWVEKQPERLVHICMEATGSYWEGVAEYLYQAGYTVSVVNPYQVKRYADFLLNRNKTDKADASLIAEFCDKERERLRVWEPHPPEIKALRSMERRLDQLRDMKQQEQNRLKSGVSDPVVIESLQENLTHLEDQIKALMKKIKEHVDQYPELREKQNLLTSIPGIGMLTAIKLIAEIGEIEDFASASQLAAYAGLAPKQFKSGSSVHKQTRISKQGRIELRRCLYMPAVVASEHNPIVMDLKRRMLASGHANMEVIVAAMKKLLHLAYGVLKSGKPFDPDYGKQFCFNP

SEQ ID NO: 448872 - protein, 361 aa, unidentified
MSRVIIGMDPHKRSATIEVMTSNETVIGGGRYGTDTAGYRAMLAEVRRWLERTWAVEGCQGIGRHIASRLLAAGEQVVDVPPRLSARTRVFATGQGRKTDATDAHSVALAATRMPGLRQVTDDQQLAVLRILADRRRSLGEDHTRMVSQLHQLLPGLIPGGAKKDLSAAQAKALLARVRPRDAADKARRRVAAELTSDLERICQRKKDANKELTALPAATGTTLTGLHGIGPSGAARLQVEVSDITRFPSKAHFASWDGTAPIDASSGDQVRHRLSRAGNRQVNRVLHIMAVVQLRNPTEGRVCYDRKVAAGKTPCEAMRALKRRLSDIVYHQMITDARAKVTGPGDSRSAGATRVRACRS

SEQ ID NO: 448873 - protein, 419 aa, unidentified
MSFKIIKNNCCGLDVHKTWIFACIGITDSNKRTVYKQARFSSFTKGLQELCHWLAKYDCTDVCMESTGKYWIPVFNILEKNNIWVTLSHPKYTKPQKGNKTDRKDAKWICDLYMCGMVKPSFIPPADIRELRDLVRYRFKLTCMITGEKNRAHNCLTVSNLKLDDVFSDIFGRSSRSITEQILQHPGETFDVAPFVHGRCKTPIEEIQAAVDGAVSKEQAVKLRQCLNHIDELEMHKSEIEREIFRLSDKYEDILTLIRTVPGFDKNPMTAIQVLSEIGGDMSVFPTAKNLVSWAGCCPHNDQSNHKIKSTRISRAGSYFKPVLVQVANALIKSKKHPEFSTRYRRIKARRGHKKAIIAICRMILTAIWHILTDLKPYTAKGFLEPRPVSKEKVLTASQALNLLKQRGYVIKDEPIFIS

SEQ ID NO: 448874 - protein, 368 aa, unidentified
MKKYITFVGLDVHKNSIVVALADAGRNAEVRQYGTIGGGLDDLDRLVKKLSSPNKELHFVYEAGPCGYDIFRSLTDKGFDCAVVSPAHIPKSPADRVKTDRRDAMTLARLHRAGELTYVFVPRADDEAMRDLTRAREDAKKAQRVAQQQLGGMLLRLGFRYPKDNWTKQHFLWLADQKMPTPVQQVVFQEYINTIHETIARVERLTQQIQLLAPNWRMAPIVDALQALRGVSIIVAVTTIAELGDLTRFDHPKKLMAYLGLIPSEHSSGQKRRQGSITKTGNGHARSVLVEAAHSYRLPARVSRVLLKRQEGLSPEVTELAWKCQVRLCARFRRLVAKGKNHNTVVTAIARELAAFMWAIANQTPIAV

SEQ ID NO: 448875 - protein, 389 aa, unidentified
MMIYVGIDIAKLNHFASAISSDGEILIEPFRFSNDADGFQLLISKLDSFDKDSLIIGLESTAHYGDNLVRYLVASFYKVCVLNPIKTSSMRKNNIRKTKTDKVDTYIICKTLMMQDHLRFVSFYDLDLMDLKALGRFRQKTMKQRTRLKIQLTSYLDEVFPELQYFFKSGLHQKSVYALLKEAPTPETIASMHMTHLAHLLKSTSHGHFDKETAQQLRVLAKKSVGASDSALSIQVTHTISQIELLDSQLERVEAEMTEIMKFNDSVIMTIPGIGYINGGMILGEIGDIHRFSNSNKLLAYAGLDPSVYQSGNFHATQTRMSKRGSKVLRYALINAAHNVVKNNSTFKAYYDAKMAEGRTHYNALGHCAGKLVRVIWKMMTDEVEFNLK

SEQ ID NO: 448876 - protein, 340 aa, unidentified
MKQYIRIGVDLAKNCFQIHALESEGGRVTTRKLSRSAMRVFFAGIKPCLVGMEACGSAHYWARELRAMGHDARLMPPAYVKPYVQRGKNDAVDASACCEAVSRPTMRFVPIKSEEQQAMLMAHKTRDLLIKQRTMGVNALRGHLAEFGIIAAKGIGRVEDLVERAADASLPEMARAALGVLVGQLEALDAAIADVTRRIANVHVRDPLSRLVAGVPGIGALAASAITASVPDPRVFRSGRDFAAWLGVTPKQHSTGGKEKLGAITKQGNRSLRRLLVLGAISVLRAAAKRKGVLRDWLVALRARKPGKVAAVALANKLARIIWAVMSTGEAFRTQTFGRA

SEQ ID NO: 448877 - protein, 347 aa, unidentified
MNFYHSTHRHYCGIDLHARSLYVCILDQQGEVLLHKEIKARPEPLLALLEPFRDDLVIGVECMHCWYWISDLCEEHGIHFILGHALYMKAIHGGKSKNDRIDSFKIAMLMRGGNFPLAYVYPKKMRATRDLLRRRTRIVQHGAMLKAHVVNTVSQYNLPPSKANLNNPGGRSQLASAFSDPDVQRNVDLDLTIVDSYQHELKKLEWHLEQQAKQHDPASLTVLKTIPGVGRILALTILYEVGDIQRFESVQKFASYARLVKCKAESAGKVYGTQGNKIGNAHLKWAFSEAAVLFIRNSDKAKRYVEKLQKRMNKPKALSALAHKLGRAAYFMLKDKRVFDEQRFLKG

SEQ ID NO: 448878 - protein, 346 aa, unidentified
MYQDNLIAIDLSKNSFQGCLLDKSHRERFNRQFTQRKLTDWLSRQQPLTVVMEACGSAHHWARLVERMGHRPLLVPTRTVARYREGHKTDATDALATGVAARQPKTRFVAPKTIEQQGMQGIERTRKHFSDHLTATSNMIRGLLYEFGLTIPKGISAFKRKVVEVLEDAENDLPMPLRMQLIESWEYYLELEVRLKTAVRARDQIITQHEICQQLLQLQGVGPVNSLGLYLTLGDRGSSFANGREASACIGVTPKQYSTGGEVTMLGISKECANKRLRSSLIQGARAVINPLKKRDPKNGLEAWLKALIERRGEGRAAVALANKTVRLAWAMLHHGEDFKLHPNMA

SEQ ID NO: 448879 - protein, 407 aa, unidentified
MARWYIGIDWSDQEHAVWVGNEAGECMEQRVVEEAAEELSDFGRWLHERSNADIELWAAIEKPHGRIVEFLLDHNVVVYPVNPKSLDRARDRFRTSGSKSDRFDARVLAEFLRTDHGHLRPLRPSSPEAQELKLLTRDHRRLVKHQTRLVNQLVATLKEFYPLALEVFPDVSAARALDFLEAYPSPGATQQMDAADGEGFAREHRLGEAQRQKLEEALRQPRPRVPAHVERAKGRLVRALVAQLRVVVREVEEYTREVERFFVAMPLAEVACSLPGGKSGTTVPALWAELGDALDRWETFQHLQAEAGAIPVTQQSGKHEAVLFRFACNKHLRHAVTQLAFISLRLSEWARAYYRQQRARGHKHWHALRALAAKWLKIIFIIWRDRVMYDEERHLATIARQMFRQIA

SEQ ID NO: 448880 - protein, 322 aa, unidentified
MSTTGGRATYYVGIDVSKATLDVAILPTEEHFVVANDEGGIDELLGKLAEQLAGILVVLEASGGFERPAVATLAASGVALFVLNPRQARDFAKATGKLAKTDRVDAFVLARFAEAIRPTPRAIPDEQAREFQEILARRRQIVRMMTAEKNRFGASASEAVRGGIKAHVEWLEKELSRTDRDLEEIIEGSPTLKGNEALLRSVPGVGPVLCRTLLAELPELGSLSPRELSALVGVAPLNRDSGTLRGRRTVWGGRGKVREVLYMGALIASRFNPSIKEFYERLVKVGKPKKVALVACMRKLLVILNAVLRDRTPWRCSHALNL

SEQ ID NO: 448881 - protein, 315 aa, unidentified
MTTTIGVGIDVSKDKLDVALHTGEVLGTIAQDAEAMEQLATTLKSIAPHRVVVEATGGYERPLLAVLHAEGLPVVLIEPARARYFARSRGRRAKTDAIDAHLLAVMAAGEVDDEELWTPKEPALAELTEMVIRRQQIVQQIGDEQRRQKQLPEGHAKRSVRRTLDFLSGEKKRLEKDINEQIKGHEDLKQTSAVLESVKGVGRTTAAVMMSLMPELGDLDRRSVAALFGVAPYTCESGQFRGAQRVQGGRRRPRQLLYMATVVAIRHNPVIRAHYAHLLAKGKKKKVAIVACMRKMAIHLNSLMRQHRQRLEQAA

SEQ ID NO: 448882 - protein, 341 aa, unidentified
MDKELYFGVDVSKKTLDLAYYDGETIDWKNAHIKVSNDDAGFKKIGSWVAKVGKDFDTFLFCMEYTGLYNQNFRLWLESKEYIYGMVEPRKMHRFEPDLDDDQRSLDRIKTDELDAFRIAIYCEQNHKKILRNPSKLPSPVYFKLKRLLAERKQNTKQSTLYKQQLHDICAYDTDLSVERKKLLLKNMQENQKAIDKEIDSYMNEDTSIRKNYNLLTSIPGIGRIIALETIVLTENFTAINNPRKYACYIGIAPFKKESGTSVRKKTGVSKKGFSEAKADLSIAVLSAIRNNPSIRDYWIRKRKEKCGGIVLNAIKFKLVLRMFAVIKRGTPYVETDAYKN

SEQ ID NO: 448883 - protein, 338 aa, unidentified
MAIVFVGIDLAKNVFAVHGVDEHGKPALVRPAVARAKLHELIVSLPPCTVAMEACSGGHHWARLFASHGHTVRLIAPKFVAPYRMSGVRGKNDAADAAAICEAAQRPSMRFVPVKSIDQQARLMVHRARQGYVEARTACINRLRGLLSELGIVLPLKAATVRREAGQVLEDLPGWANTVVGDLLCELHRLDERIAQYDTHIQTIAREDERARLLMRLSGVGPTTATAVVAMIGNGHEFKCGRQFAAWLGLTPGQYSSGGKTRLGRITKAGDAYLRTMLILGARAVLAAAKNKADAISRWAITLEARRGYWKAVVAIAAKNARLCWAMLSRGENFKLPA

SEQ ID NO: 448884 - protein, 385 aa, unidentified
MIIIGVDPHKRMHMASAIDPATNRQVTALQIEASLAGYRRLLKWAERFGERSWAVENAHGLGRHLAQWLLVRGEAVEDVPSTATARVRELSRGRRKNDAIDAAAAASVAALHGDANPVLAEDITTVLALLDERRTNVTTQRTRLVNQLHAVFRDLVPGGAPKDLSAAAASRLLAGIRPVGSVEAARKQLARDLVAEIRDADQRVKALTAQIAETVAATGSHVTEVDGVGPVVSGRLLARTRQMSRFPTAAAFASYAGVAPVEVSSADRIRHRLPRGGDRQLSHALHIVAVNQIRMPGSAGRAYYDTKIAAGKTEKEARRCLKRRLANHIWRLMIRDEQPAAAGPGGQPGATLQSSAAGSTPTTSSSDKSHPEPANPDSTTDHTAA

SEQ ID NO: 448885 - protein, 421 aa, unidentified
MVQGDRPMGKSINSVNGRKQDSTEKSRKGINSAAAKQDKVETGRKQRLAVLCLQQKLEAAKKAPKPQKAGEATVAYYVGIDLGDKKSYYCFLNADGNMVEGSLTTTPTDFGLHFKTIPRSRIAIEVGTHSPWVSSLLEGIGHEVYVANPRKTEGGKRKNRRKNDRLDAEILARQVKSDPKLLYPIRHRGEKARHALVLLRARNAVVNARTKLICGARGLVKSSGHRLPSCSADSFHKMNRTHVPEELRGMLEPLFEQIGTLTTHVKKYDKEVERMCKEAYPETALLAQPKGVGKVTSLAYLLTIEDPRRFAKSREVGPYIGLVPKQYDSGDSRPQMRITKTGDRMLRQLLVQSAHYIIGPFGEDSDLRRHGLKIAARGGKNAKKRATVAVARKLAVLLHRLWVTAEEYEPLRNSAPKEKVA

SEQ ID NO: 448886 - protein, 418 aa, unidentified
MDSQASEFSAHIGIDWADKKHDYCIQGANQSNREFGILNHSPEEIDEWVQSLHQRFVGQLAISIELTKGPIIYALQKYNFITLFPVNPSLLAKYREAFTPSRAKDDPTDAELALDLMINYPKKIKPLLMQGEQIRKLMYLVEQRRRLVEDRRRFSNRLIYALKQYFPQLLELFSHRDSELFCQFINRWPSLQKLKRARVDTIRSFFKKTSSRSVPLIEKRITAIKEAQYLTEDIAIIESHQLLATSVTAQIMITTKGIKQFDDEINKLFHSLPDAELFESLPSAGICMAPRLLVAFGENRDRFDNASQVQMYAGVAPVTVRSGQKQWVHWRWQCSKFLRQTFIEWTSKTVYSSYWAGLYYAQQRQKGNSHQSSIRALAFKWIRILFRCWKTRKPYSEAKYLKTLRDRKSPLLLLEKVG

SEQ ID NO: 448887 - protein, 328 aa, unidentified
MNAVGIDVSKGKSTVTIRKPGDVVLMSPCDIPHTQSAINDLIKQIKSLEGETKVCMEHTGRYYEPVATWLSDAGIFVSAVNPILIRDFGDDSLRTPKTDKADSKKIARYTLDRWAKLKQYGIMDKTRNQLKTMNRQFGFYMAQKTAMKNNLIALIDQTYPGANDFFDSPARNDGSQKWVDFIHTYWHVDCVRSKSLNAFTEHYQNWCKRKNYNFSAEKAAKIYQISSDLIAVFPKNDITKMLIWQAVALLNTASKTVESLRSKMNELASTLPEYPVVMDMNGVGATLGPQLIAEIGDVSRFTHREALTAFAGVDPGKNDSGKHISTFL

SEQ ID NO: 448888 - protein, 341 aa, unidentified
MGEVSTIGLDIAKSVFQVHGVDVAGAVVIRKRISRAKVLEYFGDLPPCLVGIEACPSAHHWGRELQALGHTVRLIPPSYVKAYLKRSKNDANDAAAICEAVTRPSMRFVPIKTKEQQTALMLHRTRQLLVRQRTMLSNALRGHLAELGIVSAKGRNGTAELLRIIADGRVSPAVCGILKVLARQYGAIGTEIASIDKSIMALHRGCEASRRLAEIPGIGPIGATALVAEIGDWKTFSSGRSVAAWIGLVPKQHTTGGKDRLGSITKQGNRYLRWLLIVGAMAVIRYARKHGTQKRPWLGRLMERRPTKVAAVALANKIARMAWAIMVRGERYKEPKLLLAA

SEQ ID NO: 448889 - protein, 411 aa, unidentified
MLHSRCCGLDVHKSSISACILLREAGRVQKHQRRFGAMTQELQELAEWLRQFGVSQVAMESSGVYWKPVWNILEGQFTVVLANAQHIKNVPGRKTDQKDAEWIAQLLQYGLLRASYIPCEIIRDLRDLTRMRTSLSQEASRISSRIQKVLEDANVKLASVATNVLGKRGRAMLEDIITGEDDPEHLASLALGHLRVKIPQLRLALEGKIRSHHRFLLRRLVDQIQFVEHEIALLDERLEDIGRQRPDLAQAVARWDTIPGIDRVAAWALLAEIGDNMAQFPTAEHLASWAALCPGNHESAGKRLRGTTRQGSPWLCRMACQCAWAAARTKNTYLSSQFRRLAARRGKKRAIIAVAHTLIIIGYHLQKNQSNYEDLGGNYFDRIHSDGLKRYLVKRLQQLGHKVTLEPMEAA

SEQ ID NO: 448890 - protein, 421 aa, unidentified
MKGLRAKKADMIKEGTLIVAVDVGMVSNHGCCTTADGRSTKTFRFDNTREGLDTLWTMVLASKTRFQCNEVIIGYESTGPYGEPLIHYLRQKQATIVQVNPLHTKRMREINDNSPLKTDRKDPRVIADVIRIGHALSVVVPEGDAAYLRRLNNARERHTKERTALLNQLQQFIFLIFPEFTRIIKTISCKTALHILKKYTTPAKIGSAKIEKLGEEMRRRSMGKFGAEHATALINFAKTTIGIQEGLDGLVMDIQHALVQLEMVDSLMAELEHEMETTLQRIPYSRKLLSIKGLGIVTVAGLIGEIGDFTKFTTQSEIAKLAGLDLYEVSSGKRQGQRRISKRGRSLLRKILYYAAMQTIRKNGIMHNYYQRLIGRGMKSMMALVAVSRKLLRIIFAIVRDDTEFIMNHEFQRKEEMRKAA

SEQ ID NO: 448891 - protein, 368 aa, unidentified
MNDLIRIGIDTSKSVFVLHGVNAAEQPVLRRKLRRRQMGEFFAKLPPVQIGIEACGAAHYWARELAALGHEVRLLPAQYVKPYVQRGKNDAADASAICEAMSRPRMRFVPVKTAEQQAALMLVGVRDQLVARRTQLSNMIRGYAAEFGVTAAKGLDKIEPLLVRIAREPGVPEKAKALFALLGEEFVALKPKLRKLEAQLQSWHRHNELSRRLVEIPAIGPIGSALLTMKVTNPHAFRCGRDFAAWVGLTPKDHSTAGKQRLGVITRAGDETLRRVLVVGATALIQQARKGRGNPSPWLIGLMRRKPPKLVAVALANKTARIAWKLMVSGERYDRARSGFVPPAGSLAPGARRQGRVAPPAAVACGQP

SEQ ID NO: 448892 - protein, 405 aa, unidentified
MLLVGIDWADAAHAYCVMDEAGATLASGSIPHTPEGLATLVAAIRTRARAPEEVAVALETSQGLLVGALLDQGFVVYAINPKAVDRHRERFRVAGGKSDLRDAWVLATLLRTDRALYHPLLPDSEPAQELRVLTRDRTELVRTRTMLSNQLTACLKAYFPAFLDLFGDPDRPVALAVLQQWPTAAALRSASVKRLEAFLRQHHQPEAATKARDTQTRLTQPAFQVASVILRTKARLAQTLGHQLRTLAEEIAAYDAEIRRVLKTHPDGELYLSLPGAGDLLAARMVGELGDNRDRYRDPAIAQSAAGTAPVTRASGTAHIVHVRRACIHPLRETMWYFAFCSTTHCAWAKAYYRAARSRGKRHAEAIRMLSNVWLRIIIAMRRNHRPYDQAVFLNAREAHLATAS

SEQ ID NO: 448893 - protein, 373 aa, unidentified
MNKTVAARQIVRPLVTKTVVEHGIVVRPCHSRARTVARAKSSHHARMGVGSDVHGEDSMDAVFVGIDVSKATLDVALRPSGKRWGVANDEAGIKHLTAELQQLKPTVIVLEATGGLQGPAVAALALAQLPVAVVNPRQVRDFAKATGRLAKTDALDAAVLAHFGEAVRPQPRPLRDEQTLALDALLVRRRQLVEMLTAETNRLGTAPRSVHKDIQQHIIWLRRRLRDVDTDIGTSIRNSPVWREKEQLLRSLPGIGRVTATTLLAQLPELGHLNRRQIALLVGVAPLNRDSGTLRGKRSTWGGRAHVRSALYMATLTAVKWNPSLRAHYARLLAAGKLKKVALIACLRKLLVISNALLRDRTTWNPDFAATAA

SEQ ID NO: 448894 - protein, 358 aa, unidentified
MNRSTGMNAGQIIGTMNGRQVVGLDIAKHVFQLHTVDMSTGEVINVQIKRAKVIKHFANRPPCLIAIEACGGGHNWARELMALGHSVRLLHAKAVRPFASGNKTDATDARAIWLAVQQPGVKFVGIKTAAQQATLTLHRQRELLMKMRTMQTNALRGLLYEFGATFAKGRNALFKDVEQALEELSPQLPQMVRDSLHEQVARIKALSQDMQTIEKRLGLQLKADPHMQRIAQIPGVGLLTATAAIATMGEASAFKSGREFCAWLGLVPSQTGTGGKVRLGSISKRGDTYMRTLLIHCARSVLAHTKEPGTWLEGLKSRRPANVVIVAQAAKIARTIWAVTAKQQDYQRGFQSVRPQTA

SEQ ID NO: 448895 - protein, 363 aa, unidentified
MEYYIGLDVSQKQTSICIVDEKGKVIAEGKALTIPSDIHGWISKQNGIEPQMIKQVGLETGAMSNWLYTELQKLGLPMICLETWQAHRFLKTCRNKTDKNDARGLAQLVRMGGEFIQPVIVRTQTNQELRTLLTLRQSLVGQKINLENNISGCLKPFGLIVPRGGVKSSTFEERVYEAVRKGEDRGIHLRDAMTASLKAYDQICQQVAQLSKQIEAAVKKNPICRRLMTAPGVGPVIALSFMTAMDSPKRFSTDDDIGAYFGLTPKQYQSGETDIRTGISKMGNSMTRSHLVQAATVILIKCKKWSSLRSWGMKIAKRRGFQKARIAVARKLAIILHRMWIHETDFRWGNAADKELAAVMAAA

SEQ ID NO: 448896 - protein, 338 aa, unidentified
MAIARVGVDLAKLVFQVHGVNRAEKVQQRKQLRRSQMLGYFGKLEPCLIGMEACSSAHYWARELSKLGHDVRLMAPQFVKPYVKSGKNDANDAEAICEAVGRPSMRFVAIKTVEQQVIQAGHRIRSRLVKSRTALTNEIRGFLAEFGVIVAKSLGPLRRALPELLEDAENGLPGDFRVLLMGLSEELRALDERIAAFDARIAQVAREDDRIKRLLEIEGIGPITASALVAAVGDATQFNSGRDMAACFGLTPRQHSSGGKNRLGRISKRGDKYIRMLLVHGARAALNAAKHKEDGRSRWIMNLADRRNKNIATVALANKNARIAWSILSRGESYRKAA

SEQ ID NO: 448897 - protein, 449 aa, unidentified
MGKGSGITRGDRRRNAKKARLRALVPHGNAVAGLDLGEKRQALAVTGADGQVLARRSPQVSVHDLGPYLDWAGRQARAAGCAGLSVACEPTGSRWMAVQDLCAARGLPFVCVQPLVSHIAREQEDLTGDKTDEGDSGLIARLARELHCYEPEHLEGAWAELREEGRRRAQLITNATAAKQLLRDKLGLVAPALLEAACEPFDSATWLASLEVVLERCDADVARVTAMGFEAFAARTAAVLRERGGRRLGGTCRQLFAALGDDRGVARMRRAALRRARGALADLKYARGRRARAEADMITLLGELGVDADRICEIPGLSPVTLAAILAETGDLRRHESSSSVVKHAGMSPARNESGGFRGQAKISRRGRPGLRLAAWRATWAVLRHCDVLAAKHAALTSRDDDSRLTAEQARVACAASLLRWIWSLMVHGTCWDARIAGGQLSHHRAIAA

SEQ ID NO: 448898 - protein, 353 aa, unidentified
MDRYVGLDAHAETCTLAVIGVSGRRLTSKVVETNGQALVEAIRSIPGRVHLCLEEGTQSAWLHEILEPEVSEIVVVSPPETRGAKDDLRDAWSRAEELRVGAIRTRVYKAPKHWTGLRSAAVIYRMARQDVVRAKNRLKAVLRARGILADAGVYEEKGRGKWLKELPVAGHRPAAGWLGRELDLLGPLCEEAEAWLLKEAKAHPIIKTLSTAPGMGPLRTSQMVAIVVTPHRFRTRRQFWSYCGLAIVTRSSSDWVQGHNGKWTRAVVRQTRGLNRKRQPVLKAIFKGAATTVITQLHGHPLHMDYERMLQSGIKPNLAKLTLARRIAAIVLSMWKREEVYDPQRPKPVLVKS

SEQ ID NO: 448899 - protein, 346 aa, unidentified
MSNLDTCGIEVSAKELVIQLRRRGELEPLRRFTNTPEGREMVLRHLREAGRVVRACMESSGLYGLDLALLLSAAKGIGIEVMVANPRAVRHFALALMKRSKSDPVDAGVLEQFAARMPFQAWQRPSPRALGLHALARRLHELVEIETAEKNRQHAAGISDATPAAVRRDLARSLRAQQRAVQRLTRHARQLIAQDPILSERFQLLDSIPGVGETSALQLLGELAVLAPDLDTRQWVAYAGLDPREYTSGSSVRKKPRISKAGNKHLRRSLYMPALVAVQHDPYLGGFYQHLLAQGKLKMQALVAVMRKLLHAIHAMFKKHQLYDGSTLFRLPSTSTQEVPCAPVTA

SEQ ID NO: 448900 - protein, 344 aa, unidentified
MDHFAGLDVSVKETSICIVDDAGKIVREVKVASEPDALLAVLKNPAYDFKRIGLEAGPLSQWLFGALAEAELPVVCVETRHMQAVLKAQINKTDRNDARGMAQMMRVGLYRPVHVKTIRSQKLRMLLTHRQLLQSKAIAIENDLRATLRNFGLKVGMVGKVRFEARIKELVENLPDLAALVEPLLIVRRVLREQIVILHRRLLAVVRDDEVCRRLMTVPGVGPVVSLTYRATVDVPARFRKSKAVGAVFGLTCSKYQSGEVDRSGRISRCGDEMMRVMLYEAAQSMLRSKKWSWLKAWAMQIARRRGMKKAIVALARRLAVIMHRIWVDGTEFRWTREQVPAAA

SEQ ID NO: 448901 - protein, 362 aa, unidentified
MAYYIGMDVSQRQTSICVVDDDSKIIAEGKALTLPSDIYDWLKNRIETQQIHMAGIEAGAMSNWLCMELSKLGLPIICLESFQAHQFLKTQRNKTDKNDARGLAQMVRMGGAFIKSVNIRSEGNQSTRMLLTVRQNLVRLKLSLENNITGSLKPFGLIVPRSNACAKKFRERVIIALHQAEERGIKIQASIMPSLNLYDILCGQLFLLNKQVEALAKSCPICRRLMTVPGVGSIIALSFVTSVDNPHRFKKSGDIGAYFGLTPRQYQSGEMDIRGGTSRRGDVMTRTHLVQAATVLLFKTKKWCALKAWGMKIAKRHGMVKARIAVARKLATILHKMWITQKDFCWSASVSADTLLAGTKPA

SEQ ID NO: 448902 - protein, 430 aa, unidentified
MKQYELLHSLFVGIDVSMKENVVHAMPFSPEDHPGHAHLRFSAPNTPAGSVGIVEKVSDFLKFYPDVIQVIIALEATSVYSFHLATFLSVVHFNGHIPAIVYSVNPKEIHAYKKTFTDVGKDDYVDAMVIADYARSNKIRSRPWKGPELLGLRVLTRLRFRIAKLMGIVKNSTGNSIYLECSGLMTGENPFCNVWTTTCQELLTTFQGPDEILSLSDEELLNFITEKGHGRFSHPLDVVEKVKKAARNSYRLDKRVYEPLTSGLSVSFFIIHSLEAAIKKLDKSIETMAKSFSSDSYQILLSIDGVGPVIAGGLLAEIGDIKRFKTDDALAKYIGLTWRGKQSGQSESPVKHLSKAGNVYLRYYVLLATGQIINYSAKYREAYERIRSRKTLFPYRAALNLVARKIVRLIFTLLDKHQLYSDNKVMVTLE

SEQ ID NO: 448903 - protein, 348 aa, unidentified
MIVIGIDSHKRSHTAVAADGTGRKLAERTVAATPAGHLELVRWAARFPDRRWAIEDCRHLSRRLSSDLLRAGEAVVRVPPKLMAGARRSSREPGKSDPIDALAVARAALREDLPVATLDGPDREVRLLVDHREDLVAERTRAQNRLRWHLHELEPGNEPAARSLDRTVVLAALDRDLAEVPGTVARIARELVVRIRDLTAAINDLEREIGRLVAGLAPSLLALPGCGPLTAAKLVGETAGIGRFRSAAAFARHNGTAPLPVWSGNTERHRLSRTGNRQLNVAVHRISITQLRIDERGRAYVERRRTMGNTKTEAIRALRRRISDEVFRRMRHDEAARAARPTGLAAAA

SEQ ID NO: 448904 - protein, 377 aa, unidentified
MKKELYLGLDVHKDCIMRAVAEEGRKGEVRQSGAISNDLHAVEKWIGRLRQGHGKEVILRACYEAGPCGFGLARRLEQLGVECEVVAPSLTPKRAGDRVKTDKRDAGKLARLLRAGELTAVYIPEARDEAIRDLCRARTDAVDDRRRSRHRLKGFLLRHGYRYQGKSSWSAAHERYLRELVLPHPAMKVILEEYLQAITAAAERIERCEEGMRELLEKWRLGPAVQALMAMKGFQTVAAMILISELGEVHRFSHPRQVMAYLGLVPTENSSSDKRRQGRITKCGNAHARWLLVECAQHYATPPKVSKELSRRQQGQPREVRSISWRAQNRLHRRYLRLLGRRLQRNKAIVAIARELCGFIWELLRTQDCYQAQSTPV

SEQ ID NO: 448905 - protein, 353 aa, unidentified
MKQFIGCDAHKNFSVFASMNEDGEYGPTVRVGHDREGFRRFLEGLPPKSQIALETSGCYYWLVDEMERAEHIPRLAHALRAKRRMEGRHKTNERDAQGLAMLLRNGTLPVVWIPPAELRDEREMLRWRMRLSNMRTRVKNRIHGVLQRYNVDVAVSDLFGDTGRAQLLARLPEIPNYSRRSLMEQLRMVDAVETQIRDCEQILEEMLYPRAERDVLDSLPCVGKILSAVLALEIGDVRRFSGPDYLVSYAGLVPVARESADWKRKDRCPRDCNVYLKWAYVEAANLISIQRHRWKDRHVVQLYDRVKQSTKMHGKATIAVARHLAEASYWMLTKQEVYQEPRSRRQVLSSTHG

SEQ ID NO: 448906 - protein, 384 aa, unidentified
MQTVADRPEAATAIRTDLGAIFVSLELSRSTWLITSLSPDGGEKMSKHVVRGGEVAGLLERFAQLREKTRARTGKVFPFVVIQEAGLDGFWIDRVLQNEGIESHVVDPASIATSRRRWRAKTDKIDGEALVRALLAYKRGEPRVCAMVKAPTPEEEDRRRLCRERKVLIAERVRHVNRVKGLLFSQGISGYEPLRRDRRERLVTLQTGDGRLLPDHLKAQVRRELDRLELLLEQIKAVEAERDVLLAAQQAPAAMLLDIKGIGPEFAAILWSEGLFRHFDNRRQVASYAGLAPTPWQSGSVDREQGVSKAGNPRLRTTLIQLAWLWLRHQPQSALALWFEERVRRNGGRLKKPTIVALARKLLVALWKYVTAGVVIEGAVMKVA

SEQ ID NO: 448907 - protein, 412 aa, unidentified
MELTSSVAGIDVHKSMLAVVVGRADLPERQWKRCKFGATTQALGRLAEWLQQQGVREVVMESTAQYWKPVWIALEEGFRLHLAQALSTKGPRGRKTDYRDATRLVKRLLSDDLTLSYVPDAEQRRWRLLTRTRYQIRRDRVRLRNQMEGLLEEGQIKLSSVVSDLLGVSGRRMLEALAQGETDPAKLAALGDERLRVTTEDLQEALGGQLHPTHQALLRLALDRLDLMERHLEKVDGEIAQALRAHQEVVERLCQVPGISVQSAQQILAEVGPQAATFASAPQLASWVGVCPGRQESAGESTSNRSAKGNRPLRRVLNQVAWAAVKSKGSFFQLLFRRWVPRLGVKKAIWAVAHRVLRLIWKVLHQGVRYEERGPLPRSPQALRRRRARLLRELCALGYDVTLSPRPATILA

SEQ ID NO: 448908 - protein, 482 aa, unidentified
MKKRNIYQNQSQELLSLFETAGSSAKVMCVPMDYAKKDHLVMFCNGHGDILRKPFSVKNSPEGIKYLIDQVTRSCRRRGIKKEHVFLGGEDANSFAENFVNTLRFKGWLVAGVNAHDAKKQRVNLQASTDRIDLMGIATMLLNCRANCCPAQSGIYRNLRTLVRHRRKLVVMLTEVKNRAHGIVDRLFPGFLNENKSGIVPFTQSSLYLMEDRFSPKQIRRRRRQTLIEILRRFGTSKAQETAFKLQQYAATVLHTPDEYIDTLQISLAQHVKHIRCLKESIVQLEKEIAVNLAQTQGAFLTSVRGIGIVLAAGVSAEIGDPYEQKSLNNVISYSGIIPRVKQTGGVDGKTYTGHVAKRCNRILKDYVVKSAYHLGLSGPEDLMADYKRRDASGQHADFGIGRRYLRMAMSLMRTSQIYLPPRLRRTDTAPEERAAYYLMSWPFLRDKWKKAGALEAAFAKDRPLGLWRQIVQELYDIKLKL

SEQ ID NO: 448909 - protein, 347 aa, unidentified
MNFYNNMHPYYCGIDLHARLLYVCIIDNTGLILVHKKIKDDPEALLKLLKPYIGDIVVGVECMHCWYWVADFCKEHTIDFILGHALYMKAIHGGKAKNDKIDSYKIAKLIRGGNFPLAYVYDKDMRATRDLLRRRTKIVRHGADLKAHVANTASQYNLPAHNVNLKNVCDREKMRYYFPDPVVQRSINLNMAILDCYHNELKPLEHYIEQMAKQHNPVHLNILQTINGIGRILALTIIYEIGDINRFSSVQKFASYSRLVKCKAESAGKTYGTQGNKIGNAHLKWAFSEAAVLLLRHNHNANKYLEKLQKRMSKAKALSALAHKLGRCVYYMLKKETVFDEAKFLKS

SEQ ID NO: 448910 - protein, 341 aa, unidentified
MIKISTPLHDTKACLGIDISKAHLDACLLTELPTRHRYRRKVRNTRSGIQELLGWLKEHHAEPIAAVLESTGHYGEMLAHLLHEAGHRVSVVNPGRVKQYAQSQGRHNKTDEVDAEIIARFGFTQELPQWQPLPEAQATLRALLRRREDVSAQLQAEANRLEACPTDKGPVPQSLRRIIALLSKELVRLEAAISEHIKTHPDLAADCARLEAIPGIGAKSAQWLVAELPGTLENSRAAAAWAGVAPRLSESGTLRKPSRIGPAGNRFLRKALYFPAISARTHNPRFKVFADRLAERGLSKMAIIMAVLHKLVRTAFAILKNQSAYDPSHISITPKTTQNPS

SEQ ID NO: 448911 - protein, 370 aa, unidentified
MAKCSEVFVGIDTAKTRHAVAVAEAGRDGEVRYLGEIDSAPAAVERMIKKLGSRYEKVHVCYEAGPTGYGLYRQVRALGHECTVVAPSLIPKKPGERVKTNRRDAVSLARLFRAGELTAVWVPDAVHEAVRDLVRARASAAADVRKKRQQLLSFLLRHGRVYSGGKHWTQAHARWLAKQAFEHPAQQIVFQDAIDAIEDCTGRLQRLGEQLQAIVPTWSMAPVVAAYQAMRGVSFEVAVTFVAEIGDVRRFDSPRQVMAFLGLVPAERSTGDNVRRAGLTLSGNQRARRALVEGAWTYRYPARVSARLQRRSEKLPKATRDIAWLSQVRLCARFRRLAASGKKTPVIVAAIAREMAAFLWAIGQHVAPVS

SEQ ID NO: 448912 - protein, 346 aa, unidentified
MNKTDYGGIEVSAEKLLVALERDGARQPQREFTNTPSDHAVLCRYLLRAGRTVRVCLESTGVYGLDLALALSGHPGLQVRGANPRAVRHFATALMPRSKTDPLDAEVLREFAQRMPFQPWRAPSPAALALQALARRLAALTELQKQEKNRVHAARVSETTPAAVLRDLQRSLRSQCRALARLTREALQLIAQDPELQLRFQLVLSTPGIAETSAVQILAELAVLSPNLQVRQWVAHAGLDPRQYSSGSSVHKKTRIRKTGNRHLRRGLYMPALVAVRHDPPVRAFYQHLLERGKLKMQALVAVIRKLLHALYGMFKSRQPFDGSKLYRLPEETCVLQPGFSTTEAA

SEQ ID NO: 448913 - protein, 446 aa, unidentified
MPLDCCERARGSVSWQRSLRTGAVRRWSPHGGRRDVMEVLFDRVAGLDVGNESVTVCVRTPGPRGGRRSETRTFKTMFGSLRVMRDWLIEAGVTIAAMESTSTYWKPPFYCLEEVMVVWLLNAAHMKAVPGRKSDVRDAEWIAQLLEHGLLAPSFVPPPQIRRLRMLTRYRMQLMGDRSREMVRLELMLEDASIKLSSVASSLKTVSARAMLTAMINGESDPLRLADMAKGRMRRKIPDLAQALTGTFEAHHAQLARSMLRRLELVEQALAELDAVIAEACRPWQHHIELLQTIPGVGETVAQVIVAETGADMSRFPTAAHLSAWAGLAPAMHESAGRQTPAGKRHGNKWLTAMLVEAAGSVGRMHGRNYLAAQHARLMKRRGMGRAQVAVAHSMLVAAYWMLKRDEPYHDLGADWHRRRSDEAHTRRLVAQLEHLGHTVIIDPAA

SEQ ID NO: 448914 - protein, 341 aa, unidentified
MADVRVIGLDIAKSVFQLHGVDDAGAIVLQKRLTRARLLPFFEKLPPCLIGIEACATSHFWAGELTRLGHEVKLMPAQYVKPYVKRQKNDMADAEAIAEAVTRPSMRFVGPKSPDEQSAMMLHKVRLMLTRQLIMITNATRAHMAEFGLIAPVGRGGVDRLLAIIDDEADERIPAQARACLQMLVAQLRLVKLQILDNDRQVLALARSTELGRRLMEVPGIGPLVASALVASVPDPSMFRCGRNMAAWLGLVPKQNSSGGKERLGSITKAGNRYLRQMLFAGAMAVIRRAMQGTRRTWLIRLLERRKPKVAAMALANKNARIAWAMMMSGEHYREPMAIAA

SEQ ID NO: 448915 - protein, 290 aa, unidentified
MNPPIIHAGLDVAKASFVLHFAGKNFTLCNTKIGHRQLVAILEKHPGVQVVVEASGGYERGIFDALCAANIPASILNPRQVYHFAKSLGDRAKTDLLDAQLLAIHGERMRPAPTAPRTASQRELCELVRHRRSLLDTIVAQRHSMEQVESAPLRRELTALVRQMEARLSKIEALIKKHQSAHEELRAKAQRLMQVAGVGELTALAGLAPYARESGAWKGARCIAGGRPAIRRALYMAALSAARHHTALSAFYQRLRAAGKPYKIAITALMRKLLILLTLALKNPDLTLAN

SEQ ID NO: 448916 - protein, 347 aa, unidentified
MPFAGVDAHKRYSRVVVKDETGSILCQASLQNDVAAFQGFFGNIDGPTKAVLEAGRDWGVIYDLLESIGVEPVLANPLKTRAIAEARIKTDTVDATILADLLRADLIPVVHVPPREVRSQKNLLRQRLWLVELKTRIKNRIHNIMDRNHVGPPPAADLFGKAGRRFMDQLHLPSPDDRLLKAHLELLDLVQSQIGRSEEWIDEALSQRSEVAIMRTLPGFGKVLAAVVALEVDDVHRFSHPGKLCAYAGLVPTTYASGGKVRHGRLLPSCNRWLRWAFVEAAWIAQRCSAYCHAYFERIKRRKGANCAVTALARRLCEITWHCLNSSRPYEERVMMPIRKELARSPS

SEQ ID NO: 448917 - protein, 349 aa, unidentified
MNEYIAFDSHKHYTWVEHERVSTGKTRQYRVEHAPGAIRRALAGCQPGTAVALEATANWYWIVDEIEQAQLVPRLVHPRKAKLMMGMINKTDKLDTHGMNTLQRNGTLPTVWIPPGPLRELRELTRTRVVLGRQRTLWKNRITANLAKYGRPASEWSDPYGRGAQAELRARIGGLPEQARWATQQMLRQLRVLMEQVEQFEGRLEQLVVVTPEMLWLKSLPGVGVILAATIQLEIGDIARFASAEHLAAYAGTTPRVHSSGGHTRYGRTRPDVNHYLKWAFAEAGNSVAVNHTRCPRRHVSQLYRRLRERKGHSRAVGAVARHLAEGAFHVLSRRQAYRDPSLVRAREV

SEQ ID NO: 448918 - protein, 343 aa, unidentified
MDHFVGLDVSVKDTSVCIVDDTGKIAREVKVASEPDALLAVLKNPAYHFKRIGLEAGPLSQWLFSALAEASLPVICVETRHMRAVLKAQINKTDRNDARGIAQMIRVGLYRPVHVKTLRSQKLRILLTHRKLLQSKAIAVDNDLRATLRNFGLKVGIVGQAKFEARIKELVEDLPDLAVLVEPLLVVRRVLREQIGILHRRVLTVVRDDEVCRRLMTVPGVGPVVALTYRATVDVPARFRHSKSVGAVFGLTPSRDQSGEHDHPGAISRCGDEMMRTTLYEAAQSMLMRSSRWCWLKAWAMKIARHRGMKRAIVALARRLAVIMHRIWVDGTAFRWTRQAVAA

SEQ ID NO: 448919 - protein, 381 aa, unidentified
MCPVNVAGSANGRLLKQPPVAGSEPVTPEGGTCGRARDRSGVFLKPEQLHGRESPHEQGREWRMAQKTRFVGLDVAKSKVDACIRSEGLRLSAPSTPEGRAGLVAWVRANRVGRAVMEASGGYERGWAEALRAAGVEVRIVDPKRVRHFAKAAGRLAKNDPIDADTIAWFAEAFPDREAQPHDPARDEIDRLVAARTALKDAEDRIKQQGEHRPPAVVAKALAAIAKTIRAELRKVEGAIAAKIKANPGFARRAEIIASVPGLAAQTAAGVIAWLPELGHVTNEAAAALIGAAPYDDDSGGRKGQRHIKGGRRKLRNLLYMPVMGAATRHNPMLKAHYQRLRARGKEAKVALIACMRKLIVILNTMLARDQTWNPPVRAAR

SEQ ID NO: 448920 - protein, 389 aa, unidentified
MKIFVGIDIAKLNHFAAAISSDGEILIEPFKFTNDADGFQLLVSKLESFDKNSIIIGLESTAHYGDNLVRYLVAEFYQVCVLNPIKTCQMRKNNVRKTKTDKVDTFVIAKTLMMQDDLRFITFFDLDMIDLKALGRFRQKTIKQRTRLKIQLTTYVDQVFPKIQYFFKSGLHQHAVYALLKEAPSPKEIASMHMTHLANLLKVNSHGHFTKEQAKELRVLAQKSVGANDSAISIQITQTIQQIELLDSQSEKIEAEMTDIMRFNDSVIMTIPGIGYINGGMILGEIGDIHRFSNPNKLLAFAGLDPSVYQSGDFQAKTTRMSKRGSRVLRYALVNAAWNVVRNNATFEAYYNAKRAEGRSHYNALGHCAGKLVRVIWKMLTDEVDFNLE

SEQ ID NO: 448921 - protein, 343 aa, unidentified
MDQIIRIGMDTSKHFFQLHGVNVAEHPVLRRRLRRQDVVAFFSKLPSTEIGMEACGAAHHWARVLSELGHTVKLIAPQHVKPYIKRNKNDGRDAEGLCEAMSRPTMWFVPVKTAEQQAALMLAGTREQLVARRTQVSNAIRGYAAEFGVAMPKGLDRIEPLLARIAADTSVPAMARELFALYAADYAQLQLQVKAIDRRLLAWHRAHADSLRLAEIPGIGPIGATALVMKAPDPKAFGSGRDFAAWMGLTPKDHSTAGKTRLGRITRAGDERLRSLLVAGATAVIRWVRRGRGRASPWLVALVARKPPKLAAVALANKMARIAWKLMVTGERYRAGSATTLAA

SEQ ID NO: 448922 - protein, 465 aa, unidentified
MNRSTASASRPANRLLVGDDVSSVRNDVCILTATGEVLLNHQPFVNDWAGYVALRDTVLDIFQRVEAAGVDFAGEATGWYWFHTFYALAHDEELNGLDLHLSLFNPRLTHAFKKAMASRDHSDPKDARVVAERTRFARAEHPPVLDDTWLGRRLLTRHYYHLSHALAAEKTYFSAFLFLKASAYRQLKLFTDVFGTTSSALITQYTTLQELADLPLAELEGLLKTLSHNHIPDVEEKAQRLHAVAVQSFPVPPHMLEPLNFVLRSTLEHIRFLEQQLEETKTAIEQAFANVTELGWLMSIPGMGLILAACLLAELCPFDRFFDGTVVERKTHRPRAKNARDAEASVAKWVGLWWPRNQSGTFEGEITRLPKDGNRYARYALIQLANCLREHSAEFAAYYARKHAESKTHAHKRALVLSARKAIGLIVALLHTGQLYRVPEPYREILSPHQARGQTAASSTAATDP

SEQ ID NO: 448923 - protein, 357 aa, unidentified
MPQGAIERRATMVEYVGLDVSKEETAYCVKDERGKVLARGKVASDPDALFAVLREHCLCPERIVLETGTLSNWLARELRKRGLPVTVIDARQAHAVLRLQHNKTDENDASVLADLARTGFYRSVAMKSERGQRHRALLKAREHLVGQLRSRGNAIRGLLGTFGIRLAKGTAKFDLRVRAALAERPDLAAIFEPLVGERAALLGAIEQLDRAVDAEAEADPACRLLMTAPAVGPVTALAYVATIDEAGRFGKSRAVGAYVGLTSRRNQSGEMDYSGRISKQGERMLRALLYGAANSLLTRVRRAHPLKAWARKVKRKVGHKKACVALARKLAVILHRMLITGEAFAWPQDDAKETATA

SEQ ID NO: 448924 - protein, 344 aa, unidentified
MEQYAGIDVSLESASVCVVDATGRVVREAKVPSEPEALINWFRELGAELARVGLEAGPLSQWLYAGLREAGLAVELLETRHVRDAFKAMPVKTDRKDARGIAQLMRLGWFRPVHCKSLPAQETRALLTARKLVQSKHHDLEMSLRGILRGFGLKVGATSPRTFEGRVRDLVADHPTLLVVAEALLVGRAALGEQLSRLEKRVRSVARDDRRVRRLMSAPGVGAIVALTFVAAVDDPARFRSSKAVGAHFGLTPKKYQSVETDVTGRISKIGDAGVRTVLYEAANVILTRPVKGSLLKSWAMRLAARAGMRKAKVALARKLAVVLHRMLADETTFAADKAATAAA

SEQ ID NO: 448925 - protein, 464 aa, unidentified
MQQPIEVQVDEHEPIVERVVGIDVAKASGMVCLRVPHETIPGRRVTKVWSVKATTRALVELGDHLRCQGVQRVVLESTSDYWRPFYYLLEAAGLTVWLVNAAQAKNVPGRPKTDKIDAVWLAKLAERSMVSPSLVPTEPMRQVRDLARARFDLVADRARVKQRIEKLLEDALIKISSVLTDIHGVSGRAMIEALIAGQRSPKALAELAKGRARARSAALQEALDGRFTDHHARLARLLLDQLDELTARIDQVTALLEAAITALTPPQADTDTPTGDSGGDSGDSGHSGDGAPAQPAPGRYARAVERLCAIPGGGPDSVRAVIGEIGLDMSVFGTHQRLCSWAKVAPRTVQSGRKTGRARTGRGNPYLKSALAQMAMGAAKTDTFLGERYRRLIKRMPKAKALVALQRSILVIIFHLLADPTAEFTDLGSDFYQRRIDRARRTTHLLRQLHALGYQVQLTETEAA

SEQ ID NO: 448926 - protein, 356 aa, unidentified
MSIVAHTRPFVIGVDAHARTHALAILGCPTGELLDEAQFPATAAGMRRALDWVARRTGGDLDTLWVIEGVGTYGARLARTATDAGYPVVEASRMSARANRGVGKSDPLDARRIAQAVLPMTEPQLRQPRSDNGVRAALRILIASRDQITNERTAAINALIALLRVVDLGIDARGSLTATQIATIAAWRSRSEELAAAIARAEAVRLAKRVHDSTKELTALTRQMTDLLAISPAAHLLDQPGIGPITAAIAFAAWSHPGRVRSEAAFASLAGVNPIPASSGNTVRHRINRGGDRRLNSALHMAVVTRMRMDPETRSYVEKRTREGRTHREIRRSLKRYLARQIYRHLNAATATTINA

SEQ ID NO: 448927 - protein, 332 aa, unidentified
MNNYIGIDVAKATLQVYIPIKDENISIENSTKSLKSLYSKLKKYYKKDIDKLVFIFEPTGSYSSLLKYFCSEKKIKAFIVNPRQSANFAKALDNRSKSDIIDAKMLHKFYVMAKDGDIVVPVLNEAQEALSVMLGYYKLLQKERNAFSNHLEALAAKKLNNPIEKKLEKKIEKLKLEEKKMIKEMKNLILSDEELSKSFECIVSFKGVGDISAIALLHLFISYPNANRQEITALSGLDVIETSSGTSIYRRSRISKRGNSIYRGILFMPILSSVVNNKYIKSFYDRLKENGKHSTSAQIAVMRKIILITHSLYKNKQVFNNDIYEKRIGWNK

SEQ ID NO: 448928 - protein, 342 aa, unidentified
MNLPVRIGMDTSKSVFQLHGVDENEVVVVRRQFRRAEMIRYFERLPPVLVAIESCGSSHHWARLLQSFGHEVKLIPPQYVKAYVKRGKNDAADAEALCEAVSRPSMRFVPVKSKEQQAACMLMTVRERLVSVKSQLSNAFRSYAAEFGIVGPAGRQNVTALIKRVLEDDSLPEMARDLFRLQADEYAAVQARLAKIEAKLMKWHREDDVSRRIATIPGVGPIGSSMLSMKAPPPETFRSGRDFAAWLGLTPKDHSTGGRQRHGGITKAGDSVLRSTLIVGATALLRHIRKGRHKPTPWLASLLERKPPKLVAVALANKFARIAWRLMISGGVYNRPEAAMSI

SEQ ID NO: 448929 - protein, 398 aa, unidentified
MTERPYSVFVGLDVGKGEHHACALDRDGARLHDKLLPQDETRIRELLARLSEHGPVLVVVDQPASIGALAVAVARHAGIDVGYLPGLAMRRIADLHPGQAKTDARDAYIIAEAARSMPHALRRVDVGEEALADLEVIVGFDDDLAGEVTRLANRIRGLLTQVHPALERVLGPIVQRPVTLDLLVRFGGPEGLRAAGRRRLLAVAKPRAPRSYERLVDQVQAALTEQTVTVPGTRAAELVLPQLASTLAGLLAQRDGAAAQIETILDAHPLSQVLTSMPGVGVRTAARILIDVGDGSAFPTSGHLAAYAGLAPVTRRSGSSIRGEHPSRSGNKRLKRAMFLSAFAALHDPDSRTYYARKRAQGKKHNAALICLARRRVDVLHAMLRNGTLYQAKTPTAA

SEQ ID NO: 448930 - protein, 318 aa, unidentified
MDAKFETFVGIDIAKDSLDVCFLDRGKRFTTTNDPTGFRQLLQELPAAGSCLVIVEATGGYQREMVVEMIDAGHQVAVVNPRQVRDFARGLGILAKTDRLDAEVIARFGQQANPRPTEKTSEKQEELQQLVVRRRQLIDLRTAEKNRLPLAHSRSVIKSIRSMVEQLQKKIRQIEKEITDLVESDEQLQCQATLMETVPGVGAVTATSLLAELPELGRLNRQEIAALVGVAPFNRDSGKFHGRRSIWGGRATVRKALYMAALTARRCNPVIKEFAQRLEAAGKPFKVVLTACMRKLLVILNTIIKNNAAWNQKSLIST

SEQ ID NO: 448931 - protein, 338 aa, unidentified
MERQYVAIDLHKKRSLIVRDNAAGEELAVVRIDNDPETLSAVLAEAGPEPEVAIEAAYGWYWAVDLLQEAGAHVHLVHPAGLNWEERRVKNDYRDCRELLDRMHLGKLPEAWISPHDVRELRELVRYRGKLVAQRTSAKAQVKAVLAKHGLHPPVEDLWGPGGTHYLDELRLEDAYAMKVESLRDLVTLFDREVAMVEKETRRRLVDHRGYRAIQVISGVGPILAAIFVAEIGDIDRFTSPQQLSSWAGLTPKHRESDTKVWRGRITKKGSTLVRWAAIEAISKIRGGPKIQADYHRIAERRGKHIARTAAARKLLTLVYYGLRDGEIRCLAQADEAG

SEQ ID NO: 448932 - protein, 390 aa, unidentified
MSQSFDASRSLTAFEQDSTLVAVIEMSQSKWLVAAVVPGIARQPLKKLDADAGALLKLLQRWREEARKAGREVKRIVCAYEAGRDGFWLVRWLQARTIEAYVIHAASIAVSREHRRAKTDRIDTELLMRSFLGWLRGEKRHCSMVAIPTIAEEDARRPSRERESLVAEQTRTVNRVKAVFALFGIGGFNPKLRKAAQKLETLRTVEGTPLPENVHAELRRDLERLRLVHDQIRTIESERLRRLAQAPAAATGPHAMVRLIARVLGVGIETADLLVNEVLARDLRDRRAVARYAGLTGAPDESGKRRREKGLARAGNGRVRRGMIQLAWRFLIFQKESRLVRWFRARTADGRRTTRKTMIVALARKLLIALWRLVTTGEMTEGLKLRPAGT

SEQ ID NO: 448933 - protein, 433 aa, unidentified
MKEGRELDRAQQLYHTPVGMITQELLQLKHAGETKRYIGLDLSKQSCYVCIINKQGEVEKHRSYSMRSNQRHKLYETLQTGDVVLMEASTGTFNIARAMNKHSGVVACVINPHTTRINETKKKTDKEDSLFLARLIARTPVVELSLVSIPSDQEMANRETISYYQHLKKQHTQGINRMHALFYEKGFPEAGKAYNLHTKGGRAAAIEKYIGSDRVLATTKRLLKGYSKQLTLLEQQMESEDTQFAKIVKQDDRMAAILGSIPGVGLKSISAFIAFVGDINRFSSAKQLASYCGLVPRVSQSGQKNSTGKITKEGQAALREYLVEAVLTIQNTKFDFPLKRKYLEMKQRMNGRKAAVAIARKLVTIMYAMLKNGTVFFVEKEEERKAIATYQSRKRIKSLGGYYKICNSCKEYSEMIEVTNTLHSNEIGVLKFI

SEQ ID NO: 448934 - protein, 415 aa, unidentified
MKEVYRRCCGMDVHKDSIVVCVLPAVGEAGKVIRKTYGSFRNDLIRLRVWLRQLRVNEIAMESTGVYWRPLWNVLEDQGFRLLLVNPAQVKALQGRKSDGRDAQRIAEFLQDGRLDASFVPPSEIRQLRVLLRHRIALLEQRNELHNQIRDLFETASLKLSSVVTDLMGVTGRGIIEALVRGEDSPEILSWKVRGRLRKKEKLVKESLKGYFNEFHRSMLESLYKHHQFLTTEIKLFEQRVAQQMVPYAADIERLVTIPGVDQLVAWHLIAELGADVTVFPDADHCASWAGLVPGENESAGQQKSTRCRKGNRTLRRVLTQAAWAASHCKKGYLRAFFHRVKARRGWAKAIVATAHKILLIAYHLLRHQQPYQELGDDYFDRLNPARTAKRLIHRLEALGIQVQIPATLLPLSNT

SEQ ID NO: 448935 - protein, 450 aa, unidentified
MSNAVAAVAAAAAPSEPEWAAFAAIDWADQKNFWRLLPAGSRQSEAGELDSTPEAVEVWAAHLQLRFGGRPIAVILEQTRGPLVYMLTKYPHLVLFPVHPTTAARYRETFAPSGAKSDPSDTDSLLDLLLRHRERLRPLRPDTVETRLLHFLVEERRQTVDEKTRANLRLSDCLKLYFPQLLRWFDDVSSPLVGDLLERWPTLEQLQRVHPGTLRRFFHEHNCRSEEKNVERIAAIQQATSATQDAAVREACVLIAHSLVAMLATLRAQIDVFDKRIAELVTDHPDGALFRSLPGAGDALVPRMIVAFGTQRDRYQSAYQMQCYSGIAPVTEASGNSQWVHFRFLCPKFLRQTFHEFAGCSIQQSQWARAYYDHLRNDKNKSHQVAVRTLAFKWLRLIYRCWKDGKPYDETIYMQSLRRRGSLLAGVLGTPTGVGWKSVAGFQKFSENNA

SEQ ID NO: 448936 - protein, 414 aa, unidentified
MEVLYPRCAGADVHKDSVVVCVRVQEGQHARTEVRTFGTTTRELLSLVEWLLGEEVTHVAMEATGVYWKPVWHILSTSFELVLANAGHIKAVPGRKTDVNDATWIAELLAHGLIRASFVPPTPIQDLRMLLRTRKQLTRERAQHVQRLQKTLEDTNIKIASAVADITGTSGRAILRAIIDGETDPEKLLGVTTGRLKAKRTTLMDALKGRVRDTHRLLLRLHLEQVESIEQHIDLIDKEVGERLEPFRRAIANLKTMPGLGDVGAEVLLSEIGPDMSRFATSRHLVSWAGFCPGNDESAGKRRSTRLRKGAPWLKATLVQCAWAAIRKKDSYLRSQYLRLRTRRGPMKAIVAVAASMLTAAYHMLRNDVPYRDLGPDHLRTTDAKTTTNRLVRRLQSFGYVVNLTPAPPGVVSP

SEQ ID NO: 448937 - protein, 313 aa, unidentified
MNAEKKYLGIDVSKDSFCAYMYPTKEVWNIKNEPLEISKWVKTLPEDIELATMEATGKLHKLVAAQLDKAGIPISIINPRQIRSFANSMGKLAKTDKIDAKIIAMYGKAFDPDPQKLPDEMESALKELVIRRLQIVDIIVAEKNHLSSAENELVKKDIDINIQFLKKRLKDIESQIKTMIKDSPVWREKVELLTSVIGVGKITAFIIIATFPELGNFTGKKAASLGGVAPMTRKSGKWNGKSFTQGGRKHIRSSLYMASLSAIRFNPVIREFYQRLIANGKPFMVAITACMRKLLTILNALARDSTKWRFAKI

SEQ ID NO: 448938 - protein, 340 aa, unidentified
MNRIVVGVDIAKRLFQLHWVEPETGEIVALQLKRERFLEHFANRSKCLIGMEACGGSQHWARELQKLGHEVKLLSGRMVKPFVGGGNKNDAADARAIWTAIQQPGIKAVAVKSEEQQAVLALHRMREQLVKFRTAQTNGLRGLLTEYGEVMPQGRAGIKRDVPGALGRLADRLPAMVIETLREQYGRLGELDERIDLIERRLRQWQREDSAAQRIAAIPGVGLLSATAAVATMGDAKAFKSGREFAAWLGLVPRQTGTGGRVRLLGISKRGDKYLRTLLIHGARAVLTHSKSPPEWLSALVKRRPKNVAVVAMANKMARTIWALTAHERAYQSGYVSRPA

SEQ ID NO: 448939 - protein, 371 aa, unidentified
MSLRGIRRPRTPRVVDDARRPSGNNRGVALGSPPLARTTEQSPDISIARTRQVTVTKIICGVDVSSRSLHVRIGFDGPDCSFPNTTPGIAALATFCRQHNVELVAMEATGGYEKQSFAQLWEHGLPVVILNPRAVRHFAEGMGLLEKTDRIDAGVIAWFAQVKRCLPSAPPSAAQEHLKALVTRLRQLTELQTAQRNQRLLVQDPTVLASFTQILSLLASQIRALQTEIAQLIAVDPLWQQLDQAFRSIKGVADRTVARLLAEMPEIGTLSNKAISKLAGLAPLARDSGKNQGKRPVRGGRSSVRAILFVVASVVRRYDADFAAFNRRLQAAGKPKKVIRVALAHKLLVRLNAKARQIRNSEVASCALLAH

SEQ ID NO: 448940 - protein, 355 aa, unidentified
MKQEKYIGMDVHQATISVAVMDCQGKLIMECILETKAATILEFLHGLRGSLSVTFEEGTSAAWLHDLLKPHVTHLVVCDPRKNALLKDGSKSDRIDARKLAELLRGNQLHAVYHGEHGLRTLKELGRSYLTLTQDVSRVMTRIKALYRSWAIRCSGATVYAPRHRAEWLAKIPQPGVRLRAERLYQQLDLLQPVRQEARRDLLSESHKHPAVKLLRQIPSIGPIRAAMLVALLQTPHRFRTKRQLWAYSGFAIETHDSGEYRYVRGKLQRNRERITLRGLNDNHNHDLKNLFKGAALSASTRPGPLYDFYVALLEKGMRPTMARLTLARKIAAITLTIWKKGVGFDAKQLHRQAA

SEQ ID NO: 448941 - protein, 406 aa, unidentified
MMTPTRRRVTGGFDTHADTNVAAVLDTVTLRTLARATFPTTAVGHQAALEWMRAHGALDAVGVESTGTYGAGLARHLTAAGVKVIEVNRPEKLDRYLDGKDDFVDAEAAARAVLSGRASAIPKSGDGPVEAIRSLETAHESAAHDRVEAINQFKSMMFRAPNQFRDVFSTKTFRHQLNAAVRFRTSYDDLVEQELRVALKMLAQRIRFLEAQIADIEARLRPIIAEHFPALLGLHGVGPHSAAQLLIAAGDNAHRLHSEAAFAKLCGSCPRPASSGKTVRFRLDRGGSRNANRALYRIVIVRMRHDDNTKRYVARRLAEGKTKAEIIRCLKRFVAREVFAAIINPPDNIPTGADLRAARDAAGVTLTALAVSLSIAPTNISRLERGIDHHTTRVHQALETITAMTT

SEQ ID NO: 448942 - protein, 425 aa, unidentified
MNRNTNEKINQVTEKTLVIGVDIAKHKHYACGIDERGRILQKAFPFIQTMDGFEKFYNTILDLQKKHEKTEVLVGFEPTGHYWMNLASYLTDHGIRFIMVNPMHVNRTKELDDNLQTKNDQKDARVIAQLVRDGRFSFPRIIEGVEAELRNGASLRSKVQEDLSALQNRLIRWTDRFFPEFGNVFKSFGKTACAVLEKTPFPMDIQGKIPEELVFLYRQVEGIKFPSLPKIRQLVALADQSVGLTEGVRMARFEIATLLTQYNLLTRQLENLTNELIELASQMTDYEFIMSVPGVGPSTALELLSEVGSLTHYDHPRQLIKLAGLTLRENSSGQQKGQKKISMRGRKKLRSLLFRVTLPLIQHNPAFKALFDYYTSRPLNPLKKKEAMVILCGKLLKILHALCNKQIHFNSQHMMKDLHCLVEAA

SEQ ID NO: 448943 - protein, 338 aa, unidentified
MEAYAGIDLHSSNSYIGIIDEQDRRHFSKRLPNSLTQILVALEPFKKDLKAVVVESTYNWYWLVDGLQEEGYKVHLANPSAIKQYEGLKHTDDKSDSFWLAHLKRLNILPEGYIYPKEERPIRDLLRRRLLFVRHRTAHILSLQSTISRNLALKMSGSAIKKLKEEDAKNLFDSPFLVLTAKSNIAVIQFLTKTIKAIENAVKSQAKLRKEFQLLKTISGIGDILALTIMLEVGDINRFPKVGNYSSYCRCVKSARFSDGKKKGENNRKNGNRYLSWAYVEAAHFAIRFSQEAQKFYQRKMAKTNKIVAIKALSNKLARASYYIMRDQVAYDESKLFG

SEQ ID NO: 448944 - protein, 429 aa, unidentified
MKIIYPRVCGIDVHKKFIVAVICISESVEPTYLKKRFSTFHNDLIRFRDWLIQNDCQNVCMESTGKYYIPVYNVLESHISNIVVANPKWVRAVKGEKDDDKDAKWIADLFKFGIVRSSFIPQKDFRILRELTRYKYKLVNMRSSEKNRYQNALTSGNCKLDMVFADVFGKSASNIIDLILSDNPYTDEDILSKIHRNCKASPDMILNSINGTDLTPVQKSRIELVNNHIKQLSSNIQRLDKLIDLMIEPYEDYISFLCQIPGVSRNSAITILSEIGVDMNQFTSTRRLTSWAGLTPSSNQSAGKKKSVRISRAGVYLKPCLVEVAHAAVKDKNHPYYANKFNKISKRRGKKRAYIAIARKILVAAYHMLLTGEIWNPADLAEVETPVEQRIKYVKNNLKSDIKQLLDIGLTVEELTLMIQQNANIIATQ

SEQ ID NO: 448945 - protein, 414 aa, unidentified
MELLYRLLVGIDWGTQAHQVCVLDREGRLIKQRRFDYQPEQITAMIEWLIELAGGDPAAIAVAIERPGGALVEALIERGLHVYSINPKQLDRFRDRHTVAGAKDDRRDAYVLADSLRTDLCAFHRVRLDDPWTVQVRELTRIEEELNVEITRLANQLRELLLRFYPQMLRLCPAADQPWLWALIKLAPTPTKGQKLRRSSVERLLRQHRIRKWTWDQVRAQLKTAPLSVAPGVCQAVSTHIALLLPRLELLNAQRKLCSKAVQAALDERVSEEEEKREHRDVQILLSLPGVGRVVGATMLAEASQPLAERNYHAMRCLGGVAPVTRQSGKRTTVSRRYACNHRLQNALYHWARISSQCDVKTKLHYQSLRQRGQSHGRAVRGVADRLLRILIAMLRDQTTYDHNKPRAHNPIAA

SEQ ID NO: 448946 - protein, 321 aa, unidentified
MSRILVGVDVCKDFLDAHARPTGIQKRFDNTPAGIEQLVAWVRPLAPERIIFESTGPYQKAAVGALLAADLPAVVVNARQVRDFAKGTGQLAKTDVIDAAILAHFGEVVATVVRPLPPQEILEFRDLCDRRGQLVRMLASEKNHRHAAQGASPKVIKNIDKHIAFLQRQIDDLEERMDRIVADSETFKAKDEILQSIVGIGPQVSRILLAHLPELGNGTRRSIAALVGLAPFADDSGTSSRIRHIRGGRAKVRIALYQAAVAAIRYCPTMKSFYASLKARGKATKVALIAVARKLLVLANALLRAGIPYQHPTNSVCLKDP

SEQ ID NO: 448947 - protein, 363 aa, unidentified
MNSVYHTELSSHEGTRCQFNGTKADIKLGIDVHQDFYVVVMQEGGSNPKPPQRFHKEAFLHWAAKLVRCGVQVYAVYEACGFGFGLQRKLTALGIHCYVVCPQKLDEQNKRVKTDGLDARTLCLKLDRFVQGNRHALALVRVPTEEEERSRAIHRQREQLVKVRKVLEAQGRSLMVNHGIEPVQQWWKARAFAALDVPGWMKELLANSQPILLALQQKIDQLTLQLQSAAHCEPPRGLGKMTSVIIDREIGDWCRFNNQRQIASYTGLCPGEYSSGQKRLQGCVTKHGNPRLRAALVELAWRMVRFQPHYRAVRKWKERLAKGTLTTGAARKKAIVALARQLAVDLWRVRTGRLTPEQLGLAI

SEQ ID NO: 448948 - protein, 340 aa, unidentified
MTKISVVGLDLAKRVFQVHGADDDGRPVARRKLRRGQVLAFFSEMPPCLVGMEACASAHHWARELQALGHDVRLIPPQYVRPYVKTNKNDAADAQAICEAVMRPTMRFAAVKSAEQQSVLMLHRARELLVRQRTMVINALRGHCAELGLIVAQGASKVEELVAIIEDPGDGRLPPLARQALGMLVEQLRCAQARIKELEATLLAWHRSNQASRRLATIPGVGVITATALVATIGDGSQFRSGRQLSAWLGLVPRQHSSGGKDRLGRISKRGDGYIRRLLVHGARTVLRWRRAKPGTRPGWSDRLLARRPTNVVLVAMANKTARVAWALLRYERIYKPTPA

SEQ ID NO: 448949 - protein, 374 aa, unidentified
MSSNLTNMKQYILKAAPAAQSVKSEKSSSAKRIVIGVDVHLRSYYAARKIDNAAVGTAAKFGSQEAFLLYVERQRQQAEEVVVLYEAGPLGYVLYRALKAQGVQCHVCAPDSTQQKQTRRKTNQIDARALASNLFNYLNGNERAVRLVRIPSPEQERARLISRQHDALVEERKRLGAKGNALLLSQGYGGCKNWWRPKAFERLSQGIASWVLELLKVWVPVLRQLDGLIAQAKAGLASRAQGARPKGAGAQSLVQLEAELLDWNLYSSKRKIGCLAGMVPSEWSTGTGQRLGSITKVGVPAIRRNVVEMVWRFKRFQPQYRPIQKWKEVLEGTNPTLKKKAVVAIGRQLIVDLWRLQTGRTSAQELKLIMIGGH

SEQ ID NO: 448950 - protein, 339 aa, unidentified
MTEYKLIAIDTSKHVFALHGINERDEVMLRRELRRHQLETFLQKLPPTEIVLEACGGSHHWGRRLAALGHRVRLIPPQYVRPFVKRGKNDRIDAEAISEAASRPAMSFVPVKSAAMQADAMVLSVRELLVKQHTQLVNALRGHAAEFGVIAAKGTGQVAALLERIAADPAIPAAAQAMFVELGERIAELATRLGELDRKLAKLHRANPLSRQLAEVPGIGPVGALTLALTVDASQFKSGRHFAAWLGLTPRQHSTGGKTRLGGISRQGNERLRTLLVLGATSVVKLARPGHRFGTTWLLGLLQRRPKKLAAVALANKMARVVWAMMTSGEAYRHQPAAA

SEQ ID NO: 448951 - protein, 388 aa, unidentified
MKKNSKNETMKSKRETKKVAELEASWMSLNEREANTLVIGIDLGDRTSAYCVRTLGQQMVKEATVATTATAMLEAFQGLRRQRVVIETGTHSRWVAQLLELMGHEVIVANARKLKLISENNQKSDKVDARLLSKLGCIDVDWLHPVYQRSQAAHSDLLLARARQALVDVRTAVINHVRGSVKSFGSRVVKCASERFVGVARVTLPEALKPALSGVLATLEEINEQIYGYDCQIEHLCNTKYQEAAKCLLQVNGVGPVTTLTYVLTIENKDRFEQSRDVGPYLGLIPKKRQSGQRDPQLGISKAGDEMLRKLLVNCAHHILGANGEDSDLRRWGLELVRAVERKGKKGARKLAAAAVARKLAVLLHRLWVTGAKYEPLRNRGAQQAPAA

SEQ ID NO: 448952 - protein, 401 aa, unidentified
MSAEYGVFLGLDVGKSDHHAVGLAPDGKRLHDAPLPNTEVRLRALFDKLARHGRILVVVDQPASIGALAVAVARACGHQVAYLPGLAMRRLADLHPGTAKTDARDAYVIADAARTLPHTLRRVDAGDEAFAELEVLIGYDDDLAAESTRISNRIRGLLTQIHPALEHVLGPKISHPAVQELLSKCGGPTGLRKAGRRKLLALVASRAPRMGTRLVEAVFTALDEQSVTVPGTAAAETVLPRLADSLRQVLHQRDQVAGEVERILDAHPLAGVLTSMPGIGVRTGARILLEVGDASAFATSGHLAAYAGLAPVTRRSGSSIRGEHPPKSGNKQLKRAFFLAAFASLSHPPSRAYYDRKRAEGKKHNAALICLARRRVDVLHAMLRTNTPYQPKPADEPRLAA

SEQ ID NO: 448953 - protein, 402 aa, unidentified
MEKYAGIDIAKKVHWMCVTDGEGRLIMEPRPYGNDSEGLSRMVADLDLYGGDVAVGMESTGCYWRSCYKVLAEGGYPVSVINPVKTCSERKQGNLGRAKTDRVDCLVVADTLRKQGIAPTPSPDADAAQLRDLCRFRRTVSESLSRAKIQAVALLDQVWPEYPRLFGNLFCGASLAVLRRFAVGDMDADGLASDLLSASRNRYGAAKAVEVLDSLRETCGVPATDALLLQLRLLLEQLDFCAAQIAEIDAGAEALLDSVAPTLPTIPGIGRATAAQIAAEVGDVTRFRDAKALVAYAGLDPTRRQSGGFDPDRNRISKRGSAHLRRSLYIAAQASLRADCEFRDFYDRLRGRGYSHRYAVCAVARKMLCVVWALMRSGEEYSRDRHTAREKAPEGASPVDAG

SEQ ID NO: 448954 - protein, 345 aa, unidentified
MDYYAGIDVSLEQSSVCVVDGGGKIIREAKVASEPDALIEWFAGFGFPLTRIGLEAGPLSQWLFAAMRKGGLAVELLETRHVRAAFKTMPVKTDRKDARGIAELMRLGWFRPVHCKSMSAQETRALLTTRRLIEAKLRDIELSLRGILRGFGLKVGKTTATTFAGRIKQLVSGHPNLEVIAESLLAVREILLREFRGYERRVRTAARHDERTRLLMTTPGVGPIISLTFFAAIDDPARFEQSKTVGAHYGMTPKKYQSGETEYTGRISKAGDKSVRTALYQAGHIILTRPVKGSKLKSWGLKLSKRVGMEKAKVAVARKLAVIMHRMLVDGTPFDRQLPTQAVAA

SEQ ID NO: 448955 - protein, 397 aa, unidentified
MKGFCISLDVSKGSSFYQGFKGFDEPITKPKKIEHNLEGFKELLKLKEAIRKEYNEDCIVVFESTGVYHRSLQTYLDEHNFKYSIISPLLSAKVRKSDIRGTKTDAKDCASIAKVFYLKELRIYSKMDEIYDDLKEKSRYYDFLMDEMKRWKIEFRRLLDIIYPGFDRVYDDLYGDFIQAFLLEYSHPEIIRKRRLDTIAKFLEKHTCHKEAYCIRQAQTLKEYAENCASGCSSKSYLVRQFDTVIHNLNAQIKHLEIILEEIVELAKALPNYDSIRSIPGIGNNLAARILAEIGDVNRFNSASQLVAYAGIDPQIYQSGQISGLHLKISKKGNKKLRCLLYLAVTCMIKTSRNTVIVDFYKKKKADGLASKSALVASMNKLVRIIYSLCKNGCLFK

SEQ ID NO: 448956 - protein, 417 aa, unidentified
MKVVYPTCCGVDVHKTFFVATIITSEGITPHYKKKRFSTFNKSILAFKQWLIDNQCFHVCMESTGKYWIPVNNLLEDRISVTIANPKWVKAVKGNKDDTKDSKWIGDLFRLGLVPGSFIPDKFFRILREYTRYRVKLVSCKSSEKNRFQNVFTVCNVALDAVVSNMFGQSASAITNYILTSDAFDKSICTSFLLGKLMKKADEVIESIEGFMMEPAQKARALIIRDHQEYLEQRIAELDRMVDVLVEPYEGVISLLCTIPGVGRRTAITIISEIGTDMSKFESSKRICSWAGLTPSSNESAGKKKSVRISRAGVYIKPALVEAAHAAVKMNESPYYKNKYSRISKRRGKKRAIIAIARMILSAVYSMMSTGETWNPCDLYKTDITQDLQDAHKEKAIRQAKRFLLSQGIVDLLQVPA

SEQ ID NO: 448957 - protein, 396 aa, unidentified
MEQYLKYGIGIDVSMKKFNVCLSVIDQVQKVTVKASSSFTNNLKGFTAFSDWINKHDKLKLPKVFLAEATGIYHENLAWFLYSRQLPISIILPNKAKKYMQSLGLKSKNDKIDAQGLSRMACEQSLAEWNPLSENIYMLRLITRQIESISEQSTAVNNQLHALEHGMYRNRELEKMLKKHVASLESDKQKLQKRVESIIDGDQLLKERIGKITTIKGIGIQSAAVIVSELNGFALIQNQAQLVSYCGYDVVENQSGKHSGKTKISKQGNSHVRRALYFPALNVVTHKVKPFLNLHTRILERSDIKMKAYTAVQKKLLITIYALWKNNEEFDENRTEKKNTSFGDGEPKPSFSSTSQKSPLSIKKLAPDNSEAKQDGHSSKVRRMPSFSYNKFIKNI

SEQ ID NO: 448958 - protein, 423 aa, unidentified
MKKRIYRGVNVKKVDVERLADLVREKRMVFGLDVAKEAMVGSVAVDRDEVFLNVKWTHPVETKELVELITRLPAASIEVAMEPSGTYGDALKYQFALRGVPVYRVSPKRSHDAAEVYDGVPSWHDVKSAGLIARLHLDGASEPWRDRTDEERKLAASIRTMEMYDGQESNNTNRLEALLARHWPEATQHLRLKSATLVAMIKRFGSPQGVARQASQAGALIRRVGRGGVKEETIEAIVNSASTTVGVPMIGAEIRMLQTLAEEILRCRKAASKARASVEALSEAHEAAGPMGQTIGKATAAVLVSKAGDPRDYASASSLVKSLGLNLKERSSGKHKGQLKITKRGPSVCRYYLYLAALRLIQDDPVVRAWYDKKVARDGGRMKNKAVIAVVRKLVKGLWHVARGEPFDSRLLFDTSKLNLVQT

SEQ ID NO: 448959 - protein, 367 aa, unidentified
MKKHTSVDQSLSSSDLSICTTVAVDLAKRVFQVAGEDDLGQVHFERRIKSREGFYEFLRQLPPHMVVLMETGPGAQAWARQLQEQGNVARILPAGPVAKHRIGPKNDRNDALAILSAGRNPKVLAVPVKSATGLAMQALHRARQGYVRRRTAISNQMRGLLLEHGVALAQGDVAISQKIPRLLEDATQPVPHLLRELIDELLAEWRHLGERINVLTGRLEVVANTDQTAKRLMTVRGIGPIIATALVAKETQPERFANARQFAAYFGLVPEQHSSGEKVRLGDMAKRGDGYIRSLMIQGAHSVLQQVRPDSEQPDDRRLLRWLSRLGRKQTAVRLANRNLRIVWVLLQNDQTYRRQPANGQQAAMSH

SEQ ID NO: 448960 - protein, 353 aa, unidentified
MLAELVDAVVGVDTHRDTHQVEIADRHGTPIAICSITNDTTGYAQLLAWIFDHAPGPRLVVSIEGTRSYGLGLTRAITAAGLDVIECEQPNRRARRGRGKSDAIDAHLAVLAALQLNADRLPTPRADGDREALRILLSARNELTTVSTAQTNRLRALLLGGDDADRHLARAALTDPVLAGLARRRQPRDASYEQAVRHTEIRRLAIALREAARALKGNRAQLHTIADSLAPGLTDLHGVGPVSAAQVIVSFSHPGRCRTDAAFAALAGTSPLQASSGRTTRHRLNRGGDRALNRAIHTIATTRMRSCPKTQAYITRRTAEGMSSREIRRCLKRYITRQLYRTLTTAMITTAPA

SEQ ID NO: 448961 - protein, 333 aa, unidentified
MVDGTKGSHRKEGTTKMSENTINAAGIDTGKAKLDVALAGGKARLQIDNALSGWRELATWVKRHNVDRIGIEASGGYERGVVAYLREKGFTVILFQPLQIRAYAGFRLQRAKNDRIDADLIAACTAATTTVRQAPDPRFQAFCEHLTLIEQIEEDVARAKTRLEGFRDSRHREILASEIKRLKAWRTAELKRLLAALRRHDDLANRLTLIESVPGIGPRTALALLIRMPELGSLSREEAAALAGLAPYDDDSGKHQGLRHIAGGRERLRRSLFAAALPAAFQWNPSLVALYGRLTGAGKSHKVALIACARKLLIFANTVVARGTPWTEHHATA

SEQ ID NO: 448962 - protein, 429 aa, unidentified
MNEADRTRLEEFRQFRKEIRGSAEYLLVGIDVAKDKHYAFFGTATGKTLFRRLVFENNLEGFRKLLAQAEAMKVQGGLKKVVFGMEPTANYHKPLGEHLIRCGRQVVLVSGVAAHENRKTLDGRWDSNDTRDAANVADLVSQGKCLFYEFPVGALQDLRNLLSLKRRFKRVEHGYRVRIRNHLVARYFPELDRYYKQSESVSLAIVRWCLDPSEIAGLEYKRFVEMVAPGKGGGSRENRLQTIWKMAVESVGCEAGPAVEFEAQVMVEGLKQVREAIQAIEEKIHEACSQVPEYEFLLSIPGFGPDVSSKVLGAIGDPFRFQNGKQVLKMAGLDLNAERSGKTSASAIPVISKKGKADLRYALYQAAMIASIKNNAFMVYYTNKLRGREREPGIKTKMRVKLAAKLLLIAWALMKKKEPFNPGYLAVAS

SEQ ID NO: 448963 - protein, 395 aa, unidentified
MFIVGIDVAKRSHEVCMITSDGQTVQRPFSIRNNCTGYNLMLEKIRKHTNIKSQIVFAMESTAHYWLALFTRLRKDGYHVILLNPIQTSAMRDMFIRKIKTDAKDSFIIAELIRFGRYAESNVAQDRLLALKELCRNRFYLVDMAGDLKRKLIALIDRVFPEYEAQFDTIFCKSSVALLKKYPTPQKLSNAHLDKLTELLWNSSNGHFGEWKARELKDLARNSFGVEDCDGAYSTLILLMLDQIQSLSGKADALEKEISRLFQSFDTTVTTIPGVGPIIGAVILSEVGDISRFSSADKLAAYIGVDPSVNQSGEFQAAHAHMSKRGSPYLRRCIWMASQVAVQRDPMFRAYYEKKAAEGLKYMTIIGHVTRKMTAVVFAILLDHKVYEPVLPTAA

SEQ ID NO: 448964 - protein, 473 aa, unidentified
MSKGNGMTRGDRRRNARREQLRGMLPRDGAVIGIDLADEKQALAVIDHDVRVLARKTVRVKAFRLGEALDWAAGQARAKGFTSVTVACEPTGPRWLQVQRLCAERGLRLVCVQPLVSHIARQQQDYTAHKTDEADCVMIARLAAELHCYIPEELDEVWADLRHLGRRRAALITSETASVQRIRDFLSVAWPTVTEACAKPFESMTWLAALQAVTSRCGGQPGKLAGIGLEAFTALVRDALPGWGGQRIHGPICKAVFATLTSTEGVVWAHRRGLLRRVAAELGDLQRARAQRQETEAAMTAALGDLGLARLGDIPGLTATGAAAILAETGDPKRYDTSSSVVKHAGLSPSENASGAFDGEAHISRRGRPGLRLTVWRAVWAVLIHNPVMAAKYAAMTQAADQAADQARAGGSGHATSAAEAARRRRAKARVACAAALLRWIYSMVVHGTCWDPGVAAGRKDTLAAPSCQPEAA

SEQ ID NO: 448965 - protein, 343 aa, unidentified
MQDVATVGLDIAKQIFQAHGADASGETLFNTKIKRENVLEFFSKLKPCLIGMESCATSYYWARQLLEFGHDVRLIHTSYVKPFVKRGKTDANDAEAINVALTQKTMRFVPVKTLNQQAAITIFRTRSLFVSQRTQLVNALRGHLAEAGLVAAKGIQNYSKLVNLMETAADTVLPTVMKQALTDICDQIHRLNDLVTKLDKEIERRVRHDENACRLLTIPGVGPKTAMCVIATIPDIHRFPSGRHFSSWLGLTPRTHSSGGRSVLRRITKMGNSELRTMLYLGGTVIMMRDKKTPIGRWAARLRAGRPYKVVVIAVANRIARIIWALLTKGGVYDPTYGREASA

SEQ ID NO: 448966 - protein, 342 aa, unidentified
MLYVGIDIAKNKHDVTALNVPGKTVLKPLTFSNNKAGFELLDLSLRQLNQDCLIALENTGHYAFNLLNFLHEQGYKVYTYNPLLIKEFAKSLSLRKTKTNKKDAHGIALKLLSDPNREQFQHDNRQVDLKILARHIHRLKKKQSDWKVQYTRCLDIIFPELDKIVGKHSEYTYQLLTRYPNPQKRIEAGFDKLIEIKRLTASKIQDILSVAPRSIGTTSPAREFEIIEIIKHYKRLIDKAKKCVNDLMAEFNSVITTVTGIGGRLGAVILAEIRNIHAFDNPAQLQAFAGLDSSIYQSGQIDLAGRMIKRGSPHLRWALIQAAKACARFSPAFKAYLKTKLE

SEQ ID NO: 448967 - protein, 346 aa, unidentified
MLYCGVDLHKKFSYITTMDKEGKYKEQKKVINDELPHYFDSLSEDTKVAVEATSNWYNFYELIEDKVSSVDLAHPLKTRAIAEAKVKTDKVDSTILAHLLRTDLLPTSYIPPKEVRDTRELLRYRASLVRLRTQIKNKIHAILLKNGISHPFSDLFGKGGLKFLKELPLREAYKVPLEGYIQALENLSFLIKEISKHIDTLANKDDNVKLLMTIPGIGAYSAMLIMSEIGDIARFHSKKHLSSYAGLVPSTRSSANKIRHGHITTGGSKWLRWILIEAAQKAYLYKGPLYSFYQRIRYKKGYQKAVVALARKISIIIYYILKNKVTFQYFISNYRSSQPVDYMVSK

SEQ ID NO: 448968 - protein, 407 aa, unidentified
MPLFVGIDVSSKNLEACLMDDAGETLATRTVTNNLPGATELKAVILQHVKKDDSIQIAMEATSVYSWHPAMFFHEDPELKQRQTKVFTLNPKLVKNFKRAYAEMDKTDPKDAWVIADRLRFGRLPKSVIQSEQYLALQRLTRMRYHLVHSLTREQQVFLNHLFFKFSAFNLEVDTSAFGHAITELLLEAYSLDEIAQMPLEDLAKYLQTKGRGRFSDPEDVAASIQKAARDSYRLSKCVEDSIDLILGSSIEIIRHLKRQIKDLDKAIARVLDGLPNTLETIPGLGPVSCAGILAEIGDIERFENQAAIAKFAGLFWPRHQSGDYEADDKMLARTGNRYLRYYLVEAANLVRRHEPEYRAFYQKKYREVPKHSHKRALVLTARKLVRLIDALLRNDQIYAPKKKVTR

SEQ ID NO: 448969 - protein, 424 aa, unidentified
MSKKKGILAGLAALYARVCGLDVHKKVVVACVRILDPKDGTVQSTLRKFGTMTADLIELRQWLAEQRVTHVAMESTGVYWQPVFNLLEGHFQTWVINAQHIKKVPGRKTDMKDAEWIAQLMQCGLLRPSFIPDRQQRELRDLTRQQTKLVQQRNAVDNRIQKVLETANIKLGSVASDVLGVSGRKMIEALIGGEKDVTVLAELAQRKLRDKIPQLQRALEGELTDHHRFLLRQLLGQYDFLEKEIASVSERLGAVAPPSFRAAVEQLDAIAGVGERGARALLAETGTDMSRFPTHKHFASWAGRCPGNHESAGKRRSGKTPAANRHLDAVLTEMAHAAVRTKNSYFKAQYHRLAGRRGKKRAIGAVKHSLLVTVYFMLRDNKPYKDLGVDYFDKLNPQQRIRYHVRKLQELGQEVELSSMADAA

SEQ ID NO: 448970 - protein, 422 aa, unidentified
MSQKLEIQYAAFLAIDWADQKHVWSLQDANSSTCERGEVDHMPEAVEAWVAQITQRFAGRPIAVAVEQSRGALVFMLSKYEQLHIFPVPPAMTANLRKAFYSSGDKTDPADADLLLDLLQRHREKLRRLSPDTEATLLIQNLVEERRKLVDEKTAQSNRLEAHLKIYFPQIPRWFDDVGSPLVCALLERWATLEALQKARPETLRSFFRKHHSRKEELIESRIKAIGEAMPALKDRAVVEAKAAVVKVSVQMIQVLQEGIEGLNRQIQEAAEAHPDFFIFDSLPGAGAVMAPRLLAAFGSQRERYQNAAEVQTFAGIAPVTESSGKSRWVHFRFACSKFLRQSFHEWAALSIPRSQWARAYYELQCRRGKKHHAAVRALAFKWIRIIYRCWKERVAYDENVYLAALAKHNSPLVAATKAVAL

SEQ ID NO: 448971 - protein, 343 aa, unidentified
MNTVTLIGIDLGKHCFHLHGQDVQGRMIFRKKLSRSQMLTQLANFPVCRIVMEACAGAHWIARRLSAMGHEAKLISPQFVKPFVQGNKNDFADAQAICEAASRPNMRFVSPRNESQQTISATHRVREALVRDRTSTANQIHAFLLEFGISLPKGPAIIKRLPAVLAEQEAELPPRLIALIERLRDHHKYLDEQIKVVERELAQQLAEDERSQRLLEIPGIGPITASVLAVELGDAHQFANARQFAASIGLVPRQYSTGGKPTLLGISKRGDKNLRRLLVQGARVIMQRIQDRNDALGEWTRNIMCRRHSNVVACALANKMARIAWSILAKGTHYQPRSAVAVA

SEQ ID NO: 448972 - protein, 315 aa, unidentified
MTKDTIGVDISKDHLDAHRISDGAARRFANDTAGHSSFIDWLGQAGPAHDIRVVYEPTGPYHRAFERRVDRAGAALVKVNPRQARRFAEATGKLAKTDRADAAMLARMGAILELEARSVRGPLFNDLKDLHMAREALIKNRTAARNRAKNLTLAILKRHNAEQLRQIEHQMIAIESEIMLIIKHDPDLAGRFDILVSIPGVSKVTAFALLIDMPELGTLEQGQAASLAGLAPIARQSGTWTGRAFIRGGRANVRHALYMPALVAMRFNPDLKAKYDQLKAAGKAPKIAITAIMRKLIVLANALLRKRRKWVPSLP

SEQ ID NO: 448973 - protein, 416 aa, unidentified
MNETHGEEYRVYVGIDWASAIHRVVILDAARRMLAEQEVAHTGAALAALADELIARAGGDAAAVAVAIEVPRGPVVETLLERGCAVYGLNPKQLDRFRDRYSVAGAKDDSRDARVAAEALITDRAAFRRLRLEEPGVIRLRELGRTEADLQQELTRLANQLRDQLLRYYPQALALCPAADEPWLWALLAVAPTPAVAARLSLGDVRTLLRAQRIRRLTAEAVLAQLHTPALRVAPGTAEAASETIGWLLPRLELVAEQRQACARRVQEVLDELTTSGQLTEQRDVLILRSVPGIGRVVAATLLGEAAAEVALRDYHGLRTHGGLGPVTKQSGKRRVVQMRYACHDRLREAFYHWGRVSVQRDPRSRAHYAQLRKCGHSHGRALRGVVDRLLAMLMAMLRTQTCYDPSRRQPLPQTS

SEQ ID NO: 448974 - protein, 481 aa, unidentified
MSQPKKHSPRTGKEKPAAGPGKRGGKRTGMCLEDRPILEPNAAGIDIGAREIFVAVPPDRDEDPVQVFSTFTEDLERMAQWLVSCGVSTVAMESTGVYWIPLYDVLEKHGIRPCLVDAHGMKNVPGRRTDWHECQWIQFLHSVGLLRAAFRPEGDVCAVRSLMRHRSDLVQMTNQHIQHIHKALTQMNVQIHHVIDDITGVTGLAIVDAIVAGQRDPLELAKLRDRRIKASEETIVKSLKGNWRPEHLFTLQQSRQMYRHYQEQIAACDEEIEKLLVAFQPRVDPAEKPLPPDRKKRKRGGQKKNAKTKQGFDLRSESYKIFGVDLTQIPGLMAMVLTLFSEVGRDMSRWPTAGHFVSWLALCPDNDITGGRVAWRGMRKVHNRAGELFRMAAYSLHHDKSPLGDYLRRMKSKLGPPGATTATAHKIAIIFYTMVKKQVEYDATLWAERDAQRGKRFEAKIKRQAQQLGYKLVPIEEKPAA

SEQ ID NO: 448975 - protein, 380 aa, unidentified
MKKLSIGIDCHARINVIGLAFDDMKPPVLHGKASADLNRTVDAIRKILKKYVLKKEDVIICYEAGPTGFVLARRLIKLGFECIVVAPSLIPTKSGEKKKTDRRDARKLAGYLRSNDLRAVHIPDVEDEVIRDVCRGRTDAAQELARTKKQLLSFLLRNGYHYTGKANWTEAHMRYLRELVLAHPSQKLILEEYIQRIDALEQQIRRIEDQMRELLQNWQRKPLVEALMGMRGFQLVAAMVTVSEIGCFSRFKHPKQLMAYLGLVPSEESSGDKRRMGSITKCGNGHARWMLIESAGCYRLPPKISKALSVRQEGLRREVLAVSWHAQNRLNKRWFKLSLRGLHFNKIRTAIARELASYIWDIAMIIEKQQVPCASSAVEA

SEQ ID NO: 448976 - protein, 353 aa, unidentified
MEYGAIDLHKVRSWIRIVDAEGRPVLETRITTSRAEFTRVLGARPPMRVVVESSTESEWVAQTLEALGHDVIVADPNYVAMYGTRDRKVKTDRRDVTALAEACRTGVYRRAHRVGTAARDLRRTLRVRTQLVRVRTSAICLVRSMLRQEGLRLRSGNAETILRRLDQLTVPAELVMILTPLRALLAHVNAELHALEQTLTTAARHDPRVQRLMTAPGVGPLVALHFVAVLDTPARFGGSAARASAFVGLVPSEDSSAERRLKGHITKAGPRDLRALLVQASWTVWRSKTADAQPLRTWAYALAARRGRRIAVVALARRLSRILYALWRDETEFRVPVRPAPAAGRDTRCEIGG

SEQ ID NO: 448977 - protein, 364 aa, unidentified
MHATTKPVSAESSAVMLAIDLAKDVFELAFADADGHIVERKRLKRGPFATCLQNRPALRIVMEACGSAHAWARRFARYGHEVTLLPAQHVRPYVRRNKTDRADAAGLLEAARCGDIRPVPVKTPEQQGTQGLHRIREHHKAQRTAAINLVRGLLREFGIAIPGGADKVRPATLAALEDGDNDIPMALRHALAGLLDQITACQEAMQAIEKQLADIVQRDTRSQRLMAASGVGLITATAMSAGIGDFARFPSGRHFASALGLTPREYSSGGTRKLGRITKQGDVYLRTLLIHGARSALVVAATAKKRGQPLDRTQHWALALAERKGHNKAAVALANKTARRLWAAEHHGTSFDPEHISQRKTRAA

SEQ ID NO: 448978 - protein, 342 aa, unidentified
MLVMIGIDPHKATHTAVVVDDDENVIGEFTLEASSSQAECLIGWAEGFAKREWAVESGNGLGYLVSRQLVAAGETVFDVPPVLASRVRLLGSGRSQKNDRNDARSIAIAALRSDRLTTVQPDDQVVVLRLLVKRHRDMARLRSKHCSRLHALLLEVKAGGIGVKISVTNASRLLDSINVGDEATRYRVLVGREVVDDIARLDQSLKASKKRIATAVTVSGTSLTDIVGVGPVGAATIIGYTKDVTRFPTRGHYATYNATAPIEVSSAANTRHRLNLRGNRILNHAIHIAAVTQLRHDTNSRIYYQKKITEGKTPKEAIRALKRRISDAVYKSLIADAAKTTN

SEQ ID NO: 448979 - protein, 366 aa, unidentified
MDPIYIGVDFHARQQTICYLKTETGELVISELKHEDKEQLRAFYQQFQGHVIIGLEASGYSPWFEAMLEQLGKEVWLGDATEIRRRARWRQKSDRRDAELIWDLMVHDEFPRLHQPTAQSREILRMLRYRQKLIKVRTMSKNSLQAIALQAGLAKGNRLFTKDGQAEFKAAAMSPALQWQRDHWFELLKPLNEQLLETMVWFKAQSKDDLVIARLRTHPGIGLLTALCIWHTLQPVSRFRNQRKVVAYAGFDPMIRSSAERAIYLGISKAGSRMLRYLLVEAVHTALRYDDDLKRFYKRVAERRGRPKAKVAAARKLLIRAYIMLRDEIDYAEFRRRAVAVDLPDEVKGQAKVPEVLIRKSTSPGA

SEQ ID NO: 448980 - protein, 342 aa, unidentified
MEFAVTIGLDLGKSVFQVHGVSAAGAVVVQRRLTRGKVLAFFAKHPSCLVGMEACAAAHHWGRELSKLGHRVRLMPPRYVKPYVKRQKNDAADAEAICEAVTRPTMRFVEIKTCEQQGTLVLHRVRLMLTRQRTQLSNAIRGHMAEYGLVAPVGRNGLQRLIAILGNPDDERVPAVARASLAPLVCQFGLVNDPVLDNDRRVRASARSTEIGCRLMEVPGVGPVLASAMVAAVPDPAAFKSGRDLAAWIGLVPRQNSSGGKEKLGGITKQGDRYLRQLLVAGALAVIRYAHRHGTKRPWLVHLLARRSPKIAAVALANKMARMIWAMMMTGERYREPVVAAA

SEQ ID NO: 448981 - protein, 402 aa, unidentified
MNCVGIDVSKGKSMIAVMRPFGEVVVSPFEVRHTASELSELARLLKNLDGETRVVMESTGNYHAPVAWLLHGAGFYVSVVNAMLVHDYGNNSLRRGKTDKKDAVKLANYGLDHWLTLPRYAPEEDTRLMLKTCYRQYQQYSKVQTMLKNNLISLLDTAFPDANRLFTSPPRADGSEKWVDFVATFWHCECVCGLSKKAFTAKYQKWCRKHGYNFSQDKALDIYASACGRFGVMPKTNTAKLLVEQAISQLQTTSAALAALKQEMQSLAASLPEYPVVMEMFGVGPTLGPQLIAEIGDVRRFHSKKALVAFAGIDAPPYQSGQIDVRSRSISKRGSASLRRTLFLVMGVLLQCAPMDEPVYQFMNKKRSEGKPYRVYMMASANKFLRIYYASVKAYLDSLEHD

SEQ ID NO: 448982 - protein, 360 aa, unidentified
MTESTPIVAFDQHAASVMAAVLLPGERTPALHPLPPDFPSIRRFLERLALPGVRCCYEAGPCGFDLQRTLLTAGIACDVIAPALIPRRAGDRVKTDRRDAAQLAVLYRAGALTAIHIPTEQEEAVRDLLRCREDICTDLLRAKHRLSKFLLRHGRRCPDGRAWSKRYIAWLTGQRWPLSALEQTFTSYRRAIDDTVARLRSVDADLQAALTVAPLAPRVARLRCFRGIDDLTALTIAVELGDATRFPAARQVMGFTGLVPSEYSSGATQKRGGITKTGNTHLRRVLVEAAWHYRHRPAVSHRLRIRQQGAPPAAIRVAWSAQHRLHARYRRLLARGKSPQLAVTAVARELSAFVWAALAP

SEQ ID NO: 448983 - protein, 347 aa, unidentified
MERISMIGIDTAKNVFQVCGLDDSGSVVMNIRLKRRQVLAFFEKQPACTVAFEACGASYYWARQISQRGHLVKLVPPPFLKRFLNRHKNDARDAHALALAGRDRLLRPVPVKSETEQADLMLFKVRSLLVRQYTQASNSLRGQLAEFGLTANTGTKGLEGLVEKIEAGTVMLPDMAVAALAVLIRHWRNLSVEIGRLTARLIQQVKGNERITRLMTVPGVGPIIACVCAAKLGDASRFACARDFAAWLGLTPKQNSTAQKRRLGSITKAGDEDLRSLLVLGAATVLIRAKRKPDSADPWAKAILKRRPFKVAAVALAARNARTLWAILRDGSVYEPRRSRTLTSNPA

SEQ ID NO: 448984 - protein, 336 aa, unidentified
MERHYVGIDLHRRRSVIFTMDGDGQRLGCKRIANDPMVLVEAVTEFGPMPEVVIEATYGWYWAVELLREEGMNVHLAHPAGNDWGKRRVKNDERDARDLADLLRLGRLAEAWIAPKEIRELRELVRYRYKLVNLRTGLKAQVHAVMAKEGVLPALGEMFGPGGNAQLDAMDLAESYGVRVRSLRDLIAVYDAEVAKLERDIHRRLKGDPGYEAIQVIPGVGRVLGAIFVAEIGDVTRFKSPEALSSWAGLAPRHHESDTKVIRGQITKMGSKMVRWAAIEAVSGRRGGTKLRQDFHAICERRGKYKARAAVARKLLTLVYYGLRDKEIPCLAEEAS

SEQ ID NO: 448985 - protein, 411 aa, unidentified
MEQIHDRVAGLDVHRDQVAACVRTPGPRGGVQAEKARFDTTAGGLAALAEWLAGHAVALAAMEATGVYWKPVYYALEGRFPVWLCNAHHVKNVPGRKTDMSDAGWLADVAAHGMVRPSFVPPPPIRELRELTRYRKTQIDVRAAEIARLEKVLQDAGIKLTSVASKVLTQSGRAMIEALIAGQRDPAALAGLAKGKLRPKIPQLTAALRGHFGAHHAIVAARILAHLDFLDETIGALDAEVAARVAERYQSAARLLAEVPGLERRSVEVIIAETGADMSRFPTPAHLASWAGLCPGNHESAGKRRKVATTPGNPWLRRTLIESARAAARTRDSYFGAQYRQIARRRGPNKAAVAVAHSLLDVIWHILTTGEVFTDLGADYFTSRQDKEHQTRRLVSQLEKLGYTVQLTAAA

SEQ ID NO: 448986 - protein, 338 aa, unidentified
MTSFVGVDLHRNNFTYCIRVNGEERKIGKCEITELKGFAAMLGPNTAMVVEATGNTFMFCSSLKAYVGRLVVVNPSQFKVISMSTKKTDKHDAKVLAEFLEKDMLPEVRMKDDLQAKISSLTQTREKLVQLRTVLKNKVNNLLAANFTVLKREELSTEKGLVKALSYRIDPITDTEMLVVVEQIRSLNKSIEKLDKAIEDHGNKMDGFSNLKSIKGIGTKGAAILLATIGNIHDFRSSKHLAAYIGIVPRVSNSNDTACHGRITKNGSKTARTALVQCALIAKRYSPYLNAFHESVKSRRGGAKANIVLARKFLDIVYKTLKNNWMFEDFSQFKLVKN

SEQ ID NO: 448987 - protein, 331 aa, unidentified
MGQSYVGLDVHSRESTFVIEDAAGRVTAQGEVLTTPAGLEHLRAAHRLPPDTPVALETGTVAFFVVRQLAAIGLAPQVVDAHEVRLKAHRPTQKSDRRDALELCEGLRRGIYRAIVHVPRGDVLRRETLSRRRHFVRLQSAQISAVKALLRAAGLGRLSRSLGSEVGWATVLAALAEHGAVRAYVEQHRALWRCAREQIATLEAALAQQQVAFAEPLHRLQTIPGVGPIVAATALAVCSDVGRFPDAKHAASYAGLGPTTYQSGERDAHGRITKRGAAELRAMLCAAAHHASRLDHPLQPDFAALCARRGYKMAVVAVAHRLCRIIFAMLR

SEQ ID NO: 448988 - protein, 370 aa, unidentified
MKKFIMYIGLDVHKNSIEVAFADTGRDGEVRSYGKIDGNLTALDKVIRKLEAKGAELHFAYEAGPCGYEIYRHLNSNGYDCIVVAPSMIPRQSGNRIKTDRRDAQMLARLHRAGELTSIYVPALEDEAMRDLTRAREDAKSVERKAKQRILAFLLRHGYRYSGKTPWSRAHFRWIAILKMPHPAQQIVLQESLDALSECTERVNRLTEQIQRLLPQWRMFPVAQALQTLRGVSLIVASTTIAELGDLTRFASPVELMSYLGLVPSEHSSGEQTKRGSITKTGNGHVRRVLVEAAWAYRLPARVSTALHLRQEGMPLNVCAISWKAQLRLCNRYKRLLERGKARQLIITAIARELCGFMWAIANEVETPTA

SEQ ID NO: 448989 - protein, 455 aa, unidentified
MSPPRKTRSPKAGAPPLPNLHLHAAGIDIGAREIYVAVPPGTCARAVRAFPTFTADLLALRDWLKDCGVTTVAMESTGVYWIPLFQLLEAAGIEVCLVNARHCQNLPGRKTDVQDCQWLQHLHSVGLLRGSFRPAGQVCAVRAILRHRDALVRGAGRCVSHLHKALTQMNVQLHHVISDLTGVTGLAILEAILAGERDPRKLAALKDHRIKASREVIAKSLQGDWRPEHLFTLKQTHALWQQHQTLIAECDAQIEAMLRGFDARVDGPAAGLAPAKTSHRKPQKNEPQFDARTECHRVLGVDLTAVPGFATPTVLTLVCELGPEFAAKFPTAKHFGSWLGLCPDNRITGGKIYSVRTRDVKSRVAEALRLAAQSLWQAKNYFGDLYRRWKARLGSPKAITAMAHKLARILWHLLKFKEPFNPEVFAQAEARQQRKKLARLQHSAAALGLTLVPAQ

SEQ ID NO: 448990 - protein, 380 aa, unidentified
MKTKLYIGLDVHKNSIVVATADAEGSKPVHYGKWGGSNLAAERGLVKLRDSLGVEKEEIRICYEAGPTGFVLFRRLNQLGYDCIVVAPSAIPKASGDKVKTDRRDAKKLARLFRAGELEGIHVPEAKDEAVRDLCRARTDASQALAKAKQQLGSFLLRNGIRYTGKTNWTQSHMNYLRKTRLADPAQQIVLEEYIMEIDAGVQRVKRLVEHMEDILAKWDRKPFVDALKCFRGFQTVAAMTEVSELGDLSRFSHPRSLMGYLGLVPSEESTGSKRRQGSITKTGNGHARWMMIECASHYSHPARVSEALSARQVGQSAEVRAVAWRAQQRLNRRYLRLKARGLNRNKVVVAIARELCGFLWELHAVVAEEQKATQTATAK

SEQ ID NO: 448991 - protein, 388 aa, unidentified
MNVKKYIGMDVHQETISIAVMTGDGKLVMESIVETKASTILQFVQGLHGDLHVTFEEGTWAAWLYDLMKPHVTDLVACDPRKNALLKDGNKSDKIDARKLADLLRGGYLHSVYHGENGLRTLKELARSYLTISQDLTRVMNRVKALYRSWGVVCGGQQVYAPRHRAEGLNEIGESGVRRRAEFFYQQLDAVRALRQAVRRDLLAESRKHGATKLLRQIPYIGLIRAALLIALIQTPHRFRTKRQLWTYSGLAIETRDSAQYRYVAGQLQRSKKPQQLRGLNENYNHDMKAIFKSAAAMASRREGPFQDFYLKLLTNGMKPAMARLTLARKIAAITLILWKIRSSFRRGTTENTSSLSISGREAVPSLGIILGAGQSVLLETLGSRESI

SEQ ID NO: 448992 - protein, 342 aa, unidentified
MDQISRIGMDTSKHIFQLHGVNAAEAPVLRKKLRRKEMVTFFEKLAPTVIGIEACSASHQWARLLQSFGHSVKLIAPQLVKPYVKRGKNDAADAEALCEAMSRPTMRFVPVKTAEQQAALMLAGVRDRLIRNRTQLINAIRGYAGEFGFTAAKGKAHLDPLLERIQADESLPALARELFAAQAKEYAQLQAQIDEVDARLMTWHHADECSRRLAKIPGVGPIGAVLLKMKTPEPELFRSGRQFAAWIGLTPKDHSTAGKVRIGVITRAGDEGLRSVLVVGATAVIQHGRRGGRASRWLTELLKRKSPKLAAVALANKMARIAWKLMVTGENYVAKSALAGAG

SEQ ID NO: 448993 - protein, 325 aa, unidentified
MIDGFVGIDIGKFKFDVAVLSKHNPTKHRTFANDQEGFERLLLWLESELSVFEAHFCMEATGRYGEALAYFLFDHGHSVSVVNPSCIKNYGRSKLKRTKNDKIDAVLIATYCQKETPALWQPLPKESRELQELTRELYRLKDLLGQEKTRLKAGTHTAPVLSSIESRINFLEAQIQAIETEIESHIDQSPKLRKQRKLLVTIPGIGEQTANALLAEIPDIHRFKGVRQLVAFAGLVPSEKSSGTLRGQTRLSKVGSTRIRKLLYFPAVSGKRYNPVIIAFCDRIEAAGKNKMVALGGAMRKLLHIVYGVLKSGKPFNPKLHLQRA

SEQ ID NO: 448994 - protein, 315 aa, unidentified
MAMPVSVTKPIVGVDVAKNELVIYHAELDVLTAIPNDKAAIKRWLKALPGPVAVAIESTNIYHLEFADLAYEAGCVIYMVGGYELHHYREGVKIRAKTDALDAKLLARYLKNEGHELHPWTPPSPLYRQLLSLFRRRAALVQARVALVQSWANEPLLKSAFAEQIAAMQRLETLIEKTIKDHLRDAGLLGQLNRCLKVEGIGFLTGARLLTAFQRGDFRNADAFIAFLGMDLRVSKSGQKDGRRSLSKRGDPEVRRLLHNAAMSASRTSAWKGFYEKQRARGFTTTQALVMLARKLARIVFALLKGQSEYQPKAA

SEQ ID NO: 448995 - protein, 405 aa, unidentified
MTSPRRVVIGIDTHLDTIHVAAITDTGQLLSDAEFCTNPTAYWAAICWARSFGEILAVGVEGTGSYGAGITQALQVNDIHVVEVTRSDRSARRRQGKSDPLDAYSAARTVLAGHGLAVPKDPHTGAPKALLVARRGAIKARTAAVNQIKDLLVTAPAELRERYRRYPTTMRLVQALARCRPNAHEDATAASVLFACRALAQRIEFLERQDRDLSAEIDTLTTALNPALRAAYGVGPDTAAQLLITAGTNTHRLRSEAAFAMLAGVAPIPASSGKTTRHRLSRGGDRAANNALHHIALVRWSHDRRTRDYVDRQLAAGRSKKDILRLLKRAIAREMFRHLTSQCPIDDYSDLRPARQARNITLTAAADHFSVWPNTISRLERGLKRDDTLAANYRLWLNTQLKDAA

SEQ ID NO: 448996 - protein, 313 aa, unidentified
MSEYYVGVDVCKEYLDVASSDGTSLRVGNDEAGHQELVTRFSAAPPVLVLMEATGGLERALAVQLSAAGVALRIVNARHVRHFAKATGLLAKTDRLDAQALLHFAQTLKPEPRAIQPEQTLALQALIVRRRQLVEMLTMERNRLRTAHRGVRKDLQSSIRWLEKRLAGVDDDIDRSLRECGVWREKVELLESVPGIARVISVSLLASLPELGQLNRHQISALAGVAPFNRDSGRWQGRRSIYGGRPLVRNALYMAVLVGARHNPVLRNFYQRLRGAGKPAKVALTACMRKLLVILNTMLKNGQRWGDHVQLQA

SEQ ID NO: 448997 - protein, 482 aa, unidentified
MKKRTIFQQQSQELMRIFEEAATSKKVLVVAMDYAKKEHTIMFCNGDGYILRKPFGVKNTPEGVSYLIEQVHKTCNYHKIKRKHVFYGGEDCGSYTENFAQCLREHGWLVAGVNAQDAKKQRENIQASTDRLDLLGIARMLINRRGNCSPCQSGAYRNLRTLVRHRRKLVVLTTEERCRMHCVVDRLFPGFLQERNSGLFPFHEPSLRVMEGRFSAAQIKRRKRATLVDLLARAGAQEPAQKAKKLQEYAANVLQPPKEYIATLQTSLTQHVGLYRCLKSNITSLEREMAIWLAQTQGAFLMTVRGIGMVLAAGVTAEIGNPATQKPVNNLVSYAGIIPRVSQTGGSEGSTYVGSVAKRCNRILKDYLVQSASHLGLHGADDLMADHKRRDAGGQHANYGIARRYLRIGMHMMRHCHIYLPEDLRENSTFEARREYYQVTWPYLLDKWKKYGAHEVAFAPENPLGQWRDMVQEVYNITLRTK

SEQ ID NO: 448998 - protein, 355 aa, unidentified
MNATTVAVDLAKNVFEVAVADRNWKVIERARLTRLQFERWFDNRECGMVVMEACGSAHHFARWLNGLGFTVKLLPAQYVRAYVKRNKTDAADAAALLEAARANDIKPVAVKSIEQQALQALHRTREAWKSTRTRRINTLRGFCREFGLVVPEGAATGLAQMARYLADEQSGLPLILRSSMRLMLDEIRLMEARMAQLEAQLGDIAKHSPACQVLLTVPGIGLITSTAMVAAVGNPGSFDSGRRYASFLGLTPREYSSGNTRYLGRISKKGDRYIRTLLTHGARSVLRSATVAHRAGREIDRLKRWALEVQGRTNHNKAACALANKLARIAWAVWVKHERYRGQVLPAPQSTLCSI

SEQ ID NO: 448999 - protein, 425 aa, unidentified
MKKTDYLSTLFVGIDIGSRTNVVSAIDFNQDFFIRMKPVPNAKEGAETLESLLVDVLSAHHEFNHVIIGLESTGFYGVHIANYLSASGLLAPFGTEVYCLNPKEVAKYKESFNSLDKNDGIDSFVIADFARVGRISIKPWRGAQYLALQRLTRHRLHIAECIAREKTYVLNNIFLKFSEFAMLKKEDHPFSNKYGATAEAILEQYVTNDDIIEASIEELVELIESKSRGRITDPEETVKILKAAANGSYRLDKVVAEPITLSISSSFNCIRAFEKELKAIEKAIEHTVQGLNPVEYQVLKSIPGIGHVYAAGILAEIGTIKAFTDNGALAKYCGIVWKENQSGNFRAEDTKMSKAGNRYLRYYVIEATGSVINNCPEYKDFYDKKFAETTTHQHKRALALTSRKFLRMLFGLLDKSQLYSLERSR

SEQ ID NO: 449000 - protein, 412 aa, unidentified
MKRIRDRVAGLDVHRDTVVACCRVVDPDGEVEVTKQSFATTRRGLSELATFLSDASVETVAMEATGIYWRCVYYALEGMFNELWLCNAQHVKNVPGRKSDLSDAEWLADVAAHGMVRPSFVPPPEIRELRELTRYRKTQVDARAREIQRLEKALQDAGIKITSVASSVWSASSRLIIEALIAGTRDPKVLAEMAKGRMRVKIPHLEEALSGHFGAHHAILCRQIIGHIDFLDRSIGSLTEEITTRLVPFESAVAIVTSIPGIARTTAEVIIAETGADMARFPSPGQLCAWAGVAPASYESAGKRRPAGTRHGSPWLRRALVEAARAGARTKGSYYSAQYVRIARRRGPNRACVAVANSMLFTIWHLLSNGQLYEDPGADYFERRHDPVVEAKRLARRIEALGFDVSVIEKAA

SEQ ID NO: 449001 - protein, 341 aa, unidentified
MKNKSFIGIDISKNVIDVSIFCEETPIKDFSHDVFNNSRKGFGEMCTWLKKNHVVLSNCLFGMEFTGSYSMELEKFLYARNYQFCMLSTHVVKHYPMGPKDKSDKIDSAKIADFLYRYNGTECVKPYKMPDKTMQRLKALMNERKFLVEQRTCFMNRRQLCTTKEDAQLYDGYIKKFSRDIDNIELEEQKLLATDDSLLATYKNLLTIPGVGFVNAINVIVITRNFTAFETARQYASYVGVAPHSHTSGTSVRWRPRPSARCDGQAKADLSMAATVAVQYDAELQSFYNRKLGGKQDSDTKRKALNAVKFKLVLRMFAIGKQNRKWEPLDSKSSNEKLAIS

SEQ ID NO: 449002 - protein, 349 aa, unidentified
MSHKLNSGVAVIGIDIGKNSFHVVGLDQRGAIVLRQKWSRGQVATRLANVPPCLIGMEACVGAHHLSRKLTSLGHDARLMPAKYVRPYSRGQKNDFRDAEAIAEAVQRPTMKFVATKTAEQLDLQALHRVRERLVSQRTGIINQIRAFLLERGVAVRQGLRFLRAELPRILATPCDALSPRMVRVIEDLAVDWRRLDERIQGLSSEIEVLARRDAGCERLMSVPGIGPIISSAMVAAIGSGDAFAKGRNFAAWLGLVPKQISTGDRTILGKISKRGNRYLRVLFVQAAWVVLIKPKSWQRHGLKPWLEAAKKRLHYNVLAIALANKLARIAWSVLAHGRTFEASKVQTA

SEQ ID NO: 449003 - protein, 411 aa, unidentified
MEPKLIVAAIDVHKRMLAAVVVDEDNPQQALDQRKFGSSASELKHLSAWLIAHGVTLVVMESTAQYWRPVWLALEKDFALHLAQAQSNAGPRGRKLDYVDALRLARRFLAAELRLSFVPDGEQRSWRCLSRSKYQKRRRRVQLQNQIEALLEESQIKLSSVVTDLLGATGYRILKALARGESDPQELIKLAANNLKASPEQLADSLSGPMQDRHRKVLTMQLEELDLIDKHIAELNQQLQEALQEHQQAVLRLCEMPGLKQDAALQIIAEIGPRAAVFETPEQMASWIGVCPGREESAGESKSNRSPKGNRAMRRLLNQIAWGAARTKDSFFSELYHRLVYKLGVHKAIWAVAHRIAKVIWKVLHEQVKYIERGRLALDPIAMKRRVTRLSRQLQQLGYTLEVKPIVATTN

SEQ ID NO: 449004 - protein, 346 aa, unidentified
MTVKLMAGIDLHSNNLFCGIVDLAGRRVFEKKLPCDLESVIRALKPFKKRLESIAVESTYNWYWLVDGLQEHGYPVVLANPAAMQQYDGLKHGDDKSDAFFLAEMLRLRILPTGLICDRAVRPVRDLLRRRMGLVHKRTSLMLSLKSLHTRMTGRDLSTGRIKAMEPQEAEKLFEHPADQLITRLDLQLVEQLGRSIGQIEAAILAEVKGSAAYQVLQTMPGVGKILGLTITLETVDPKRFEGPGQYASYCRCVDSRRMSNGKKKGENNGKCGNKYLAWAFVEAANFAQRHDAACRKFYDRKKAQVNGIVATKALACKLAKAAWHMMSQNTDYDAGRIFPGVRKEI

SEQ ID NO: 449005 - protein, 330 aa, unidentified
MGTAATCFAGIDVSKDTLDCCLLVPGGKAKEHTFANDPPGHVALLAWADRHAAGRPVHFCLEATGPYSEAPATALADAGRLVSVVNPTRVKYAGLARGRGNKTDKADARLIADYAQRERPPAWQPPSPEVRELQGLVRRIDDLTEAAAREKGRLASPALTAAVRKSVARTVRFLEREAARLRAAAAALVAATPALRADRDLLESIPGVGRQTATTILAELPAVDRLPTAQSAAAYCGLSPREFTSGTSVRKKTRLSKAGNPRLRKALFLPTQTAVRFNPLLRGFFARLVAAGKPKMQAIGACMRKLVMIAYGVLKNRAPFDPAWPSRITP

SEQ ID NO: 449006 - protein, 321 aa, unidentified
MNKYKEIYGIDISKDVFDVYGSQSGHNQFKNDSKGFLSFLKYLPKDVLVVMEATGYYHYRLAQFLYKKGLAVSVVNPLSVKRFIQMKLAKVKTDKRDAKAISEYGQMNEVPLYTALTEVQSECLQLFRLLDNYLKHRTATKNKIKGEEALGIPSKFVYRSLKRNLKHLNKEVLDLEARLLALVKQDQQHQLTLLKSIPGMGVKTALFLIVITDGFKKFETASQLCSYVGITPTIRESGSSIRGRSRISKVGNKKLRNLLFLCAFSACKHNKACREIYERLVAKGKSKKLALIAVANKLLKQAFAIVKSGRPYDENFVSRLA

SEQ ID NO: 449007 - protein, 314 aa, unidentified
MTTQSPIIGIDVAKDSLSLYRADLDQYCTLDNDARSIRAWLKTLPGDCALAVEATSTYHVQLVDLAHARGHRLYVIDGYRLSNYRKGIGGRIKTDASDARLLARYLAHEQAQLRVWQPAGKAYRLLQSLLRRRATLIRSATALRQSFGHDTQFKVSMKAALSSLKRLEQRLDQDIAQALKDAGLAEQAKRCRAIEGIGPLTAAALNMAFQRGPFRNSDAFIAFLGLDVRAKESGRYSGRRKLSKQGDPEVRRLLHNAAMAASRTKAWQKLYLGYLERGLKKTEALTILARKLARIAFALMKTQQPYRSPTCTAG

SEQ ID NO: 449008 - protein, 418 aa, unidentified
MNKHNNSGKKSEVTLKRAKPRGPMRRDTKEVLAELVGKLKEKLDPKKPPATSAGEKHKRGELRPNLDRLTVGVDLGDQWSHYCILGLEGETLAEGQLRTTQEDLAEFFQALNAARVVFEVGTHSPWVQEVIGGCGHEVLVANPRMMEGPKRRKRKNDRIDANKLARLGRVDPQSLHPIQHRSREVRQDLVVLRARDALVAARTELINATRGLVKSMGTRLPKCSSPSFAEKVEGTVPAELRDALLPLVRMAAALSGCIQEYDKKIEKLGREKYGHTALLRQVKGVGPITALAYVLTLENPDRFVKSRDVGPYLGLVPKQEDSGEIQPQLGISKTGDTMLRKLLVGSAHYILGPFGPDTDLRRYGLRLCERGGKNAKKRAAVAVARKLAVLLHCLWVSGEVYEPLRQGTSATIAPAVAA

SEQ ID NO: 449009 - protein, 400 aa, unidentified
MNGCVWAGVDVGKRDHHCVVIDGEGSRLLSRRVGNDEGELLALPADVAALAEEVTWAVDLANGNVALLAMLLHAHGQKVMYISGLAVNRAAGGYRGEGKTDARDAAIIADQARIRRDLSPLRPGDPVSVELGVLTARRADLTADRTRGINRLRDALTSIFPALERALEPTRTGPLVLLSGYQTPASIRRIGKARLEAWLRNRKVRGAAALAAAAVDAANRQHTTLPAEALTAQMVHDLAAEVTALNEKIGEIDKLVERRFREHRHAAPILSMSGFGPLLGAELLAATGGDMAQFATPDRLAGFAGLAPAPRDSGRVSGNLRRPKRYHRGLQRVFYTSALISIRWCPESRQYYDRKRAEGKRHIQAVLALARRRVNVLWALLRDGRCYQPEPPRAGLAAAA

SEQ ID NO: 449010 - protein, 364 aa, unidentified
MEQITRGECGRVVVRVGVDLAKRVIQVHAVDAAGQLVTGRALARDRFIGWCAQLPAGCVVAMEASSSAHHWARKLCSLGLDARIIAAHLVKPYRKQGSSGKNDANDAAAICEAASRPSMHFVPIKSVEQQSILCVHRLREGVKEERTACINRIRGLLAEFGLVFAQSPKVLRLVLADVIEDASNEMGTLARLTLQRAHAQWRELDEHLAWCDERIAEHARTNGQVKTATTLLGVGPLTASAVVATVGDFRQFRNGAQFGAWIGLTPKQHSSGGKTRLGRITKRGDTYLRTLLIQAAKSAVLTAHRRSDRISRWLCTLRERSGWQIAAVALANKNARILWALMTKGEAFDANHLSVKPGMSPQPT

SEQ ID NO: 449011 - protein, 411 aa, unidentified
MRLFVGDDWAEDHHDIEVMDEAGKVLAKKRLPEAAAGMTQLHGLIGRFVPEDADDVEVVIGIETDRGPWVAALTAAGYLVFPVNPLQASRYRERHGVSGAKSDGGDAHMLADMVRTDSHQLRPAAGDSPEGQGIKVVARTHKTLIWDRTRQVQRLRHQLREYFPAALEAFEDLDAPDALDLLAKAPDPARAAKLTRAQVAAALKRARRRNIKDKTDAILAALRGEHLGQPPALTAAYAATVRSLIAVLTTLNEQVKTLEEQVREHFGRHPDAEIYQSQPGLGPILGARVLGEFGDDPGRYADAKSRKNYGGTSPITRASGKKKVVAARFIRNDRLIDALMAWAFASLNGSPGARAFYDEQRAKGLEHNDALRRLANRLVGILHGCLKTRTLYDEATAWGHRENLPQSSVAA

SEQ ID NO: 449012 - protein, 365 aa, unidentified
MNATAAGCVVGIDVAKSVFQLAVADGAWRVIEQHRLTRAQMERWFANRSVDLVVMEACGSAHHWARWLNKLGIEVKLLPALYVRAYVKRNKTDSADACALVEAARCAEIVPVKVKSVEQQALQGLHRTRSLWMGTRTSRINALRGFCREFGIAIAQGARLGVEQVARILADPNSAVPELIRGTLKLLVEEIRLLEARTAQLERELTVIARASPACTTLLTIPGVGLLTATAMVAATSGSVQHFRDARHFASWFGLTPREHSSGNTRVLGRISKRGDRYLRMLLTHGARSVLHAAMRAALAGKNIDGLRRWALDVQARTNHNKAACALANKLARICYATLRDAQPYGEPLRRPLKKIERASFAIAA

SEQ ID NO: 449013 - protein, 392 aa, unidentified
MDSPPPRHHSATVVFEEANGSEGETMKKHSSKHDSLSSTDVELCTTICVDLAKQVFQLAGEDATGRVIYEDRIKSRQAFHDFLLKLPTTVAVLMECGPGAQAWARLLQAKGNPVRILPAQRVAEHRSGAKNDRNDCYAILRAGRDTSIASIPIKSTTALAIQALHRIRRGNIKRHTALGNQIRGLLLEHGVSMPQGDAAINKHVPQALEDASLPLPDLLRELLDELLMDWLSLGERITVLSRRLEATAQEDKVAQRLITIRGVGPIIATAIVAKQTDPSRFASGRMYSAFFGIVPDQHSSGNKIRLGKMSKRGDGYIRSLLIQGAHSVLSQLRPDSDQPDDRRLLRWLSRLGRKEAAIRLANRNLRIIWTLLQSDQVYQRKPNEKPEAAMSL

SEQ ID NO: 449014 - protein, 350 aa, unidentified
MVVVGADVHKHSHTFVAVDQVGRKIGEKTVRAITAGHAQAVMWVRERFGTEVVWAIEDCRHLSARLERDLLTAGQRVVRVPPKLMAQTRASARTRGKSDPIDALAVARGFLREPDLPVASHDEVSRELKLLVDRREVLVAQRTATINRLRWRVHELDPERAPVPASLDRCKHRLLLDAWLATVPGLVAELARDELADITRLTETINALATRIGERVAKIAPVLMAMPGCGELTAAKLVGETAGVTRFKSEAAFARHAGVVPVPVWSGNTAGRVRMTRSGNRQLNAALHRIAVTQIRLDGLGQAYYRKRLAAGDSTPEALRCLKRRLARVVFGHLHTDHQHRTQPCQPAAA

SEQ ID NO: 449015 - protein, 340 aa, unidentified
MEAIAVIGIDLAKSVFQVHGVDAQGQVIVRKRLSRAKLVPFFAKVPPCLVGMETCASANYWARELMVLGHEVRLMPPQYVKPYVKRSKNDVSDAEAICEAVTRPTMRFVGVKSPEQQSVLMLHRTRSILTRQRTQIGNAIRAHLAEFGIVAPVGRQGLDRLIAVIGDEQDARVPIPARRCLAMLVEQQRLVLAHLLDTDRAIRAHSRASEIGRRLQEIPGVGPLVASALVATVPDPHVFRTGRGLSAWLGLVPRQNSSGGKERLGGITKAGDTYLRKMLFVGAMAVIRHAERYGTRRPWLTKLLSRRSPRVAAIALANRIGRTAWALMTSGERYREPVVA

SEQ ID NO: 449016 - protein, 341 aa, unidentified
MKNLFIGIDFSKEKVDVAIISAEGLVETSVRVFNEFKNSVSGYKQLVKWVDKNANGMDSSMWLFCGENTGDYSKPLCNHLYGKGYDMWLENAKCIKDASGIRRLKSDRADAAMIAEYAMRNHEKAVVYEPLSESLAQLREYYLYRQMVVRHRCSFEVRRGEKRLMTKKSAAKTVIAQSGRHIVSELNREIAKINRKIASLIESSDELSEVYNIVTSVPGIGTQNAVCLMVYTNNFRRFNYDARSIACYYGIAPFGEDSGTSVHVDPHVHYMANRHIKGMLTQAALAAVRFNPIIAQYYQRLIGRGKKMPVAMNNVKNKLIHIVTSMVKNKQVYNPEYRLLA

SEQ ID NO: 449017 - protein, 361 aa, unidentified
MNYGSKRATKMTAGVDLGDKYSYLFVLDNDGGEVVEEGRLRTTPDDLRRRFDSAERMKIAIEVGTHSPWVSRLLTECGHEVLIANPRKTRLIYGQRRKTDKLDAEKLARLARADPELLYPVEHRGCESQAHLAVVHSREALVRSRTQMINHVRGTVKSFGYRLPKCSTPSFHKKIPGQLPSELAEVLGPIVETIGSLTEKIKDYDRRIEELAAERYPETELLRQVSGVGSLTALTFVLTLEDPQRFAESRSVGAYLGLAPGTDQSGEQDPQKRISGEGDELLRRLLVSSAHYILGPFAPDSDLRRHGEKIAQRGGKNAKKRAVVALARKLCVLLHRLWVSGEVYEPLHNARRLGVQGEEVA

SEQ ID NO: 449018 - protein, 352 aa, unidentified
MMIIGCDFHPRFQHISFLLEESGECGQRRLLHTAEAEQYYRSLSGTRVRVGIEATGSYGWFRRLLSELGHELLVGDATQIRASNPRRQKTDKRDAEHILGLLAQDRFPAIWQPPAENAQLRQLLLHRSRLVRLRTRVTNQLDGMAKNEGLLVPGGWSGKRRMAIEALPLPGWYGERRKDLLGLLDRLEERIAPLDRAVSQAAAHNAEACLLMTHPGVGPVVSLAYVLTIGNWQRFARGKQVSSYFGLIPAEESSGDKRRLGHISKQGNTLVRWLLVEAASTAQRYDASWHRQYLRLSMSKHHGVAKVAIAHKLAVRLYWMLRSGQDYGQMMERGSHARQSECPVGRSKGPIE

SEQ ID NO: 449019 - protein, 346 aa, unidentified
MNQIIRIGMDTSKHIFQLHGVDAAEQAVLRKRLRRKEVLAFFAKLPPTVIGMEACGAAHYWGRELRKLGHEVKLMAPQHVKAYVKRNKNDGRDAEGTCEAMGRPTMQFVPVKTEEQQAALMLAGVRQQLIARRTQLSNAIRGYAAEFGVTAAKGLDKIEPLLARIAQDESLPALARELFAIEGREYTQVQAELKAIEAKLMAWHRANAASRRLAQIPGVGPIGATALVMKTPDPRAFPSGRHFAAWLGLTPKDHSTAGKTRLGKITRAGDEVLRSLLVAGATAVIQQVRRGRGHPSPWLVALLKRKPPKLAAVALANKIARIAWKLMTTGESYDGARMPGASALAA

SEQ ID NO: 449020 - protein, 355 aa, unidentified
MNEAKYIGLDVHQATISVAVRDSDGKLVMEAILETKAETILQFVRGLRGSLHVTFEEGTCAAWLYALLKPHVRQVLVCDPRKNALLKVGNKNDRIDSRKLAELLRANLLSSVFHEDTGLRAVKELARSYLTMTKDLTRVMVRLKALYRSWAIPCATKQVYAPRHRAEWLAKIREASVHRRAELYYQQLDALRALQQQVKKELLIEGRKHSATKLLRQIPSIGPIRAVLLLALIQTPHRFRTKRQLWSYCGLALETRTSAEYRVVHGQLQRSKKPVAIRGLNKNHNHDLKNLFKGAALRAAAVEKPFQEFYAALVAKGIKPEMARLTLARKIAAITLIVWKKGARFDAEQLKQQAA

SEQ ID NO: 449021 - protein, 371 aa, unidentified
MQDSIFIGLDVHKATISIAIAKNERGGEVRHWGTIPHRPDHVRKLVEKLGADQSQLYFCYEAGPCGYGLHRQLVEMGHDCIVVAPSLIPVKAGDRVKTDRRDAVMLAKLHRAGELTSVWVPDAAHEAMRDLVRARATAVRMLGKARQHLQGFLLRHGRIYPGKKGWSVAYRRWLTTLGFQHPAQQIVFQDYVDAVSDAQARVDRLTRQIADLVPTWSLAPVVEAVQAMRGVAFIVAVTVVAEVGDFHRFDNPRQLMAYLGLTPSEHSSGSSIRRGGITKAGSSLARRGLIEGAWSYRMQARVGRKMFDRLEVLPQSVRDIAWKGQLRMCQRHRHLVAAGKLKVVVTTAIAREMLGFIWAIAREVSVEPART

SEQ ID NO: 449022 - protein, 395 aa, unidentified
MSAEGEAIRSNDYRKDTTVKAPSTRPATVLGLDVGKSSHWACLIDRDGEVLASAPVRNREAELDTLFASAPAGTLVVVDQFRNIGSLAVRRARAAGLGVAYLPGLAASRAAGLFAGEAKTDERDAAVIARTALGVPDSLSGVPGRGEALEAARALSSQRDHVVACATRDKNRLRAVLLESCPALEAAVDLSDRRWLELLAGFGGAWGIARSGAGGPRAEAAGEAAAASTAPPPALVEAENRQVRFLAARISEALDEAGALEAETAALLEGDETYACLLTVPGIGPRTAAQLAVSVDIGRFPDHDHLASYCGIAPRVRSSGTSVRSVRASRRGDARLKSLLIFSCNSLVRSSGRYGEYYRACRARGMGHGRALKAVARKRLRAIYAVMRDRVPYRE

SEQ ID NO: 449023 - protein, 415 aa, unidentified
MEDLGLRALHRRVAGIDVHRMLHVVTVLIEQPDGSMQRQTREFGGFRRDCRALAAWLAELHVELVVMESTGIYWKSVFTHLENAGITAWVVNAHRIKHVPGRKTDMADSEWLAVLARFGLVKASFIPPRDLRELRLVSRYRRKLSAMCASEINRLHKILDDGGIKLGGVVSDINGVSARAMVSALIAGQPIEQMLGLARGKLQQKREELGASLDGDLSARHLFVLGHIEAHIQTLQRELAEIDRYLLAAMRPYAWAHQLLQTIPGIDEIAAALIVIEIGDDMARFGRAQSLACWAALSPGNNESAGKRKSGRTGHGNSTIRFILCECANAARMTKSTLAAKYRSLMVRKSHKKAIIAVAHKMIRLIFVMLSRRQPYLDQGIDYAAMSAKKNAPRWIRQLKAIGRWPSPNSAAASA

SEQ ID NO: 449024 - protein, 369 aa, unidentified
MPHVTSIGLDVHARSVAAAAFNPFTGEVVHRDFGTDAAEIAEWALGFEEPRACYESGPTGFHMARELRALGLDCAVAAVSKMQRPAADARRKNDRRDAEFIARMLATHNIVEVPLPDAAVEAARDLDRALDDATAEYRRARQRLNMFLIRLGHVWDERNADGTRKGSWTRAHWRWISGIRLEGPQRDVLEYYVTAARCAESDRRQLEKKVLALARTDRWRPAVEALSCIKGIDTLTAFRLAAEAGSFTRFRTAPAFASWCGLVPSERSSGETERRGGITKTGNRLARTALVESAWHYLTCTPRPKAPAPGADVPAAIRARADACTARLCRRREALAAAGKSSCKANAAVARELACWVWEIGRRAEGTLS

SEQ ID NO: 449025 - protein, 419 aa, unidentified
MAQAHDKPIISVVHPICCGLDIHKASVSACCLTTVADGGEDMEIAEFDTFTDALIRLRDWLIERDCPVVAMESTGVYWRPVHNVLEGFVKVVLVNARHTKHVPGRKTDLADSQWLAGLLRHGLLRGSFIPPQQVRQWREMTRLRKAYQESLADFKRLIHKLFEGANIKLGVVVSDLFGATGRYVMNLLATRAGELSADDIAAGAHGQLKQKINELCRAVQGFFTDHHRYQLRLLLATVTELEHHIEQIGQNVKKLMADHHPVLSRLQEIPGVSEVAAATILSEVGPTLEEFPRSAALTSWSGLCPGNNQSAGKRKSGRSPVRGHRLKTIMVEVAWSAVRKPGSYYKDKFQRLRARRGAKRAIVAIAHRLLKAVYYIIKEGRHFRDLGAEYLTHKHQTGKLGSLKKQAKLLGYELTPLAA

SEQ ID NO: 449026 - protein, 346 aa, unidentified
MIIVGCDFHPAWQQVAWVDTETGETGERKLEHSSGEARVFYASLSVPALIGVEATGNCQWFLDLMMELGHQVWIGDAAQIRASYVRKQKTDKRDAAHVLKLLLEDRFPRIWVPNREERDLRQLLLHRSKLVEMRTRVKNELQHLALNQGVQRKRKLWSQAGQQLLRSLPLQPWASRRREDLFSLLALLDRHIGVLDEAVEKASQLDKMAQLLKTQPGVGPITSLAFVLTIGDVSRFQNGKHIASYLGLIPREHSSAGKQRLGGITKQGNRMMRMLLVEAAQIAVRCDPGFRKQYLHRCHSKPKAVAKVAAARKLAVRLYWMLRTQTPYPEIVRIESSPRVPLVGAS

SEQ ID NO: 449027 - protein, 466 aa, unidentified
MKPFYMGIDVSKGYADFMILNSKKQPVAQNFQLDDTFEGHQSLYKILGRFLTDHPESTLFAAVESTGGYENNWYNSLIEFQGSLNIQTARLNPLGVMHNSKADLKKNTTDKISAQNIAEYLIAHPEKVVYQQDDQLAGLRKQWGFIKMLTKQSTQFLNQLNALLYTANPELLSYCQDGVPGWMLTLLVQYPSAARLKNAHAKTVANIPYVSRMRAQQLIANAKRSVASATDTTTEQLIVATTRQILHLKNTIAEQMKRMIKECPISEIELLKTFPGISDTSAIGLIIEIQTVKRFAGVKKLASFFGVHPVYKVSGDGVGGFKMSKQGRKAPRQILYMVALSAIRCNPLIKETYEKHQQQGKHNMAAIGICMHKILRILYGMLKHNKPFDPQIDIRNRQRKVRVKSDTPAKDTNRRFQDYDQNAPVTRRQRKKRLERERPHNVGDIKSGVTAPVPLADIIADILPQL

SEQ ID NO: 449028 - protein, 376 aa, unidentified
MKKIVICGADVHDNSITARIAVNKDAPETRVFRYTAKGRNSLFKYLKFVARNNGTELIVMAYEASSLGFGLCDEARDAGIECYVLAPTKMPQSEEQGKRKTDARDALKILEQLRGYLLAGNELAKVWIPDPQTRDDREVVRMRLEVADKLTSVRTQVRTLLKRNKVEKSKEIGKAGTVSDRQWLQRLTEPGHELALGGRVALASLLRQIAALEAEIQKLDEAVKTLAATDRYRAAVEVLDTQLTGVAVLTATVFLTELGDMRRFKNRKKVGAFLGLVPSSHESGERNDRKGHITRQGPARVRKVLCQAAWARIAFDKEDHKVHARIVEKNPKKKKIATVACMRRLGVRMWHLALEAQLQAGVYLDKELPQAQLRAG

SEQ ID NO: 449029 - protein, 352 aa, unidentified
MIIIGVDFHPEFQQIASVDTDSGEFLEKRLAHREEAEKFYRALADQKVRVGMEASGHARWFERLVGELQFELGIGDAAEIRTKRVRKQKTDRQDAQLILRLLLEDRFPRIWVPSWENRDLRQLLWHRHRMVQARTRIMNQLQAVALNEGLCCKKRLWRERGRQQLESFRLAPWASRRRRDLLELMDRLNPTIAELSQAIEQEVEKCPAAQRLATHPGVGPLTALAFVLIIGRAERFQCGKQVASYLGLVPLEESSGNRRRLGHITKQGSSMLRFLLVEAAQVTVRSLPDWRSKYLHLMMRRGRKTAKVAMARRLAVRLYWMMRQGWDYQQWNKFGSHAGQPGHRDGVQSNTE

SEQ ID NO: 449030 - protein, 419 aa, unidentified
MIHPSAAGIDVGAKEHVVAVPADRDPEPVRSFKAFTPDLYELADWLKGCGVETVALESTGIYWITLYEILEERGFQVRVVNARHVKNVPGRTKTDVLDCQWIQKLHSFGLLSGSFRPDQQIRTLRSLMRLRDNLVVNSTQSVHHMQKALFEMNVQLSNVISDIVGESGMRILEAILAGERDPEALARLCSTRIKASRQTVAKSLHGNWREELLFALRVAMDSYRFAQSKIAECDERIGQHLAQFEDRAALETPPASLKSELHRICGVDLTKIPGIKEQAAQIIISEVGLDMTRWNTEKQFASFLGLCPNNAISGGKVLRRSTRKVYNRAADALRLCSQSLTHSKTALGAKYRRLKARLGAPKAIVAMAHHLARLVYRMLRYGRHYVEKGMAEYEIRFRLQRLKWLKREAKSLDMQLLPA

SEQ ID NO: 449031 - protein, 346 aa, unidentified
MTIYCGVDFHARQQTICYCDSAGGEVRLAELNHERDDIGGFYAAFAGDMVVGLEASGYSTWFVELLEGLGHRVLIGDAAEIRHLAKRRQKNDRRDAGLILDLLLRGEFPQVHRPPFESREVLRLLRYRHKLVQMRTRAKNSLQALAFSAGSAGRSRLLSREGRERFLRLPMSEAMGRQRAEWLSLVEEFNARIKSLDSWLKERALHDERVLRLQTHPGIGLLTSLALVHALEPVSRFDGGRKVAAYVGLDPMEYSSGDRQRFGSISKGGSRLLRYLLVEAAQISVRRDEGLKRFYLRLLRRRGTQKAKVAVARKLLIRGYILLRDGIDYAEFLRRGVEARPARLAT

SEQ ID NO: 449032 - protein, 340 aa, unidentified
MKITTIGIDLAKNVFQIHGVDVHGKAVLKKQIKREEMAVFFANLAPCLIGMEACGSAHYWARKLQIQGHTVKLMAPQFVKPYVKTNKHDAADAEAICEAVTRPTMRFVPVKHVEQQSVLALHRARQGMVKARTAQANQIRGLLAEFGLVVPQGITHLYQRVPLLLEQAKEELPGLFRQLVQRLLEHLKILDRQVNEMEIQIQMWHRSNPLSRKLEKIPGIGPLTASAMVASVGDAKSFNNGRQLAAWLGLVPKQHSSGGRPTLLGMSKRGDCYLRTLLIHGARSVIYALKRKPLTTGWLASLLARRDKNIVAVALANKNARIIWALLAQDREFRSDYVMP

SEQ ID NO: 449033 - protein, 410 aa, unidentified
MEVVHARCAGLDISKRDAKVCVRIAGAGRRKTTETVTTWGSMTNQVLALREHLVAEQVTCAVMEATGDYWKPFYYLLEDAGFELMLVNARYVKNLPGRKSDVSDATWLAQLGAHGLVRASFVPPEPVRQLRELTRARTAITRERGREVQRLEKLLEDAGIKLSSVASDITGVSGRAMLRAMVEGQRDPVVLADLARRRMRSKIPALTEALTGRFTEHHAFLAGVHLDLIDRHTAAIEEITARIEVVIEPFQPFRQLICTIPGIDTLTADVVIAETGADMSRFPTASHLASWAGTCPGSNESAGRIKSTTTRAGNPYLQGALGAAAMTCARTDTYLGARYRRIASRRGPQKANVATQHKMLTTIWHMGTTGTLYDDPGADYFTRAHPERAKNRAIHQLEAMGYRVTLDRAS

SEQ ID NO: 449034 - protein, 470 aa, unidentified
MRDDIISSCGQRISCFYLCSQVYCAQTGTSALWDVTYEPDVEAMDRFLLISQQVVTFSSTRNVRNLNMREAYTMYIVGIDIAKRKHEAAVIDGEGAVIIKPFSFTNNCSGYNRLLAMLTKAKLPLDEVSFAMEATGHYWLALFTRLQKEGFRVQVINPVQTNSIRSFYIRQAKTDPRDALLIAEVIRFGHFSESTLHPENIYELRELCRGRHAIVSMQADVKRKVVALLDQVFPEYETAFTNLFGDTSMAILQTCPTPKELSEMPFEELCHLIEVSSHKRFRMAKAQELQALARNSFGFAMAGDVFSTMIRLYAKHLDFLKQQVQEMDRKIAEIMDTLDTPITTITGIGPTLGAYILSEIGDISRFSSAAKLAAYAGIDPTMRQSGEYNGVRNRMSKRGSPYLRHAIWLAASSAVLHDPALKLYFQKKRDEGKPYMASVGHACRKMVSIIYAVMRDNKAYTPYIPNEISA

SEQ ID NO: 449035 - protein, 360 aa, unidentified
MLKQSSELNFEGHNIFVGIDLHLKSWTVTILTDKLSHKTFTQPASVETLHKYLEKKFPGGVYHSVYEAGFSGPWTHYKLQEMGINNIVVNPADVPTTQKEDLGKDDSVDSRKLARSLRSGDLTPIYIPVPSTLEDRSLVRLRATIVKDMVRFKQRIKSFLYFYGVSYPQEFEKAGTHWSKRFMKWLKEGVSLQHDSGNQSLKILIQEAEQHRKLLLETTRKVRKLSCSEKYASNMVLLRTIPGVGFITAITFLTEIENIERFGNSDHFAGFIGLVPNQHSSGDKKRIGEMTFRGQDTLKKAIIESSWFAARLDPALNKSFHSYLNRMDANKAIIRIARKVLNRMYFVLKNKMEYVPSVVK

SEQ ID NO: 449036 - protein, 420 aa, unidentified
MKSFVPVAGVDVSKRFSDLCVLSPDNNVLLRQKIYHDMVSMKLAEKKLHEIELECGARPVVVMESTSHYHLILFQFFTDAGFEVVVVNPIQSGALKNINVRKVKNDRVDAYRIAMLYRLKVLRPSQIPTSSLRGLRLLTRQRSELKGDVARFKNRLTAYLDQIFPGYGEVFSDVGGSASRAVLHMCPTPEKLLNADGSLLAKAICEAGNKGPKFGAEKAAKLREAAGSAQVIGVRSASNASLIKNVLDIIEGLLAAIQRIEREIKELVTQDTRLDEDVKLLCSIPGIGFSSAVVIAAEMGNISLFRKPKQLAAYFGLDPGERQSGTFKGRKNKLSKRGSPQVRAALHMAAVSSVSRNRDGTYRNPVLAEYYERKCAEKPCKVARVAVMRKLSNIIYAVLRDRRPFELRTPQEHMALLAAA

SEQ ID NO: 449037 - protein, 365 aa, unidentified
MIVIGADPHKSTHTAAAVERATGELRSSETVAARAAGHAQLLDWARALDDERVWAIEDCRHVSGGLERFLVERGERVVRVPPKLMAGARRSARERGKSDSIDAAAVAGAALREGIESLPAAHLDQRSLAIKLLLDHREDLVAESTRAQNRLLWHLHDIDPELAPTGRSLRHQHVLRSLAARLSRREQTVRVRLARELVRRCSALRRDLLTLEHELYARVREQAPELLELPGCGPLTAAKLLAEIAGAGRFATDAKLARHAGIAPLPASSGARHRHRFDRRGNRQLNCAFHRIAITQARIHPEARAFLARKRSEGKSNREALRSLKRHLVRRVHRLLAPPAIGSSLLMSSSPTKANSVPAGMPCLT

SEQ ID NO: 449038 - protein, 450 aa, unidentified
MRAEKQKKSKTVNLPKHLQHINVHAAGIDVGSRSHFVAVPEGTSEPPVRAFESFTDDLQRMADWLITCEVSTVVMESTGIYWIPVFEILESKGLEVKLVNARHVKNVPGRKSDVLDCQWLQRLHTYGLLQGAFRPPEQICTLRGYVRQRMNLVRYAASHIQHMQKALAQMNLQLTNVVSDITGKTGMLIIKAILSGERNPLVLAALRDQRCKNSEETIARSLHGNYRPEHLFSLKQAVDLYSFYQGQIAECDQAILAQLATFDVASDSDKDNKPPTTIEEALQRMSGVDLTKIDGIDSNSALKIIAEIGINMNRWKSPKHFASWLGLCPGTKVSGGKNLSGKSKQVANRAAATLRMAAFTLFNSKSALGAYLRRQRSRLGAPKAITATAHKLARLVYAMLKHGSAYVDAGQDYYEKCYRSRVVHNLKRKAQELGYQLVEISGLQQKTATT

SEQ ID NO: 449039 - protein, 375 aa, unidentified
MKFANSAGGFDRCIAYLEGLAESKSDLLVGMEATGHYWLPLFCRLQDAGYAVVVVNPMRTDAMRRFKGSSRVKTDIVDCVLVAETLRCGGFQPSRLGDEAMIELRQLTRLHQALKESVADLKRQVIVALDQVFPEYDSVFSDTFGESSKAFLKRCPTPEECLAVRADSLAKTLERASHGKLGRAKADEIKGIAKASCGIGLATSAFSFQIKLLIGQIDFIEGQVSEVEARIRAGIEEVEPLILTIPGIGHALGAQIVSEIGDVRRFRNASSIVKYAGINPSISQSGKFSSEENHITKQGSPYLRRALYLAAMAQLKLKSPFYDYYAKKRADGKSHREALVAVARKLVHVIYAVLSKQEPYDPNVTKSPGLASRSE

SEQ ID NO: 449040 - protein, 380 aa, unidentified
MEYCTTIGADVSDRTTKICVMTKAEGGERRIVVETTCATTEAGFEEAFGKFDRSWPVVFETGTHCRWMDRLFRKMGFKTIVGNPGKIPSITKSNTKNDRNDARELARLALADPTMLHPVFLRDEVYQQMLRLHHARNMLISQRTQTINQIRGFAKSMGHRIECSSTEKFHELSKADWPRELEECAWPLMGSLKTINLKIKAYDKLIARLAERPEFKPMVERVRVVYGVGIIGSTVFVAAIGGRPDRFDHTRDIGAYLGMIPKQDQSGDGDKQLHITHAGSDIVRTALVECAGVAMMPNAKDTDLKLKGLRIAMRGGKIARKKAKVAVARGLAVTMLAMLQHPEREYVPLSEEGKKGFERYRAELEYLTMQKASRKEKKVA

SEQ ID NO: 449041 - protein, 348 aa, unidentified
MYYVGCDQHKYYTQVMVKDQNGSVIDQRKLRHDNKDVIEEYFSSMPKESSVLLEATGFDPWFTDLLQELGLNVKLAHPSRTRAIAEERIMTDKISANVLADLLRANLVSEAYIASPEIRAKRFRMRYRQSLIHMRTMAKNRIHAMLARLGISVPPLTDIFGKKGRAYLQHLDLAPIYRRALDGYLDLIDTTTSLSHLVDLELYKELKENEQLRLITTIPGIGKVVGHIILAEIGDIKRFLSSAKLASYAGIVPSLHQSGKVAYSGSITKTGNRYLRWALVEAAHMALRTDPYLRMYYDKIRAKKGTSVAVVAIAHKLLCYAYQVLTKNQEYKPKAIPERARLKAGPLA

SEQ ID NO: 449042 - protein, 312 aa, unidentified
MDNKKVYVGIDVGKDWLDFAVAGNNKITRFGNHDEGIEKVVEQIDLLNPRLVAVEASGGYESAFVNTLMVKKQRVAVVNPTRVRALANAKGLLAKTDEIDARNIASYAEMIKPDPKQPREDLDIRIRALVTRREQLVDIRSAEGNRLGTCHESTKADIREHLDWLGRQIGILDKEIKQLVKSSEKWTNQIKLLKSMPGVGFITAVTMTANMPELGELNRQKIAALAGLAPYNRDSGKKRGKRRIFGGRQSVRRVMYMAALSAIKHNPVIKKFYERLIEKGKPFKVAITACMRKMVSILNVMVKKQEAWRYQV

SEQ ID NO: 449043 - protein, 316 aa, unidentified
MDHEQIFVGIDVSKNQLDVAIRPGDAFFPISNDDQGIADLVRRLADLNPRLILLEASGGYEILAAAALRQADLPAQIINPRQVREFARSTGRLAKTDKIDAAVLAYFAQLLQPPLRPWPEALQQELAALMTRRRQLVEMLVMEKNRLGTAHSPKVRKSLQVHLQYLTTQLQELEQDLNDFIRRSPLYLEKDQLLQSVPGVGPLTSQSLMAWLPELGALNRKQIAALVGVAPFNRDSGKMRGRRTVWAGRKQIRSSLYMATIAACRFNPTIRNFYQRLLQAGKRKKVAITACMRKLLTILNAVLKHQKPWAYAPVCA

SEQ ID NO: 449044 - protein, 396 aa, unidentified
MSVVVGIDVGASQHVAAVCRRDRQRAERSLLRYRNNRSGFEELDHWLQSQGRVEQVVMESSGHYWLPLASHLRQRGVPVAVVNPLEAKYFAKSRLRRTKSDPADARTLAELGVRDQPPAREALVGVEVREAARFCIRLVEDQARVCQRIRRLVEISFPELGELFEDPTCETALAVLRHSPTARSAGRRHLNTLANSVRPGGRRRLGQVKAKRLQELARETIAPPELDAQAALEVQLLIQQYDLLGRQIEVAEQRVAEMLDGELARRLQTIPGVGPATAATLMAEIGDIRRFDDVDQVAALSGVHPAEKSSGRKGAREGTSWHMAKTGNPYIRAALYRIAVSGLKHNPVLRQHYAKKRAAGRSPMNAIGHCMGKALDLVWGVWRSDRDFDPNYRART

SEQ ID NO: 449045 - protein, 411 aa, unidentified
MEEILCGIDWASDHHDVALIDVEGIKLGRRRISDDAAGLGELTGMFAEHGAGPGTVKIAIETERGLLVASLRAAGYDIYPVNPKAVDRYRDRHHLARGKSDAADAMVLAHILRTDAHLHRPLPADSPAARAIEVLARAHQDLVWSRQHEVNRLRSLLAGYYPAALAAFGDLTTRTAMTVLAAAPTPAAAAQLTTSDLLDLLAAAGRGRRRADARRLAEVFAAPQMRQPAAVEQAMGDAATAVITTITAMNTAVTALAQRIDASFEQHPDAAIYHSMPALGPILSARVLGEFGDDRTRWPDPASRRAYAGSAPITRASGKKRVVLARSIRNRRLYDAAHWWAFAALSVSPGARAYYHQRRAAGDGHQAALRRLASKLIGQLHHCLQHRVPYDEATAWTRHQEQSQPAPPAAA

SEQ ID NO: 449046 - protein, 322 aa, unidentified
MINKNNTKQNTIWIGIDISKRELEIHTYESSLKLPKSIPNTKSSISKLIKNLSKNELIHCVFEATGGYEKLLLSMLQNEGIKASRVTPSLPRNFAKAQGILSKTDAIDAKVLTDYGMKFTPRETAKIDPVIEEIQALQKYRRHLNDELHRERMQLEHTLPKNIQTMVKSRIKTLQKQVEKVTEMMIQLKVKSPEINEAVKLLTATKGVGDKSALSLLAAMPELGELTNNQASSLAGLAPFNRDSGKYRGRRMIYGGRKEIRQALYMAALSASRYNPILKEFYQRLQANGKPKKLALIAVMRKLLSHLNLLMKRHLQETEAAK

SEQ ID NO: 449047 - protein, 359 aa, unidentified
MLETMTYVGIDVHARSVHAAAIDVGSGELRRARFGGGSDQVVEWLQTLPLPLKGCYEAGPTGYGLYRAAAAAGLELDVVAPSKTPRAPGDRVKTDRKDAELLARLLLAGQLKPVTVPPPPFEAARHLARAREQVRGDLMRCRHRVSKLLLLHGRVYEGSAWTKTHRRWLSKQRFEESATELAYLDCLAAVDGLVARKQALDERLSRLAFEGDWSPTVGRLRCFRGIDTLTAFVLALEIGDFSRFPRPGKLTGWLGLVPSLEQSGESRRQGAITKTGSGYARRLLVEAAWHYLPRPSEGPTIAVRRAGQPDHVIEIALRAERRLHRLYQRLRARGKPGNVTTVAVARELACFLWAAAVAD

SEQ ID NO: 449048 - protein, 328 aa, unidentified
MSKSVVKVGIDVGASELWVAVPGRRPKAFEHTGAGIQGLHRWVHRLVDGNALHYCLEATGVYSVHAATRLLSFSDVTVSIVNPAVIAAFARTTMKRSKSDAIDAELIRRYAEQHQPSAWRPEAEPLRRLAALVAQADTLKGLLQQWDNHGHAQQFMPDLPATVQKTQRSVRRSLQRQLETIERTIDNLCATDQQLAHQVALLETIPGIARRAATQLLAYGGSRWIRYSARAMTAQAGLAPRHHSSGTSVAKKQRIDRQGDRRLRRALYMPALVGSRYNPALKKLYARLCANGKLKKVALVACMRKLLTIVRAILITKKPFECALRPLT

SEQ ID NO: 449049 - protein, 364 aa, unidentified
MHYVNNTELSSHEETRSQFNGGRGAIKLGIDVHQDFYVVVEQVGGSNPKPPQRFQKEAFLHWAGRLKPKSGAEVHAVYEACGFGFSLQRKLSTLSIQCHVICPQRLDEHNRRVKTDGLDAKALCLRLDRFVQGNRAALAIVRVPTEEEEQLRAIHRQREQLVKARKQLEAQGRSLLVNHGLEPVQNWWKPRTFAALPAPQWMKELLANSQPILVALQQKIAALSVQLQSAASPEQPRGLGKMTSVIIEREIGDWKRFNNRRQIASYTGLCPGEYSSGNTRLQSCVTKHGNPRLRAALVELAWRLVRFQPDYKPILKWNTTLRKGALATGAARKKAIVAVARQVAVDLWRIKTGRLSAETLGLIN

SEQ ID NO: 449050 - protein, 346 aa, unidentified
MLHAGLDLSRRKVDVCLLSQAGEIVDEWASPPDADGLRGLAARAAMWAPAVRGVIESMNGARFVHDRLEEHGWDVLIADATKVKGLAPLACKTDKIDARVLATLSARDLVPEIWLPDPSIRRERELARFRLHLVRHRTTPKNRIHAALIAFGHPCPVSDLFGHAGRELLDGLEIPDPWRRNIEVSLGLIDDLELQIAQLTVQLKRRGADHRYIPLLVTAPGLGWINAYTVASEIGDIARFASPAKLCGYTGLCPRVIQSGASDRRGPISKHGPKYLRWALFEAALNACKHPYYAERYQHTKRRLGRQRGPKVAQIDLARRLTEAIWHMLTNNQPFAPAGAPFRLAA

SEQ ID NO: 449051 - protein, 363 aa, unidentified
MKQPLTNDYVAFIGIDWADRKHDIALYDCTTQTWQDCVISSSPKAIAEWVTQLRQQYGQAKILVGLEQKRGPLLYALCQYDNLVLMPINPRTVATYRKAFQPSRAKSDPIDARIIVDLMRKHADKLDVWVPGCPKHRALRQWVESRRRLVGEKVRLTNRITASLKSYFPQVLDWFEDKDTLVFCDFIEQFPEVKTAQAATPEALTQFFRDHQVIRKTAIQRRIQQIQDAGPPLTQDEAITVPAQALTAALVALLKVILSQLTEFELQIAQLFESLPDAELFQALPGAGPHLAPRLLAAFGEDRTRFPSAQAFMSYIGDGLVLFFSDKPSSNGSTRPEDIRLGPRPFTSSNAQPVKVIPKPFER

SEQ ID NO: 449052 - protein, 346 aa, unidentified
MEQIIRIGMDTSKSVFQLHGVDAAERPVLRKQLRREAMISFFKKLPPTVIGIEACGGAHHWGRLLASFGHEMKLMPPQYVKPYVKRGKHDAADAEGSCEAMSRPTMRFVPVKTAEQQAAQMLAGVRDQLVRRRTQLTNAIRGYAAEFGLITGKGLGKIEPLLARIEADESLPVLAKELFDAQACEYGHLQKELKVLDAKLLAWHRSNEMSRRLAQIPGVGPIGATLLAIKVPDARAFKSGRDFAAWIGLTPKNHSTAGKNRLGVITRAGDGALRSVLVAGATALLQHRMRGRGRASLWLVGLARRKPAKLVAVALANKTARIAWKLMVSGEAYRPGPTMAPAMTQA

SEQ ID NO: 449053 - protein, 415 aa, unidentified
MEQVYERCAALDVHKAQVTVCVHVPDQAGERAELRAEFATMTSDLLGLRDWLKGLGVTHVAMEATGVYWKPVYYLLEDDFELLLVNAQHVKNVPGRKTDVQDAQWLCQLLEHGLLKSSFVPPQPQRELRDLTRYRKSLVWERGREANRLQKVLEDANIKLASVASRPLGASGKAMLRELCEGNNDPVALADLAKGKLRAKLPLLRQALEGRFRGHHALLVSHLLAHIEYLDQTIGELSEEIEERMRPFARERELLCTIPGVAERTAEVILAELGPDMSRFATHRHAASWAAVCPGHDESAGKRRSGKTRKGDSWLRVALIEAANSAAARTKDTYLRAQYLRIRRRRGHKKAIVAVAHSILVSAYHVLQDDVSYQELGGDYFLTREDRQRMTRRLVRQLERLGQSVTLEPMAAEAG

SEQ ID NO: 449054 - protein, 417 aa, unidentified
MKCFVGLDVSSTKLDVCIMLNDTSTPVTASLSNDLSGATEIKNHILDLNHTYHFERIVIGMEATSLYSFHPAMFFHEDSQLKELHVEIMVEQPNKIKKYRDAFEENKNDTIDAFYIADYFRIERFSPSFLKEEKYMALQHLTRTRLQIIEQLTRTKQHFIENIYYKCNTLAYQFKKEELSTNLWSSTMMTLITDEMTLDELANMPLQELADWLQQLGKGHFKDSENLAQTIQAAIRGSYRLSKLQQDSVNVILGLLAREIRNLEKMIKEIDKAIEDMVETIPEYQCLTSIPGVGKVYAAGIIAEIGQIERFKDHPQVAKFAGLNWREKQSGNSNSQHTSLVNRGNRYLRYYLVEAANSVRRYDDEYKDFYKKKYHEVPKHQHKRAIVLTARKFVRLVDVLLRNHQLYTPPRRLMEDK

SEQ ID NO: 449055 - protein, 317 aa, unidentified
MEQRQSSTKVAGIDVGKGWLDVAAHGLEDALRVENDAAGISTLIAWLKAREVGRVGLEATGGYERGVRAALDAAGFEVVVHQPIEVRRFAQLKRWRAKNDRLDAQLIAAATAQVDAVKAAQDPRLVELAERLTAYEQITDQIAALKTFLESVTLKDLDKLLRTQIGSLERTKARLSLDILGRIRAQPDLLARFRLLTSLPGVGAIVAASLVIRMPELGAMKKGQAASLIGVAPFDRDSGQWKGLRFIAGGRARPRRMLYLAAVTAKRFDPGLKAFAERLIAAGKAKKLVTVAVMRKLIEAANLVLSRGQPWQTQPTP

SEQ ID NO: 449056 - protein, 345 aa, unidentified
MIIGCDFHPSWQQVSWLDTETGEVGEQKLVHATGDAKAFYEQVAAPVLIGMEATGNSQWFIELVEDLGHEIWIGDAAQIRARYVRKQKTDKRDAAHILKLVVEGRFPRRWTPDREQRDLRQLVLHRHKLVMIRSRVKNELQHLSMNKGMQKKRSLWSRVGQQLLRELPLKPWAACRREDLLGLLAMLNQQIGKLDGAVQHAADEHPQAKLLMTQPGVGPNTALAFVLTMGDVSRFRRGKQVASYLGLIPREESSGGKQKLGSISKQGNRMLRALLVEATQTAVRLEPGMRKQYLHRCHQKSKGVAKVAAARKLAVRLYWMLRTQVAYPEIVRIESSPRVPLVGAS

SEQ ID NO: 449057 - protein, 408 aa, unidentified
MEILYPRCAGLDVHKDMVMARVRCVSEPAVDETRSFATTTGALIELQEWLSSHAVTHVAMEATGVYWKPVWHLLEEHFELVLANAQHIKNVPGRKTDVNDAAWIADLLAHGLISASFVPPKPIQELRDLTRTRKQLVREVSQHSLRIQMTLEDANIKLGSVLSDILGHSGRAILNALIAGETDPERLADLARGNARKKRAELIQALHGRISAHHRRLLKLHLGLIDSLQQALATVDADVGKTLAPIEECARLLTTMPGVSELTAHVLVAEIGVDMARFPTAGHLLSWATMCPRNDESAGKRRSTRTRKGAPWLKTALVTAAWAAVRVKGSYLQAQFLRLRARRGAKKAILAVAASMLNAAWHMLKDRVEYKDLGTDHFARRDRSKAIRRLLRRLDDLGCKVQLTTEAA

SEQ ID NO: 449058 - protein, 345 aa, unidentified
MKITTIGIDLAKNVFQVHGVDEHGKAVFNKPLKREQMAAFFVNLPPCLIGMEACGSAHHWARKLQGMGHTVRLMAPQFVKPYVKTNKNDAADAAAICEAVTRPSMRFVPIKNVEQQGVLALHRVRQGFVKARTAQANQIRGLLAEFGVIVPQGIGHITQRVPMLIEDAANELPGVFRLLIQRLLDHLKQLDRQVQELEAQIVAWHRQSDLSRKLGQIPGIGPITACALVASLGDAKNFKDGRQVAAWLGLVPRQHSSGGKQNLLGISKRGDTYLRTLLIHGARSVIYHAQNKGQGSAQCGWLHGVLQRRNKNVAAVALANKNARVVWALLAHGRSYEAGYVRESV

SEQ ID NO: 449059 - protein, 352 aa, unidentified
MVTVVSDDPPRIVVGVDSHKDTHQAAVLDARGALLGNRSFAASLRGYRELEEWLATMGVVDRVGIECTGSYAAGLTRYLRERDVDVLEVNSTHRATTARRGKDDAIDAEMAARKVLSGEAKALAKDTTGDIECIRLLKVSRESAMKAHTAAKLQIRDLLITAPAPLREYVEAVHGSGRRINRAGALRPDLERLDDPHQATKFALRQLSRRVKSLEEEMQEVDVHLAQLVAKCAPTLLTCRGIGTQHAAQLLITAGQNIERLQNDGAFARLCGVAPVPISSGKTNRMRLHRGGDRKANKTLHLIAVARIRIDPRTQVYMERRRAEGLSKRDLLRCLKRFIAREVFNALRQDLL

SEQ ID NO: 449060 - protein, 360 aa, unidentified
MFRERTSVGLDVHARSVVAAAIDGQTGEVFKARLTPSHAEVLEWIGRLPGPCAVVYEAGPTGFGLARALSAAGLRCEVAASSKLHRPAGDRVKTDARDALHLVRLLRLDEIVPVRIPSPAEEAARDLVRARGASRQDLMRSRHRVSKLLLRHGIVYSGSKAWTALHDRWLRQQRFDSAATQAAFDDAYETVVLAAARRARLDEKITALAGDSEFTPLVRRLACLRGIATLTGFALAVEIGDWDRFTGASIGAYLGLVPSEHSSGQSRVLGGITKTGNAHVRRLLVEAAWHHRTTYHPGVVLQRRWDQAPAAARARGHAGNQRLHARWVNLNLRKKRPVIANVAVARELAGWCWSLAVMPD

SEQ ID NO: 449061 - protein, 391 aa, unidentified
MVCVGIDVAKDKHDCCILDSDGTIRADCITIPNNMDGFKQLLQTIRDCTKKSDKIKVGLEATGHYSYNILGFLLDNDLAVYVMNPLHTNLYRKSLSLRKTKTDRVDARTIATMLLSDVDLKSYTDTAYHNEKLKSLTRYRFDKVRERAKLKQSVSRLVTILFPELEKIVPSLHIASVYALLSEYPGAKQISEIHLTKLTNLLATASKGRYGKDKAIQIRDAARTSIGSVMPAKFLELKHTIKLIRELTSEIDEIEVSIQKIMDELNPPILSIPGVGIQSAAMILAEIGDFSNFESPDKILAYAGCSPSTYQSGKLTNCYAHMEKRGSRYLRYALYNATKYVCHWNPVFAEYLAKKRAEGKHYNVALSHATKKLVRLIYALQKSGKAYLVAA

SEQ ID NO: 449062 - protein, 428 aa, unidentified
MNYNTQNAKIASITEKTLIIGIDVGSEAHYARAFDWRNYEYTKKPLEFSNTEAGFQAFRAWMEDIAEKHGKTAIIPGMEPTGHYWFALGKFLQDSGMKPVHVNPHHVKKSKELDDNNPNKNDRKDPKTIAALVNEGRFSYPYIPTGIYAEIRSLSNLRFQTQEELTRIKNRLARWFSIYFPEYKDVYGDLKAVSGRMVLKAAPLPEDIIKLGAEGMNRLWRSAKLRGVGMKRAKTLVSAAEHSVGSKEAPEAARLELKNLLNDMDVYGSRMEELLRRIEEKLKEIPHIDNLLAIKGIGVVTVSGFIAEVGDIGRFDSPKQLQKLAGYAIVANDSGKHNGESRISYRGRKRLRYVLYEAAISLVGKNAEFREIHEYYRTRKENPLKKMQSVVAVACKVLRIFYAILTKGVRYAPEKLLGDIRRPQEQTA

SEQ ID NO: 449063 - protein, 394 aa, unidentified
MKLVGIDVGKNSHHFCVMDKETGELNVTPSSFSNNKEGFDFLINSLKPYSKKSILIGMEDTGHYHVALLKFLLSNGYTVALINPKTTDLTRKMEGGITKNDKLDTITICDVLDTPERKKQYRITKVDRFDLYEQRQLTRHHHNLKEELNVYCNRLQKSIDLVFPEFNTLFSSKYGIVYMNLLKTFGSAETIASTDIRTIRKCFEIKGRGNRISLTPEKLKECAKNSIGISSEVETIQIKHLVSQITLIKEQIAEIDKKIEEFSIKNNSPILSIPGISHFSGTSILAELGDIGNYSKPSQIIKFAGVAPYHYESSQYNAQHTAITKKGSKYLRKTLYQIILPVIKNNPVFKKYYLLKISQGKGHRCAQGHCIRKLLRIIYHLLETGQSFDPALLR

SEQ ID NO: 449064 - protein, 269 aa, unidentified
MNITPVGVDIAKAVFQVHYIDADSGEIVNRSIKRAAFLEHFANREPCMIDMEACGGAQHWARQLTKLGHQVKLMPAKFVKAFNVRNKNDAADARAIWLAVQQPGNAVAVKTEAQQAVLALHRMRQQLVKFRTMQINGLRGLLTEYGEVMGKGRTALDNAIPAVLGRVADRLPAVLIDTLREQWNGLQKLDQQVVEIERRLRQWMKEDKAVKAIAAIPGVGVLTATAAVATMGDARAFRSGREFAAWIGLVPKQTGSGGKVTLQSISKSV

SEQ ID NO: 449065 - protein, 386 aa, unidentified
MRAVCGLDVHKDSVFLCILCETGEIFEKVYGVLTHELQSMCRDMKSRGVTEVSMESTSVYWIPIWRVLEPHFRLKLVNPYFIRQLPGRKSDVKDAQWIAECTLKDLVRGSFVPPERIQQLRQYDRRIFDLDAEIVRKLSKLDAVMQRCNIRLSNYVSNTDTKSYKEVVRKLCEGVTAPEELIKEIYSRIINRHGRETILAALTGVVSDAEKDAMRQLRDELDLAEKHKQECQDKMLHICKTYYPDELKRLMTIPGIRERAATSLIAEIGVDMTKFPTAAHLASWSGLKPRNDESNKKIKSRRITHGNVFLRKTIIECAWGASRTKDCFFSRFSFHQTQVRKKNKMKVLVAVARKLLIAVWHVLHDETDYKDFGANDCDTSAVENNG

SEQ ID NO: 449066 - protein, 309 aa, unidentified
MKQEVVYCGIDVAKEQLDVALGPKRWQVPNTKQGVGQLVKQLKAERSKVHAICEASGGYEKAIVIALQKSALAVSLVQANRVRQFARAAGVLAKTDQIDAAVLVHFGRAMHPPPSAAQSEQIAHLRELDAQRRHLSRLLSAEQNRLAQLSCAELRSLSRSLISKVKKQIATIDARIAILIAQDQNLCVKAQKLTSIAGVGPRTAALLLAQMPELGSLNRAQAAALAGLAPFNRDSGSMRGKRTIFGGRRTVRTGLYMAAVTAARCNHILAPFYQRLCAAGKPPKVALTAVMRKLLLALNSALAPKLNPA

SEQ ID NO: 449067 - protein, 416 aa, unidentified
MKLFVGIDVSSEKLDVCFLTDDNQLSILSEISVANDIEGASFIRETILEFNNSYHFDQIVIGMESTSMYSFHPSMFFHEDEKLKKLNTLVTIENPFRVKQFSRMFDENKTDRNDALRIADFLRIQRFTTSPIKEEKYMALQRLTRTRYQLIKQLIRTKQHFLENLTYKCNTLAREMRDESTSLFSATLISLMTEDFTLDELAELPLEAFCDLLQEKGKGRFKQPEKIAKAIQRAITMSYRLGALAQESINVVLSVLVREVRALEKNIKELDKAIEQVIVVIPEYQCLTSIPGVGKVYAAGLIAEIGQIERFEDQTKLAKYAGLSWKVNQSGNYQSQNTPLTKQGNRYFRYYLVEAANSVKNYLPEYKAFYQSKYKEVPKHQHKRALVLTARKFTRLVDTLLRKHQLYTPPRSVIEK

SEQ ID NO: 449068 - protein, 350 aa, unidentified
MIDVCVHVQPTRKGEVMGNVTTIGIDLAKNTFSLHGIDAAGTVVLRKTVSRARLVALVAEQPPCLIGLEACSGAHEWARRFQHCGHTVKLMAPRFVAPYRKNSKNDGNDAEAICEAVTRPHMRFIPIKTPEQQSVLCLHRVRQGFIGERTATINRLRGLLAEFGLVLPQQSAHVRRGVAALLEGLPPHAARALDDLREHLRLLDARIREYEHSIEAHARHSEAAKLAQKRQGVGPITASAIVASVGDAREFKNGRQFSAWLGLVPRQHSTGGKQRLGHITGRGDPYLRTLLVMGARSVLQRAAGQADPLSRWALAVRARRGYHRACIAVAAKNARVVWAMLSQQPATRSS

SEQ ID NO: 449069 - protein, 341 aa, unidentified
MCEYIGLDVSLKETAISVRRNGKRVWRGKCPSKPSAITEVLRRHAPAAQRIVFETGPLSVWFFHALSAEGLPAICIDARHAKAALDMAPNKTDANDADGLAHLAEVGFYREVRVKGDASMLTRTLVAARTRLIRIATELSNQIRGLMKTFGLVVSRRKGSRFEEDFHRLLSGREDLMRILLPVLEAWRSVRARAAELTRQVLATARQSDACRLLMSIPGIGAITATAFVTAIEDPENFRKSRSVGAWLGLTTRRYQSGEVDYVGHISRRGDAHLRGLLYEAATVILTRTHANSTLRTWGQGLRERIGFKRAAVAVARKLAVIMHAMLKSGEPFYRTGAAPA

SEQ ID NO: 449070 - protein, 349 aa, unidentified
MKIIGCDFHPGYQLIMMLDTETGEIIEKSLSHERKEEVQAFYAGLPGPVRVGIEASGQSQWFERMLAELGHELWIGDAAKIRASAERKQKTDRRDAELLLRLLVENRFPRIWVPTAEERDARQLLLHRSKLVRMRTQVKNQLQALALNQGVQRKWKLWSAAGRIQLESLPLLPWASRRRAELLRLLDQLETSILELDRAVAEQAYARPEARRLMTHPGVGAVTALAYTLTMGPVTRFPRGKQVASYLGVIPTEYSSGGRGQRLGHISKQGSPFLRGLLVEAATTAVRYDPEMRRAYQRLAQRKSRALAKVAMARKLAVRLYWMLRSQTDYAQLIQGSHAGQPESFCGRS

SEQ ID NO: 449071 - protein, 340 aa, unidentified
MKNGLKLLGIDIGKNSFHLISHDAGGHQVLRKCFNRNRLLQFAAQIEPCSIAMESCGGSHWLARKLASLGHRVKLIAPQHVKPYVTGNKNDFIDAEAICEAASRPRTHYVAVKTVEQQVLSVQHRLRESLVCHRTEAINRVHGFLLEFGVALPATKAAIAKVPELIDDSRSDLPLQFKRVMEHLLEDIHRLDTEIKACDAQIKQQLAQDDAGTRLMTIPGIGPITASAFVADLGDASNFRASRDLSAFLGLVPRQFSTGGRPVLLGISKRGDRHLRTLLVQGSRALMIRIERRDDALGQWVRDLLTRKHPNKVVCALANKLARIVWAVLRRGSTYNASMI

SEQ ID NO: 449072 - protein, 324 aa, unidentified
MTYAVLGIDVSKNTFDTNLGAGTKARSKSFANSPAGWHHLIAWLGEHKVGQVHACLEATGRHGLGIALALHEAGHVVSIVNPAQIRDFARTKLGRNKTDQVDAVHIREYAELFKPRPWTPPSPAMRRLCELQTIRAGTVAGLTEWKNRRGSGIMDDLALSLAKTTIQHFTSQLEAVDQAIAETIDNDVELSAKRDLLVSINGVGEALAGIVLAELPGPDILGSSAAVTAYAGLNPQQHQSGISVNRPVRISKIGNAVLRTALYMPALSAMRYNPAVAALVDRLKAQGRLKGKQIVIAAMRKLLVLCFGVLKTGKEFDPAMAMGK

SEQ ID NO: 449073 - protein, 321 aa, unidentified
MDKYSKIYGVDISKDVFDIIDTQGNYYQFANNTKGHKSFAKVIDKNSLIVMEATGYYHHCLAEFLYHYNYVVSVVNPLSVKRFIQMKLSKIKTDKSDAKAICEYACFNEVPLYVSKGKNQYECLQMLRLLDVYTKQSTALKNKIHGENTLGVPSKLVLKSLQKSLKFLRKEMQILEDKLLELVKQTQQKELTLLKTIPGMGTKTAILLLVLTNGFNRFENAKQLCSFAGITPTIRQSGSSVKGRSRISKMGNQKLRNLLFLCSFSACKHNKACAALYERIVDKGKSKKLALIAVSNKLLKQSFAIAKSGLPYDEQFVSKLV

SEQ ID NO: 449074 - protein, 372 aa, unidentified
MTPMTRNGHDTSTLYMALELSAGKWKLAFGRELGAPPRIRTVDAGALSELKSEIEAAKRLLALPDDCAVKSCYEAGRDGFWLHRWLLAQGFENLVIDPASIEVERRARKRKTDRIDAIKLFTRLIRHAWGERVWKVVRVPTEKEEDGRRLHRERERLVCERGQHQARIRALLATQGIKSLRVEDKALELRRLWDGARLPEQLRRELTREWERLKVIRAQIKTVETEIDADQASPAAQVTRQLRQLKAIGMVGAQVLGHEFFGWRKFSNGRQVGALAGLTGTPHQSGSTAHEQGISKAGNRRVRAVMCELAWIWVRYQPDSALTQWYRARFGSGPGRLRRIGIVALARKLLVALWRFVDQGVVPEGAIVRSAS

SEQ ID NO: 449075 - protein, 397 aa, unidentified
MFQKSKSTIAILQPGGTIIRKPFNVPHTSQNLIELADYLGSLEGSTKIVMECTGRYHEPMLKALYEAGLFVSLVNPHLIKNFGNNSLRRVKSDPADARRIARYTLDNWAELRQYSGMDNTRTQLKTLNSQFSFFMKQKVAAKANLIALLDNTYPGVNKLFDSPPREDGSEKWVDYAYSFWHVDCVRRIGLKTFTERYRAFCRKHHYIFQPDKPEKLFHASKELVAVFPKEKTYKLLIQQSIQQLNLASGHVERLRQEMNALASTLPEYSTVMGIYGVGKTYGPQLIAEIGDVSRFTHREALTAFAGVDPGVDESGQHKSKSNRASKVGSARLRKTLFQIMTTLLQNAPEDDPVYRFLDKKRAQGKPYYVYMTAGANKFLRIYYGKVKECLRNLEQAE

SEQ ID NO: 449076 - protein, 347 aa, unidentified
MEVLHPDCAGLDVHKNVVVACVRHMVKGRAATIVKTFKTTTQELIALSDWLSVEGVTHLAMEATGVYWKPVWHILSDGVFELVLANAAHVKNVPGRKTDVNDATWLSDLMAHGLIRASFVPDEPTQQIRDLLRTRKQFVRERGGHTQRIQKTLEDANIKLDSVVSDIMGLSGRRMIEALIAGQTNPGVLADLAHRRLQASGAELEAALLGRVMAHHRFLLRLHLEQVDALDAAIARIDQEVDANVEPFRVAVEVLSSIPGVSSLSASVIVSEIGVDMSRFPSEGHLISWAGLCPKNDESAGKRRSTRMKKGAVAEDHPHSMRLGGYADQAKLPSGSVPAHTIQARRE

SEQ ID NO: 449077 - protein, 352 aa, unidentified
MATTAQIAIAVIGIDIGKNSFHIVGLDHRGAIVLRQKWSRGQVEARFANMSPCLIGMEACVGAHHLSRKLKALGHDARLMPARYVRPYSKGQKNDFRDAEAIAEAVQRPTMKFVVTKTADQLDLQALHRVRERLVSQRTGIINQIRAFLLERGIAVRQGQRFLRVELPRILATPPDVLSPRMVRVIEGLASDWHRLDERIEVLSSEIEELAKRDAGCERLMSIPGIGPIISSAMVAAIGTGDSFSKGRDFAAWLGLVPRQISTGDRTILGKISKRGNRYLRVLFVQAAWVVLVKVKPTRWEGHGLRPWIEAAKKRLHHNVLAIALANKLARIAWSVLAHGRAFETNKLQAAA

SEQ ID NO: 449078 - protein, 365 aa, unidentified
MQKSTAFVGMDVHKESIEVAIAQGGEAKRYGRFAGNAAAVDQIARRVGVRGREVQFVYEAGPCGFWIYRRLRRKGFHCMVVSPSMTPRRSGDRIKTDRRDALNLAQLACGGQLTAIYVPDERDEAIRDLVRAREDSVCVQRQARQRLQALLLRNEIRYAGKTAWSAGHRRWLAGIKLPDPAQQIAFEEYVQSIEEADARLKRLAQVIAVHLESWRWKPLVDALQAFRGIESIHGVRIVAELGDLTRFDSPRKLMGYLGLIPSENSSGARRRQGAITKTGNRSARRAFVEAAHAYRHPARVSWVIARRQGSIPRDVVDIAWKAQLRLCARHRKLSARGINRNKVTVAIARELCGFIWAVGQIVKPA

SEQ ID NO: 449079 - protein, 404 aa, unidentified
MIFVGVDWAEAHHEVCVLDQAGAVLGRRRVPDGVAGIAQLHALVGDHGTEPSTVVVGVELDRGLLVGALAAAGYQVVAVNPLAASRYRERHGTSGAKSDRGDAKVLADLVRTDRHNHRPIAGDSELAEAIRVLARAHQSAIWSRQRQLNSLRSALRAFYPAALEAFGTDLACGDALAVLRLAPTPKLGRQLSRAKIASALGRGGRQRNLRQRAAQIQAALRSPQLAAPPPISHAYGVVAHAAVGLLTSLNQQIATLEEALDEGFNTHPDAKTIRSLPGLGMVLGARVLGEFGDDPTRFATAQCRKNYAGSAPITKASGRSLVVLARHARNRRLADALEQWAFCSLTRSPGARRYYDQLRARNKTHRQALRQLANRWVGILHTCLDRGILYDEHLAWSHPQPTAA

SEQ ID NO: 449080 - protein, 450 aa, unidentified
MNASFVLGIDPGKTFFAATLMNLTGERIWKARQFDMSRDGFEALRSSLPAGDLTVGIESSGRIDDNLLAWFGRWKSSCRDRNIRVIRVNPGQSARFGGPKPRRDHSDGSDSDHLGEFTRVYADRLEAFEHDPKAQAMTRLINERQHLVEELAATKNRIHEQLLVCFPEFSQMFVDPFAKLARAVLRQAPTARHAAKRRSLSLARVKAGHKERSLGTVQAQNLIQLAKRSIGSASEDNDAAAMIFLLDLLDLLEKRLASIEETLAAYAAQAKQELGPAGEHGVSAARQIELLDSIPGLATVAASTLVLGTRGLARFGSGRALSAQWASCPERTQTGTSLDKTRLTARGDHKRRAMLYLATQIACMYDPAFAFHKWRMVQRGLCPQQAVCAAMNRMARVAWALVAKNETYDVNLMIGQIQIHHADLWKTFVRLHQNNGALWKKVEIKYKKIA

SEQ ID NO: 449081 - protein, 355 aa, unidentified
MNQEKYIGMDVHQATISVAVMDAGGKLIMECLLETKASTIVEFIQGLQGTLSLAFEEGTSAAWLHDLLKPHVSRLVVCDPRKAALLKEGNKSDRIDARKLAELLRTNQLKPVYHEEHGIRALRELGRSYLTITKDVTRVMNRIKALYRSWGIPCSGTSIYAPRHRAEWLAKLVEPGVRVRGEHLYQQLDSLQPLRLQARRELLQESHKHSGVKLLRQIPSIGPIRAALLVALLQTPQRFRTKRQLWAYSGFAVETHDSGEYRCVRGKLQRNRERITVRGLNDNHNKDVKNLFKSAAISASTRPGPLHDFYVARVEMGMRPTMARLTLARKIATITLTMWKKGVGFDPQNLYRQAA

SEQ ID NO: 449082 - protein, 350 aa, unidentified
MVVIGVDAHKRTHTLAVVDEMGRSLATRTFPATLDGHRAALGWAQRWPERVFALEDCRNLTRRLEADLIRAGEGVLRVPARLMATARRTGRELGKSDPIDALAAARAALREPGLPVAQLDGETRRLRLLVDHREDMVGERTRMQSRLRWHVHELFPGLEIAPKSLGRLRVIAALDRRLHKVDGTVAAIARELLGRIRDLTVRINELQRETTQLVRPLAPSLLAMPGCGPLSAAKILEEVAGAGRFRSKAAFARWNGTAPIPVWSGNETRHRLNRGGNRQVNAALHRIALTQWRGVGPGRTYVQHRLAAGSTKTEALRLLRRRLSDEVFRRLRSDETAITKTSSREGVIAA

SEQ ID NO: 449083 - protein, 392 aa, unidentified
MVVSVGIDVSKDKHDCFIVSSEDEVLADVFTIPNNMDGFRFLLQRIQDYTHAQDKIKVGLEATGHYSYNILGFLLDNDLPVYVMNPLHTNLYRKSLSLRKTKTDRVDAKTIATMLLSDVDLKSYTDTAYHNEELKSLTRYRFDKVQERAKLKQSVSRLVTILFPELEQLVSSIHGTSIYALLSEYPGAKQISEAHLTRLANILVKTSRGHYRKDKATHIRDAARTSIGSVMPAKSLELKHAIKLIQELTSEINEIEDAIRKIMDELKPPILSIPGMGFHSAAMILAEVGDFSNFNSPDKVLAYAGCSPSTYQSGKLTNCYAHMEKRGSRYLRYALYTATKYVCYWNPVFTEYLTKKQAEGKHYNVALSHATKKLVRLIYALQKSGKAYLAVT

SEQ ID NO: 449084 - protein, 387 aa, unidentified
MIYYVGIDISKYKHDFCIISNAGELIVENFSFQNNKIGFQTFLDQLKPYNKSDIRIAFEATGHYSLNLELFLVNNGFSFMKVNPLIIHQFLKTRSLRRTKTDKADSITIAKYLMSVPYKPNSDLLYTIFTLKSLCRARENLIKERSKFAVLLTNELDKSFPEIKPFFNNMISTTLLYILEKYTNTKHIAAMKDYESLRKLSHGKFTYARFAQLKELAKNSVGFHNENTDLLISTYVSIYNDFNNKIDPIEKQISTIINVLNPRMLTIPGIGEISAATILSEYGDIKNFSNPNKMLAFAGLDPSINQSGTLESNGKMVKHGSGHLRYAVMNSALSILRFSPEFYDYYLKKRSEGKCHRVALSHVCKKLIRVIYSLEKNNIDFNPSLLK

SEQ ID NO: 449085 - protein, 357 aa, unidentified
MNFIGIDLHKKTISVCVVNQERKVLKRRTLCCAEPERIVAFFREWGEFRAVVEATASYEWLWQLLEPLAQRLVLAHPGKLRVIAESKNKSDKLDAQVLAEFLALDMIPPAYRPTPRQRQHRTLVRQRVFVKKNLTRVRNKIRRVLSNYNADRPDLFTRAGLTYLQEAKKKVSAADQFVLDQLLEEWHYHRRQFQAVGRQLQAFARQAPLKEKEIRAVLRSMPSVGPTTVEVVLSEIGDIERFRSNKRVVAYAGLAPGQRESAGRKKELGITKQGSGLLRWVLVQTAWRTLRCSLRWRSVYENLKKRRGSKKAIVAVARRLLTVMAALWRTGQRYRHAAQDGAPTVPKARRACRAAQA

SEQ ID NO: 449086 - protein, 359 aa, unidentified
MDIQGTSVGLDVHALSVVAHAVDEETGKVSKARLCPDHGEVLGWLHQLRAPVRMTYEAGPTGFGLARAINEAGMECVVAAPSTLQRPAGDRVKTDARDAAHLARLLRLGEITAVTVPEREIEAVRDLVRAREDARVDLMRVRHRLSNCFCGRGSSIFGGTPCTCAHEKWLRRQRFDDAHLKAAFDHGFDAVLAATAARDRLDEQITEVAASPRFADPVNRLGCLRGISALTGLALTVEIGDWSRFTGSSIGAYVGLVPCEYSTGTSRVQGSITKVGNTHVRRLLIEAAWHHRKSYRTSGPTLRARWAVAEPALRARGHAGNRRLYKRWRHFTERGKNPLVANLAIARELAGWCWSLATM

SEQ ID NO: 449087 - protein, 373 aa, unidentified
MSNVRFIGLDVHAEKIAVAVAEPDGEVRSLGVIPNQPESIRRLIKKLGPTDQLRVCYEAGPTGYVVYWQLTALGVKCEVVAPTLVPVKAGDRVKTDRRDALKLARSYRARDLTAVWVPDAAHEALRDLVRAREAAKKDQLRARHRLGKFLLRRGQRPPTAMKAWTQKHLKWVKTVHFDRAAQEATLLDYLHEVEHMADRIERLEHAIDDAVKTAPEQMRAVIEALQALRGIALISAATIVTEVGELSRFPKPRQLMGYSGAVASENTTGERTRRGSITKTGNAHLRRVVIEAAWAYRYRPAVGAALRKRQTDLSPEVKAIAWKAQHRLHGRYCWLAAKGKLKQEVVTAVGRELLGFIWAIGVHVEATRRQAAA

SEQ ID NO: 449088 - protein, 325 aa, unidentified
MTITMIGLDTAKAVFQVHAVDKAGNVVIRRKIQRKDLITFFEKQEATTVVMEACGASHHWGRTLAVLGHDVKLIAPEAVKPFVKKGKKNDAADAAAICTAAQQAEVKFVPVKTMEQQAILAVHTARALLVKQQTMLANAVRSLASEFGLTVPKGIGNVEGLAEQVEEEKSLPEEARQVAKELKGRLSELVVHIGTLETKIVRHARNDARARRLATIPGIGPITASLIAATVADFSVFKNARQFAAWLGLVPRQHSTAGKTRLGRITKAGNSEIRRLLVLGATAMLKVAGQWNSVGVHGSGAFWSAAQPDWRPSRWRTRRRASSGR

SEQ ID NO: 449089 - protein, 316 aa, unidentified
MNTKTNQNINVGVDTGKYQLDIYIRPLDIYFTVENNEKGIKEAVKTIKKYNPNRIVIEATGRLEMPFILACAKANLPFTIANPVHIKRFAGALGQRAKTDKLDAQLIAHYSEAIQPKLSRLKPDTMQAMSDLVARRNQLLTMQTMEKNRLQILPKELLMTIKPVLTLFKNLIIKVEDKIAKLIESCPEYQAKNMILQSMKGIGKIAAASIISNLPELGYINSKQASALIGVAPMNRDSGRYKGQRKIQGGRPQVRTVLYMAMMSAMQSNPVFKATYQRLLAAGKPKKVAIIACIRKMIVILNSMLRDGVMWEGPKV

SEQ ID NO: 449090 - protein, 441 aa, unidentified
MIRRGVAGIDLGSEQHWACAPTLDRSGREVAHFGATTAELIRMAEWLKARQVESVAMESTGVYWIAPHEVLEGQGLQVLLVDTRQLAQVPGRDKKSDPTDCEWIQRLHSCGLLRGSFRPEEAVCMLRTLVRDKANLVAESGDWLRRMQKSLDQMNVRVHRAVSDIDGVTGMAILRAIVGGERDAQKLAKLRDRRCSKTQQEIAEQLNGHWRDDHIFSLQQALKMYDAVQERMAAYEQEILRKLGEMEREEPHEPTAPPLQNASKARTIKKLGQEAKRQALYRMSGVDITQIDAIGVETVEVVVSEYGSDLSRFPTEKQFVSHVTLAPSVPKSGGKPVRKKKRNSASTRVAAALRMAALSLRHSQTALGAYYRRIAQRRGGDIAVFAAARKLATLIYRLLRWGQPYVDEGAAAFETRYRQHRIGRLAATAKELGYQLTPVPA

SEQ ID NO: 449091 - protein, 433 aa, unidentified
MKPPPEQPAPDWLVHRAFGGLDWASQKHNVIVVDPHGKVLEDFEIEHSALGWKKFRERLAPYGAIPFAIETSQGTAVEQLLEAGMKVYPINAKSAKSYRERKAPSGVKDDRLDAWSFADACRIDGQGWRALRPEDPLVKELRLLCRDEVSLIEQRTSFICQLRHALAEYYPTALEAFEDWGSVSAWMFVQRFPTPQLLQVAGKRAWEKFLHARHLWRTESGPRRIELFSHATELSGTVPMANAKSQLALSLISMLFALEKQLGIYRKRIDELFGRHPDHDLFGSLPGTGPKLAPRLLSEIGDDRERFEDGPQALQCLAGSAPVTRRTGKCKVRANPDRWPCHQRWACDKHLRHAMHLFSEHTLRQCVWAQIYYQHHRQKGSSHADALRRLTQRWLKIIYRMWMDRTPYDPMLHHHNQLKHGSWVFELKTTNCK

SEQ ID NO: 449092 - protein, 412 aa, unidentified
MEVVYPCCCGLDVHKKSITACVLWAEAKGKSRKEKKRFGTFTHDLLQLGDWLEQCGVTHVAMESTGVYWKPVWNILAEQFEVLLVNAQHIKAVPGRKTDQKDSEWIADLLQHGLLRGSFVPPQPTRELRDLTRYRVSLVQEINRIANRIQKVLEDANIKLASVATDALGASGRAILGAMLAGEQDAARLAEMSKGLLRNKIPELKLALEGRMTEHHRFLLRQLFEHLRFTESKRSEIEQEIDKRMRAFEDKVTRLCTIPGVDRVTAWGILAEMGINMNQFPSSGHLASWACLCPGSFESAGKRLSGKMRKGNVSLRRCLSQAAWAISMMKNNYLSALYRRIAARRGAKRAVMAVAHALLEIAYHMLKRKEDYRELGADHFDRIDVNRIRRSLVRRLERLGHKVTLEPLAQTA

SEQ ID NO: 449093 - protein, 417 aa, unidentified
MKCFVGLDVSSTKLDVCIMLSDTTTPFTASLTNDLVGASEIKKQILELNDSYSFERIVIGMEATSLYSFHPAMFFHEDSDLKALKVEVMVEQPNKIKKYREAFEENKNDTLDAFYIADYFRIERFSPAFLKEEKYMALQHLTRTRLQLIEQLPKTKQHFIENIYYKCNTLSTEIKNENLSTNLWSSTIISLMTEDYSLDELATIALEDLAEFLQKLGRGRFKAPEKLAKAIQAAIRGSYRLSKLQQDSVNVILGLLAREIRNLEQMIKDIDKAIEDMVEVIPEYQCLTSVPGVGKVYAAGIIAEIGQIERFKDHPQVAKYAGLNWKQYQSGNTNSQNTELVKRGNRYLRYYLVEAANSVRRHDSEYQTFYMKKYQEVPKHQHKRAIVLTARKFVRLVDALLRNRQLYTPPRRLMEDK

SEQ ID NO: 449094 - protein, 355 aa, unidentified
MSQEKYIGMDVHQASISVAVMDARGKQLMECLLETKADTILEFIQGLRGTLALTFEEGTSATWLHDLLKPHVSRLVVCDPRKNALLKDGNKNDRVDARKLAELLRTNQVKPVYHEKHGTRALKELGRSYLTITKDVTRVMNRIKSVYRSWAIPCAGTSVYTRCHRAEWLAKLVEPGVRIRAEHLYQQLDSLQPVRLEARRELLLESRKHAAVKLLRQIPSIGPIRSALLVALLQTPHRFRTKRQLWAYSGFAVEVHDSGEYRWVRGKLHRNRERITVRGLNDNHNKDVKNLFKGAAISASTRPGPLHDFYVARVESGMRPTMARLTLARKIAAITLTMWKKGVSFDPKQLQRQAA

SEQ ID NO: 449095 - protein, 355 aa, unidentified
MTFVGLDLHKRYITACALDDRGTIVSEIRQLPTSMASVLDWLTAVPAPVTVAMEATLYWEWLVARLQEAGHPAMVADAYQVKLIWQARSKTDIIDARKLAELLRSNLLPTIWVPDLETRRRRQLLRGRAFLVRERTRIKNRIHGHLTAENHCYPRSDLYGRAGRAWLAAVPLSPVLAAETQRLLHLHDVLTTEIAGLDAQVQRAARQDPIARRLATIPGVGVVGAMFLHAEIGPIDRFHSSHQLAAYAGLVPTTRSSGGKTTHGPLAPMSNHWLKWILVEIVQTLKLAPGPVGTYYRHLLRAKGKPKATTAAARKLCTYLYWMLHEEWTYAQWLDQHQISRRPEVRPTLRLGAMA

SEQ ID NO: 449096 - protein, 410 aa, unidentified
MAGKKLWVGIDVGKQFHHACAVDADGKTVFSRKIKNRQVAIEELITRTTSKAGAEANDGEVVWALDMTSGSAALLVTLLIATGQPVRSVPGRLVNRMSGAFTGEAKTDAKDAHTIAETARLRSDLTPVTMPDQVVGDLQVLTARREDLMADWVRGVNRLRELLGSIFPSLEQAFDYSTRSALILLTGYQTPTGLRAAGEAGVAEYLRTQRAWAPGIPAMAATAVTVAAEQDLALPGETVTAPLIARLARQLLDLDREIKDLDKQLTTRFGEHPHAEIITSVDGFGPILGAELLADTGGDLATAFGTPDRLAAYTGLAPVPRDSGRIRGNLHRPQRYHRGLRRVFYLAALSAIKRPDGPSRAFYQRKRDEGKRHVQALIALARRLINLVWALIRDNRTFTTEAPTPTATAA

SEQ ID NO: 449097 - protein, 378 aa, unidentified
MLPENRILIAIELSLSSWLVAVRLPDAERSRLHHIEGGDRSALLALINDLRSRASTKLRHTVDVACCFEAGRDGFWLHRLLTAHGIATYVLEPTSILVARRARRAKTDRLDAEGMLRVLATWLGGDRQVCSMVRVPTPEEEDAKRPHREREHLVQERERIENRMEALLFTQGIRGKPSLRSWERDIAELRTGDGRALPPLMEAELNRLRRRLMLILELIRETEAERAEAVATSADDATNQKVLRLQRIRGIGANFSAVLVREVLYRSFANRRQLASYVGIAPMPYQSGGMDRDRSISRAGNPRARTTLIQLAWLWLRYQPGSALSNWFRDRVGSLQGRTRRIAIVAMARKLLIALWRFVETGVMPDGVEFRAAEEATA

SEQ ID NO: 449098 - protein, 320 aa, unidentified
MQQWIGCDAHKKFSVFVAVDERGKAGHAVRVEHKREVFRTYLESLPANSEIAIESMGSWYWLVDEMERAQHIPHLTNPLEAKKRMGKPNKTDRLDARGLGVLLRNGTLPECWIPPGELRDQRELLRTRMALRDMRIKLKLRIHAALDRYGLQAEGISDLFGKSGRVYLAEAAAELPTETRRMVVTQLEALDELTEKIEAVEKRIQEQIAPSAEVKLLLSIPGVGAILAPVIWLEIGDVNRFPRAEQLASYAGLVPRVISSGERMRLGNVSKSVNQYLKWAFVEAATCAVTVQHCYHVHSSEHHVPPSEREAEIRRNRAPN

SEQ ID NO: 449099 - protein, 433 aa, unidentified
MLKLNYMSTLFVGIDVSSKTNAVYAMDFEENKYISSSFGNNQPGADQLVNMIAECMQKHKNLDTVLIVLESTSVYSVHISNFLSASEVLMPYRPYVFCVNPKAASNYRKSYIGMEKTDPTDAYLIADFGRVGRTKKLEPWRGGQFISLKRLTRHRMHLSECITREKTYMVSNLYLKFSELQLLEGDDKPFGSLYGATSSAVLTEFLSPQEIIDMPEEDLLTFLAGKSRNRISDLSKTSELLRKAARDSYRLDKCMYEPLSISLASSFNCIHAYQKEIKLIEQAIEKCINGMNPNALLILQSIPGIGPIWASGILSEIGDITVFHSSDALAKYAGLYWPKGDSGDFTSEDNKMSKAGNPYLRCYLGEAANSVRKHIPEYADFYARKYAEVTKHQHKRALALTSRKFVRLVFGLLVKNQLYTGEKLDTEYNIESN

SEQ ID NO: 449100 - protein, 283 aa, unidentified
MVKAATSPPWLPNHPSGHKTLIAYLLRGSGQVRVCLEASGNYSLDLALSLQAHRQVEISVINPRRARRFAESLGERSKTDPVDARVLCEFAARMPWVPWQPPSPVALHLRALTRAIADLGAIHTQQNNRAHAAAASQALPVLVVKEMQRHQKYLEQRMTRLRREALRLVAGDPELDRHFRLMLTTTGIAETSALQILGELAVLPDMLDARQWVAFSGLDPRLFKSGQSVEKRPRISRGGSRHLRRALYMPALVALSRDPYLRGLLSKLTRSRQAVHRTREVPV

SEQ ID NO: 449101 - protein, 407 aa, unidentified
MERIVIGVDPHKLSATIEVVDRHENVLASGRFATDKAGYAAMRRQVAAWPERTWAVEGSNGAGRPLAQRLLANGEHVVDVPAKLAARARMLDTGHGRKTDAHDAHSVAVAAVRAKELRVLALDPQLEALRMLVDRRQELARQRTQTANRLQRLLAELTPGRAKKDITTRQAKAILAAVRPPDLVGKTRRRLAVEQLTDLVAIEKRIKSLSKELKGRVADSGSTLMDLPGVGPIVAARVLADVGDVTRFADRNRFASWTGTAPIEASSGEQVRHRLSRAGNRRMNHMLHIAAATQIRLDTEGRRYYRRKLATGKTRMEAMRCLKRRISDAIYRQLVADARRAALSNARESSEADPGGHCGATQKSSAVNLPPHIDTSDQPLPGPATTTLQPGPGLRNSANKQPLGTAS

SEQ ID NO: 449102 - protein, 389 aa, unidentified
MDLAVGKAAERSGAGFPTAAGGRSNVSGSSKTVTEQDRRRSVGTSPNSRQSRSRLHVDSSSHLQDRDISMDGSITSFVGIDVAKHSLELCVLPEETRQDFSYDAKGLEQLFRQLPDAGTCLIVVEATGGYERRVVAELAAAGHLVAVVNPRQVRHFAIALGILAKTDRIDARVIALFGQQVRPRTIAKNHEKQEELQQLVTRRRQLIDLRTTETNRQELLTSQLIRKSLQKVIALLEKQIEGIEKEIAKFLESDDEWKGKANIIKSVPGVGKITVISLLADLPELGVLDRQEISALVGLAPFNRDSGRFHGKRSIWGGRASVRSVLYMAALTARRCNPVIQAFAKRLEAQGKPFKIVIVACMRKLLVILNTLVKTNSQWNPNYAQKTID

SEQ ID NO: 449103 - protein, 399 aa, unidentified
MAVVVGIDVAKEFHWAEVKVAETAEVLLSRRVENSPPAIQELIDDIAGAVENHGSATVGIDVLGGIAGLVQAMLLEAGLCVVHVPGLAVNRARRATVGGERKSDPKDAKVIADQVRTRDDLRQVTPSSELDAEIRLLVSRRRELVRDQTRRLGRLRDLLTSIHPDLERSLDVTNKADLWLLCRYVTPTEIRHAGLGRITRYLQRAGGLRAALINKLVDAALQAAHTQQVTIPGETVAADIVRELAAEALATRKRIKDLDTRIEGVLEVHPDAALIRSLPGMGATLTAEFLAEAGGTDRFPTGDQLASAAGLAPVLRQSGKVRYLQRATAGNKALKRVFYQSAFCAIQKDPTSRAFYDRKRTEGKRHHQALIALARRRINVLHAILRTRQPYRTNHPTAA

SEQ ID NO: 449104 - protein, 341 aa, unidentified
MQVITIGIDLAKNVFQVHGVDANDKVVFNKPLRRSQVLPFFAKLGPCLIGMEACASAHYWGRELKKLKHNVRLMPAKDVKAYVKRNKNDAVDSAACCEAVRRPTVRTVPVKTPEQQAQLMQHRVRDLLIRQRTQAINALRSHLGELGIVAPQGYEGLRVLLAIVADSSDTRLPEHARASLSALVAQIASCQAQIGAIDKLLLAQHRKNADSKRLETIPSIGVLGASAIVATVPDATIFKRGRDFAAWIGIVSREDSTGGKQRLGPISKQGDRYLQRILIVGAFAVLRQARAHPEKYPWVTQLLARKPAKVVAVAIANKTARIAWAVLTKKEIYRVQTTVAA

SEQ ID NO: 449105 - protein, 430 aa, unidentified
MGGHLNRRYEEVVSVDVIVDRCAALDVHKNTVMACVRKPGPSGRSRVKEVREFRTWTSSLRDLRDWLAAQEVTQVAMEATGSYWKPVWHVLVELDGVELMLCNAHHVKNLPGRKTDVADALWLAQLLECGLLRGSFVPPPEIAQLRDLTRYRTKLVQDRARETQRIQKLLEDANIKLDSVVSDVLGKAARRMLDALMAGERDVEVMADMALTRMRPKIAELRLALEGRFDGHHALMLGMHLSHIDHLTGGIDEINEEVDRRLVPFVEQARRLRSIPGIGTRTAEVVIAEIGVDMSRFPTAAHLASWAGLCPGNHESAGKRRSGKARKGNAALRSALCEAAWCAARTKDTYLSAQFRRFCRRFGKRGEGKAIFALAHTMIVIVWHVLNDGVDYQELGGDYFERRTDNEAHARRLVRQLEKLGHRVTLEPAA

SEQ ID NO: 449106 - protein, 523 aa, unidentified
MPRSRTARSSKAHKSLVLHKPNGLLSPRVQAVGPEHFGIVAVDCAKARSRYFLADFYGRVLLQPTTLTHSSGHFQAAIDRLRQAMIEHQLGDLVVAIERTGEYHRPVQRAFRQAGFEIRLVHPLTSKQYRQPADPGNKTDDTDLAAIFRATTHGFGLCDPVWPDRYRTLQLFRRHRRDLVDKNSQLCCQIREVLHAAMPGYAECFCHLWDDSPAPLVIARHTTSAQAVRQQGLAGLQQIAVQAGLRCREDTFHKILAWAQQAPPAHEHTLDLRRILGDLDDDRLHKTQQILELERSLAQLVVATPYALLLAIPGINIVTVADLAGELGPLQFYLNANAITGRAGLMPSRYQSDQVDHPNGPLRRRGHRRLRAVLMQTADNLVQCNHYFRARADLWKRAGKDARWIRVKVAKIFSRLAYALVAGQQLFRHDCCQPRHYVLGKLLEFHSSHRTAPEQIRQDLETVIGQLPATARAEEAPPLQKLLDELNQRSRGPQPLAKILPLVLARLGQRMLQSEAVREGTSS

SEQ ID NO: 449107 - protein, 342 aa, unidentified
MKDTIIGVDLAKRVFQVHGATMAGQLMFRRKLSREQFRVFMAAQPAALVVFEACGSASYWAREMESLGHEVRLIAPQYVRPFVKRQKNDAADAEAIVTAARQPNMRFVSPKTEGQQAKAVLFRGRERLVHQRTELVNALRGVLYEFGHVFPQGLSHLNLIEELVKNPACDLPMLIIEECQDMLRQIAAKTEQIEARTKKLKALAAETEAARRLQTMPGVGPMIALAIEAFAPDMAQFKCGRDFAAWLGLVPRQHSSGGKNRLGRVSKAGQADIRRLLIIGAMTQIMDRARHKIPADSWIGRMLARKPRMLVGIALANKMARQIWAMLVKKEDYRNPAIADAA

SEQ ID NO: 449108 - protein, 378 aa, unidentified
MDVLYHRCAGLDVHAKTIVVCALWGEEDHIQKEIETFSTFTKDLFRLLKWLEDREITHLAMESTGVYWKPVFNILEDYFDITLANAQRIKNVPGRKTDVSDAEWIAKLLRYGLIEKSFVPPAPIRELRDLTRLRKKWVGQLIAEKNRIHKVLECSNIKLGTVISDIFGVSGRKLLTRLMEQGYIEEADIDACLHGRMKGKKQQIQESLFGTLTEHELFMIRQSWKHIEYLESLIQEMDQRIDHLLQPYQQEVDLLMTIPGVKKETAAVIIAEIGVDMGQFPTPQRLASWAGVAPGNHESAGKRKSTRTVKGNPHIKSALCEAAWALSRCRNQPLAAKFWSLAARRGKKKALVAIAHRMLVTIYCMLSRKEPFWGPQVS

SEQ ID NO: 449109 - protein, 346 aa, unidentified
MRIIGCDLHARQQTISMLDTESGEVTEKTLAHEGETVREFYAALPKPVLVGLEATGSMFWFLRLLEELGIEYRVGHPAAIRKAETRKQKHDRRDAALIRRLLEEKRFPQIWLPTPEQRDLRTLLRHRHQLVRMRVMTQNGLQGLALSQGLRRGAKLWSQAGQQALDSLPLAGYSHTRREQLQELRQELNQRLQQLDQAVSEQAEQRAGARRLLSHPGVGPITALATEVFLGDAQRFPNAKAVASYAGMIPSEHSSGGQQRNGSLSKQGNPLLRQLWVEAARVAPRKDARLKQFYRKKLVQKGLGKAVVATARKLGIRLWIMLRDQIDYTEFCRRAERRCPYAGMPE

SEQ ID NO: 449110 - protein, 341 aa, unidentified
MNITTVGLDLAKSVSHVVCCNQAGKIVRKKMLRRNQVLHFFSELSPCLVGVESCASAHYWAREIAKYGHQVKQIAPQHVKAYVRGNKTDFNDALAIAEAVVRPEMRFVRTKTQTQQDIQALHVMRKKCERDRTANSNEIRGLLNEYGIILPVGISHVYKSLPELFDRQVENGLSELFKELLERHYQKLVELDEHLNWYTKKIKQLSQHEACRRLQSIPGVGPIIASALYQHIGNGSEFKNGRAVSASLGLVPKQHSSGGKHNLQGISKRGDSYLRTLLIHGARAVMRVSKHKETPLSQWIKRIEQTRGRNKAAVALANKLARIAWALLAQGGDYQPELTTA

SEQ ID NO: 449111 - protein, 392 aa, unidentified
MRKTKSTANAELKAVNAGAAAVDIGSKMHMAAVDPACTDSPVRAFGTFTQDLRDLATWFKECGVTSVAMESTGIYWIPAYEILEQHGFQVTLVNARYAKNVPGRKTDVSDAAWLRQLHSYGLLRGSFRPTSEIATLRAYLRHRERLVEYAAAHIQHMQKALMEMNLQLHHVVSDITGATGMRIIRAMVSGERDSEVLASYRDVRCHASVETIRAALLGNYRDEHIFALAQSLVLYDAYQARMLECDRKLEASIAALRDKVVKPAGKLKKPRVKTKQVNSPSFDVRAALHGVVGIDLTEIQGLGPSLALKLISECGTDLRACRPPSTKHFTSWLCLAPGNKISGGKVLSSRTRRSSSRAAALLRLAATTIGEAIPPSVRFIDGCPRGPAKQRR

SEQ ID NO: 449112 - protein, 355 aa, unidentified
MVESKTEAKSSEVGVTDPYRRTEHCGKIHAYRCDKGVGVIGIDISKDHLITSRGRVRRYENNKRGYEEILKMKPCTIEPTGVYAIRPCQYFKEKGIKVLQVSPNMLSREKEFRGKKTDFYDAEKLENMVDKAKEYEYNPLRELVTLYLFLKDIEVKYKNRLKRALFLVSDNDKISKERLEKLAKGDFTQEELYNLEYTPIVLEEIKVLAKTLLETQEKLEEVRRMIEEQVPQDHVLLTIPGVGRLAAGIIIGIVGDVKRFPKPESFVAYCGLDPVVERSGKVVVSKGISKRGNKYLRSLFYFLAEMNYSKNPTLLKFYEAHKDRLQGKKLFTALARKLARIVWSVWYNNKPYEPK

SEQ ID NO: 449113 - protein, 329 aa, unidentified
MGEVSTIGLDIAKSVFQIHGVDADGAVVIRKRISRAKLLEFFATLPACLVGIEACPTAHYWSRRLQAVGHTVRLLPPSYVKAYLKRSKNDANDAAAICEAVTRPSMRFVATKSEQQRSGLMLHRSRQLLVCQRTMLSNAIRGHMAEFGMISAKGRNGTAELLKIIADEQDDRIPAAARFSLGILARQYAVVRAEIVAIEKRIHAWHRSCEESRRLEEIPGVGPIVATALVAEVGDWKTFSSGRSLAAWIGLVPRQYSTGGKERLGGISKQGNRHLRWLLVAGAMAVVRYAHQHGTKRPWLARLMERRPIKVAAVALANKIARMAWAMMV

SEQ ID NO: 449114 - protein, 343 aa, unidentified
MQTVTTIGLDIAKSVFQVHGVDAAGQVVIRRQLKRRTVLAFFEKLPPCLVGIEACASSHHWSRELNALGHTVRLMPPVYVKPYVKRHKNDATDAEAICEAVTRANMRFVATKTSEQQSCLTLHRTRHLLIRQQTSMINAIRAHLAEFGIVAPVGRNGVEQLLGVVADTNDKRLPEVARACVAALGVQLRMLKAQILEFDRMISAWHRSNEMSRRLDKAPGIGPVLATALVATVADPKTFRSGRNFSAWIGLVPKQHSSGGKDRLGHISKQGDRYLRGLFVAGALAVIRYAKIHGTKHRPWLTALLARRPTKIAAIALANKLARMAWAMMVKGERYKEPVALAA

SEQ ID NO: 449115 - protein, 317 aa, unidentified
MYVGIDVSKDQLDVASEDGAFAEQFPNDEGGHGQLTKRLLEVSPTLVVLESTAQYQLEVSLTLAAAKIPLAIVNPRQVRDFAKASGILAKTDKLDAGVIARFGAFAKPAAQPLPDDQTLELEALLTRRRQLVGMIAAEKNRLQAIFGPAKQGVAAQSVRDTLSYLIKQLKQLEKDLQKRLERSPAWKAKEDLLKSVPGVGKVTAMTIAIDLPELGKLNRKQIASLAGMAPFNCDSGKSNGKRRIRGGRASVRTALYMACLASLKHSSEPTASRYDRLKTQGKKPHGVAIVACMRKLLTILNAVVRDGKPWNPALAGA

SEQ ID NO: 449116 - protein, 314 aa, unidentified
MAMHATRPVIGIDTAKEELVIQHDDEKRHLAVDNNPAAIRQWLAGLPKGCDIAIEATSTYHMEITERAHAKGHHVYVVDGYRLKNYREGVGGRAKTDLTDAQLLARYLRKEKDELRRWAPPPKAYRTLQSLLRRRAALVKARTALRQSLSAEPLLKTALATLLKQIDRIDHLIQKRLREAVHAAGLRDQVQRCQAIDGIGELTATALVMAFLRGDFQNSDAFVAFLGLDVRVRDSGKLKGKRRLTKQGDTEVRRLLHCSAMSGARHPTWKAFYQRYRDRGLKTTQALVILARKLARVAFALMKHQENYCAPRLS

SEQ ID NO: 449117 - protein, 390 aa, unidentified
MTYYVGIDIAKYKHDCFIADDSGCVIRDSFTLTNDKDGFDVLLSILKELKPKGQIKIGFESTGHYHFNLKLCLEANGYDYVEFNPLLVHKFSSTQTLRRTKTDKKDASMLAKYLMTIDYKPYVNSFYHINNLKSLTRLRETLITDRTRFLNQITSYLDQIFPEFKPLFENGLNESAFYLLTHYMTPAKMSKLDSNKYSKMKSELRHPISYQKICQIKDAAINSIGHTSKALEYALEASLTLYLTLDKQIDELESKIIEIYDSLNCHIHTIRGISKLTSAGILSEIGNFNKFLTPAQIQAYAGLEPSKDDSGTHDGLGVMVKHGSSYLRKYLMNSAETFYVYNPSISDFYWKKRNEGKHHRIALSHVARRLINTIFYLEKHNQDFDSTLVK

SEQ ID NO: 449118 - protein, 426 aa, unidentified
MAKVEHTSDARVLVGIDISKHRHEVLIAAPGKQRRRKMTITNTIEDFQRLIRVLSEFGLPVRVGFEATGNYHRALMHHLGEAGFDLKLVSSVALARTREALHNSWDKNDPKDAQVILRMLEIGAVQVFHDPMIAGTNDIQELSKTHEVVSKAKTELWHRIPTHYLPLYFPEAERFHRSSRTDWFLAFLEAFQSPHMITAMPKESFVQAPWPILGRRVGKSDLLSDIYETPKTSVALQVHPDSEAIRMFRLVLAEGRSLTRQRNEIEDRAVSLLSELPDFRLLTSIPGVGPINAMTILAEAGDLRRFHHHRQFLKFCGMDLATVQSGMFRGQSKISKYGNARLRRVLWMAGQTAVLQRANSFRDNFERYISQDRHNPHLRRKAYTAVAAKMARTIHAVVKLGEPYRPFFEGTSPGGRTPLSQGRGGA

SEQ ID NO: 449119 - protein, 430 aa, unidentified
MKSNTQNAKIEAITEKTLVLGIDVGSEMHYARAFDYRGIEYSKKPFKFSNTEAGFATFKEWILELKERHEKDKVVPGMEPTGHYWFNLGKFLQDNEMKPVLVNPHHVKKTKELDDNNPTKNDRKDPKVIAGLVREGRYMIPYLPEGVYADLRTASNIRFQLQAELTRIQNRISRWFNIYFPEYKTVYGKPDAKSGMLILKAAPLPEDILTLGIDGVNQIWRDAKLRAVGKARAKTLIEAAEHSVGSKEGAVSARMEIRMLLEDYESRNTRLQEVMVLIEELVRKIPMAEKLLEIKGVGIRTVSGFLAEVGDISRFNNPKELQKLAGLALVENSSGKHKGETTISRRGRKRLRYLLFEVAMSLVSKNQEFRELHNYYTTRRLNPLKKMQSLMAIAAKLIRVFYAMLTKGVDYDPKKMVSDIKRPAVYLQAA

SEQ ID NO: 449120 - protein, 375 aa, unidentified
MKEKVRFLGLDVHAETIAVALAEPDGEVRSLGTIANREESIRKLIKKLGAAEHLRACYEAGPTGYVLYWQLTQLGVECAVVAPTLVPTKAGDRVKTDRRDALKLARSHRSGDLTAVWVPDGDSEALRDLVRTREAAKQDQLRARHRLSKFLLRTGRRPVVGMKAWTEPYMAWVRQVRFERPAQQATLQDYLHEVDHMVARVKRLEQAIAEAVKLASPQVQEVVRGLQALRGIAEISAVTIVAELGQISRFDTAPQLMGYSGAVPSEDSTGKRKRQGRITKTGNAHLRRIAVEAAWSYRHRPAIGPKLRKRQEGVPEPIKEIAWKAQIRLHKRYMKLTAAGKDRRKIMTAVGRELLGFIWAIGVKLETPVKQQIAA

SEQ ID NO: 449121 - protein, 463 aa, unidentified
MKSRPKPRSTAAAKADPGGGGGIDPCQHPHAAGIDIGERELVAAVPPQSTTGPAVRTFTSFTADVEALRDWLLACGIKTAAMESTGNYWITAYDLLEAVGIEVYLVNARHVKGVPGRKTDVQDAAWLQQLHAAGLLRKSYRPAQEIVPLRYLMRYRQGLVAAAAQQVQAMQKVLTELNLKIQHVFSDIDGVSAQAIITAILAGERDPAKLAALRDRRCRSPLATIKEALTGSYREEYLFVLRQSQSTWHRLQEDIAACDVQLTQLTLRVEAEALGALPDPVSGNQHKPGKNSPQIGVFEEAWRYYGVDLSAVPGVSAGLLSVFMSELGTGAQLLQSFRSGSAFASWLGLCPDNRISGGRILKAKTRQVANRVSNALRMGVFGLHRSQNKMGEYTRRMKGRLGKAEGITAGAHKLARILYALIATRHAYDESEAFKITPRSRERQHAQLLKQAQSLGFQLVPAA

SEQ ID NO: 449122 - protein, 270 aa, unidentified
MEHYVGLDVSLKLTAICIVDRTGKIQREGVVHSDPEAIAAFIKSNAPHVVRIGLETGATSTWLWTELKKLGLPVICIDARHAKAALKMQINKSDRNDAVGIARIMQCGWYKEVRVKDLDSHAVKALLVSRALLVKIKRDLENQVRGLLKNLGLVIGPAKMNTFALRAAGLTEDRPELAAAVTPLLKARMAIEQQIAELDRKVMKSARNNAQVRQFMTAPGIGPITALCFLATVDDPGRFRRSRSVGAYVGLTTRRFASGEIDWTVNLEVR

SEQ ID NO: 449123 - protein, 370 aa, unidentified
MSHYRVGCDAHRRYSQFAVLDQDGQLRQQTRVDHQPGAIQAFLESLPEGTPVALESVGNWYWIADEIEAAGCLPLLTHAAKAKVMMGNVNKTDKLDAKGLAKLLHLDSLPTVWLPPGEIRDERELHRTRMALSKLRTALKNRIHATLAKYGITSTEYSDIFAGAGRAWLQATLGRLPPETGRCVAQEIEALDGLQDQIARLEERIRERIALIPSIQLLKSLPGVGDILAIVVDREIGSIDRFATPGQLASYAGLVPTVHASGGKTRFGHMRKPSNQYLKWAFIEAANVVVRHRHHPAWKTKYVCQIYDQVSQRKGHAIAVGAVAHHLAEAAFWILTRQQPYRPPANRQASPKQVQGRAQLVSTEIRELIA

SEQ ID NO: 449124 - protein, 338 aa, unidentified
MALYCGIDLHSRDCWLAMLDERLEVIWETKVGNDLETIFRLLEPHREVLEGVAVESTFNWYWLVDGLMDAGYRVHLTNTWAVKQYEGLKYTDDRHDARWLAHLLALGILPEGYIYPKEERSARDLMRRRSFLVRKRTSFLLAMRGAFECRTGMRISSNDLKKWKTEDVEAHVEDPMAAFGITCLLEPMHALSAQIKKIEKGALARGRLRPEFVPLETVWGIGKILALTIMYEVGEVARFHKVGNFTSYCRLVNTARLSAGKRKGSGNRKNGNPYLSWAFSEAAHHAVKHHTEAQKYFQRKRAKTNGIIAIRALAHKLARASYHVMRDGVDFDPEKTFG

SEQ ID NO: 449125 - protein, 340 aa, unidentified
MSITTIGLDLAKNIFQVCGVTADGAIAFNRPVRRAGLLKFFEKQPPCLVGMEACGSSHYWAREITKLGHDVRLIAPRYVKPYVKRGKSDAADAEAICEAVTRPTMRFVPIKSAEQQAVLCQHRVRDLLIRQRTQLSNVIRGLIGEFGHTVRKGLSYICTFAQAMKAGEMPALPEAAQGVIAGLCDQLLDLQTRIQVLEKQIFKTARKDERVKLLQTIPGIGPVNASAIVATIGSGEQFSTGRDFAAWVGLTPINKSSGGKERLGRISKMGNQYLRKLLINGMTARVRAAKYYPERVDPWTASLLARKPTKLASVAMANKTARIIWAVLSKNEPYRKIETA

SEQ ID NO: 449126 - protein, 367 aa, unidentified
MKKISTVTTKKVEENASQKLTIGLDLGDRFSWYCVLDEVGEVVLEQKVATTAKAMKEVFGGMPRSRLALETGTHSPWVSRVLSELGHEVIVAHARKVRLIGESRKKDDRLDARMLARLVRIDPQLLCPVKHRSAQAQADLMVIRARAGLVRARTSLINTARGVTKSYGERLRGCNPRNLNAEKAQELSPELQAALGPLLGEIDSLSERIREYSERIEQIAKQSYPEVGRLQQVKGVGALIALTYVLTLEDAHRFGKSRDVGCYVGLQPGRRNSGQSEPQLHISKEGDAYLRTLLVQGAHHILGPFGADSDLRRWGLKLAERGGKNGKKRAVIAVARKLAVLLHRLWVSGEAYEPLRHQRPVALPAVA

SEQ ID NO: 449127 - protein, 340 aa, unidentified
MQITTKFYLGIDVSKHWFDLSLLTVINHQKQIMVTERFDNNETGIKQMEQWLKKQNVSFNDNTLLVIENTGIYHRLIWEFCSTHKLPIHIGNAAHIKWSFGIARGKNDVIDSQRLCNYAHKHADELKATPELNPVFIELRDMMTSRSKLVSQSGSIRSHLKELKLSNNKATQKLIEQVHKPVLDGLKKSIALIEKQILNIIHKDDTIKTNYDLLITVPGIGHLTAIYILCCTNNFVDKISGKQLACYAGVVPFQDKSGSSIKGRNKVHKMANKELKKMLHLCALSAVKCYPEFKQYYERKKKEGKHVMSILNAIRNKIVLRAVAVVNNQKPYVENYKKAF

SEQ ID NO: 449128 - protein, 432 aa, unidentified
MSKFFYNPTIGIDVSADFSIAAILAPNGDIFRKPFKIKHDVDGFNHLLKEIKKVEEEFNMKSAIFMESTGVYHLSLFHFLKSNQLEAYVINPLITNSNKNKDIRKVKNDKKDALSIAKIGKFEDIKAYSFLDINIFTIKSLCRDYYKLIDIRSAFKKKLSADLRVIFPGYSSVFSDVTGLSSTTILKNFQNPEAIIDAPKEVILQLLRKSSRKNMAWCNKTYNKLLKVAYSAKIIAISSPRFSVKIISCIETIEGINKQASALMSEIKTAVYSDDTTEQFKYNVDLLMTIPGLGFLTAVTILTETGDFSSFSKPKQLVAYFGIDPSVNESGKFKSDKDKMSKRGTRFGRRSLYAVALASIRSKRNGQATNKILLDYYKTNLVGKKKKVALVAIMHKLINYIFAILRDQKEYELRLPQVHKKMFLENTNNSAA

SEQ ID NO: 449129 - protein, 365 aa, unidentified
MQTVNRSQTLFVGVDVHKDTHTAVGLSPFGEKVFEMTIGNETEDFISLVEKTKVEAEKSGLVPSFGLEDIHSWGERLSSFLAEEGLPVRAVAPILVDHRRQKTTHPEKNDSLDAQGVAEVMIQRINMLPTYKLTEAAQKSKQIRELSLEREWLVKERARLKNQLHVLLHRIHNTEYRSRFKDPFSKKALRYWMRSIPQNTDAMLEQRMKRAVRRLLDLREEIQEIEDGLESMMKDSGQTISTASGCGIVIAAELIGEIGDVARFHSPGALAKYAGCAPREHSSGKTIRWRKTRSGNRRLNRAFHRMALSQISRSGSDAARAYFKRKTSEGKTKAQALVCLRRQLVNVVWMMMKHKTEYVYPQKND

SEQ ID NO: 449130 - protein, 342 aa, unidentified
MTIVTVGIDLAKNVFAVHGVNAAGKPVLIRPNVPRGKLLELIASLPPCLIGMEACSGAHHWARQFQKFGHTARLMAPKFVAPYRLSGKRGKNDAADAAAICEAVARPNMRFVPVKSIEQQSQLMLHRARQGFVEQRTATLNRIRGLLSELGIVLPLKASTVRREATRLLQELPGHANTVIGDLLGEVTRLDERIAQYDRHIAGMARQSTPAQQLMRLRGIGELTATAMVGSVGNGSDFDCGRGLSAWLGLVPSQHSSGGKERLGRIKKSGDSYLRSLLVMGARAVLAAAMNNRNPKQDPISRWARALLARRGYWRAVIAIAAKNARMCWAVLQRGENFKMPA

SEQ ID NO: 449131 - protein, 426 aa, unidentified
MRKRTTYRAVQIKDVKVEKLKEVVEGQAVTLAVDGAKEVPLAAVMKSPDDVILTMKWNQPSEMEEVVELLGRLGARELQVAMEATGTYGDALRAHLWAAGIEVYRVSSKRVHDLAEVHDGVPSRHDAKSAAIIGKLHMEGRSERWPMRSALQRDAVAAVKLMGMYEEQLQRGKGQLEALLARHWPELGSLLKLGSTTQLGLLKTYGSAQAIAANAKAAGALIRKLGRGKHSQEKVAAVLEAAKQSKHVEPTEIERLLIKEHCAEMDRTRRLEALARARVHKILGHEPAVRRMAQVVGKTTAAVLYALMGDPSAYENLPQYIKSLGLNLKETSSGKKKGAVHITKRGPSTPRQYLYLAAMRAVKDCEVVRAWFERKQGRDGGKGKGGKALVAIMRKLAAALWHVARGAAFDVRKLYNVQALGLADGP

SEQ ID NO: 449132 - protein, 404 aa, unidentified
MIFVGIDWSERHHDVCVLDAEGTVLAKGRVPEGIEGVAKLHETLAEHAEQPQEVIVGIETDRGLLVGALVAAGYQVFAINPLSVDRYRDRHSTSGAKSDPGDAKVLADTVRTDRHNHRPVAGDSELASSIKLLARTHQSFIWERQRHVNRLRSALREFYPQALQALGTELASRDAIAVLLIAPTPELGRRLSRSKIAAALRRAGRQRNVGPRAAQIQRALRSDQLGVSASLEETYGVIASSLVGLIAGLNDQIAGLEQGLHRAFEQHPDAEIILSLPGLGSTLGARVLGEFGDDRTRYADARARRNYAGTSPITKASGTHRVVLARFARNERLYDACHMWAFASLTASPGSRRCYDAQRERGKTHNQALRALGNRLVGILHGCLKRGELYREDIAWRVREAEAA

SEQ ID NO: 449133 - protein, 391 aa, unidentified
MNPSQRVVIGMDPHKRSATIEVMAGDETILGAGRFGTDRDGYRAMIKYARQWTDRIWAVEGCQGIGRHIANRLLADGELVVDVPPKLSARARVFATGQGRKTDATDAHSIALVGTRMAGLRPLVNDEQLAVLRILADRRRSLGEDHTRMVSQLHQLLLDLVPGGAKKSLSAAQAKVLLATVRPRDTAGKARRRVAAELIADLERVYQRSKQADKELKELVAATGTSLMDLHGIGPSGAARLLIEVGAVIRFPDRGHFASWNGTAPIDASSGDQVRHRLSRAGNRQINRVLHIMATVQLRNPTEGRAYFDRKKAAGKTSMEAMRALKRRLSDIVYRQMVNDAAVAMATGSGGHQGTSTNSSVTGSHPHTGSSEKSLPEPADSKLRTSMQTTS

SEQ ID NO: 449134 - protein, 387 aa, unidentified
MAQVIIGVDPHKRSATIEIINAREKTVGQGRFGTDRDGYQAMLAAGRKHKDRLWAVEGCNGIGRHVAQRLVADGETVVDVPAKLSARARVFATGQGRKTDPVDARSVAVVALRTEGLRQVVTDDTTVALRLLVDRRDQLGRARTEVVSRLHHLLLELVPGGAKKDLSAQQARALLGTVRPRDVVGKTRRRLASELIGELVVIDKKIKIAKQELTDLVNSTGSRLMDLTGIGPSGAARLLGDIADIARFTSRAHFASWNGTAPIDASSGEQNRHRLSRAGNRRINRALHIMAIVQLRRDTAGRRYHRRRLAEGKTSMEALRALKRRLSDIVYRQMVADTKLLGTGPGGHAGATLQSSAADPNPEIDTSEKSLPGPAEPQPRTPLLIIT

SEQ ID NO: 449135 - protein, 346 aa, unidentified
MSKQILAVGQTEVPHMKKLFCGIDVGAETLAVAVMEWDHPCIQREFANTVTGHKALLSWLGKMKAQVRVSLEATGIYSMDLALALDATEYVEIAVLNPKRVHDFARTLRRSKTDSADAQVLAEFSLRMPFAAWQKPSQSALALRAVSRHLEALVVQQRREANRLHAAERSIATPRCVISDLKRSLAGVGRRIVKLRREAMTLIAADGNLKERFNLLTGVPGIAAVSALQILGELVLLAPDMKVRQWVARSGLDPVHQDSGTSVHKPSRISRAGSRHLRRALYMPALAAVRWDPHMKAFYEALLARHKRKLQALIAVARKLLHAIYGIFRTRTPYDGRRLFPHLETA

SEQ ID NO: 449136 - protein, 379 aa, unidentified
MSKIRFVGLDVHADTIAVAVAEPDGEVRALGLIPNRLESIRKLVVKLGPVKQLKVCYEAGPTGYVLYWQLTALGVACEVVAPSLVPVKPGDRVKTDRRDATKLARSYRAGDLTPVWVPDAAHEALRDLVRTREDARQDQHRARHRLSKFLLRHGQRPPEDVKKTWTLKYMTWIQEHVHFDQPALEATLLDYIHEVEHMAERILRLEKAIAEAIQKTPSEIRAVIEALQALRGVAQLTAVTVVAELGSLSRFPSPRQWMGYSGLVSSEFSSGHKIQRGPITKTGNAHLRRVIIESAWAYQHRPWIGGFLLRRQRDLQLTPEVKEIAWKAQWRLHTRYKKLAAAGKKKPQIVTAVGRELLGFIWAIAVQTEATFPTDRKAA

SEQ ID NO: 449137 - protein, 480 aa, unidentified
MSQQKKHSKPLGEEKTAAGTGKRGRKRKGMCLEDRPILEANAAGIDIGAREVFVAVPPDRDEHPVRVFSTFTEDLEKLAQWLVSCGITTVAMESTGVYWIPLYDVVEKYGVKACLVDARGMKNVPGRRTDWHECQWLQFLHSVGLLRAAFRPEGDVCAVRSMMRYRTELVEMTSQHIQHMHKALTQMNVQIHHVISDLTGLTGLAIVDAIIAGQRDPVVLAKLRDPRIKASEETIRKSLVGNWRAEHLFTLEQSRKSYQHYQGQISACDEAIEKLLVAFVPRVDPTERPLPPDRKRKQRGRKKKNANPNTFDLRTESYKLFGVDLTQIPGLMAMVLMLFSEVGRDMSRWKTAGHFVSWLALCPDNDISGGRVLWRGMRRVHNRAGDLFRMAAYSLHHDATPLGDYLRRMKSKLGPAGATTATAHKIAIIFYTMVKKQVEYDATLWADRDAEREKRFEAKLKRQAQQLGYKLVPIEERPAA

SEQ ID NO: 449138 - protein, 316 aa, unidentified
MITLSVDPHPGSHTVAALDRNGATLANITVSNTAEGLSQLHQFAVPFARRRWAIEGAGNHFIAVFVGQLLERSEIVYSIPPSLTSQYRARRGRKKNDFIDAENVGRALLANPQLTPLHNAEPQRELQELTRAQRRLSEQLRANRGALQELMAESAVRKIIEQVIAVLLKQLTALEKQIQATIQAVMPSLLKLPGVGPIVAGVLLAETGDPKRFASPHHFASYCGAAPVERGSGQNRRMQINPGGNRRLNWALHIVAMVRLRMDGGRSKRFLEQAQLRGKTKRSALRLLKTYIARELFRVLSTGQLHSLPAEAHPIG

SEQ ID NO: 449139 - protein, 425 aa, unidentified
MDVMHERCAGLDVHKATIVACVRTVTGGKVNRECRTFDTTTAGLLALLAWLTESGCTHVAMEATGVYWKPVWNILSDGDFELMLANAAHIKNVPGRKTDVNDAMWIADLTACGLIKASFVPGEATWELRSLLRARKQQTREQTRDIQRIQKTLEEANIKLDSVISDILGLSGRRMIKAMIAGVTDPSKLVDLADRRIKATREELRDALHGRLTDHHRFLLGIYLKQYDALDALIMEIDRRVDASVARLDEETKAQAGQCPFRSLIELLCTIPGVSTLGAMIILSEIGRDMSRFPTAGHLVAWAGLCPGQNESAGKRRSSRLRKGAPWLKTLLVQCAWSASKKKDSYYKAQFHRLKAKRGPKTAICAVAAAMLTAIYHMLKDGTEHQDLGARHFDHRSTKLKANRLVAQLSKLGFKVEIQPIAEAA

SEQ ID NO: 449140 - protein, 340 aa, unidentified
MGEVITIGLDLAKSVFQAHGADGSGEVVFRKKLRRDQMRGFFGGQPRCLVAMEACASAHYWAREIGALGHETRLIAPAYVKPFVKRQKNDMADAEAICEAAQRPTMRFVAPKSAEAQAAGVVFRTRDLLVRQRTQLINALRGHLAEFGHIARKGPGHSARLIELVRDLTAELPPAARSVLIVIVDSLEAMQGKIAALDREIAARARSSEAARRLMTIPGVGPVTATAMVALAPPASTFRRGRDFAAWLGLTPRQHSSGGKERLGRTSKMGERSLRRLLILGASSAARMAARNGARDPWLARMLARKPRMLVTVALANKMARIVWALMAHGGSYRAPAMAV

SEQ ID NO: 449141 - protein, 343 aa, unidentified
MKLSRVGVDLAKNVYQLHGVDRHGKTVWKRRLRRGQWLQALLDKAEPGCEIGMEACTGAHHWARELQSRGYTVRLIAPQFVKPYVKSNKNDANDAEAICEAMSRPHMRFVTVKSIEQQDIQATHRVRTELKDHRNAKANQIRGLVAEYGLVAPQTLLALRRAIPEWLEDADNGLTIYFRSLLHGLWDDLLTLEDRLKELDKAIEKIARSNEVAKRLQQLRGVGPIVATALVATVGDGAQYSKGRQMAAALGLTPRQYSSGDKHRLLGISKRGDVYLRTQMIHGARAVVSQAKHRDDPLSRWVTDIAKRRHPNVAAVALANKTARMAWAMLRNDTDYDPGIGAS

SEQ ID NO: 449142 - protein, 405 aa, unidentified
MDIIVERGAGLDVHKHSVVTCIMGTGIKKEIRTYSTMTNDLLRLKAWLKEREITHVAMESTGVYWKPIFNILEDAFEVLLVNARHVKNVPGRKTDVLDSEWLCKLLRSRLVRGSFIPPKEVRELRDLTRYKRKLIQTITSEKQRVEKILEDANIKLSSIASDTFGASGKRIIQELLKGELEPGAMAELSKGRLRNRKEELKEALVGHVEEHHKRMIRTSLEHINAMEEIFLSVEQKIQEQIELHFKEAYELLKTIPPVKDNASVLIAEMGVNMDLFPTEAHLSSWAGMSPGNHESAGKKKSGKTTHGNNYLKSILTEFAWIASKMKGTYLCAKYQSLVGRKGKKTTLAAVGHKILISCYYILKYRVPYKELGANYLDERKKDRIARSYVKRLTTLGYAVTLKEVA

SEQ ID NO: 449143 - protein, 400 aa, unidentified
MRQPVPHGWAGVDVGKGHHWVCLIDEAGATVWSSKVVNDEGAILEAIGGVLERADQVVWAVDVTGTMSGLLLALLAAHGQRVKYAPGRTVNQMATAYRGEGKTDARDAYVIAETVRHRNDLQEVEVASALVTDLRLLVAHRSDLVGDRVRLVNRLRDVLSGYFPALERAFDYAHSRGPVVLLTGYQTPAAIRARGDSRLQAWLVKRKVRNADRIATAAVSAAKSQRTVVPGQEVAAGIVADLAAQILAIDTRINDLETRIASTFRDHPQAAIIESLPGMGPILGAELIAAAGNLNGYANAGRLASAAGLVPVPRDSGRRTGNLHRPTRYSRKLRRVFYLSAQASMMRDGPNRDFYLKKRGEGLMHVQALIALARRRVDVLWALLRDNRVFETTPPALRPA

SEQ ID NO: 449144 - protein, 388 aa, unidentified
MLPSIHHASTEQTATVRPDLTLYASLELSRATWLVTCLLPERDRMSKYSTPGGDGCALLELLECMRTRAQQLTGCPVKIVVIQEAGLDGFWVHRLLEANGIESHVVDPASIAVPRRRRRAKTDAIDGETLLRTLLAWSRGEPRVCAMVVPPTPEEEDARRVCRERAILLRERIRHTNRIKGLLAGQGIMGFNPLHKDRRQLLDAARTGDGRPLPPQLRAEILREIELIELLLRQIADVEAAREILAGRKTAKVPSPVVLLKQLKGIGPEIASVLYFEGLFRSFGNRRQLAAYAGLAPTPWRSGTVDQEQGISKAGNRRLRRTMIELAWLWQRHQPASALSRWFHTRVGNERGRIRRITIVALARKLLIAVWRYVTQGEVPEGAALKAA

SEQ ID NO: 449145 - protein, 348 aa, unidentified
MELFIGLDVSLASTAVCVLDSHGKEVKETTVTSEPEALVEFMRGLSGRVAAVGLEAGPLSQWLHRHLTEAGFETVLMETRQVKGALKAMPINTDRRDAAGIARLLQMGWFRPVHCKSVSAQEMRAVLTARKSIQQACVNLELSIRGILRNFGLKIGKVSRGSFEFRVGELVEDNSMLKAAADPILRVRAVLRNELAALDKLTRDRAKADSVCQLMMTMPGVGAVVALTVKAAIDDPERFRSSKDVGPWVGLTPRRAQSGERDIIGQITRAGDTSLRTALVQAATIMLNRGRPNWLTAWALRVAQRRGKKRATVGLARRIGVVLHRMWRDSTEFRFTRKPNMPPGVASA

SEQ ID NO: 449146 - protein, 367 aa, unidentified
MNSVARSAGLIHLGMDTSKDKIAVGILREDQTSPDVEMIFNDEASIRRLINRFPDPGQLRACYEAGPLGFELHRLLTSMGVVCEVIAPSLIPTAPGDRVKTDRRDCKRLARLYRAGELVAIRVPTPAEEAVRDLCRARADLVDDRMRTRHRLSKFLLRHDRIWRGGGAWTGKHDLWLLGQRFDEAALTSTYGHYRAMLIARDGELAAIEADLAYWYTRGPFADAVARLGAYRGVAYLGALTIASEVGDWRRFPTARAFMGFTGLVPSEYSSGNSVHRGHITKAGNAHLRTQLVETAWQYQHRPNIGATIARRHQGLPPATVARSWTAQQRLCARFRRLDARKTSRNVVAVAIARELAGFLWNEMTSD

SEQ ID NO: 449147 - protein, 310 aa, unidentified
MKISTLSIDLAKNVFQVAGFNSNHKRECNKRLNRAKLNAFLANTPPCRVVMEACYSSHYWGRVFSSYGHTVDLIPAQHVTPFVRGNKNDSNDALAIYEASLRPHIKFVPIKTEAQQEILMLHKIRERLLQNRIAATNQLRGLLVDFGYVFPVGIKAFEQGIIALESDSELRPQLRIMVSDIYTEYKTLVKRIKAIEAMLTAHVERDTNAKILHSIPGVGVLNASAYAASIGNGQAFKSAKELGVWLGLTPKQYASGDKSKMSGITKRGNSYLRKQLIHGARALIARSHHKTDALSQWINQFARKNTLIVW

SEQ ID NO: 449148 - protein, 347 aa, unidentified
MRFYTNQHKFYCGIDLHARTMYLCILNQEGKIVLHRDIKTSPDIFLKTIAPYREDIVVAVECIFTWYWMADLCSRENISFILGHALYMKAIHGGKAKNDKLDAYKIASLLRGGMMPMAYVYPSDMRSTRDLLRRRMHLVRKRAELLAHVQNTNHQYNLPEIGKNIGKKGNRAGLAQRFTDASVRKSIELDLGLIDHYDQLLHRVEHEISLIAKIDDADSYFRLRSIPGIGRILGLIILYEIHDISRFPRVQDFVSYCRLVKCAKESAGKIVGSSGKKIGNVHLKWAFSEAAVLFLRRNPEAVKYRAKLERKHGKAKSLTILAHKLARAVYNILKKKEVFNPKVFFAK

SEQ ID NO: 449149 - protein, 345 aa, unidentified
MSNLQYSVGLDYHTSFVQVCILDPEGKVKSNFKAENHAQTIIHKLKTLSPDAKFCAGIEACCGATDLADELKKLGLDITLAHASTVARLKKSPDKSDYTDARMLADLVRVGWLPAVWLPDHSTRQLRMLVRSRQKLAESHKSTKLRITAMLRSERVKLTEKPWTKAWLEAVSNCKRFGSQGLFVINSLLQQIEFLKQQMKAVEEQMFQATLHDGLVQYLLTIKGIGLVTAVILRAELGNATRFNNGKQMAHYCGLSPCNASSGKKQSDSGLIHAANNLLRTTLIELAHRLVRYDERWQELYEKLKFNGKPICVAICAIANRFTRCLHHKMKEVEIRLEEASQKKD

SEQ ID NO: 449150 - protein, 429 aa, unidentified
MSYRIAGIDVHKKMLAVVVSDVEIESEYQFERRMFGSSPEQLRSLAAWLLEQEAEEVVMESTAPYWKPVWGALERYWKPLREKREGARRRSGTLHLAQAPSNRGPRGRKKDFPDAERLVKRLVARELTLRFVPDAEQRLWRTVTRRKYQLTRHRVRLQNQLESFLEEAHIKLSSLVSDLLGLSARRMLKALADGETNPAALAALADQRLRATPAQLCDALGACAELSPVYRRLLKMALEELRLIDEQIGQLDQEMANLLSQHQDAVKRLAEVPGLGVDSAQQIIAEVGPTSATFPSEKCLSSWVGACPGDDESAGVNYSHRSPKGNRHMRRLLHQAANAAARTKGSIFEIVYRRSVPRLGHNQAIGTIAHRQCRLIWLILHQGVRYEERGPAVTKRSKQLRTSKMLRQLRSLGYRIEPPNPQPSQAQVQ

SEQ ID NO: 449151 - protein, 341 aa, unidentified
MNHYAGIDVSLKDSSVCVADANGKIVRESTVASEPEALIAWFSELGFAVTRIGLEAGPLSQWLYAAMQKAGLAVELLETRHVRDAFKAMPVKTDRKDAQGIAQLMRLGWFRPVHCKSIEAQETRAILSARKLVQSKLHDVEMSLRGTLRGFGLKVGKTTPNRFAARIKELVERHPTLQIIATSLLAVHAVLLREFKVFEKQIRIMARDDERARLLMSTPGVGVLVALTYVSAIDDPGRFTSSKRAGAHFGLTPKKYQSGETDITGRISKIGDKGVRTALYEAAHIILTKPVKGSALKSWAARLAKRAGMNKAKVALARKLAVIMHRMLVDRTPFNPAAAAA

SEQ ID NO: 449152 - protein, 364 aa, unidentified
MKKLTTKKSMTSKRLERQDEFSSYVGVDLGDKHSCLCILDRWGRIAEELRGRTTVKEFEEFFGKQPRSRVAMEAGSQSRWVCEIAKKHGHEVYVANPHKVQYISGGDDKNDPGDAYKLAELSYVRPSMLHAISHRKRQEQVHLEAIRARDLLVRSRADMINAVRGMSKAFAETLVQCSAESFTTKAAGKLPEDLRSATAPLLRVIDQLSEEVAALDQWIEHVARQQYPAYQLLERVNGVGTLTAVTYMLTLGDAGRFQRSRDVGAYLGMRPRQKDSGRSSPQLGITKTGDAYLRKLLVNCAHYMIGKFGADSDLRRFGLRLAARGGKNAKKRAAVAVARKLSVLLHRLWVSGEAYEALRNSQAA

SEQ ID NO: 449153 - protein, 413 aa, unidentified
MKSAPNTLPTEPANGVTGGIDWARDDHAVSVVDHLGREIVRATIEHNATGLRELLTVLQRAGAREVAIERPDGPVVDTLLNAGVTVVVISPHQVKNLRSRYGSAGNKDDRFDAFVLADTLRTDRARLHRLLPDTAATATLRQTCRARKDLVAHRVAVANQLRAHLMIVFPGAVGLFADLDSQISLTFLTRFNCQDRADWLSVTRLATWLASVGYSGRTDPAVLHRRLTSAPRGTTGTDTTATTGAFVTVLKSLNAQIDALDADIADQLARHADAQIFTSLPRSGTVRAARLLAEIGDCRAKFPTPESLACLAGVAPSTRQSGKVIHVGFRWGANKQLRDAVTDFAADSRRANPWAADIYNRAIARNKSHQQAVRILARAWLYVIWHCWQDGVAYNPANHRALQTLLNHQHRAA

SEQ ID NO: 449154 - protein, 475 aa, unidentified
MTSRRLVGIDLGIASAHTVRILDETGTTLAKRRAHPTLESLSEVEQTALAGCDESTRLEVIVEPTGPAWLPIAVFFISRGHLVFRVSSAKASDLRKFFSRHTKTNGIDADTLARLPLVDPGGLQPLRLAGVEHAALDRRVRACDRLTRQGAEHKVRIKDLVRQMLPMTPLTGDLGAADLAVLERWADPNALLKAGRKRLTALIVKASNNHQGAERAQQWLDAARASIELYGDHPALAYVDLAAEVATEVRLLRAVKAELANHAAERETAYRWVDPTGLARSLPGLADVGGPALVAVMGDPARFAKGKQFRAFTGLTPKASETGNTDRKGQAMSKAGSSLLRTTLIRAADHARKQDPQLARIYYLQMVERGKDHLGALCVVAANLAERAWAVMNRAMPYVICDTNGRPITHDQATTIIAEHWTVPAEVRARRRSTKKGKAPQTTRAGRHARGDLPRHSIVDHHPHRGQQDPQRRSA

SEQ ID NO: 449155 - protein, 348 aa, unidentified
MVALGVDAHKRSHTIVAVDANGRQLASKTITTTTKDHLALLNWAEQLADDGEGLLWAVEDCRHLSRRLERDLLAAGQSIVRVPPKLMAHVRDSARTYGKSDPIDALAVARAAQREPDLPVARLDGPDRDVRLLSDHRETLVAERTRAICRLRWHLHELDPGWEPKSRSLDRISTLDAVAARIQNLDGTVARLARGLVDRSRELTLQIKDLTTEITVLVSTMAPALIAIPGCGAITAAKILGETAGVDRFRSRDAFARHNGTAPMPVWSSNKARHRLSRTGNRQLNAALHRIALTQAHWHEPAKLMMQRRKAGGDSGMEALRVLKRRLSDVVYAALRADLQPMAQHVAA

SEQ ID NO: 449156 - protein, 412 aa, unidentified
MRVVMKVGCGLDVHKRSVTACLLKIGPRGKRVTEVRTFATTTAQLKELAGWLEEEGCRHVAMESTGVYWKPVFNILESVCEEVILVNAQHIKNVPGRKTDVKDSEWIADLLVHGLLSASFIPPQEIRELRELTRYRKKLIQQRGDQSNRIQKLLEACNIKLASVASDVLGKSGWEMLEALVEGQTDPNKLAEMARGRMRKKIPQLISALEGHISDTQRWLLGEQLELVAQLDQKIARLDGKIKELTAPFEEIIVRLCEVPGVSRRVSEVVLAEIGVDMQRFPTAKHLASWAGMCPGHHESAGKRKSGRTRHGSSWLKTALVEAGWSASRTKDTYLAAQFRNISRRRGAKRACVAVGHSILTIVYHLISQPDIRFEDLGSDHFVTPHRHQLAQKLVKRLDSLGFKATVEWKAA

SEQ ID NO: 449157 - protein, 361 aa, unidentified
MSVERMHVGLDVHAHVVVAAALDAETGELVRRRLGSSPGEVLAWLRSLPGPVAAAYEAGPTGFTLARALRAGGVRCEVLAPSKLQRPVGERVKTDARDALHIAKLLRLDEIVTVRVPSETQEAARDLVRAREDARRDLMSARHRLGKLLLRHGVAYPGKTAWTRAHHDWLRQQRFDPPGLQAAFDAAHEAIVAVEDRRDRLDDAIRSMAADSEFTGVAQRLACLRGVSTLTAFGLAVEIGDWTRLDGRRIGAYLGLVPTESSSGQSRSQGGLTRTGNMHACRLLVEAAWHHRPRYTPTSPTLRARWALASPAARERAHQGNQRLHHRWRSFEARGKRKVVANAAVARELAGWCWSLAVMEA

SEQ ID NO: 449158 - protein, 375 aa, unidentified
MTKHSEVFVALDTSKLRNAVAIAEAGRAGEVRFLGEIENTAAATTKLVRKLEAKYERITFCYEAGPTGYELQRHIRGLGHECIVVAPSLIPKKPGDRVKTNRRDAVSLVKLSRAGELTAVWVPERRHEAMRDLTRAREAAVIDLRAKRQRVSALLLRQGRSYPADKKTWTKVHMNWLASQRFEQPELGVVFAEMMFATRQAQERVERLEQAIRTAVPDWSLAEMVTAFMAFRGIDLVSATCLLAELGDLTRFPTAPEVMGYVGLGCSEGSTGDKIKRGGITKSGNRRARRMLVECAWSYQHPPRVSIAKQANVAAAPAKVREIAWKAQCRLNRRYRVLLRRGKLKTVAITAVARELAGFLWAAARELSSPERVAK

SEQ ID NO: 449159 - protein, 337 aa, unidentified
MSVYVGIDVHRKRSQVAVVTEEGQVQLNKNVVNGSEPFLRLIGDLPSGTPVAFEAAFGWSWLADLLEEYGFDAHLVHPLRCKAIASARLKNDKVDAAILAQLLRADLLPEAWIAPPPVRQLRAVLRHRIGLVRLGTQLRNRIHAVAADHGYDRPASYWTGPGRGWLAELDLPAASREIVTDCLTVIDGLAPLTDRIDGELHTHAKTDPRVKILRTLPGVGEFTALVMLAEIGDITRFGSARKLASWAGLTPTVRGSDLTVRHGHISKQGSAWLRWVLNQAAQTAKRSPEFAATYAAIAKRRGKKIATIAIARKLLTRAYHLLADMQATDTTTPPRRP

SEQ ID NO: 449160 - protein, 429 aa, unidentified
MRNESTPGARGPVFCGVDTHADSHWLCVLDWRGRKVLSRRFPADAAGYEALAGAIAAAGEPACVAMEGTSSYGAGLTRHLASLGMPVREALSPARMQRRRPGQGKCDEADAERAARAAMSGSKLGTPKSQDGWVDGVRCMLAARSGAVKARTSAINTARSLLTTAPEGLRSRFRGMAGPRLMEELPSVRAEGALGAALGALADLWAAARDAALDMERAIEASLEENCPALLAMYGCGPVSAAKLAVAAGDNPGRLRSEASFAAICGACPIPASSGKTVRHRLNRGGDRQANSALHEIARQRVMRDPETAEYAERARARGKSDREVMRCLKRYVAREAYRALMRPHEVRRPEDASGLVAARRAARVSQVRAASILGTSEKYISMLERGQRELKPIRRAYEAWVEAGLPLDWDRQAFEAERKMDSKKHLAK

SEQ ID NO: 449161 - protein, 521 aa, unidentified
MSRPRANRSAKTRKAFLLQKPTGQFTPRVQAVGPEHFGIVAIDCAKARSRYLLADFYGRTLLEPTTLAHTAGDFHNAIARIRQSLQQHDLRDVVVAIERTGEYHQPVQRAFRQARFETRLVHPFTAKQYRQPADPGNKTDDTDLAAIFRATTQGFGLCEPTWPDTYVTLQLLRRHRRDLVSKNTILCCQIREVLHAAMPGYAECFDRLWAAPTALMLARHTTSAQAVRQAGRQGLQQIAADAHIPCQRGTLDKILAWAQQAPPGHDQSLHLRHILNVLDDDRRQKTQQILELERSLAHLVVATPYALLLRIPGINIVSIADLAGELGPIPLYLNGNAITGRAGLMPCRYQSDRVDCANGPLQRRGHRRLRAVLMQCASNLVQYNHHFKARAQLWKHAGKDPRWIRVKVAKIFSRLVFASVAGRHVFPHPCCQPRHYILGKLLTFHQEHHTPPDQMRQDLEAAIEFLPASARADEAQPLHELLDEQAKRRRGPQPLASVIPLVLARLGLTAVESTGCESAGP

SEQ ID NO: 449162 - protein, 313 aa, unidentified
MITEEVHVVGVDVSKATLELGSLSLTLPASIPNTPAGFKILLKSISKSITPVHIVCEATGPYHGPLVRFLHQAGIKVSVVNPRLTRDFARARGRLAKTDAIDALLLADYGRTMKPDPTTPPEEHVVLLDELVTRRAQLVEDRARERNRLEQSSCPDVAASLRLHIRHLDEQIKKLLKRIAEVVEKHPSLKAKVSLLAQVHGIGTLTASVLLATLPELGTLSKNEVTALAGLAPFNRDSGAFRGKRSIHGGRIGVRCAIYMSALSASRGNPILKAFYQRLRAVGKPHKVALVAVMRKLLIYLNSLLKQHSLSPA

SEQ ID NO: 449163 - protein, 338 aa, unidentified
MTMYAGLDVSDKTTHICVVDGDGVVVWRGVCATDPAVITKTLARHARGVDRVVLETGPLSAFLYHGLVERGVAAICICARHAKGVLSVRVNKSDPHDAEGLAQLARTGWFKMVRIKQEATHLDRAQLKIREQLVKAHRSMVNQLRGLLKLFGLRMGRVTTPGKRAARLTALFAQKPELEPVMRPLIGSLEALEVQIRRSNRLLAASAAADPVAARLMTVPGVGPVAALVFRSTIEDPDRFARGEDAGAFAGLVPRRSQSGERDTKGHISKAGDPMLRSALYEAANSLLGRVKRPSALQTWGKALAEAKGTKCARVAVARKLAILLHRLWQSDTEFCWN

SEQ ID NO: 449164 - protein, 313 aa, unidentified
MKEEKTFIGIDVSKEKLDVGVRPQADFMTFANTEEGISLMTDFVKSKRPELIVLEATGGLEMAALRSLAVAGLPAVCVNPRQVRDFAKAMGVLAKTDKIDAHVIARFADSVRPEIRPLKTEETEMLDAFNTRRNQLIIMLTAEKNRLTTASKWTKKDIEKSIKGLEKALAKINREVENLIKKSPHWRHMDKILQSVPGVGPVMSLTILADLPEIGTMNRRQIAALVGVAPLNRDSGKYKGRRAIWGGRARIRSVLYMCVISGICHNPKIRVFYNRLISSGKKHKVAITACMRKLMIILNTMIKNGACWNESGC

SEQ ID NO: 449165 - protein, 343 aa, unidentified
MQYYVGLDVSLKQTSICVVNQAGSVVREGVVDSDPEAIAAFVRSKAPGAVRIGLETGPTATWLWSELKQLGLPVICIDARHARAVLKMQINKIDRNDAAGIARIMQTGWFKEVRVKGLDSHSVRALLASRALLVKIKRDLENQIRGLLKNVGLVIGRAKFNVFAVRAEELIEDRPELIAVVGPLLKARQAIEQQTDDLDRKALKLARYDAQVRRFMTVPGVGPITALCFKATIDDPTRFKRSRSVGAYVGLTSRRHASGEIDWTGRISKCGDAMLRSYLFEAAGVLLTRVPKWSALKAWGMRLAKRNGLRKATVAVARKLAVILHRMWIDRTEFNWSKKEVAA

SEQ ID NO: 449166 - protein, 489 aa, unidentified
MAKRKMSTFERLNMGRMNRSQRRELGRRVAAGDPGLAIVHADAGGIDVGNESHFVAVPPDRDAHPVREFGCWTAALNQMAEWLKSCRVDTVALQATGVYWIALYDILEQHGIRVVLVNAQHTKNVPGRKTDVQECQWLMKLHTYGLVRDSFRLQQELESVRTIWRVRDRHVKEAGRAVQHMQKALTKMNVQLANVISDVSGVSGQAILSAVLKGERDPYKLADLAHSRIQASREEVARSLEGNWRKDVLFELQQAVDSFHFAHRQMQECDEQLRLYLVSLPTRVLVIPAPSKGTAETPESPTRKRKKAKPGDNAPRIDLREELQRICGVDLTSIDGISVMTAFTVLSEVGTDMAHFKDENHFSSWMGLAPSKDISGGKIVGRGKKKVNNRVAVVLRTAATTLLRSDTYLGARYRHLRRQLPTFKAAVKAMARYLAVLIYRMLTKGEAWVDRGAKRFEQRSTERELARLRTKAKANGFDLVPLPRPARVG

SEQ ID NO: 449167 - protein, 369 aa, unidentified
METIYIGVDFHARQQTVCYLKTESKELVVIELKHQHQDEVRAFYSQFSGQVIVGLEASGYSPWFEQLLEDLGHEVWLGHATEIRRRARWRQKNDRRDAELILDLLIHDEFPRLHRPAPQSREIMRMLRYRQKLIKIRTISKNSLQTLALQSGLAKRSHLFTKAGQQELRAAEMSPAMQWQREQWLQLLEPINERLCETMLWLKLQTKDDHRISRLRTHPGIGLLTSLCLVHTLWPVSRFRNQRKVAAYAGLEPMERSSAERKRFLGISKAGSRVLRYLLVEAAHTAVKKDDDLKRFYQRLVERRGRPKAKVAAARKLLIRSYIMLRDEIDYAEFRRRAVAARLARQSTRPNMPEKLIGQPASPEGQDPK

SEQ ID NO: 449168 - protein, 350 aa, unidentified
MSMLAELVEVVIGVDTHKDTHTAAVLDARTSGVLARATVTADPDGYAELVALAEQHSGLRAWAMEGTGGYGAGLARHLAAADELVVELDRPKRPARRAGAKSDPIDAERAARDALARTQLAQPKTGPERAALQMRLTARRAAVEAAATAQRQLLAMVITGPEAVRGRFRGQTTRTMITTAARLRPGASSGDIEHLTALTVLHDLARRIRFLEAEALDHEKAIRTIVRSWRPDLLDLTGVGPIVAATVLTAWSHPGRCRSDAAFAMLAGTAPIPASSGKTVRYRLNRSGDRQLNRALHTVVLTRLQRDQRTRAYADRRRTEGKTDREIKRCLKRYIARELYRRLESPPLAA

SEQ ID NO: 449169 - protein, 392 aa, unidentified
MVISVGIDVSKDKHDCFIVSSEGEVLADVFTIPNNMDGFHRLLQRIQDCTNSQDKIKVGLEATGHYSYNLLGFLFDNGLTTYVLNPLRTNLYRKSLSLRKTKTDRVDARTIASMLLSDAGLKPYTSTAYHNEELKSLTRYRFDKVKERAKLKSSISRLVCILFPELEKLVPTLHMTSVYSLLEEFPGAKQVAAAHLTRLKTLLETASKGHYKRDMALEIRDAARNSIGSRMPAKSLELQHTIRLTRELDREIAEIEEQIQSIMGELHSPITTIPGLGFRMAAMILAEVGDFTRFDSPDKLLAYAGMSPSTYQSGQLKNCYPHMEKRGSRYLRYALYNATKYVCYWDPAFADYLAKKRAEGKHYNIAISHAAKKLVRLIFAMEKSMQPYCSAS

SEQ ID NO: 449170 - protein, 341 aa, unidentified
MEQVTTIGLDIAKQVFHVHGADAGGAALFSRKLTRAKLLSFFASQPRCLVAMEACGGAHHWARELKLLGHEVRLIPPAYVKPFVKRQKNDARDAEAICEAAQRPGMRFVAVKDEAQQASAAVFRARDLLVRQRTQLINALRGLVAEHGWVAPQGRFRMAQLMADIEAPACALPEAARGAFRVMIDTIRSLDGHIDRFEREIAGRAKQDPDARRLVTIPSVGPVIATAVLALAPPAESFRCGRDFAAWLGLTPRQRSTGGKERLGSITKAGERTLRRLLIIGASAVVRQASRHGAPTGSWLAKMLARKPRMLVTVALANKTARIIWALLAKGGVYKAPAVAA

SEQ ID NO: 449171 - protein, 444 aa, unidentified
MSTQYRIAGIDVHKKMLAVVVTDVAAAGEWIWERRAFGTLDSDLRALAAWFAECGVREAAMESTAQYWVPVWRALESQCELHLAQAQSNRGPQGRKRDFADAERLVRRYVAGELILSFVPAAQQRLWRSATRARHQLTSDRVRLQNQLEALLEDAQIKLSSCVSDLLGLSSQRMLQALAHGESNPQYLASLASPGLRATPERLQDALCQASRMQDLHRQLLQLLLERLSLIEKQREILNQTIAQALHEHSAAMARLVEIPGFGVNSAQQILAEVGPQAATFPSAAHLASWAGVCPGRHESAGVSTTDRCPKGSRTMRRVLCELALAAVKTKGCWFQSLYRRLVVRLGHAKAIWAVAHRLCCLVWKILHEGVSYREHSPTPNLLVAKQRASRLIRQLQALGYAVQLTPLTPGLSVVGSFRPCGCRISAPAFPGSGLRKLPSTDSK

SEQ ID NO: 449172 - protein, 358 aa, unidentified
MFVIGIDPHRGSHTAAVLDGTEELLAEYRVVADRRQRQRLLEWAAPFTPRIWAGEGATGTGALLAQQLVAAGEQVLDVPPTLSARVRLLDSGRSDKTDSHDARAAAVVALRHRDLRPVRAEDHVAMLRLLAKRHHDLVAARTRAVCRLHTTLCYLAEGHFPKRMKAAQAAAILARIRPTDPVAMERKALARDLLAEIRRLDRALGDLIARITTAVTASGTTVTGVFGVGPVVAAYLIGHSGGIRRFPTAGHYARYNGTAPIQASSGPTKRHRLNPRGNRQLNHALHMAAVTQVRNDTPGRPTTCASRPRGSRRRTPCAPSSGASATSSTSSSSPTAADRGPGRTSGNDSMACVTGSAP

SEQ ID NO: 449173 - protein, 405 aa, unidentified
MKQPATLHYAGVDWATRTHAVCVVDPHGAVRARFEVPNTGKGFSGLCNRLVKLGVAGVAIERPDGPLVEAMLEAALRVVVVTPRQVKALRSRYAASGAKSDPADAYLLADVLRTDGHRLASLTPDSDPTKVLRALTRTRKDLQEARMALVNQLTSQLERCFPGAVGLVAELHSAVAVAFLRRYPTSHATAGLTQAKLAAFLRRLHYPARTPVTTLLGRIQAAPAAGISPAEATGRATCVLALLEAIQVTARQERELEAEIVERLEVHADQHRFTSLPRAGHGVRAAALLAELGDVRARFPDDDCLAALGGAAPVTITSGKRRVVKFRWACDKKLRTAIVDFADDSRHASPWAAHVYAQALARTGRHPHAVRILARAWIRVIWRIWQHGVAYDPAKHRGAVMLQAT

SEQ ID NO: 449174 - protein, 337 aa, unidentified
MAKEKAVRWVGVDVSARWVDGSRAAADEPVSARQFANTPAGHGELASWLTQGGRRARVVLEATGLYSLDLALRLQRTARIEVMVINPRASKEFAGAWGQRAHTDASAAQGLREYAARMPFTPWTPPGPQALALRTIMRRVVALIEARVQERNRLHALSATEALPTVVRTDIRQHIRTLERRIARLEHEARALVEPAPALHAGFRHLCSVKGIGRRSALMILAEVAVLPGELTARQWVAHAGLDPRPIRSGTSVHPPVRMSKHGNVYMRRSLFMPALVAVRRNPAVQRFATELTARGKAPLQVLVAVMRKLLHAIYGMLKTDTDFDGEKFRRSAHAEG

SEQ ID NO: 449175 - protein, 343 aa, unidentified
MYYIGLDIHKKTISYCVKDASGQIHREGKIGSTRCELDSWIKTLPQPRMIAMEATIFTGWIYDHLLPHAEKVKVANPLMLRAIAAAKRKNDRIDSNKIADCLRCDFLPECYMASTAIRDRRRTLRYRNLVLKQMTQMKNRISGLLMETGVSYNKQRLHKLGYFMELMSCNEEVNESIRPLLKLSRETVVRSQRLDYALVHSLERDPLLAERLKRLRTIPGVGPITALTWALEIGDVSRFQSVKQAVSYCGLCSAERSSADKLVRMPISKQRNKHIQQVLVEAAKLAPRYSQELALVYERERQRGNKNRATLAVARKMVAYMLAVERRKQDFVPAKEFGGTAAA

SEQ ID NO: 449176 - protein, 315 aa, unidentified
MLAEKVDYVIGVDTHRDRHTLAVVVASTGAVVAQHAVGTAIRGYAAAVAFAERDAAGVRVWAVEGAGHYGAGFTRYLSGRGQLVIEVGRTARGERRLHGKDDALDAVRAARSALASKTLTLPRAGQRQEALRVLLLTRRSAVDVRRLALVQLRSVIVTAPESLREELRRLPVGQLIRRCSRFRRSDSRTPDELAVVLVLRSLARRIEAATEEANDLEREVIGHVRALVPELLNEPGVGPIVAAQLIVTWSHRGRLRSEAAFARLAGVAPLPASSGQTIRHRLSRGGDRQLNRALHTVILHRRQHDPATRDYIALR

SEQ ID NO: 449177 - protein, 311 aa, unidentified
MEHSPFVGIDVSKDQLDVHIHPTDDALRVRYDDAGLGTLIDRLRAVAPTVVVLEATGGYEVTVAATLSSAGLPVAIVNPRQIRDFARATGQLAKTDSLDARVIALFAAAVRPAARPVPDDQAQALGELIARRRQLVDMLGAEHNRRRLLRDRRLQRHLQAHIDWLEEALRRLDHDLSTLIRSSPLWREADDLLRSVPGIGPVTASTLIADLPELGHLDRRRIAALVGLAPFARDSGAFRGRRMITGGRAHIRRVLYMATLTAIKHNPAIRDFYRRLVAAGRPGKVALTAAMRKLLIVLNAMLRDHRPWQLA

SEQ ID NO: 449178 - protein, 336 aa, unidentified
MFIIGCDYHPRFQMIAILEKATGEVKVLRLEHESGEAKRFYAGLPKGVLVGIEATGSTQWFERMVGECGHELWVGDPAEIRARRVRKQKTDERDALHLLDLLLTNRFPRVWVPSPEDRDARQLLQHRQKLVGMRTSVKNQLHGLAMGQGLCRKQKLWSESGRKQLEALELGPWASRRRQELLTLLDELDPKIAELDKAVEAEAARRPDVMRLRAQKGVGPIMGLAFVLTLGTVSRFRRSRQLVSYLGLNPREDSSGSHQYLGHISKQGNSMMRWLLVEAGQTAARLDPELGRVYKRLKFRRGANVAKVAIARRLAVKMYWILRQAPEAAPAGSHVR

SEQ ID NO: 449179 - protein, 414 aa, unidentified
MALKIVYKICCGIDVHKTFVVACIASTNSKGITVYKSHRFSTYTKGLKELSQWLLDNNCKDVCMESTGKYWIPVFNVIENSCNIVLAHPKYVKAIRGKKTDKKDAKWIADLFKHDLVAGSFMPPTDIRQLRDLMRYRFKLTCFMSSEKNRLQNCLTVSNIQLGNVVSDTFGKSSKKILDKILENPLDTSFDIEPLIHRSMKKKLPELELAINGYITPEQAAKLKIIKRHFEDLEARKADLESIILELAKPYQQEIELILTAPSFKNIFSAIAVVSEIGVNMDVFPTAKHLCSWAGLTPTNNESAGKKKSVRVSKAGCYIKPLLVQCATAIVKSEKHPEIRNRYLRIKKRRGHKKAIIAIARMLLTALYNMLKKKEPYNAELYKNSDVLPVDREITVEQAILIVQYQGYKIKSAT

SEQ ID NO: 449180 - protein, 345 aa, unidentified
MDYYAGIDVSLEQSSVCVLDAGGKIVREAKVASEPEALIAWFGNLGLAMTRIGLEAGPLSQWLFAAMKQAGLAVELLETRHVRNAFKTMPVKTDRKDARGIAELMRMGWFRPVHCKSISAQETRAILTTRSLIEAKLRDVEMSLRGLLRGFGLKVGKTTPTNFAGRIKQLVSEHANLQVITDSLLAVREVLLREFRSFEKRVRTMARHDERTRLLMTTTGVGAVISLTYAAAIDDPARFKNSKQVGAHYGITPKRYQSGEIDYTSRISKIGDKSVRTALYQAAHIILTRPVKASALKTWAMQLAKRIGMAKAKVALARKLAVIMHRMLVDGKPFDHKLANQAAAA

SEQ ID NO: 449181 - protein, 340 aa, unidentified
MDATTYGLDVAKSVFQMYWVEVETGEILNRRFGREELIRFLAQRPAGRVALEACGSAHWWARKIKALGHEVVLLHAKFIRPFVQTNKTDAADARAIWTAVQQPGMRPVATKTEDQQAMLSLHRMRALLVKFRTMQVNQLRGLLYEFGATFRAGRAAGLAEIRAHTAELENALPSTMMCCLQDQLRRIDELQRDIDLLEKRIGVWQKQDAACHAITAIPGIGRLTATALVATMGDAKSFRSGREFAAFLGLVPRQSGTGGKVRLGPMSKRGDPYLRTLLIHGARSVLYNAKVPTPWQKDIQARRPANVAAVALASKIARTAWAILARGQEYQRNYVSVRPA

SEQ ID NO: 449182 - protein, 356 aa, unidentified
MNSSAVSTFERYLALDVHKHYVVVGGVNAQQQVILPPRRLDLGEWAVWMPKHLHPTDAVVLEATTNAWTFYDQVAPLAGRTVVAHPGLVKVIASARVKTDNRDVLHLARLLAANLIPEVWVPPQEVRELRALLAHRRRLIKMRTMTRNRLNSVIHRYNLTPPRGELFLPKHRAWWLNLKLSPTEKLRIRQDLATLDHLEPEIVEVDAELHRLSTVAPWDQHVRYLMQMPGFGIIVVMTVLAAIGDVTRFPSAKKLVGYAGLGASVHASGETYRTGRITKSGRKDLRWTLRVVEAARIAVLYHDYWKQEYAKLEKRLGTNKAIVVIARTRSGSWWCGTCGMTARRIAMSMPSGLPTS

SEQ ID NO: 449183 - protein, 497 aa, unidentified
MGGKVKRTLFPNVICFLGRKPSRTTRRETTNTEHWETTLYILMIEDYSLRDKKRKFSPSKEKPPVKIEMMHPHQIILSEEVSVDKNDDSRLEEFRQLKRDIRGSTQHLVVGMDIAKERHHAFFGTPAGKVLLHRLVFDNTRDGFEKLCFQADILKTQHGLAHVVFGMEPSSDYHKPLGEYLIEHGHGVVLVAGTAVKKNRELLDNRWDKHDTKDAANVADLVTQGKCLFYEFPSLSLRELRSLLSLKRRLKKSEQGYKVRIRNHLIAQYFPEMDAYFNYAEGLVRCLDPKKLAGLQFREFVRMVPGKQEERLGEIYAKAAFSIGCEGHPSVAFEASLLLDGLKSLHLMILETDRRIAEVCKKFPEYPCLLSIPGFGPDISAKVLGALGNPHRFENHRQVLKMAGLDLSADRSGKRTDVTPVISKKGKADLRYGLYQAALIASTRNTQFMSYFTNKLQGREKEKGIGTKMRVKLSAKMLVIAWTLMKKKEMFDPGCLG

SEQ ID NO: 449184 - protein, 345 aa, unidentified
MERYIGIDVHRDSTTICVVSATGKRVRREIVETNGQVLVRYLKLLRGTLHVCIEESSWSEWLHEILSPHVAQLVIYQSQWTPGAKSDAIDAHGLAEKLRLGQAGPGVFKSPHRYRKLREWARVHQALTQDVARAKNRLKSQLLRRGVRCVGTSVYDPRQRDSWLRQLPVSMRPTTQLLGLELDGLVELKAQAEAALLEESHRHRIAKILETAPGIGPLRAALLMATVITPHRFRSKRQFWSYCGFGVVTRSSADWVQTESGWIKAQAVRTRGLNRNHNPTLKAIFKGAALVAIHQTKPGHPLKQAYARLLDGGTRPPLARLTIARKIAAAVLAMWKTEEVYRAVS

SEQ ID NO: 449185 - protein, 424 aa, unidentified
MNFKMQDKQNQLIERISDTHLIVGVDIAQQLHVARAVNFRGIVVGDPLTFENNEEGFVKLLSWIQNLQKLKNLDSTIVGMEPTGHYWINLSKWLDKQNIEVVTVNPHLVKRNKENRDNTQSKSDKKDALVIADMVKNGYYSFVRPTSESFEKLRVLISNRDVIVKRLVMSINQVNRWVDVVFPELRQVFKDVTCKGAIATLRLFPTPDEISSLETLDVMRGWKSLMKRQPGPKKAQLLINLAKSSIGTGQALDAYKFHLEQLLEEYDLAVKQLERVEQHVKEVLYKIPFAKKLLMIKGISEISLAGILGESGDLSGFSHGNSLLRHAGLHLAEASSGKWKGQIVISKRGRSRLRRFLYLATMSLVMNNPEFKAVHSHNVKVKKIKKMKSIMKLIGKLARIFVGIARRNESYCPKKVQVSIPLAA

SEQ ID NO: 449186 - protein, 480 aa, unidentified
METSYRRCCGIDVHKKSVQVLPPQGQTGLKPLEREFGTFTRDLPRLRGWLKSSGVSEVVMESTGQYWRAVWNVLEGEIPRLVLVNPQHVKALAGRKADRMDSQRLARYLQENELQASFVPPREIRELRDLTRSRVHLLQEVNRVKNRVGQMCEAGNIKVSNVATDLFGVSGRLVLKGVAEGKRDAGWMADYARGTLRGKKKQLEHALEGSFTEYQRWMLRVQLGHLNFLEAQLTQLEQEIEVRLQPYAEQLRRLMTIPGVDRITSWTILAELGPDMSVFPDARHAASWAGLCPGNRESGGKRLSSKTRKANPYLRRTLCQAAWGASHTKDTYLAALYRRQRNRLGHNQAIFALAHQLLLIAYKLLRDGEDYRELGADYFDQKNKPKVVNRLVQRLTRLGFYVTLQEAPPSAAQVQSVPPDSAPPALTPEPLSDSPPSDAPRPPLKRGPGRPCKCATRGLVCRHKSAIQTQPPESMSLNQP

SEQ ID NO: 449187 - protein, 404 aa, unidentified
MTDRVDVCGGVDTHRDVHVAAVVDTAGRVLKTAPFPADMTGYQQMHAWFRSSGRVLGVGVEGTGSYGVGLTRYLTRADVRVVEVNRPNRQLRRQKGKTDSVDAEAAARAAANGTATAVPKSADGPVEAIRMLRVTRRSAVKARTQAANQLHAVVVNASEQVKQQLRDKPLSAKVRICAAFRPGADHTTVTYAKVALRHLARRYQTLTAEIGELDNQIIGLCARVNPALLAAAGVGPEAAAALLVTAGDNPHRLTSEGSFAALCGASPVQASSGQIIRHRLNRGGDRQANNALWRIAITRMRTDQPTQEYVRKRQSDGKTRREIIRCLKRHIAREIYHLLTNPPPTPSGADLRCLRQNAHITLTQAAAALQVHPTLLSKLERGQHHNQQLATTYQHWLQAPPDLE

SEQ ID NO: 449188 - protein, 371 aa, unidentified
MNSIVYVGMDVHKESYTVCCYSFDTDETMYKQKIASDYKMVLKYLEQIRKQFSENIEFICGYEAGCLGYSLYHQLTDHGVKCIILAPTTMAITNTNRVKTDKRDAGNIARCLAFRTYSEVHVPTDEDNSIKEYIRMRDDQKIALKKIKQQILALVLRQGKRFEGGKSYWTVVHMKWLKSLDLSGVLRETLDEYLITYEYFTEKIERMDQRIEELASGERYQEKVRKLSCLIGVKTHTALSVVVEVGDFERFAKAEKFAAFLGLVPSEDSSGNSQNRYGITKAGNSHLRRLLVEAAQGYTRGAIGHKSKALKQRQQGNTQQVIAYADKANERLRRKFYKMTLNKGVNRNIATTAIAREIACFMWGLMTDKVA

SEQ ID NO: 449189 - protein, 401 aa, unidentified
MKTVLSVDVAKNKSMIMLMNSDGEILIDTKEIKHNLEDFEKAKEEIKEISPENITVFMESTGTYHLPVERYFKENGFNTVVINSLTTKNNYDTIRKTKTDKKDCYRLAKLFFVNEVEYHELSKKDLYANLKAMTRQYFYLLQQNVSCKNRYKRLLNICFPELEKIFKSTRIYDDTALNFIKEFPHAEIVKEKRIDALYNNLYKTNGRNLNFYKRLSETIKIASANSYPGVDKEHKDVKNFSDMAKIVQNNNNVINELRDKMIETAKESPYYEIINSFYGIGEILTAEILGELGDITRFDSPKQLIAFCGLDPTIKQSGKSINVKGAISKRGNKYARYILFNCSQMVVKLGASNYPEHPVYIYYQNKKAEGKHYYESLTACSTKILRMLYSMCKNNKQFLEN

SEQ ID NO: 449190 - protein, 398 aa, unidentified
MLPDHPCTGPTAIRVEFDAIFVSLELSRSTWLVTSLSPGHGEKMSRHGVKAGDIGGLLALLAELRRRAKERTGSDYPVVTIQEAGLDGFWLHRALQKEGIESHVVDAASIATSRRRRRAKTDKIDGEALLRALLAYKRGEPRVCAMVVAPSAEEEDRRRLCRERQALLDERIVHTNRIKGLLFAQGISDYAPLRRDRRKRLEGLQTGDGRALPAHLKTQISRELDRLELLLDQIRAVEAEQEALLAAESREAGTDEPGQAEPEAEPRNAVAMLLAVKGIGVHAAAILWSEGLSRPFANRRQVAAYAGLAATPWRSGAIVHEQGLSKAGNPRLRTLMVQLAWLWLRHQPQSELSKWFKARGERGRKGSIVALARKLLVALWKYVTQGVVIEGAVIKTAA

SEQ ID NO: 449191 - protein, 322 aa, unidentified
MSIPSPTAFIGCDVGKASIVVFDSRTGRTYIIANLPAELRRFAESLDATCLVICEATGGYEAALLDAMVQAGRAIHRADARKVKAFIRSFGILGKTDRIDARALTLYGEERHARLALWQPHNAARERLHQLVLLRGDLLASQTAWGNRSQAPGGPALAAHIEPVLVCLRAQISAVETEIQRLLNEVASLRRQAEALRAVPGLGPHSVAALLALMPELGQLTRRRATALAGLAPHPDASATLERYRRVRGGRPEVKRMLFLAAMAAAKHNPALRAFHQRLRANGKKPMVALVAVMRKLVVMANAILRDLTSPAETGCSLVRSG

SEQ ID NO: 449192 - protein, 334 aa, unidentified
MKQVHLIGVDVSSKELVCATKSAGQPLPLATFANTTAGHKKFIRWATKGGRPARVCLEATGIYSLEFALALHHAKNVEVMVVNPRAIKDFVRSCMQRAKTDAVDAGGILEYLERMPFAAWQPPGPEILELQAINRRLVQLTTELAREKNRRHASEFAGDSADAIAHDIEVNIHHLERRIERMEQSGLDLVRGVPALARKLAHLVSAKGIAEASAMRLLAELLVLPDGLAAPQWVAHAGLDPRPYESGTSVHRPRRISKVGNRYLRAALYMPALVAIQHDPNVKAFYNKLIAAGKKPMQAIVAVMRKLLHAIWGMLKHDQDFDGEKFFKIAKENT

SEQ ID NO: 449193 - protein, 427 aa, unidentified
MNYTQNEKIMSITEKTLVVGVDIAKTPHYARAFDYRGIELAKVFKFENTREGLESFKEWIDSLAKENGKSSSIVGMETTAHYWFNLGYFLKDEEVRLVLVNPFHVKRSKELDDNSPTKNDRKDPKTIAKLVIDGRYFVPYIPEGIYSDLRIAMDIRDSINKSLVRIKNRVIRWLDKYFPEFFDVFGDWEGKAALITLREFPIPEKIITAGIDKIVATWRKGVQRAVGAKRAAKLVEAAKGSIGIKEGLRMAQKELRAIMQQYDLYMEQLSEVEADMEELALQVPGVNEMLTIKGVGITTAAGFIAEVGDISRFSHPNQIQKLAGLNLVESSSGKHKGQTTISKRGRSRLRSILFKVIMPLVAKNDEFKALHKHYTTRRENPLKKKQSLILLCCKLIRIFYALINKRVAYSPEKLIKNISYLQLQDAA

SEQ ID NO: 449194 - protein, 408 aa, unidentified
MLFVGDDWAEEHHDVELMDQAGRMLARARLPEGVAGIARLHAMIGEQLGDDAEEAEVLVGTETDRGPWVAALLAAGYTVYAVNPLQAARYRERHAVSGAKSDPADAHILADMVRTDAHQLRPIAADSSQVQAIKVVARVHKTLIWERTRHVLRLRHALREYFPAALEAFEDLDAADTLQLLSKAPDPASAAKLNRSQIRAALKHARRRDLDTKTTRIQAVLRSQQLGRDPVITGAYAATTRSIAAVLATLNEQITALEEQVEQHFGRHPDAEIILSQPGMGPVLGARVLGEFGDAPGRYADAKARKNYAGTSPITRRSGKRKSVHARFVHNDRLVDALMLQAQSALRASPGARAYYDKQRARGLSHNAALRQLANRLVGILHGCLKTGAVYDESTAWLSHNQDQQSAA

SEQ ID NO: 449195 - protein, 357 aa, unidentified
MSQQSNNCAIAVIGIDIGKNSFHVVGHDQRGAIVLRQKWSRGQVETRLANLSACLIGMEACVGAHHLSRKLQLLGHNARLMPAKYVRPYSKGQKNDFRDAEAIAEAVQRPTMKFVATKTTDQLDLQALHRVRERLVSQRTGVINQIRAFLLERGIAVRQGLRFLRVELPGILATRTDVLSPRMSRVIEELAGDWRHLDARIEVLSGEIETLAHQDQHCERLMTVPGIGPIISSAMVAAIGTGEVFPKGRDFGAWLGLVPKQVSTGDRTILGSISKRGNRYLRALFVQAAWVVLVKLGPKQWERYGLKSWIEAAKKRLHYNVLAIALANKLARIAWAVLNKGRAFMCVKTDAMASRPA

SEQ ID NO: 449196 - protein, 385 aa, unidentified
MDQTSSSAISTNTLHCALELSRNSWLLAIQFPDREQPSLYPIEGGNTEKLMAKLTAALDCWAKMSGSPPAITLCYEVGYDAFWLARFLMGRGIECLVIDPGSLQVNRRGRRVKTDRVDVKMLLRTLIAWCRGERHVWSLVRIPSIDEEDLRRSHRERGRLVRERTAHINRIKGLLLGQGIRGINVKSKYKTLAVDNLVTGDGHRLPPRLACEIGREIQRLAMVQEQIAKIERERDTAPTRCEATERKRHLLLQLKSIGPAISALLSREVYYRQFANRRQVGSFLGLTPSPYNSGAEERCQGISRAGSGHVRAIMIETAWLWIRHQPKSALTRWFVERTAGQSTRVRKIMIVAVARKLAIALWRYVEHGMVPQGAILNPPTTGNAR

SEQ ID NO: 449197 - protein, 350 aa, unidentified
MLIIGVDFHSRFQQIAMVNTETGELEERRLEHENGEAKKFYAGLQKPVRVGMEATGYAQWFERMLAKLGYELWAGDAAEIRAAMVRKQKTDSRDALHILDLRLAKRFPRIWIPSAAERDLRQLLRHRHKMVCLRTSVRNQLHALAMGQGVYRKRKMWAAGGRTELEGLGLDPWASRRRQELLDILDRLDPSLAELDRAVAKEAAERPAARYLMEQPGVGPVTALMFVLTIGPVERFRRSKQVVSYLGLNPRESSSGGRQRLGAISKQGNSMARFLLVEAAQTASRYDEALRRDYQRLKFRRGTAVAKVAIARKLAVRLYWMLRKHSSPVPSTRMQGSPEHPLVGASLSRN

SEQ ID NO: 449198 - protein, 399 aa, unidentified
MFVGIDWAAESHDVCVVDPTGKIGGRASVAHSKEGFDELVKHLGRWARQGEVLVGIERPEGRLVDRILEAGYTIVLIPTYAMKDLRRRYAVGGAKSDPGDAYVIADVVRTDGHRLRRLEPLSEQTRALRSVVRARGDLVDQRVGLANQLRACLEAYWPGAAVIFSDVASEICLAFLERYPTPEAAARLGELRLQSFLKKAGYCGRRPPAELLGRLHGAPDGVNGVEAEARADAVRAMVRVMRSLLRSIKDLDRAVVAHLGEHPDAEVFTSLPRSGQINAAQMLAEWGDCREAYPDPDSVAMLGGLCPVTHASGKHRDVSFRWACNKRLRLAITTFADNSRHASPWAADIYRRAIARGCDHPHAVRILARAWARVIWRCWQDRTAYNPVLHGSAARLEAA

SEQ ID NO: 449199 - protein, 359 aa, unidentified
MMVIVNTINLKREETAMKITTVGLDLAKTVFHAVCFDDHSKEVKKRILRRNQLRIFFTQLSPCMVGMEACASSNYWGRELKALGHEVKLIPAQHVKPYLLGNKNDFNDARAIAEAMTRPHIRGVALKTAEQQDIQAIHRMRSQCLRDRTALCNSVRGLLAEYGIVLSQGISTLRKNIHGMLEDAENGLSLTFRNLLARRYEQLLELDDHINFFAHELEIQSQQGDACQRLQEIPRYGPIIASAFYSNVGNGEGYSRGRDVAASIGLVPRQHSTGGKNVLLGISKRGDGYLRCLLIHGARSVVIHASKKKDKLSQWINRIVAERGKNKAAVAVANKMARIGWAVLRHSTHYQAALTVSSL

SEQ ID NO: 449200 - protein, 409 aa, unidentified
MERVIERGAALDVHKKSVTACVRGPGADGGRRQEVQTFGTTAAALLALRDWLSAHGVTHVAMESTGVYWKPVYYVLEEMFTCLLVNAAHVSKVPGRKTDVRDCEWLAQLLEHGLLRGSFVPPVPIRELRDFTRYRQVLVQDRTREANRLHKVLTDAGIQLASVATNVLGKSGRAMLAALVEGTTDPAVLADLAQGKLRRKLPALREALAGRFRTHHALLVSQLLAHLDYLDEALDILTTQIEEALAPFAREAARLDAIPGVGPRTAEILIAELGVDMRQFPTARHVASWAGLCPGTHESAGKHRAVRTRKGNRWLRAALIEAALAAINVRDSALAARYRRLVRHCGHKKAIVAVAHKMLTTAYVLLADGRTYQEPGAGYYDAQRKDRSVRRALQTLERCGYRVSLEPAA

SEQ ID NO: 449201 - protein, 359 aa, unidentified
MQAQSTELNFKGQNIYVGIDVHKKSWSVTIMSDQLEHKTFSQLPDTKTLHRYLDKNFPGATYHSVYESGYCGYWIHQELLSHHINNIVVNAADVPTTGKEKTNKTDKRDSRKLARSLSKSELKSIHIPTRKTQEDRTLLRTRYALRKNLSKEKVRIKSMLNFYGIEHPPVFEKSCTHWSKRYLEWLKKVPMEYESGKSSFDLLIKGVEELRELLLETNRKIRQMSDHQDYRENFELIDSIPGIGLITGMTFLTEIEDIQRFSNIDQFASYVGLVPTCHSSSEKEQNGGITFRSNGLMREMLVESAWIVAAKDPAMHLAFIELCKRMESNKAIIRIARKLLNRIYFALKNKQKYVCCIAK

SEQ ID NO: 449202 - protein, 326 aa, unidentified
MIIIGIDVSKAKLDCLWIRDLPAMKIKSKLQANTPAGHKALLAWAVKQTGEEVTELHFVMEATGVYHEALAYALHDAGAQVSVVNPARVRDFAKSLGAQTKTDKKDSVVIARFGMTQSPRLWEPEPIEIRQLKALIARCDAVKQDIQRELNRMEKATVSDASAAVQVSIETVRSQLEAEKKRLESLITDHIDNHPGLKNDQALLESIPGVGPVISQQMVAVIRSRSFNQASQCAAFLGLIPIERQSGTSVYSPPRLSKHGDGRVRAKLYMAAVVATQYNPDIRRQYKRLLKNGKSKMSAIGAAMRKLVHICFGVLKHQIPYQPQPA

SEQ ID NO: 449203 - protein, 362 aa, unidentified
MIIGVDYHPSFQAIAFFVEETGECGEQELNHSDGQAEKFYRELKQRGICVRVGMEATGYSRWFERLLAELGFEVWMGDPAEIKAKRIKKQKTDRKDAQLLLRLMMEKNFPQIWVPSPENRDLRQLLWHRHRLVQMRTRIMNQLQALAMNEGYRWKKKLFSEQGRAQLEKLTLAPWASRRRQELLELLDRMNPTIEELTAAAEQEVKKRPEALRLMTHPGVGPLTALAYVLIIGKPERFHCGKQIGTYVGMIPSEDSSARKQRLGHISKQGNSLLRFLLVEAAQAAARCNPEWRRRYIHLAMRRHKSIAKVAMGRKLGVRLYWMWRNGCEYSPSLEFGSYAGQLGIVHGMKQDVVHLNGHPAP

SEQ ID NO: 449204 - protein, 426 aa, unidentified
MDFTQNERLGQITEKTIIIGIDVAKRKHVARAIDDRGRDLAKRLVFANSFSGYKQLLEWAHHLLDETNRHKLILGMEPTGHYWLNLAYYLKAQGLHAVVVNPMKVKRTKELDDDSPTKNDTKDSKVIAQVIRAGRYHEPILPESIYAELREGIKLHDMMQEDVASIKAQVHNALDRYFPEFLTVFKDWTGKAALHFLKKGYLPEDIQASSEEELMAEVKQAAKRGVGVKRIQELKRAAETSVGLSVGLGMARQELRYLIDQYQAIQERIQAHEALLEDFVHHVPGARQMMGIKGVSSITVAGFFAEVGDLSNYRDPRQIIKLAGLNLRLNESGLFKGQTTITKRGRRRLRSLLYQVSRPLSIHNEAFKQLHHYYRSRPNNPLTGKQSLVALSRKLIKILYVIGTRNCTFDEKRMIKDIPQLRDLQE

SEQ ID NO: 449205 - protein, 392 aa, unidentified
MSQQHCHFDASRSLTALDQDSTIIAVIEMSQSKWLVAALVPGVERQPLKKLDAQEEGLLKLLHRWRNEAGQAAREIKRIVVAYEAGRDGFWLARWLRARDVEAYVIHPTSIAVSREHRRAKTDRLDTELLMRAFLGWLRGEKRHCSMVSIPTIEEEDARRPNRERQNLVTEQTRIVNQIKAIFTRFGIRTFRPTLRKAEEKLKSLRTAEGILLPDNTRAELCRHLARLRVVREQIRAVEQERLRKLAAAPAAEKGSHAMVRLIARVLGVGIETADMLVNEVLSRRWRDHKAVARYAGLTGSPDESGKRRRERGLARAGSARVRCAMIQFAWRFLRFQKNSALAQWFAARTTDRRASTRKTMIVALARKLLIALWRLVTRGEVPQGVILRPAL

SEQ ID NO: 449206 - protein, 351 aa, unidentified
MRTSQKITGIVTTIGIDIGKNTFHLVGFDQRGAIILQQKVSRSQIERRVANIPRCLIGMEACSGSHHIGRQLAEIGHDVRLIPAQYVKPFLKGHKNDYRDAEAIAEAVQRPTMHFVTIKTPEQMDLLALHRVRSRLVGRRTGVINQIRGFLIERGITVRQGPMPLRKALSEILSSDTGALSPRMVGLIADLAQDWRRLDERIAAVSAEIEALAEQDDSCQRLMTVPGVGPIISSAVVAAIGNGTGFKQGRDFGAWLGLVPKQESTGDRTILGKISKRGNKYLRTLFVQAAHVVLERRPSAAMRGLWPWVEQASKRLHRNMLAIALANKLARIAWAVLARGGTYQPRITHAA

SEQ ID NO: 449207 - protein, 447 aa, unidentified
MSKSTTKQQKNKISLFPIIHPHASGIDVSDDEMVVALPINGFIELKYFECFTRDLQAIPRLLKEHNIDTVAMESTGVYWVCLFEILIEEGFEVYLVNARHVKNVTGRKTDETDAVWIQKLHSCGLLSASFQPSNLERSLRSLTRHRKSLVKTCSTYTNRMQKALELMNIKLHTVISDIDGKTGRLIIEAILQGERDAHILASLKDRRIKASQEVIIKSLEGYWQPEHLFELKQCYEMYKHHQQMIDECDAEIQRTLEQMINLRNEGDIQQIQPSEKRKRQYKNPISFDMTAYLKNLLGVDITQITGISELTALTIISEIGTDMSKWPTEHHFTSWLGLTPNTKISGGKTISSRVMKKKQNAGEAFRSAANSLYKSETPIGKFYKRIKSKAGPGKATVATARKMAIIVYKMIQTQAPYDPVALEKHQEQHKIHIINRLRKKLELLEAA

SEQ ID NO: 449208 - protein, 320 aa, unidentified
MPASCGVGIDVAKDTLDVAWSTDPDARWRTTNDEAGWTALIERLRALQPRVIVLEATGGYETGVASALSVAGLPVAVVNPRQVRDFAKALGRLEKTDALDAGILCEFAVRIDPVPRPLADDVLADLQALVTRRRQLVDMLTAERNRVPLARGAVRKNLRAHIVWLEKQVGHTDRDLRTRIEHSPIWRVRDQLLQSVPGIGPTTAACLLASLPELGTLSHREISKLVGIAPLPDDSGTRVGYRRIRGGRAGVRRALYMATVTAITHNPTIAAAYRRWRTAGKLPKVALIAAMHKLLIHLNAMLKHQTVWQPTPVPPSTTPS

SEQ ID NO: 449209 - protein, 307 aa, unidentified
MTAVGIDVGKASLDLAVDGRSGVTRFTNNRSGIAKILKRLLAMDAPRVVVEATGGYEEPLLEACCDAGLWVSRVNPRQARNFARASGDLAKTDAIDARMLALMARLFNDRLRRYTAAPPWQRELRDWLRRRGQLVTALQAHKQQAAMAPTMVRTLASRTIAAVKRELAAVDAAIHALLKQHATPAMHSRKGLGPVFQASMLSLLPELGQLNRRQIAKLVGVAPMNRDSGQGQGKRRIRGGRAPVRVALYMATLSAVRWDPLMKAHYQQLRARGKLGKVALVACMRKLLGIVNAKRRDELRDQGLIVV

SEQ ID NO: 449210 - protein, 331 aa, unidentified
MAAVMIGVDPHKGSHTAVAIGAAEELLGQLRVRACAARAERLLAWAEDWPQRAWAIEGAGGLGHLLAQQLVAAGERVLDVPPKLAARIRLLGSGSTDKNDPNDARSVAIAAPRSAACLPVRADDHAAVLKIWAKRYRDLSRARNQVVCRMHAVLCQLVPGGVSKRITAGQAARILDAAEPRGAAGMARWQLAEQFLTDLRRIDIQRRDIQRKLAAAVRASGTTVTEIFGVGPAVAAAVPGDVGDISRFATQDSFAAYNGTAPVEVSSGNRVIYRLSLRGNRRMNHAIHMAAVTQIRYRHTKGRAYYDKKIAEGKTSKEALRALKRQVSDAL

SEQ ID NO: 449211 - protein, 452 aa, unidentified
MKKSKPAPSSLPQVNPNAAGLDIGAREILVCVPADRDPTPVRAFGTFTPDLQALADWLQHCRVQSVAMESTGVYWIPIFELLEARGLEVYLVNARHLKNVPGRKSDVQDCQWIQRLHSYGLLSASFRPEAEIVALRAYLRQRAMLLDYRAAHIQHMQKALQQMNVQLTQVLSDITGVTGLAIIRAIVAGERDPVVLAQLRHPRCQSSQDEIAKALTGHYRAEHLFALQQALALYDFYTAQLAACDATLAGQYAAIRPVWDEADPPPPLGPDRKTNSHSKNAPGFEVRQKLYDVLGVDLTDVDGLDDSTAQTLLSEIGSDMSKWPTEKHFCSWLGLAPHNDITGGKVIRSRTLKVRNRAAQALRMAAQSVGRSDTALGAFYRRLRSRIGHRQAVTATAHKIARIVYHMLKHRQPYHDLGREVYEQRQRERELKTLHRKAAKLGLSLVPLPTPS

SEQ ID NO: 449212 - protein, 347 aa, unidentified
MIHIGLDVHKKKTKVAVLDDKTGELQKPYDLRTGELVDHIQKMPGRKRIAMETSTVSQFVARQMESCGLDVMVVDAFKCHRLLEALSRSKTDKLDAIGLSFLLARGMLETARVWLPSHAVHELRELVRVRKALVKESVATQNRIRKLLSRQGADCEHHDLQGAGGAQWLGELADTLPESAALALRVMRDSLASTTGHIATLSEAVKQQAQADESMRLLQTMPGTGPLLAAVIMAEIGDISRFETACKLRGYTGLVPKVTQSAASRYTGPLVREANRFLRWALIQVAQNFARSKQTQDLRVIRTYKQKVYSYGPNPAKVDLARRLTNIIFAMLRDGTEFDPAMLGYAA

SEQ ID NO: 449213 - protein, 422 aa, unidentified
MLSARPAGCRHPLAITNRTYITIVSALRRVVIGADTHLDTNHLAVLTDTGKPLADAEFPTSPAGYDDAVRWAQSFGTICIAGVEGTSSYGAGLTRVLQAAGIEVAEVSRPDRAARRRRGKSDPLDAYAAARAALAGDRLAVPKDEHTTALRALLSARRSAVKAHTAATNQLHALLVTAPAELRERYRRHHTTALVAALAQCRPATHGDPTTAAVLTAAKALAQRVKFLEQQRQDLTAQLDGLVGQINPALRAAYGVGPHTAAQLLVTAGTNPHRLRSEASFAALCGAAPVPASSGTITRHRLSRGGDRAANNALYRIALVRMSSHSQTRDYVERQVTKGRTKKEILRLLKRAIAREVFRLLTRPGPVDDYRDLRAARQAKNLTLAAVAQHFGVPIITISRLERGHQRNDTLANHYRQWLTAA

SEQ ID NO: 449214 - protein, 374 aa, unidentified
MSAPMIYLGLDVHKDSITLAVLPEGTPAPTRVDRLPNDLPKLRRYLARLARDGTLRICYEASGAGFVLYRALRGWGYHCDVIAPSLIPTKPGVQRKHDKYDAAQLARLYRAGELTPVRVPSEADERIRDLVRCRETIQRDLLKSRHYLLKFLARRGFIFRAGKHWTLAHLTWLRELAGPASPLIDEDLEVLREYLALFDYKLGRRQALDQRIAELAQTPTLQTPVQWLQCFRGFQVQGAMVLQTELGDWRRFDSARALMAYVGLIPREDSTGDRERKGSITKAGNAHCRHVLIQAAWSYHHPPKISAALKARQRGQPATVLSHAWKAQHRLHKVYRHLAYRKQPRIAVVAVARELVGFLWAVMRHHEPASVART

SEQ ID NO: 449215 - protein, 355 aa, unidentified
MTQHSHIAASHQLDYERTLILAVEVSGRSWVVAAQVPGLRQKGVKQQLAPRADALMAAVEGYKRRAAAAGMAVERVIVAYESGGSGFWLARWLQQRGVEVYVMQPSSVPVDRRMRRAKSDRIDADMLLRTLLAWLRGEPRVCSMVPVPDEATEDARRPIREREELIRARVALVNRIEAVLTVLGAGEYNPLRRDCRERLGQLRTALNQPLPPHARAQIERLLDRLDLIRQQVADLEAQRDRAVEGETVGQAERMIQHLARVRGIGVQTATVLVHEAFVRRFRNARALGSYAGLTGTPYGSGGTHREQGISKDGNRRLRATLVELAWMWLRYQPGARSHAGSTIAWAALADACARS

SEQ ID NO: 449216 - protein, 414 aa, unidentified
MKQQEVAAWIGLDWADKKHSIHLEVREGKREHRMLEQKPGIIHEWAAELRQRFQGQRIAIAIEQRKGAVVHALMMYDFIVLYPINPKALARYREAFRTSGAKDDPSDSELLLDLVSKHGDKLRAWIPDTVVARKLQLLCEQRRKIVNHRVALTNRITSLLKQYFPQAIEWVGDVASIQACDFLSNWSTLASIQRARKETLRKFYRQHNCRKASVIDERISQISNAVPLTNDAAIIEPLSLSVQIYAVQLRSLIRAVQQFDKQIVETFAQHPDHDVFDSFPGAGQVCAPRLAAAFGTDRSRWQSAVEMQSHSGIAPVTERSGDSKWIHHRLACPKFMKQTFHEFADQSIRFSKWARVYYDQMRARGNDHHAALRALAYKWIRILFRCWKDGKPYDEEKYVKALRQRGSALIEKFA

SEQ ID NO: 449217 - protein, 357 aa, unidentified
MTEGSWVGLDVHARTTVAGVLDAVSGELRLQRVPPRSEEAVEWLRTLPGPVRVAYEAGPTGYALARACAAASIACTVAAPSKIPRASGDRVKTDRRDAERLARLLRLGELVAVRVPEPVEEEARDLVRAREDARADLMRARHRLSKLLLRHGLVYEASAWTLAHDAWLRGQRFTSRPLALAFDEGYGAVLQAKVRRDALDRVIAELAAEPPFADIVGRLCCLRGVSTLTAFALTVELGDWGRFRPQSLGPFLGLVPSEDSSGERRRLGAITKTGNTHARRLLVEAAWHQRRPLRPSAQLERRRHGQPAAVRNRADESARRLHQRWHALEGRGKRRTIVAVAVARELAGHCWAMATMA

SEQ ID NO: 449218 - protein, 427 aa, unidentified
MPYRIAGIDVHKKMLAVAVADVEVEGDFHFERQKVGTTPADLRRLADWLVAHEVDEVVMESTAQYWRPVWEALEQHWRPGRRARDGAPRLAGTLHLAQAQSNRGPGGRKKDFPDAERLVKRLVAQELTLSFVPDVEQRLWRTVMRRKYQVTRNRVQLQNRLEALLEEAHIKVSSLVSDLLGISARRMLQALADGETDPAALATLATARLRATPEQLCDAFQACPTLHPVYRRLLKLTLEELRVIEDHLGQLDQQMADLLTAHHDAVQRLAEVPGLGVDSAQQIIAEVGATAATFPSAKHLASWMGACPGNEESAGVNYSHRCPKGNRQMRRVLNQAANAAVKAKGTIFNVVYRRLVPRLGHAQAIGAITHRLCRLIWKILDQQIRYEERGPAVSTEAKKVRARKMIRELRSLGYHVELLTPPAGNPA

SEQ ID NO: 449219 - protein, 449 aa, unidentified
MKSKSEQQSSRSIESIRPNAAGIDIASRMHYAAVPEGRDRVSVRKFGAFTEDLHEMARWFQSCHIDTVAMESTGVYWIPAYLILEEYGFDVYLVNARHLKNVSGRKTDIADCQWIQQLHSYGLLEKSFQPESLTRELRSYMRQRKNLTQGYATQVQLMQKAFDQMNIKLHNVLSDITGKSGMSIIKAILSGERDAQRLADLSDKGVKASREDIVKSLQGIWREDNLFELRQAYELYEVYLEKIRVCDGQIESVFNRMLESTGRDMDQGKRGQVSGKNKFRFNATQYIVSITGIRLTDIFGISELSVAEILSETGTDMSKWATEKHFTSWLNLAPNTRISGGKKLKSKPARKKNHAGQAFRLAASTLKSSNNWLGEFYRRIKAKSGAPTAIKATARKLAVIFYRMLRDKKEFCPLPLDEYNNYFKERRIKYFDKQAAKYGFRLMPVNTVS

SEQ ID NO: 449220 - protein, 409 aa, unidentified
MNNVAGIDVSKGKSMVSVLRPFGEVVAKPFSIGHTGSELKELADYLKSLDGETRVVMEHTGRYYEPVARFLHEEGVFVSAVNPKLIKDYGNNTLRKVKTDKADARKIARYGLDNWAELRQHTPMDTIRMQLKTLNRQQSLYAKTKTMMKNNLIALLDQTYPGVNALFDSPVREDGSQKWVDFATAFWHVDCVRNMSLTAFAERYRKWCKRHGYNFSQSKAVEVHTGAQDLIAMLPKDALTKTMVRQAIDALNAVSASLERLKAEMQALAAQLPEYPVVMAMHGVGDSLGPQLMAELGDVARFTHRNAITAFAGVDPGADQSGTHEAKSTRVSKSGPPELRRALFLVMDCLLKTQPQDDPVYRFMDKKRAEGKPYLVYMTAGANKFLRIYYARVKECLEDFDAQQNSAQS

SEQ ID NO: 449221 - protein, 346 aa, unidentified
MVTTIGIDPHKATHTAVAIDEDETVLGEITLPADRYQTKKLMEWAGNVDGDGSRLWAVESAGGLGYLLSQQLVADGEQVVDVPAVLASRVRVLSSGKSDKNDPNDARSVAIAALRQPGLAVVRREDHAAVLRMLAKRHLELTSLRTQAVCRLHAVLMLLKPGGIQRRLSAKAASRMLGGMRNLDAVGEQRRRGAKAHLGDIRRLDRDIKANKTLIRHAVTVSETTVTDVYGVGPIVAAFLIGYTGDPTRFATSDRYAAYNGTAPIEVSSGGKKRHRLSLRGNRRLNHAIHMAAVTQIRFDTPGRVYYDKKLTEGKSKKEALRALKRRISDVVYRRLITDQQRAQTS

SEQ ID NO: 449222 - protein, 421 aa, unidentified
MKKAETGKVKVVRDDALIVAVDIGMEMNRGYCTTPDGRSTKTFKFENTREGLDTLWGMIMASKNRFKCNEVIVGYESTGPYGEPMLHYLMNKPVRIVQVNPMHTKRVKEINDNSPLKTDEKDPRVIADIIRWGHSLSIVIPEGDAAYLRRLNNSRERHVRERTALVNQLQQLVFLLFPEFMTVIKDIKCKTPLYLLKRYPTPEAISVLDKQLLGEEMRKRSMGKFTEHHADMLINLAKNTVGIREGAAGLSMDIRHILVQLEMLTNLIAEIESEMEIALGRMPYSSKLLSIKGLGVVSVAGIIGEIGDFKKFGTRSEIMKLAGLDLFEISSGKRKGQRRISKRGRSLLRKILYYAAIQTIRKNGILHDYYTRLTDRGMKRMMALVAVSRKLLGILYAIVRDDSEYSVNFESMKRQVIKKAA

SEQ ID NO: 449223 - protein, 344 aa, unidentified
MPQPHHVGLDISVEETTICVVDELGHVAHRAVEASDPAVLVEHLVRLGFTYSRIGLEAGPLSAWIYAGLVDAGLPAICVETRHMHAALSARINKTDRNDALGIAQMMRVGLFKVVHVKTPASQQRRLLLTARKLLQRKVNDIENDLRGQLRNFGLKVGTVRPSAFEQRVRELVADMPFVAAVVIPLLDARSALRAQLAKLHKMLLDIVRSDPVCRRLMTAPGVGAIAALTFRTCVDNPARFSRSKCIGAHYGLTPRLYQSGETARIGRVSKCGDAMMRVALYEAAFVALTRSQGRWNPLKAWGVAIAKRRGIQKAVVAVARKLAIILHRMWRDETDFRWTAAKV

SEQ ID NO: 449224 - protein, 458 aa, unidentified
MSQLPTLSYKGFAGSKAGLVRLRFQEEVSKSTMSRVESIQSEPEFAAFIGIDWADQKHIWCLQTGSKQRESGELEHTPEAVESWVANLYQRFAPRPIAVAVEQSRGALVFMLSKYELFHLFPVPAQMAASMRQALYPSGAKDDPRDADLLLDLLLQHRNKLRRLSPDSEATRRVQNLVEERRKLVDEKTAQINRLTDHLKVYFPQMLEWFGRLDSELVCALLERWPALEELQKASPANLRTFFRKHRCRDRERIECRIEAIRRALPAIQDRAVIEAKSAVVKVIVQLIRILIGGIEDLDGQIEEAAAAHPDFFIFNSLPGAGPVMAPRLLAAFGSQRERYRSAHEIQSFSGIAPVTESSGKRKWVHFRWACPKFLRQSFHEWAGHSIVQSEWARVYYQQQRSKGNTHHAAVRALAFKWIRIVFRCWQDGVAYDENTYLAALVKHGSPLSGLVAIGKTL

SEQ ID NO: 449225 - protein, 393 aa, unidentified
MFIVGIDIAKRSHEAVVISASGDVLVKSFKFSNDSKGFDKLLKNISAINADLSQFEFGMEATGHYWLNLYCKLIDLKCLVHVINPVQSDALRGLYIRQTKNDSKDSFLIAELIRFGRYAETTLSDPDTIALRELTRQRFYLVDCISDTKRKVICLIDKIFPEYENIFTDMFGATSFELLNTYTCPETIANLDIDILSDFLKKASKGRFGLTKAEEIQTYAKNTFGSFLFADSSSFALRQFLEQIKLLEKQVEELNSYISETLSKFDTTLTTINGIGSTLAATFVAEIGDINRFDSPEKLSAFAGIDPTVKQSGEFSGTKNHMSKRGSPYLRRALYLAAVSCNLHNPAMRAIYDKKRSQGKPHNVALSVISRKLVNIIFVLMKSKQPYVMVMPD

SEQ ID NO: 449226 - protein, 396 aa, unidentified
MPTMTYSTATQLTPSEQTHQAHHEVTGGVDTHKDTHTVAALDASGRLLGHREFAATPAGYAGLLGWLRGFGQLVRVGIEGTGVYGAGLAGYLQGVGVELVEVDRPDRKTRRWQGKSDPVDAEAAARAAQSGRATGIPKTRGGQVDALRALRTARRSAVAARAEAQTRMKALVVTAPDPVRTALRGLGDRQLVEHCATRRPDRAAAGDPATATVLALRALARRHQQLTAEIDEFDTLIGPLVAAINPALVALSGVGADVAGQLLVTAGDNPHRLRSEAAFAMLCGVAPLPASSGRTHRHRLNRGGDRQTNAALYRIVLSRLRCDPRTRAYATRRTTQGMSKPEIIRCLKRYIAREVYTALLAPGPSSVPALPSTVPEESTWSARSAARTNDVDTDKR

SEQ ID NO: 449227 - protein, 342 aa, unidentified
MNHFAGLDVSVKETSICIVDDTGRIVREVMVASEPEALLKVLGNPTYHFKRIGLEAGPLSQWLFSALAEAGLPVICVETRHMQAVLKAQINKTDRNDARGIAQMIRAGLYRPVHVKTLRSQKLRMLLTHRKLLQSKAIAIENDLRGTLRNFGLKVGMVGKVKFESRIKELVDNLPDLALLVEPLLIVRRALREQIVILHRRLLAIVRSDEVCRRLMTTPGVGPVVALTYRATVDVPARFRKSKSVGAVFGLTCSRYQSGEIDWSGRISRCGDEMMRVMLYEAAQSMLRSKKWSWLKAWAMQIARRRGMKKAIVALARRLAVIMHRIWIDGTEFRWTRETAAA

SEQ ID NO: 449228 - protein, 421 aa, unidentified
MSYRIAAIDIHKRVLMVVIATVADQVKDATGEAIEFECRRFGAGALERKHLGSWLQEHGVQEVVMESTAQYWKPVWLDLEPHFGKLNLAQAHSNRAPKGRKNDFKDAKRLARRLLADELMLSFVPEPEQRIWRTMTRGKHQLIRDRVRLQNQLESLLEEARIKLSGVVSDLLGVSGRRILEALSKGETDPAKLAELGDDRLQCSKQELADALNGSPEPTHLELLKLYLERLALLDQQIGKLDQMTATALKHHEDAVTRVAQIPGLGVNSAQQLIAEIGVDVAAFPSAGEFSSWIGVCPGSNVSAEQNQSSRSPKGNRFVRRLLNQAAHAAVKKKNSHFQSVFRRLLPKLGYEGAVWAVAHRLGCVVWKILHDGITFVEQGSETDPKAKKRRARRLTQALRKLGYSVSLTPIQPGPLAEAQG

SEQ ID NO: 449229 - protein, 354 aa, unidentified
MIIIGADYHPGFQQIAFVDTDTGELQERRLEHREDAEKFYRDLAAQEVKVRVGMEASGHARWFERLLAELQVELWIGDAAEIRTKRVRKQKTDRQDAQLILGLLLENRFPQVWVPSWENRDLRQLVWHRHRMVQARTRIMNQLQAVALNEGLRCKKKLWRDAGREQLASFRLAPWASRRRHDLLELLDRLTPTIAELTQAIEQEAEKCPAAQRLQTHPGVGALTALAFVLIIGRADRFQCGKQIASYLGLVPSEESSGQRRRLGHITKQGNSLLRFLLVEAAQVTVRSDQEWRSRYFHLTMRRGRKIAKVAMARRLAVRLYWMWRREWNYEQLKKFGSHAGEPGHPDGVQSSTE

SEQ ID NO: 449230 - protein, 376 aa, unidentified
MSKVRCVGLDVHAETIAVAVAEPDGEVRSVGVIPNRPESIRKLLKKLGPADQLRVCYEAGPTGYVVYWQLTGLGVTCDVVAPTLVPTKAGDRVKTDRRDALKLARNYRAGDLTAVWVPDAAHEALRDLVRAREAAKKDQLRARHRLGKFLLRHGRRPPTAMKAWTQAHLAWVKRAVRFDHAPQEATLLDYIHEVDHVAARIVRLESAIDAAVTTAPIRMRAVIEALQALRGIALVSAVTIATEVGELSRFAKPRQLMGYSGAVAREDSSGERTRRGGITKTGNAHLRRVVIEAAWAYRHRPAVGPALRKRQATVSAEVKEIAWKAQHRLSGRYRALTARGKCKQQVITAIGRELLGFIWAIGVHVEAATEGTTVGA

SEQ ID NO: 449231 - protein, 430 aa, unidentified
MKSNTQNAKIEAITEKTLVLGIDVGSEMHYARAFDYRGIEYSKKPFKFSNTEVGFVTFKEWILDLKERHEKDKVIPGMEPTGHYWFNLGKFLQDNEMKPVLVNPHHVKKSKELDDNNPTKNDRKDPKVIAGLVREGRYMIPYLPDGVYADLRTTSNIRFQLQAELTRIQNRISRWFNIYFPEYKTVYGKPDAKSGMLILKAAPLPEDILTLGIDGVNQIWRDAKLRAVGRARAKTLIEAAEHSVGSKEGAMSARMEIRMLLEDYESRNTRLQEVMVLIEELVRKIPMAEKLLEIKGVGIRTVSGFLAEVGDISRFNNPKELQKLAGLALVENSSGKHKGETTISRRGRKRLRYLLFEVAMSLVSKNQEFRELHNYYITRRLNPLKKMQSLMAIAAKLIRVFYAMLTKGVDYDPKKMVSDIKRPAVYLQAA

SEQ ID NO: 449232 - protein, 345 aa, unidentified
MNNNRLISIDLAKNTFQVCGLNQANKVNFNRKITRAKLTAFIQQQESTLIAMEACGSSNYWGRQFQSMGHQVKLVPAQHVKPFVKGNKNDHNDALAIAEAALRPNIKFVPIKSTQQQDLQMVHRIRQHYVKQKNAVANQLRAYLLEYGIVIPKQIHYLIKKVPELCALENNNFSSLAMELIQELYSELLELQDKITELNQQIAHQNSQNEICKQLQKLPGIGPLIASALYSAVGNGSQFTKGRQMSAWIGLTPAHFGTGGKNTNVDTTKKGDQYLRTLIIHGARTVVTWSANKTDPLSLWIQRLVAKRGKRKTYVALANKLTRAAWHVLRGESFNMEKITAKQSI

SEQ ID NO: 449233 - protein, 338 aa, unidentified
MTRFIGVDLHRNCFTVCVIAENGREYTSEYRLTQLSLFLRRLRPADELAVEVTGNTRLFYDAVISHAARVVVVNPSQFRLIRQSLKKTDRHDARTLAFYLSKGMLPEVRMKDKLHAQIASLTQTRDTLVKQRTALKNKVNNILSAHGINLPKEAISGEKAFQEILGMKFDPLVEVELRVIVGQIRGLKESIAQLDKTIKSEGSKLEGHANLKSIKGIGDLGATILLSVIGDVRNFEHVGKLAAYFGIVPRVNNSNESEHSGRITKRGTKLGRTALVQCSLIAMRYSPYLASFYHKIQARRGTGKAIIALAKKFLGVIYHTLKNGWVFEDFPNFVLKRA

SEQ ID NO: 449234 - protein, 321 aa, unidentified
MSAPSFVTVGIDVAKAHVDVALLGARLDAQRFNNDADGHTALATALQPLGIDLVVMEATGGYEAELACALQGAGLPVAVVNPRQARDFARAMGKLAKTDSIDARMLAEMASVLVRREDLSRLLRPVSDERQQWLAALLTRRRQLITMLLSERQRLQITPERLHPSLQAIIAAIQAQLDDIDAQMVGHVREHFAELDRLLQSTRGIGPVSSACLIAQLPELGKLNRRQIAALVGVAPVACDSGSRQGRRRVQGGRFEIRRVLYMATLTATRHNPAIKAFHQRLKAAGKLPKVALVACMRKLLTMLNAMVKSNTPWDDSLHLA

SEQ ID NO: 449235 - protein, 345 aa, unidentified
MTTMNYIGLDVHKKTISYCVKDVSGRIQQEGKVGSTRRELDCWMKTLPQPWMVAMEATIFSGWIYDHLLPHATQIKVAHPLMLRAIAAAKKKNDQIDASKIADCLRCDFLPECHMMPKEIRDRRRTLRYRHLLVRQMVQMKNRVSGLLMETGVEYNKQRLHKVSYFRELLSENEEVHPSIRPLLKLSRETIERCQKTEYALVSSLQRDPMLADRIKRLRTVPGVGPITALTWALEIGDVSRFRTIKQTISYCGLCGDERSSADKMMRMPLSKQRNKHIQRALVEAAKLVPRQSHELAVIYDRERQKGNSNRATLAVARKMVAYLLAVDRQQRDFVPAEDRRTAAA

SEQ ID NO: 449236 - protein, 355 aa, unidentified
MSKYSVGVDISKKDFHVCLSVIDSFQQVKVLRSGTFANSKSGFAALVTWLKASRKDKSFGMAITMEATGVYFENCALFLYSKGYAVSVVLPNKAKKYIGSLGIRTKNDKSDAKALSRMGAEQVLDKWAPHGPFFYELRALTRHSQSLKEMRTSATNQLEAIELGMYPSKSVIRSQKKMIAIVDEQIVSNTKAISAHIASNEEVSRKILDITAIKGVAELTAATVLAETNGFELFNSIGQLVSYAGYDVVENQSGTHNGKTKISKQGNSRIRRALHMSSLCVVTHEVDIFKDLFERTYEKHKIKMKSYVAIQKKLLGIMYTLWKKNEKFDPKYGIKDTAKDEEVVHSSRGCLEEAV

SEQ ID NO: 449237 - protein, 373 aa, unidentified
MGEDRTVCVGLDTHKAKMAVAVAEPGRSGEVRFHGEIANQPDAVRRLIERLAEKHGQLKVCYEAGPCGYGLQRQITALGHDCTVVAPSLVPVRAGNRVKTNRRDAMTLARLHRAGELTAVWVPDPTHEAMRDLVRARTAAMETVRRARQQLQGFLLRHGRVFTGRKAWSPAHRRWLAGLRFAHPAQQIVLQEQIDAIEEAERRRDRLGQQIRELVPEWSLAPVVTALQAMRGIAFLSAVVLAAEVGDFRRFATPRQLMAWLGLVPSEHSSGAKVERGGITKAGNGRARRVLVEGAWSYRFPARVTSLIQARLDQAPEEARAIAWKAQLRLCARFRRLVAAGKNVNLVTTAVAREMAAFAWAIACQVQPRGAAA

SEQ ID NO: 449238 - protein, 472 aa, unidentified
MRESSMPPLQRHRTRKAVARGSGLPASLQAVHLNAAGIDIGSAEHYVAVPADRDPQPVRRFACFTADLERLAEWLEQCGIDTVAMESTGVYWIPLFQILETRGFEVKLVNARHVKTVPGRKSDVQDCQWLQQLHTFGLLAGSFRPDDQTCVLRSYLRQRDTLIRDCAAHIQRMQKALTQMNIHLHQVISDITGATGMRILRAILAGERDPVQLATMKDPRVRSSRQQIAQALHGDYRAEHLFALQQSLELHDTYRKMIAECDVHIEHCLAGFDARVDLAEHPLGPPKHGHRTPRGNAVGFDLRAHLYRIAGVDFTRIDGFDALTVQTILSEVGLDPSRFPSEKHFASWLALCPDNRVTGGVVKHTKSRKVVSRVATALRRAAQSAANSRSALGGFYRRLRARLGPAKAITATAHKLARIFYRMWKYREPYHPLSLDHSDTKYRERTLASLRKRAAALGFELVQSPAVSGAVS

SEQ ID NO: 449239 - protein, 348 aa, unidentified
MTLTIVETRAVTGGVDTHADTHVAAALDSIGGMLGVREFPATPVGYADLLGWLGGFGTVHLVGVEGTGSYGAGLARHLGAAGVRVVEVDRCDRQDRRRQGKSDPLDAVSAARAALSGRALGVPKGRDGAVEAIRALMVAKRSARGERTQTINQARALIVTGPDELRAKFARHSPAALVAELAALRPRAGDVPGYATQIALRELARRVEFFDAQLQRLDALIVPLVTTHAPGLLAVYGVGPDTAAMLLVAAGDEPARLRSEAAWAHLCAVAPIPASSGKVTRRRFNPGGDRQANHALWRIVITRMSAHPPTRAYVARRTAEGLSKKEIIRCLKRYIAREAYPHLRPAGG

SEQ ID NO: 449240 - protein, 343 aa, unidentified
MKITTVGIDLAKNVFQVHGVDERGKAGLRKALKRDQVLSFFANHAPCLIGMEACGSAHYWARKLEALGHTVKLIAPQFVKPYVKTNKNDAADAEAICEAVGRPNMRFVPIKNSEQQAVLSLHRARQGFVKARTAQANQIRGLLAEYGIIIPQGISQIARRLPEILEESENGLPGVFRQLLKRLGDHLKELERQVDELEGQIQTWHHEHEASKKLARIPGIGPLTASALIASIGDAKSFANGRQLAAWLGLVPKQHSSGGKPTLLGISKRGDTYLRTLLIHGARAVIRVAEHKPDFAESWLARLLARRNKNVAAVALANKNARTVWALLAHDRNYEAGYEPSGA

SEQ ID NO: 449241 - protein, 370 aa, unidentified
MHQSSTLYIGLDVHKDSSAVASVAKDHDAEVVYLGTIGTRHGDLDKLIRNMPSKATHLVFVYEAGPCGYWLSRDLTKKGYVCRVVAPSLIPKKAGDRVKTDRRDAVQLARLMRSGDLTPVYVPTVDDEAIRDLSRAREDAVSDLKAAKFRLQAFLLRQDIRYTGRATWGPAHLRWLAEVVCATPAQQIVFQAYVRAVTEHTERLQRLEQELKEQVTAWCLNPVVDALQALRGVQFTVAVTTVAELGDLTRFDTPRELMKFLGLIPAEYSSGERRRQGSITKAGNTHARRALVEGAWAYRYPAKISRHLQWRLENHPKAIQDISWKAQVRLCKRYRRLMARGKHANQVVVALARELVGFMWAIAKQIPVTP

SEQ ID NO: 449242 - protein, 346 aa, unidentified
MKEVRTIGLDLAKKVFQAHGVDATGAVTVRRALRRRQVLAFFAKLPPCLVGMEACATAHYWAREIAKFGHQVRLIPPAYAKAYVRRNKNDPADAEAICEAVSRPSMRFVAIKSEAQQAAAGIHKVREMLVKQRTMLINGLRGLMAEFGIVVADGPQHVGELVEILADPTKQRIPSPLHEGLLAMVETMRGLERRIEIIEKQIVARGRSNPTCRHLITIPGYGPILSSAMAAMVVNPAAFTNGRHLSASLGLVPRQDGTGGKIKLGPISKRGNGYLRRLLVNGATAVLHSKHAKKDPWLAKLLATKPPKVAACALANKMARIGWAVMMRQENFRPRQHQPCPDYPAA

SEQ ID NO: 449243 - protein, 339 aa, unidentified
MAIVGGLDLHRKQITFDLVELETGRVDRGRIAPAHRETFRRWLTGVVAGGPVDLAVEGCTGWRFVVEECATADVRAHLAEPADAAALKGRRQHAKTDRLDARHLRELLEAGKLPECWIPPTLVLEVRTKVRLYKDLLDERTGWQQRIHAVLFHHGVPAQTKLLASERERLVRLDGLSPSGRQAITVALRVIDTLDGELLRLREELVAFAKRQPGCKELQREFGIGPLSSVVIWCEMGDARRFANSRNAVRHTGLDISVYSSDGKRSRGHLTRQGPPLLRWALYEAGRCASRTTSPDHAYYEQVARRLGKRRAAMSVARKLARRCHHRLRALGDTALAPT

SEQ ID NO: 449244 - protein, 458 aa, unidentified
MRIIGIDLATTAKHRAIIATERSQFISPLLKFDTQLADLERLRGRALQEAAPNEELVVVMEATDINWYPIAVYFDQHGATVHVVNPRITADLARFYKRHAQSDRLSAKVLARLPLVSPDSVYPLVLSGGDYLALQRACKELDRLTVRISAHKNRLQAIDRLGWPGLKRRVFPAPDGWVTRWFREHFYDPQTVVDAGVEGLRQAWRAADAYDQGEGWIEPLLALAQELLQLYGHSGAYVDYAALADEARREQRRLATVEADAHEMRLHVTHPRYRQLHASRNLQSLRGVGEDGAAVYTAFVGAPDRFASNRAFRGWSGMVPRSRQSGESESKGLHLSQAGPNLVKKYAYLNADVARQRDPQIAAIYYQQMVEKGQHHTQAVCACATHLLDRVRIVLTEDRPYELRDVDGTPLTPQQAQEIIAARYTVPDEVRQRNNRRARKERVEQRAARKEERRSRSR

SEQ ID NO: 449245 - protein, 355 aa, unidentified
MDATGKPVLVRPSVPRSKLLELVASLPACLISMEACSGAHLWARMFQAHGHTVRLMAPKFVAPYRLSGKKGKNDAADAAAICEAVTRPSMRFVPRKSLQQQCELMVHRARQGFVVQRTATINRIRGLLSEFGIVLPLKAATVRREAMLQLEDLPGWANTVIGDLLSEVHRLDERIAQYDRHIEQIAKESAPARQLTQLPGVGATTATALVAMIGRGQEFRSGRQLSAWLGLAPGQYSSGSKQRLGRITKAGDPYLRMLLILGARSVLQSAKGKSDAVSRWAMQLAARGVPVQLLEAVGLRLTIEVPARVVHQGPQRCAAPMTVCSLAVRILRRSCTKRDPKYLAKCRHRQGKLLA

SEQ ID NO: 449246 - protein, 473 aa, unidentified
MRLYIGLDLGSKSQSEAVAVDESGKIVGEPVRFTPERSSMDEMVATLCGGALPEEVMFISEPTGTIWHSVESYLSSRGYGFFLVSPQKTHDLRRFYKRHAKTDTIDAYTLAKMALVHPEGLFRPSTMEPLWHNLRRGAKKEAKIARLIGDYKRTIQAKAEIALPGISSVVDEVDSPLAKCLYTKYLDPRKAVKLGKARLERSLGKAAGYSEKLFSEIWRCIETAAEIETDCDYDDLRVDIDEDFEVLECLKAQWESVKRRNLRTYCRLDPGRLLCTVYGVGDTLAPAILAGIGDGERFKSIKHFLSYTGFTPRVEESGQREAKGTRMTKAGPPWLRRALYLAADVARRWDPQLAEVYYRCMLNKGHAHTKALCVVASRLAMRIYAVVKEQRPYELRDVDGRPVTAQEAKAIVEARYKVPEEVRCQRRNAVGNHSMKRSGRSRTTQSRSGCPTLRLTAPLPKVNEGSLRALDTT

SEQ ID NO: 449247 - protein, 343 aa, unidentified
MKVTIVGLDIAKNIFHVVCFDERFKELRKRILRRNQVLLFFANLPVCCIGMEACASSHYWGRELRKLGHDVKLIPPQHVKAYLRGNKNDYNDARAIAEAATRPGISGVAVKTVEEQDMQAVHRIRSQCLRDRTALVNSTRGLLSEYGIIVPKGIASLRHRIPELLEDADNGLSMLFRQLLARRYDQLVELDNHIEFYTDELEKIGQEDEACQRLQTIPGFGPIVASAFRSAIGNGSAYSKGRDAAASLGLVPRQHSTGGKNNLLGISKRGDRYLRSLLVHGARAVVTQAARKNDKLSSWLNRIVKERGWNKAVVAMANKMARMGWAILRHSTSYRSLPATPAS

SEQ ID NO: 449248 - protein, 447 aa, unidentified
MPELPKPAEPEFVAYLGIDWGDKKHAWALQVAGSTKVEQGEVLHTPEAIQEWVMGLRHRFPTGRLAVALEQSRGPLVFALSKYEHLVLHPIHPTSAADYRKIFRPSGAKSDGPDAAILLDMLVRHRDKLRPLHPDTPETRTLQLLVEDRRQLVNERTRLSNRLGADLKSYYPQVLQWFEDPYAPVALDFLERWPTLEQLQKAKPATLQKFLQTHQCRDEAKNHARREAMQTAVAATTDIAVVTAGCAAARAAVRLLRDLSQSIREYDRQIEKLAKAHPDFAIFDSLPGAGAVLVPRLIAAFGTQRDRYQNAAELQRYSGIAPVTEASGQQSWVHWRWSCPKFLRQTMHEWAAQSIQHCDWAAAYYQVQREERGKSHHAAVRSLGYKWIRIAFRCWQDRTLYDDSRYEAVLRGHHKKATAQPNQPSQFEMPTQWISCGSFQKIALKNS

SEQ ID NO: 449249 - protein, 409 aa, unidentified
MELLIPRGAGMDVHQATVVITVRLPDEAGGRRSVTETFGTMTPDLLALRDWLQAHGVTHVAMESTGVYWKPVYYLLEDAFTLLLINMHELKRVPGRKTDVKDSEWLAQLLECGLLKSSFVPPPAIRELRDLTRYRVQQVRDQAQETNRLHKVLEDAGVKLSTVVSDVMGVSGRAMLAALLEGKSDPVALADLARGRLRAKLPALQRALQGRFRPHHAFLLRQILSKIDFLEETIADLTREIDARVRPFEPMLTALDTIPGVDRIAAISIVAETGGDMHRFPSAAHLCSWGAMCPGQNESAGKRRSGKTRKGNVYLRRTLIQAALAATRKRDCALQTRYHRVKRQRGHKKAVVAVGHQILEIAYYVMRDGVSYHELGADYFVRRDRERAKRRSIQQLEALGYRVTLNDAA

SEQ ID NO: 449250 - protein, 370 aa, unidentified
MKDDISVFVGLDVHKDCIAIAVAHAGRAEPRFIGTCGAQLRELLKTVSGLGTPADTLIAYEAGPSGFALARQLAAHGWQCEVIAVSKTPRKPGERIKTDRRDALALARYLRSGDLTPVVIPDATDEAIRDLSRARHDAVRARLKVRQQLKAMLLRHGKPFPGKTSWGSAHERYLARVVFDHPAQQIAFAEYRSAIMDTHQRIERITQALREQIEHWRLGPVVSALMCFKGISFIAAVTLVAELGDMHRFEHPRQLMAYLGLVPSEYSSGTSRIQGSITKTGNTHVRRILVESAWAYRYSARLSRPVVQRQLEQPKAVRDIAWRAQLRLCSRYRRLCGRGMHSNKICVAIARELCAFIWEAARHIQAALPR

SEQ ID NO: 449251 - protein, 416 aa, unidentified
MKITYQTCCGVDVHKSFLVATIVKTTGGIEPSYQKERFSTFNNSILEFKQWLLDNDCHDVCMESTGKYWVPVFNLLEDDINVVIANPKWVKAVKGNKDDTKDSKWIGDLFRLGLVKGSYIPCKKFRILREYTRYRYKLVSCRSSEKNRYQNALTVCNVALDSVVSDIFGKSATSVIDCLIEQSGNSINHEEIASRLLRSLKKKSDSVIESIEGYQMTDPPKYRMRLVRAHLDYITSTINDIDTMLDSLIAPYENAVQLLCAIPGVDRNSAITVISEIGTDMTPFSNSKRLCCWAGLTPGSNESAGKKKSVRITRAGVYLKPALVQVAHAAVKSDKSPYYKQKYERIMKRRGKKRAIIAIDRMILTAIYQMLSTGEAWNPTDLYKTDMPEPLKEKQKEKAIKQAKKLLIREGILSES

SEQ ID NO: 449252 - protein, 405 aa, unidentified
METERCAGIDWASEEHALCVVDGGGRSLAGEMHSHDEAGVRELIARMRTLGVCRVAIERPDGLLVDRLLEAGFTVLPIHPNKLKATRPRYEAAGGKSDGFDAFVLAELARTDSHRHRALAPNSDETKALRALTRTREDLVGARVRLANELRAQLDAFWPGAARVFADVDSPIGLAFLERYPAPEDARGLGEKRLEGFLARNGYCGRRSAAELLERVRSAPAGRAGAMEAEARRGAVLGLVAALKPIVTQIRELTSQIAGAVRSHPDGQVFLPLFKDPKSVITAARLVAEIGDDRGRYPTQEALAADAGMAPVARESGKRKVAGFRWACDKRLRDAVACLANSTRHTHPWARSVYLDARSRGLEHPHAIRVLGRAWLRVLWRCWQDEVPYDPAKHGNLRRLQPAGG

SEQ ID NO: 449253 - protein, 340 aa, unidentified
MTIVMGLDQHRAQITAEWVDTVTGEVCRSRVAPAHRGSVRRFLARFEDHELEVALEATTGWRFVVEELQRVGASVHLAEPAETAARRGRKKRAKTDRADARLLRELVMVGRLPESWIAPDHILDLRARVRLRHTLIDERGEWQQRIHAVLYHHGCPHHHGIGLLTGTGREWLQSLELPATAREQVTVALQMIGAVDAQVAPMDKELRAYARRQPGCKALMGLYGIGHLTAVTILAELGDARRFSSSREAVRYSGLDITVYQSDQRRAPGHLSRQGPPALRWALYEAAQSAHRTSSPDRDYYLQAAERLGGNRACLAVARKLLKRSYHTLRELGDGALQPA

SEQ ID NO: 449254 - protein, 359 aa, unidentified
MFAVTNAIPMDVIIGVDTHKDVHAAAAISGAGIYLATITVPASSNGYGALEAWAKSMGAVQAFGIEGTGSYGAGLSRFLRERGHTVVEVNRPNRQLRYQQGKSDAVDAESAARAVLSGQAVGQPKSGTGTVEMIRHLKIARDTAVKARTQAMQTLKAIIVCSPDALREQLDQVSGKMTLLRRLAALRPGPLTSTLASAKASLRSIARRWLLLDAEIKQHDAHLETLTAARAPELLEAHGMASGTAAEMLLLVGDNPERIHSEAAFAKLCGACPIPASSGKTIRHRLNRGGNRQANAALYRVVIIRMRGHQPTLDYVRRRAAEGKPKSEIIRCLKRYVAREIFGYLCRKPALADAAATSS

SEQ ID NO: 449255 - protein, 323 aa, unidentified
MTRTICGVDISSQSLDARIGHEGAFAQFPNTTAGIAALRSFCQAHQVELAAMEATGGYEQLAFQQLSEQGLPVAILNPRSVRQFAQSMGSLEKTDRIDAGMIAWYAEVKKSRPTCVAPESQQHLRALVTRLHQLTDIRTAQLNQQRLVTDRAVQASFKKLLAVLARQIAELEKRIAALLEKDPLWRELDQAFRTIKGVADRTVARIMAEMPEIGVLSNKTISKLAGVAPLANDSGQHQGKRAVRGGRATVREILFIVASVVGRYEPDFIAFQQRLRAAGKPPKVVRIALAHKLLVRLNAKAREVRQRLATLQPDRMALLSGSR

SEQ ID NO: 449256 - protein, 369 aa, unidentified
MDYYAGIDVSLEYSTVCVVDGSGQIVREDKVASEPEVLIAWFSSLGYRLTRIGLEAGPLSQWLYAAMKQAGLAVELLETRHVRDAFKAMPVKSDRNDARGIAQLMRLGWFRPVHCKSVGAQEVRAELTARKLIESKLQDVENSLRGILRGFGLKVGKATSRGFAARVRELVKGHPTLETIAEALLCVHETLRREFIGFEKRVRSQARTHEGAKLLMSAPGVGAIVSLTYAAAIDDPARFKSSKKAGSHFGLTPKKYQSGETDRTGRISKIGDASVRAALYQAAHVILTRPVKGCAELKGWAMRIANRAGHQKAKVALARKLAVIMHRMLADGKPFNPNAKAERMAAKSAKTTAKAVALLAQRQTMAAAV

SEQ ID NO: 449257 - protein, 410 aa, unidentified
MVKENFIYVGIDLHKETHTAVMIDCYNQKLGEITFPNRPADFPKLVTKVKKCNTDAKEVVYGLENAYGYGRPLAVWLIDKGYFVKDVNTAISHRQAKHRGVMYRKSDSDDAEAIALATLNMLDKLPDACPNDAYWSLGQLVHRRDNIMKQRTRLVNQLHEQLCIAYPSYKQFFNDISRPTALYFWEHYPSRKYLKGKSVEDLRTELVPVSHNRCSTKNCEKILDAVASDKVKNNAYQDARDMVTLSIVSDLQHYDSQLAEVDKMLEQMYKMLGCTLTTIPGVNVITAVKILAEIGDIKRFANANKLAQFAGIAPLHLSSSGKGKDVATKQGNRRLQATIYFLAIQMVQVSSKGTPRNSVVRAYYEKRKAEGKTSQQALICISRRLISIIYGMLKHGTEYRMPVVESAGEK

SEQ ID NO: 449258 - protein, 401 aa, unidentified
MVSDFKKGRYNLMKIFVGIDIAKLNHFAAAISSDGEILLEPFKFTNDADGFQLLVSKLESFDKNSIIIGLESTAHYGDNLVRYLVAEFYQVCVLNPIKTCQMRKNNIRKTKTDKVDTFVIAKTLMMQDDLRFITFFDLDMMDLKALGRFRQKTIKQRTRLKIQLTTYVDQVFPEIQYFFKSGLHQNAVYALLKEAPSPKEIASMHMTHLANLLKVNSHGHFTKEQAKELRVLAQKSVGANDSAISIQITQTIQQIELLDSQLEKIEAEMTDIMKFNDSVIMTIPGIGYINGGMILGEIGDIHRFSNPNKLLAFAGLDPSVYQSGNFQAKTTRMSKRGSRVLRYALVNAAWNVVRNNATFKAYYDAKRAEGRSHYNALGHCSGKLVRVIWKMLTDNVEFNLK

SEQ ID NO: 449259 - protein, 328 aa, unidentified
MFYLGMDVAKAKLDCCLLLDEVSGKRKTKVVSNAKSGIVDLLAWTAKQNVSPEELHVVMDATGVYHEQAALALADAGVMVSIVNPAQVKDFGRGLAVRTKTDGVDSFVLARYGALLKPAAWIPPAPEARMLQALLARRDAIALDLQRERNRQEKADATDTPELIRKSLEDSIEFLVKQLAQLQQDIDDHINRHPSLKKDMNLLQSIPGVGPQVGGNMLSVLSSHHFESAEQLAAYLGLVPVERQSGSSVLGRARLSKAGPARIRAVLYMAAVAAKRCNPHVKAVYERMLARGKCKMSALGAAMRKLVHLCFGVLKTQQPYQRDYAKNA

SEQ ID NO: 449260 - protein, 257 aa, unidentified
MSELYVGIDVSKERLDVAFSDGREGQFGNDPAGHSQLRGVLSQQPPRLVVMEATGGFERSAAAALAAAGLALRIVNARQVRDFAKASGRLAKTDRLDAQVLVKFAQAMKLEPRELPSEQQQGLQALIARRQQLIEMLVMEKNRLRTAHKDVKRGLKKNIDWLEQQLKHADQDLGSALRECGVWREKVELLESVPGIARVTALRLLASLPELGTLNRREISALAGVAPFNCDSGGWSGIAVSTAVVRSPEVRCTCRRS

SEQ ID NO: 449261 - protein, 345 aa, unidentified
MKYFFIGIDVSKEKLDATLIHYESESDSEQQLAYTTVENNPKGFRSLVSWCKKNAGRGVKTDTMLFCCETTGGYDRALCDWLYGNGLNIWRESALQIKRSMGLRKGKDDKADSEMIAYYALRFRSKATLYKPLDGNMRSLRDLFLYRQSLVADRQAKLVSAKEKRHISSKSKVDNFIYRDAQKAIDLLTKSIKECERRMLEIIKEDEEMYSNYLHLISCKGVGLVTSVMLIVYTDNFKGWNAKKMASYCGIAPFYESSGSSVFHKANTGGYSNRRLKGILTQAARSAITHNPTLRQYYLRMKAQGKPYGVILNNVNNKLVHILFSLVLHDCDFELDHETKRTARA

SEQ ID NO: 449262 - protein, 367 aa, unidentified
MKQRTTKHSVQPLSEVPGCKTVAVDLAKRVFQVAGEDALGQVVYEQRIQSRDAFQAFLQQLPEGVTVLMETGPGAQAWARQVQQRGNAVRILPAQHVGKHRSGPKNDRNDALAILRAGHDRRIASVPVKNVAALAMQALHRARQGYIRRRTALSNQMRGLLLEQGIALAKGDVAINRRIPEILEDASQPIPDPLRELIDELLAEWRQLGERVAILTGRLEAQARADQTAQRLMSVRGVGPIIATALLAKQTQPERFANARQFAAYFGLVPEQHSSGEKVRLGRMGKQGDGYIRSLAIQGAQAVLQQLRPDSEQPDDRRLLRWQQRLGRKGAAVRLANRNLRILWVLLQNEQTYHREPNRRQEATMNN

SEQ ID NO: 449263 - protein, 330 aa, unidentified
MKNVKDVIGIDISKNTIDATLYHSREHAVFSNDEAGYRDLIKWSKGHLGTAHYFYCFENTGNYSLKLSVFLCASSLVYVEESPMRIKRSTGLTREKTDKLDSYMIARFGWMYREELEPSNVRPKAFQEIGRLLALRDQLVRDRSGLKSTLKEQRHLLSSPSTDACCKILERSIKHIDKQVLSIEKRMRELLKTDDKLQQNYQLLLSVKGVGLILSCQLLYHTSNFVKFDNWRSFSSYCGIAPFEYSSGSSIRRRKQSHYIGDRKMKTLLSMAAVSAIQSDRELKNYYQRKLEEGKHKMIALNNVRNKILARSFAVIKRGTPFVNIAAVNF

SEQ ID NO: 449264 - protein, 318 aa, unidentified
MTAQLLALAAGIDVGQRFLDVGFAPSGKTFRVPNAAGGIAALVERLTQAGVGRVVLEAIGPYARQLVSALAVAGFEVGLINPRRIKAFREFEGRRAKTDRLDARLIARFALAMTDAIRPLPSAEQLALKALATRRRQLTEMIAMEKTRLKQAVEPLLLESHRTAIAALTAESRQIEAELGRRVAADPQIAATFEILTSIPGIGERVAGVLITELPEIGRSDRRAIASLAGLAPHISQSGNAPPRAAISGGRPCVRSALYMAALVASRHNPEMKAAYLNLRSQGKPAKLALVAIARKLLVTANALVKNRTHYTPQSLDK

SEQ ID NO: 449265 - protein, 315 aa, unidentified
MTNQKKSKTVINVGVDIGKQFLDICIHEKSLYWQEDNSPEGIKRLLKRLAHYQVERLVMEATGRYEFNLAQAAYSKGFPVCIVKPLSVRRYAGAIEQLAKTDKIDAALIAQFAAVVKPRATPQKSKNLIAIKDLIARRRQLMSLRTQELNRISIMGKAFEVSCRRIIRHLDAEIDRMEKRLAKHVQGQAEWTDKQLLLKSAPGVGNTLVYTLLADLPELGTLNNKEVAALVGVAPINRDSGRLRGKRRIQGGRANIRTVLYMATLSATQCNPVIKAFYKKLVAQGKHKKVAITACMRKFITMLNAMVRDHCTWAY

SEQ ID NO: 449266 - protein, 412 aa, unidentified
MTAKDQFAAHVGLDWADKKHDVCVQFKNGDRIFHVIEHTPEALDIWLNELHQKVKGRIAIAIELKKGPVVYALQKYPFVTVFPIHALSLARYRQAFWPSGAKDDPQDAELALDLMLRYPHKIKAIEADNPDIRLLQQLVEQRRLLVEDKRRFVNRLINTLKQYYPQPLEWFSHRDSSLFCELIIRWPSLQQLKRARSDTVRHFMNAKGGPAVAYTEQRVASIASAIPLTTDKTVIEANALMATALASQIKLAGDLIRTYDERIESLFDTLPDAELFKSLPGMGPCMGPRMLAALGDNRDRFNSAEEIQNYAGIAPVTERSGQKSWVHWRWQCAKFVRQTFVEWTAKTVNSSYWARLYYQGQREKGKSHQSAIRALAFKWIRIIYRCWKTKTRYDEAKYLLALEARKSPLLKP

SEQ ID NO: 449267 - protein, 428 aa, unidentified
MDFTQNQRLKQITENTLIIGVDIAKQKHVARAIDDRGLDLAKRLMFHNSFEGFTNLLDWIESLSNKLNRTHVIIGMEPTGHYWLNLAYYLKDRGLQTVVVNPMKVKRSKELDDDSPTKNDTKDAKVIAQVVRDGRFHEPTLPEDVYAELREGMKLYDIIQEDLSSIKAQMHNLLDRYFPEFQQVFKSWTGKAAIQLLKQGYFPRDIIQSTEEELLNEINKAAKRAVGLKRVQELKQAAEQSVGLQVGLNMAKQELKYLVEQYELLTKRLQVHQEQLEVLIQHIPGAVEMTAIKGVSAMTVAGFFAEVGDLSNYSDPRQIIKLAGLNLTMNQSGLHKGRTSISKRGRRRLRSILFQVARPLSCHNEGFKQLHEYYRNRPNNPLTGKQSFVALSRKLIKIFFVLGTRECAFSESRMLADIPMLDNINQAA

SEQ ID NO: 449268 - protein, 369 aa, unidentified
METKELNPINFLYVGVDVHKDQHTAVAANCFGHALLEKEINNSKEEFAQLVEKVKILAEAKSLKPIFGLEDTSAYGQRLALHLCQENFPVKVVSPVFVDRERRKLTHPEKSDSQDALGVARALISRIGTLPDFSISKTNEIAKDLKDLVVDREFLVKEQTRIKNQLHRLLHRSYNSEYREKFKNPFFVRALEYWSKHPVPGELSDSSILKSQIKRKIRRLKAIKQEVLEIEGEMKIILDQMNQKLKTLNGCGLVLASSVLAEIKNIERFHSPNALAKYGGLCPKEKSSGKRIRHIKTKSGNRRLNKAVHRIALSQIGRRGNIYSREYFKKKIAEGKNKAQAMCCLKRRLINIIFMMLKHKAAYDYAARC

SEQ ID NO: 449269 - protein, 316 aa, unidentified
MTNYIGVDVSKDSFDAHSTSLGSRQFSNDGTGFKSFRKWIGASAHVVMEASGPYYLRLADDLYQSGFLVSVINPLVIRRFCQMNLQRAKTDRKDAIAIAQFAHLTNPSVWNPAPEHLRQLQQMQSVMEQLSKQLTSTRNALEALNQHPHIYKSALKSLQQVERAQQQQIVQLEKEIMELTKQHYQAEFDSLVSIPGIGKKTAVLLILSTHGFSRFENVKQFVAYTGIAPRIFQSGKTINKKPKISKLGMADLRRSIFMCALKAIKYNQGCKNLFDRLRAKGKAAKVALMAVSHKLLRQAFALAKSKKLFQSELSLA

SEQ ID NO: 449270 - protein, 320 aa, unidentified
MTGIICGVDVSKDSLEARIGPEGAAGAFPNHVEGIAELAAFCAAQAVELVAMEATGGYEQLPFAQLSQAGLGVAILNPRAVRQFAEAMGRLEKTDRIDAGMIAWYAEVRQSRPVCLAPQSQQHLRALVTRLRQLTEIRTAQLNQQRLVTERAVQASFRKLLTFIAAQIRDLEQRIAKLIGQDPLWRELDQTFRTIKGVADRTVCRLMAEMPEIGTLSNKTISKLAGVAPLARDSGKHQGKRVVRGGRASVRDLLFIVASVVGRHEPDFIAFQQRLRAAGKPPKVVRIALAHKLLVRLNAKAREVRHRFAVLHPSSSALFL

SEQ ID NO: 449271 - protein, 354 aa, unidentified
MSQQLSTTIAVIGVDIGKNSFHVVGLDQRGAIVLRQKWSRGQVESRFANMPPCLIGMEACVGAHHLSRQLKGLGHDARLMPAKYVRPYSKGQKNDFRDAEAIAEAVQRPTMKFVATKTADQLDLQALHRVRERLVSQRTGIINQIRAFLLERGIAVRQGQRFLRAELPRILAAPPDVLSPRMVHVIEDLAGDWRRLDERIEGLSGEIEAIARRDAGCERLMSVPGIGPIISSAMVAAIGNGDAFAKGRDFAAWLGLVPKQISTGDRTILGKISKRGNRYLRVLFVQAAWVVLIKPKSWERHGLKPWLEAANKRLHHNVLAIALANKLARIAWSVLARGRSFEARMTNEANSQPV

SEQ ID NO: 449272 - protein, 466 aa, unidentified
MAAVMIGVDPHKASHTAVVISAAEEPLGELRVRACAVQAERLLAWAAAWPQRTWAVEGAGGLGHLLAQQLLSAGERVLDVPPKLGARVRLLAAGDTNKNDPNDARSVAVAALRSAGVREVRADDHAAVLKIWSKRHRDLGRARTQAACRLHAVLCELIPGGVSKAITAAAAARLLESIAPAGAVEAARCELAAAFTEDLRGIDARIRETRKKLAVAVQATGTSLTGLYGVGPVVAAVVIGDVRGVSRFPGRDHFAACNGTAPIEVSSGPRKIYRLSRRGNRRHGHAIHMAAVTQIGHRHSQGRACYDKKLAEGKTPKEALRSLKRQVSNAIFACLHTDARQVAARAGSPGGQPGNDSASSAAGSHPRHRLFGQATPGPGHHTTTATSNPAPGPAHARGRAGRSPVAATPPQVQAERPQRNEDQRSGGAARRRPHPAARKARGQESPRKPQRPRGPSQAAKNTGGAP

SEQ ID NO: 449273 - protein, 355 aa, unidentified
MIGTKYIGMDVHKESISIAVRNSAGKVVMESVIETKASMILQFIDGLRGDLQVTFEEGTSAAWLYDLLKPHVTKLVVCDPRKNKSMREGNQNDKIDARRLAELLRLDHLTPVYHGEHGLRTLKELVRSYLTITKDLARVKSRVKAIYRSWAIPCTGKQVYAQRHRAEWLGKINEPGVRRRAECYYQQLDALRLLRQGVRRDLLMESKKQKAWKRLCQIPSLGPIRAAVLLGILQTPHRFRTKRQLWAYGGLAIETHSSAGHRRVDGQLQRSRKNVLVRGLNRNSNHDLKNLFKGAAAVASSKPGPFEQFYTALVAKGMRPEMARLTLARKIATIVLIVWKRGVCFDAQHLKPQTA

SEQ ID NO: 449274 - protein, 326 aa, unidentified
MTKVQNFSGIDISKNSFDVCLEHEGRYRHKKFSYTEEGMESCVKFITPDTHCIMESTGTYHCRLAHFLHTRGITVSVVNPLSVKRFAQALMLRSKTDSADSRMLAMYGRKFTPAPWLPKKDYCIELQQLINLQQLLIKQLTADTNQLEANAHSVVRNPCVQEVLRQQVLQTQASIKQVEKQLEEIVQQYDKQNYDNVSAIPGIGKKTAIVLIAMTQNMEAFDSAKQVCSYFGLCPRLYESGTSVKGRAKICKMGMVVIRKLLYMCALSAKRYNKACRELYERLVAKGKSKKLILIAIANKLVKQVFAIMKNKTTYNENILSIKFAY

SEQ ID NO: 449275 - protein, 343 aa, unidentified
MLHYVGLDVSLKQTSICVVNETGSVVREGVVDSDPDAIVAFVRSNAPGMLRVGLETGPTATWLWTELNQRGLPVICIDARHAKAVLKMQINKSDRNDAAGIARIMQIGWFKEVRVKDIHSHLVKALLVSRALLVKIKRDLENQIRGLLKNLGFVIGRAKFNVFAGRAEELIEDRPELIAIVAPLLKARKAIEQQIDDLDRRVLKLARHDPEVRRFMTVPGIGPITALCFKATIDNPARFKRSRSVGAYVGLTARRHASGEIDWSGRISKCGDAMLRSYLFEAAGVLLTRVPKWSALKAWGMRLAKRNGLRKAKVAVARKLAVILHRMWIDRSEFNWSKKEVAA

SEQ ID NO: 449276 - protein, 394 aa, unidentified
MYFVGIDVSKYKHDCFIVTETGEVIKDTFTFDNTRTGFDQFFFILDGLGPKNEIKIGLEATGHYMNNLMKHLSVKGYSFILLNPIIVSRFRHSETLRRTKTDKVDAKLIAQVIASKDFNSYPLQAYHFPDLKTLTRLRNRLIKQRSLYLVMLTNQLDLSFPEFKEFFDGNLKSKTAQFILTKYGISSRIANMNSQSFELLRKVSYGKFSYAKFAKLKELAKNTIGCSSEIDETLFTLTINLYQSIDEAITEVESKIIEIMEKLDSPTASIPGIGTMSAATIIAEYGDVSRFANDGQMLAYAGLDCGRYQSGTSDFPGRMVKHGSGYLRQVLMNVAETCMIHVPSFYDYYLKKRNEGKSHRVALSHLARKLVRMIYKLETSHTHFDLSVFNSQHQ

SEQ ID NO: 449277 - protein, 372 aa, unidentified
MRHHTEAFIGIDTSKSRNAVAIAEGGRGGEVRYLGEFPATEAAMRKLVAKLAARYDKLTFCYEAGPTGYGLYRLIKRLGYECIVSAPSLIPKKPGDRVKTNRRDAISLARLSRAGELTAVWVPDERHEAMRDLSRARQAANKDLQGKRQQISSLMLRLGRVYPGKTTWGPAHMKWLMAQKLDHREQRMALEELLQGVRQESERVERLERAIREAVPEWSLAEVVTALQAMRGIDLIAAVGVLAEIGDLSRFQNPRELMGYLGLVPSESSTGDKINRGGITKSGNGRARRILVEAAWAYRYPARVGREKQPKVAAAPRRVREIAWKAQTRLCGRFRSLERKGKRRTVIVTAIARELAAFVWAINREVRPPRTA

SEQ ID NO: 449278 - protein, 405 aa, unidentified
MPYILALDVSMGHSYSVLYKDDTCLFEDEIEHTQRGFHALLEKIQHLPERPLIVFEATGIYSRPVEKFFQDHHFSYCLLNPLEAKKQMEESTLRSWKTDKSDAHRLAQTHLKNQRQPKEVQSNFYLEMRDLARFYQEIEKKITRLRMDLHNCLQLTFPELEQFFSNRLTPYALTLIRLFPHPDFVLASTRTKIKNKLINETRKKISANRAEQKADQIIHYAQCAYPAVEKDSIHCQKTIYYAELLQDLLEQKEALATQMIKKAEGSPCFLLYQTFPGIDALTAALLLGELGDITRFKTHKQLNAFVGIDIRRYQSGKYTGQDRINKRGNPKARKIIFFTIRNMIRQQRAAPNHIVDYYYKLKKQPIPKKDKVATVACMNKLLKCMHAMVRAHTEYDYAYAVSVDH

SEQ ID NO: 449279 - protein, 364 aa, unidentified
MDVHLRSTTVCALDAETGEAVTRRFRGNPWGEVAEWMSGFPGPSLAAYESGYLGFAPQRELSGLGVDCVVAAVSKVPRSAADSASKNDRNDAARMAKAILAHDISPAWVPSPEVEGIRDLAGAYDGATARLATAKQRLLAFLAKRGFVYGGTTPAGNPRKYWTYDFLRWLDKVRPEDDGGVRALAALRNEVEAAAEARADLLSEYRAAVDASPIAAEVAALQSIKGCAFALAAAFSAEVGDFTRFRSGRQVTAYFGLAPSQRSSGDSVRLGGISGAGNALVRKLAVEGSWCYAAARHQPKLMPRDTGVPLEIRMHGRKGSERLLRRREEMLARGVPAAKANAATAAELVRWLWALGMMCREGAE

SEQ ID NO: 449280 - protein, 354 aa, unidentified
MNHDKYVGLDVHQASTVAAVINAQGKCVCESIIETKGNTLVDFILGLRGTLHVTLEEGTQSAWLYDLLHPLVAEVVVCDPRHNKLAAGGNKGDKIDANKLAHRLRMGELKPVYKGEAGLRQLKVLVASYENLVSDTTRVRNRIKAIYRSRGIGCGGREVYHQSRRAEYLAQLTDAGLRRRVELLYQQLDALTPLRREAQKAMLQESRKPGAYQLLQGVPAIGPIRAAQLVATVATPHRFRTKRQFWPYCGLAVVTHSSADYRFVAGKVAKRVKPGQTRGLNRNHNHRLKAVFKGAATEALKREPFKSYYQRLVGQGIRPELARVSVARKLAVIVLQVWKSGEEFRAEEVNKSAA

SEQ ID NO: 449281 - protein, 418 aa, unidentified
MEILYPRCAGLDVHEETVVACARLATGSGEVAREVRTFGATTASLLELAAWLTAQGCTHVAMEATGVYWKPVWHILAADGFALVLANAAHVKNMPGRKTDVGDAAWLAELLAHGLVRASFVPEAQTQVLRTLLRTRKQLVRERVAHTQRLQKTLEDANIKLDAVLANLLGASGRAMLEALAEGESDPATLAALAHPRLTATPERLEEALRGRVAPHHRFLLRLHLDQVDALDAAIARIDREVDAGLAPFQAAVELLTSIPGVGGLAAQVIVAEIGLDMGRFPTAGHLLSWAGMCPRNDESAGKRDESAGKRRSTRLRKGAPWLKTTLVRCAWAASRKKARCLQARFHRLRGRRGPTKAICAVAASILTAACHMLKDGTAYQDLGPAHFERRSKQTQAQRLVRRLADLGHAVEITPVAA

SEQ ID NO: 449282 - protein, 401 aa, unidentified
MPHSSSTQSTNSAPVLGAKGRAVGLDIHPDTFAAAVLEGREPLKARVAHSITQQPLEALCAWAARHTKPADVLIIEASGNTFTVAERLQAIGRQVYILESHRAGQIGKSYLANDRLDAVKIAQIYLSGLSIKVWQPDAATRQRRELLSTYQRCVQDSTRAQQHLRSFLNEYALRLPKGFRLCRPEALARLLSLKEWTPRQKLLLEEMHGSLIATRERRTRLRRLMALEIEQTPDFLRLYKLAGLSLVTTYALVAIIGDIRRFATSGKLVSYLGLNPSVVQSGNSDTGGALHRTGRGSLRALIVQASKRLLTTTNPLQKWGLSVALRRGRNKAAVAVARKLTVAIWHVLRGHWNKTLEETTTLLTKLDKLATDLGVPTLQELGYASKIAFREQKLEVLRTHP

SEQ ID NO: 449283 - protein, 391 aa, unidentified
MSQYFVGIDISKYKHDCCIINAADQSIVAKFTIRNDKDGFNELLTSLQSLSTPEGIRIGFESTAHYALNLELFLEKAHHSFMEVNPVLISEYKKSTSLRRTKTDSIDCESIARWLMTIEYKPHSKGFYHAYSLKSLTRLRDRLIRQRSFYLVKITNVLDHTFPEFKPFFQERFSKTALYLLENYGSAEKMARMNSASYDNLRRISRGKFTPQKFIELKALAANTVGVNNSIFDTELTCLLTLYKEASNQISVLEAQITELIEEVHPHYMSIPGIGPISAAVIYAEYGDISNFSSPAQMLAFAGLEPGISESGTESHKGRMVKRGSSQLRYTLMNCALPLIRFDVTFATYYAKKRSEGKPHRVAISHVTKKLVRVIFALERQNTDFVATALR

SEQ ID NO: 449284 - protein, 476 aa, unidentified
MPDAPVPSSNAPILAHETLYIGIDVGKFRHVAGFVSTSLLNRHERFESCPVVTFEQSLEGFRLLVQRIQTYVPIEQAFVLMEKTGHYHKALEQYLLEMDLSVYLIHIQTRAAGILKSDKRDALGLANHLYNQLEKNIQFGVSTEVARRAVPPSEIAALLRGLIRHRYELMHECTQRKNKLVAICDELFPELTSICKDPNTPSALALRKSFPTPQDVSTASLETLRVARLGHYPSVARLQQLQEMARHTIGVKEPGRQQGLIFEQEQLITELQLLQRHVQAIDMRIATTLGQSREGRILMSIPGIGQIQAATIIAAIGHIDNFENAAKLKSYFGWAPAVFQTGITYDRVRLTNKGTRTIRQTLFLVVANAIQQDCEWRKIYQRLVPLKCAYDERRKEYVGKKKVMGRIAGQITTMIFALLKQDAELLRKTHNGSFPEPILYDPEVHKAHRSGKYKAIKPVTLKGSLIQLPSHTQKIP

SEQ ID NO: 449285 - protein, 383 aa, unidentified
MRTVCGLDVHKDSVYLCILSSTGEIYEKKFGVLTTELIEMRDLMLSHHVLEVGMESTSVYWVPIWRVLEPHFKLKLINPYFIKQLPGHKSDVKDAQWIAECMLKELVNGSFVPPERIQQLRQYDRRIYDLDDEIIRKLAKLDAAVQRCNIRLSNYVSNTDSVSYKAVIDKICEGVTDPNVLVEEIHGRIINHHGKETIIASLTGSITECDIDIMQQLKAEIDLAEQHKQECMDKMLAICENEYSTQLHNLQTIPGVKMRAATSLIAEIGTDMSHFETANHLASWSGLKPRNDQSNKTIKSRRITYGNRYLRRTIIQCSWGASRTKNCFFSRFSYHQIQVRKKNRMKVQVAIARKMLICAWHILKDGVSYKDFNNIIEASVTNG

SEQ ID NO: 449286 - protein, 285 aa, unidentified
MNLLKGNEINVGIDVGKSQLDIYIRPTGKFFSVANDAQGVREAIKRLKAHQPKRIIVEATGRLEHRLVFACAKQGLPIVVANPVHVRRFAQAIGQLAKTDKIDARLIAHFGEAVQPKLTEVNAESVRKISDLLTRRRQLLRMQTMEKNRLGIMPQVLHASINTILKSFKAAIKKLDELLDRLIVTNEEWATKSSILQSVPGVGKMVAYTLLSDLPELGHLNNKEISALVGVAPMNRESGKYQGQRRIRGGRHQVRTIMFMSMLSAIQHNSTLKAYYDRLKLAGKP

SEQ ID NO: 449287 - protein, 356 aa, unidentified
MAEGTWVGLDVHARKTVAGVLDAVSGEVRSLRAPTLPSETVQWLQQFAAPVRVAYEAGPTGYGLARACASAGIACTVAAPSKIPRASADKVKTDRRDAERLARLLRLGELVAVRVPEPHEEAARDLVRAREDARGELMRARHRLSKLLLRHGLVYDCSAWTLAHDAWLRRQRFDSRPLQLAFEESYGAALQAKARRDALDQAIDELAAEPPFAEIVGRLCCLRGVATLTALALTVELGDWTRFRPQSLGPFLGLTPSEDSTGERRQRGSITKTGNTHARRLLVEAAWQQRRPLRESTTLARRRQGQPPPVRARADQSARRLHQRWHALERRGKRRTIVAVAVARELAGHCWALATM

SEQ ID NO: 449288 - protein, 384 aa, unidentified
MWLVWLPPVGRCSPVELLTQFGRVTAAVPVVSPPLWPYTKGAAMRIVGVTGGVDTHADTHVAAAIDDNGGLLSVESFGADQAGFEELLAWLVGLGDLSSVGVEGTGSWGVGLARYLADHNVMVVEVDRPNRQVRRKVGKSDPTDAVSAARAALSGVATTTPKSRNGTVEQMRVLLVARRSARQQRIQTLNQLRHLVFTGPESIRVRFKDRYKTGLVTEAANMRPRQGSDPIIFTTNTVIRGLARRIQNLNTEVKTIDGALIGLIENTAPSLLELHGVGVDTAASLLVAAGDNPDRIGSERSWAHLCGVTPIPASSGKVTRHRLNRGGDRQANAALHRIVLTRMSSHPETKTYVNRRRAEGLNTAEIMRCLKRYVARQTFKHLAV

SEQ ID NO: 449289 - protein, 426 aa, unidentified
MTAGQLHYLGCDRSDAHLDFTLLGADLAVPESVRVPARAANVEAWLGQWRRRFPKHQLCVCFEQPAANLIVMFSRFEFVRLYPVNPATLKSYRETFVVSRAKDDKTDGYWLADLVRTHRDQLPNWEPLSPAVRKLAALVEGRRDLVDQRTNWSNKLVSLLKNYFPEALDLIGEHAASALAIAFLRRWPTLQQLQQAGWPAVERFYRDQHCVRGTALARRQEVIKQARPLTDDPAILEPATLRLEAILGQLEPLLIAIARYDQQIAAVFAVHPDRAIIASLPGLGPVLAPRLLAALGDDRTRLPDARALQCFSGIAPVLIRSGLSTVVTRRHACPRFIRQTFHEHAGESIRHSHWARAYYQQQKDRGKKHHTIARALAFKWQRILIRCWHDHTPYDDATYMRSLKDRNPILYQLALTTKLPREENAA

SEQ ID NO: 449290 - protein, 331 aa, unidentified
MSKKIIAQNEEIVIGVDVSDRKHNLAVVRVKGGELIRDDKVAPDYESWKKYLAKLPGCDITVVYESGPQGYNLYDAIWRLGHKAAVIMPVKHVGVKTDKRDARSIARDWLAGRAKEVTAPDLWKRESRQVLRTRAQFMKDLVRVRNRMSALIRFHGLIARLAPWREAETNSHLAFCLEALGAHEAFLKETIKKFDHQIEQMATEPQVRPTVEKLIPIKGIGTQTALEIAFEVADIGKFKTSDEFASYTGLCPGEWSSGETRRQGHITRRGPGRLRGALVRSAWTLVRYDEEEKKRFEALSARIGKKRAIVAIARRLAVRIWWTMKEEKKVA

SEQ ID NO: 449291 - protein, 354 aa, unidentified
MLIIGCDFHTRYQQIAMAREETSELLVERRLDHESGEAQAFYRSLQSLQEPVRVGIEATGPIHWFERLLAELGHELWIGDSAKIRASEVRKQKTDERDARLILDLLLAKRFPKIWVPTPAERDLRQLLWHRHKLVCLRTMLTNQLHFLAMSQGLCRKKKLFTKKGRAELGSLTLGPWASRRREELLKLLGQLDPPITELDRAVLEEAKRREDAVCLMTHPGIGPVTSLAFVLAIGPITRFHRSKKIASYLGLNPSEASSGGKRRLGAISKQGNTMVRWLLIEAVYPAVRKDPALRQDYQRLKFRRGHAVAKVAIARKLAVRMYWMLRSGADYAQLVRRQGSPGPTLVDASPSLG

SEQ ID NO: 449292 - protein, 318 aa, unidentified
MIHYIGIDISKRDFHACFNEGGDVLIFINDTIGIKKFIKYLKSIKCTVKNTLIGLESTGSYHLPVAYLCTKAGYTVNVINPLITKRQNQTGIRRVKTDKQDAKLIRYCLVNGAGYPFYDSAQTLGLKVLVRQRSQYSMLRHGARLKHADVMERERYLNIPITSVNLDLYSFLDKKIKLLDQALRKHEPKTQKLLQTIPGVGPQTAVTCVSEIGDIKRFPDAQKLTAWLGLDPRVHQSGTSINGKGYITKRGNKLLRTRLFNAASVAVIHPPNIFYEFHQKKLSEGKPYRVALCAVMHKMVHVIHAVWRNETPFVNKFK

SEQ ID NO: 449293 - protein, 347 aa, unidentified
MKHSAGLDVSVKETAICIVDEVGKVVRETKAATEPGAIIALLNSTGVEYERVGLEAGPLSQWLVNELAEAGLPVICVETRHMKAVLKAQQVNKSDRNDARGIAQMMRVGLYKPVHVKTLASQQERMLLTTRKLLRDKLQDMENELRGTLRNFGLKVGIVSPGRFEARIGELVAGHLRLETIVVPLLAVRRVLREQLAKLHKMVLDQVRSDPLCRRLTTVPGVGPVVALTFRATVDQAQRFARSKTVGAHFGLAPRRFQSGEMDYDGRVSKCGDAMMRTALYEAAQVLLTRTQKWSWLKAWAMQVARRRGAKKAIVALARRLAVVMHRMWIDGTEFRWRKETNTAVTV

SEQ ID NO: 449294 - protein, 370 aa, unidentified
MSQSSTLFVGMDVHKDSIAVAYVSQDHGAEVTYLGAIGTRQCDIDQMIRKMQAKARHLIFIYEAGPCGYWLYRYLTKKDYDCWVVAPSLIPRKPGDRVKTDRRDAVQLARLARSGDLTVVYVPKVEDEAIRDLARAREDTISDLKSAKFRLKAFLLRQDIRYTGRANWNPAHLRWLSEVVCPTPAQQIVFQEYVRAVTEHTERLQRLEQALQEEVQAWRLNPVVEALQALRGVQFTVAVTMIAEMGDLTRFDNPRELMKFLGLIPSEYSTGERRRQGSITKAGNTHARRALVEGAWAYRYPAKVSRHLQLRLEKQPKIIQDISWKAQLRLCKRYRQLVSRGKHNNVVTVAIARELAGFMWAIAKQVPLTP

SEQ ID NO: 449295 - protein, 354 aa, unidentified
MKGTAVTIVEDKPVITGGVDTHADLHVAAALDPIGGLLGVRQFPATAAGYADLLEWLGGFGDVGLVGVEGTGSYGAGLARHLAAAGVAVVEVDRADRQDRHRQGKSDPLDAVSAARAAQSGRASGVPKGRDGAVEAIRALMVAKRSARHERTQAINQARALIVTGPDELRTRFAGHGPASLAEAIAALRPRPGDVPGYATRVALRELGRRVQFLDARLERLDELIGPLVTARAPGLLSLFGVGPDTAALLLVAAGDHPERLRSESSWAHLCGAAPIPASSGKTSRHRLNRGGNREANHALWRIVITRMGSRPGHPATRAYVERRTKEGLSKKEIIRCLKRYVAREVYHQLRDGT

SEQ ID NO: 449296 - protein, 398 aa, unidentified
MTESSDYESVQVFIGVDVGKDTHHAVAINRSGKRLFDKALPNDENKLRSLISDLKQHGQILLVVDQPATIGALPVAVARSEGVLVGYLPGLAMRRIADLHAGEAKTDARDAAIIAEAARTLPHALRTLKLADEQIAELSMLCGFDDDLAAQTTQASNRIRGLLTQIHPALERVLGPRLEHPAVLDLLQRYPSPEKLASLGEKKLATQLCKLAPRLGKRLAADIAQALAEQTVVVPGTNAAAVVLPRLALQLITLRKQRDEVALEVEQRVLAHPLYPVLTSMPGVGVRTAARLLTEVACRAFASAAHLAAYAGLAPVTRRSGSSIRGEHPSRRGNKALKRALFLSAFAALRDPLSRAYYTRKMSQGKRHNQALITLARRRCDVLFAMMRDGTFYTPQGS

SEQ ID NO: 449297 - protein, 343 aa, unidentified
MDKISMIGLDLAKNVFQVHGVEASGRVVLRRQLRRGAVEKFFAQLPPCTVGMEACGSAHHWARVIGRHGHQMRLMPPAYVKPYVKRNKNDGRDAEAICEAVCRPTMRFVPVKSVEQQATLAVHSTRSLLVRQRTMVANALRAGLSELGIVAAAGLEGLHELMARLEAPSTEIPEMMRGALLVLARHWQGLDTDERALERQIARAARADREARRLMEVPGVGPIIASTVLAKVPDAQVFRSGRDFAAWIGLTGRDHGTGGKHRPGRISKQGDRMLRALLISGASAHLRQQKRRGISDPWLRELLARRPYKVAMVAFAAKTARIIWAMLVKGEQYRARASAPAAV

SEQ ID NO: 449298 - protein, 391 aa, unidentified
MDTVAQSYTRKESVVNKVTTFVGLDVHKRTISIAVAHEDGEPWSWGRVPNQPEAVTRMVQELGAEGTRYTYEAGPTGYGLCRRLRTLGAQCLVAAPSKIEKAPGDRIKTDRRDALKLVRLLRRGDLHPVWVPSPEQEAFRELTRARQAAKQDLQRVRNRITKLLLRVEVAEPVGVNRWTATYRRWLDQLQLEQPLQQVVLEEFRRSLEEAEARLERLVQQLKAACTAHPQASLIAALQTLRGVGVITAATVMAELGDPSRFDTARQLMGYVGYGVAEDSSGERVHRGGITRAGNAHFRHVLGEGSWQHARPVRVGKVLTQQRRGQPPAVVAIAERADQRLHRRYWRLVHRGKLPQTAVVAVARELVGFIWAIAREVNGLPVPPRRRQDVAA

SEQ ID NO: 449299 - protein, 375 aa, unidentified
MEKLRFLGLDVHAETITVAVAEADGEVRSLGTIANREESIRKLIRKLGPVEHLRACYEAGPTGFVVYWQLTQLGVKCDVVAPSLVPKKPGDKVKTDRRDALNLARSHRSGDLTAVWVPDEASEAVRDLVRQREAAKQDQLRAKHRLTKFLLRTGQRPPLGVKAWTERYVEWVQQVRYTHPARETTLLDCLNEVQHMEERVKRLEQSIVEVIQLAPVPIQNVVRGLQALRGIAHISAVTIAVELGNITSRFERARDLMGYSGVFPSEDSSGERIRRGGITKSGNAHLRRIVVESAWSYRYRPAIGARLRKRQEGLPAEITEIAWKAQNRLHKRYMTLMARGKEQRKTMTAVARELLGFIWAIGIKAEASCKQQLAA

SEQ ID NO: 449300 - protein, 373 aa, unidentified
MPKYSTAFGMDVHLRSTTVCALDADTGEAVTRRFPGNPWGEIAGWMDGFPGPSLAAYESGYLGFAPQRELAGLGVECVVAAVSKIPRSAADSASKNDRNDAARMAKAILAHDISPVWVPSPEVEGIRDLAGAYDGATARLATAKQRLLAFLARRGFVYGGTTPAGNPRKYWTYDFLRWLDKVRPEDDGGVRTLAALRNEVEAAAEARADLLSEYRAAVDASPIAAEVAALQSIKGCAFALAAAFSAEVGDFTRFRSGRQVTAYFGLAPSQRSSGDSVRLGGVSGAGNALVRKLAVEGSWCYAAARHQPKLMPRDTGVPLEIRMHGRKGSERLLRRREEMLARGMPAAKANAATAAELVRWLWALGMMCREGAE

SEQ ID NO: 449301 - protein, 376 aa, unidentified
MSKQLQTSATLLRYCVGIDVSKDTLQVCISVIDTHGKVTIKGTCKVNNKVAGFDSLVNWVKKHCKEQSLPMRFVMESTGVYHEQIAWYLFQHDLAVSIVLPNKAKHYLKSLGHKSKNDKIDAKGLSQMGLEQNLTLWRPLSKNIYSLRVLTRQHQRLQELKNQSENQKHAVLHSQFSDKFILKQLDKLIKLYEQQIQQVGQEIVKLLDKDQILKTKIDKICKIKGLALLSVSTLVAETNGFEGFENVRQLVSFAGYDVVENQSGKRVGKTRISKKGNNRIRRILFLPAFNAVRHGEPSCQALFKRVFERSQIKMKGYVAVQKKLLTLSFAIWKSNEEYNPMHYANNGKELETTDKKIVPINGTTQDVTTQKVLLLQ

SEQ ID NO: 449302 - protein, 393 aa, unidentified
MICVGIDVAKDKHDCFILSSEGEVLADVFTIQNNAEGFDTLLQMICRCARPEDKIKVGLEATGHYSYNILGFLLDKGLDTYVINPLHTNLYRKSLSLRKTKTDRVDARTIAAMLMSDVDLKSYTDTAYHNEELKSLTRYRFDKVRERAKLKQSVSRLVTILFPELEKLVPTLHMTSVYALLSEFPGAKQIAGAHLTHLKTVLSDASKGRYGRDMATTLRDAARCSVGSVMPAKSLELQHTIRMIRELDAEIEDIETAIQSMMAEIQSPITTIPGIGVRMGAMILAEIGDFSRFDSPDKILAYAGMSPSTYQSGQISLAGAYSHMEKRGSRYLRYALYNATKYVCLWDPTFSAYLAKKRAEGKHYNVALSHAAKKLVRLIYALEKSKRPYSTAA

SEQ ID NO: 449303 - protein, 322 aa, unidentified
MKDQYSFSQFLGVDVSKAKLDFALADGKQTWSIKNTEEEIVRELIGRMENPQTTIVVMEATGGYEDLLVTLLHQHNIALAVVNPRRIRDFAAGIGRDAKTDPIDAGVIAFYGQVVKPAAQLAKSDDDKKLQSLVERRRQLLDLINQEDNRLQQTADREIREYIQQSLETLKKQVKTIDQRLSQCVQENTTNARKVEILESVKGLGPVAISTFLAELPELGQLNRGEIAKLVGVAPMNNDSGQASGRRRIFGGRSYVRRVLYMATLVATRFNPSIKTFYQRLLGKGKPKKVALTAAMRKLLTIVNTLIKNDETWSDEVKKASV

SEQ ID NO: 449304 - protein, 341 aa, unidentified
MDQYVGLDVSLKQTWISVRQNRKRIWRGKCLSHPRVVAEAIRQHAPNAVLVVFETGSLSTWFHHELTAAGLPAVCIDARHAKAALDTAPNKTDANDADGLSLLAEAGFFREVRVKSWAAMQVRTLVGGRAQLIGISSDLSNQIRGLMRTFGLVVPAGGGRIFEANVRALLEGQVALAGSILPLLEAWRAVRAQATVLDRQLVAVARQSAACRLLMTVPGVGAVTALSYATMIENPANFGNSRAVGAFVGLTTRGYQSGEVDYDGHISRRGDKHVRALLYEAATVMLSRVRSDSVLRSWGLKLREKVGFKRAAVALARKLAVVMHAMWRDGRVFNPATGAPA

SEQ ID NO: 449305 - protein, 430 aa, unidentified
MAMRKRDEEVVFPNAAGIDVGASSHWVAVPRQATEEPVREFGAMTDDLNAMADWLLGCGVEVVALESTGVYWIPIYEVLERHGLQVWLVDARQMKYVPGRKSDVQDCQWLQKLMSLGLLRAAWRPGDEVCVVRAVVRQREVLLTEQASWVQRMQKALVQMNIQLTEVLSDVMGMTGQAIIRDIVAGQRDAQALARHHSGRIKASAEEVRKALTGNWREEHLFVLTQALAMYDSLAQRIGECDAKTQALLAPLGRQDVDLGKAPKQRSKQRAAFDVRQALANWAGVDLTRIDGLGVAAVMKILSEIGPDLSRFANVKHFCSWLGLCPGTKISGGKVLSANTKRSANRVRQALSALGAFYRRLCGRMDKPRANTAVAHKLARMVYFMLTRGEAFVDKGQQHYEQQQRQRSIAALKRRAAALGFNITPSPATA

SEQ ID NO: 449306 - protein, 444 aa, unidentified
MGKRGKNSVRYVGMDIHKEMAVSCIVDEKGKVVQRHRCRCTREELEQFGRRYLQAEDKVAVEATTNTWEVVGILKSFITEVVVSNPLKTKAIAEAKIKTDKVDAEVLAQLLRCDFLPRVWEPPVATQALRRLTARRAALVMDKTAIKNRIHAILHQRLIPCPFTDLFGVQGRQWLQTLSLDTDGRASVDSDLRLLVSLEAEIAQHDQELATVACAEPRVKLLMTLPGISLTVAQTLWAVLGEVDRFRDADHAASYLGLVPTTHQSGKHCYHGPITKQGHRQARALLVQAAQHVRTHPGPLGVFFQRVAKRRGYNVAVVATARKLVVIAWHMLKANEPYRYAQPHTVEAKLEQLRVTATGEKRKRGYAKGTPRPATYGSGQRVQRIRSLHQVCERTALPPPKGVAALPLAERRMLEQSGTLEFVQAIQHEKLKIRQVKKEGTRSE

SEQ ID NO: 449307 - protein, 342 aa, unidentified
MSEVYAGKQIVGMDLHRRRSVLVRMTESGQHLETVRISNDPEYLRAVMARAGEAPEVVLEAAYGWYWAADALAELGATVHLAHPLGVKMFSYRRVKNDERDAADLADLLRMGRGPEAWIAPPATRELRELVRHRAKLVALRSNLKCQVHAVLAACGVPVVMSDLFGAGGQQLLTRVVLPPAFRARVNSARRLIEALDFEIELFTNLVGSRLRGHGGYTAIQAISGVGPILAAVFVAEIGDVHRFRRAAQLASWAGLTPKHHESDTTVHRGRITKQGCRLVRWAAVEAIQRTDKHSHLGRVRDQVGTRRGTNIGKVAAARELIELVFYGLRDGHIRCLNRRSA

SEQ ID NO: 449308 - protein, 342 aa, unidentified
MKIIGCDFHPSFQQIAMVDTETGEHTERRLNREEAMVFYRSLSGKALIGMEACGNTLWMERLLTELGHELRMGDASKIRAMEVRKQKTDRRDAELLLRLLLEERFPQVWVPSPQQRDSRQLLLHRQKLVSARRQFKNQLQHLALNQGLQQKQKLWTKSGRELLEELPLTGWTAQRRADDLELLDQLERRIAELDVSVQQEAASDPIAVLLQTHPGVGPVTSLAFVLTLGTIDRFASSKKVVSYLGLNPAEHSSGGRQKLGSISKQGNPMVRSLLVEAGQSAARLVPELKRAYQRLKHRKHSGVAKVMIARKLAVRLYWIWRTQQPYTATRMQGSPSHLVGVR

SEQ ID NO: 449309 - protein, 385 aa, unidentified
MTATTRSFDPTALENTLFISFELGEGKWILSFTSGFGEQVLRLSVRSRDRKAVLCTIEAIKERLGLAPDARVASCYEAGRDGFWLHRFLEVQGVENLVVDSSSIEVSRRKRRAKTDRLDGESLLDLLLRHLAGSRKKVWSVVRVPTVEQEDRRHLHRELASAKKDRTRVTNRMKGLLANQGLTLDLKKDVPAQLAALRQWDGSPIAAGLGARLAREWERVQFYTGLIERLEAERRELFRHSPDPAVEKARQMNLLRGIGMNSAWLYAMELFGWRELRNRKEVGSIVGLAPTPHDSGQSERERGMSKAGNRHVRAMAIEIAWGWLRFQPNSELSKWYQRRFGSGSKRLRKIGIVALARKLMIELWRFLETGVIPEGAELKTDVRIR

SEQ ID NO: 449310 - protein, 360 aa, unidentified
MRTKVNHNLFEGQSIYVGIDCHKSSWKVSIQSERYEHKTMSQDPSPETLASYLKRNFPGASYKAVYEAGFSGFDACRVLNKLGIDCIVAHAADVPTSEKERLQKTDKADCRKLARSLRNGELTAIHIPDRYLEADRALIRQRQRISKDVSRIKNRIKSLLLQFSIQMPAHISESQSRYWSKAYLTWLKGLTFEEARLKQVIDNYVRQGEFLRKDLLTVNRQIKELSESEFYGENFKLLRTVPGIGLIAGMTFLVEIGDTTRFNKLDELCNYIGLVPKMHSSGDRTFTGKMMNRGKKILKIMLIEASWIAVRHDPALMAKFNEMSLVMQKNKAIIRIARKLLSRMRYVLEHNLPYETGIVK

SEQ ID NO: 449311 - protein, 380 aa, unidentified
MTASQTVLQGKDTANQGDLYVSFELGDKQWKLSCNDGRCRRSPSRYALDAGDKAAILDCIRKAKTRCGLDLHAKVHSCYEAGRDGWWLHRWLLEQGIDNIVVDSASIEVNRRARRAKNDRLDADKLLAMLLRWHGGELRVWAVARAPTLQQEDARRVDRELQRLTSERTAHTNRIGSLLVMHNLRPARIGGRDWTKWWSANSEQVPPELRAEIERESERLALVKQQMKAIEAQRRQEVIDNMHPLVAQLSRLRAIGLTSAWMLDKELFGWRRFANRRQVAGCLGLTPTPYDSGNSQIEQGISKAANKRPRTLLVELAWSWLRYQPDSALSQWYSRRFAAAGKRMRRVGIVALARRLGVALWRYLQYGEIPQGATLKPTQA

SEQ ID NO: 449312 - protein, 326 aa, unidentified
MQYILGIDVSKDKLDLVLITEPGKFHKVISNNSEGYKALDKWLVSRQVEQVHACLEATGQYGEEVAEHLYKQGHAVSVVNPARIKHYGESKLHRNKTDKADADLIAEFCLKEKPTLWQPLSPEIKHLRALVRRLEDLKTNCQQEKNRLSSGEKDEWVVKDLSTHVAYLETCIAATEKEIQNFIKQTPNLKKQQDLLNSIPGIADKTSARLLAEIGDISTFESASQLAAYAGLNPKGFSSGSSVHKKTRISKQGRRELRSCLYMPGIVASNHNPVVRSLKVRLHDRRLANKAIIVAAMRKLLHIVYGVLKTQMPFDAEYHKQFNFSA

SEQ ID NO: 449313 - protein, 342 aa, unidentified
MEKATIIGIDLAKRVFQVHGAATDGTVVFRKKLSRVQLVAFLARQPACTIAMEACATAHYWGREIAKLGHMVRLIPPIYVKPFVKRQKNDSADAEAIAEAAARPSMRFVAVKTEGQQAGAMIFRTRDLLVRQRTQLINALRGHLAEYGIVAAQGVVHVEQLQEAVDDRVAALPPMVRDLGQIYLVQIALCSDKIASLEKSIRLAAARTKATARLQTMPGIGPVTAMAIAAFAPPMESFRRGRDFSAWLGLVPRQKSTGGKQILGKTSKMGQRDIRRLLIIGAMTVVRWAARKGAPAGSWLARMLARKPRMLIAIALANKMARSAWAMLTKQEDYRDPMVAAA

SEQ ID NO: 449314 - protein, 416 aa, unidentified
MSDENKVASIDVHKKVLMVVVGSREGDAIGPKGELERRRFGTTTIDLHGLSLWLQERGVKEAVMESTAEYWKPVWAELEPYMRLHLAQAFSNRAPKGRKHDFRDAERLLRRHVAGELILSFVPEPEQRAWRTLTRMKTRLARQRVRLHSQVECLLEEMRIKLSCVLSDLFGASGLRILRALAEGETDPKKLAALGDDRLKCTKEQLLDALTGNVQGMHLELLTLYLQQLRLVDEQMEKLHRLIAQALKPHQEAVARLAEVPGFGPDSAQQVMAEVGVQASTFPSAGHLASWVGTCPGQEESAEENYSSRSAKGNKYMRRVLTEAAQAAVKAKGSHFQVVFRRLLPRLGYKQALWAIAHRLCRMVWKILHEAVHYVEQGAYRDPRARKQRARALAQALRRLGYDVQITPKEPATVQA

SEQ ID NO: 449315 - protein, 340 aa, unidentified
MCSVSRFVGLDYHQDSVQVCVLDSEGKLLSNRSVANDAATIAQAATRHGRPKRVAIEACCGAANLAEELRTECRLPVQLGHPGYVARMKRSPDKTDWGDAHLLADLVRVNYLPAVWLAPEPTRQLRRLVRHRTQLVRRRTDVKLRMRAVLRENRIRYSESRPWTKAWLAWLTQTSELSESDRWLMDEHLAELKSLNERIQAVEKKLTTVTADDAVVARLQRFPGVGLVTAVTLRAEVGCFERFRTGKELARFCGVTPRNASSGARQADAGLIRAGNPDLRKVLVELAHRMMWQTDGPWAKLAHRMLGRGKPRNVVVAAVANRWVRWLHYELRREEATELN

SEQ ID NO: 449316 - protein, 419 aa, unidentified
MRVHRNCCGLDVHKKMIAACLIREDGEGNSVTEKRLFGSMTRELHELAQWLCSAQVTAVAMEATGVYWMPVWNVLEPYGLQLLLINPEHYKAVRGKKTDLKDGTRIAELLQDGRLEGSYVPPVTIRVLRDLTRYRIKLVQYQSSIANRIQKLLEQCNIKLASVASDALGVSAMAMLRALAQGETDAVRMAGMAKKQLRKKIPQLQLALEGCVLPHHRLLLTEMIEDLDHVGAKITRIEDTIERHMRPFQEAVNRWLTVPGVKHRLAWTLVAEVGPTVEAFPSAADIVSWAGICPGNNQTAGKRKSGTTRAGNPWLRRALCEAAWAASRSKGTYLQAQFRRLAALRGPKRALIAVANSILTAGYYMLQRATTYQELGPDYFDRRNKVRATHRLVKRLEALGHRVILEPHFTAYPLKASSS

SEQ ID NO: 449317 - protein, 427 aa, unidentified
MAYRIAGIDVHKRMLAVVIADVSVEGEYEFERRKVGTRPSELRALAEWLVAQEVEEAVMESTAQYWRPVWAVLERMWKPHRREREGAGPMAGALHLAQAQSNRGASGRKKDFPDAERLVRRLVAQELTLSFVPDAEQQLWRTVMRRKYQLTRNRVQFQSRLECLLEEAQIKLSSLVSDLLGLSARRMLQALADGETNPANLAALADGRLRATPAQLSDALGACTDLNPVYRRLLKMALQELHLIQEQIRQLDQEMASLLGAHQEAVERLAEVPGLGADSAQQIIAEVGPAAATFPSAKQLASWVGACPGAEESAGVNHSNRSPRGNRQMRRLLNQAANAAVRTKGSIFELLYRRLVSRLGHAQTIGAISHRLCRLIWIILHRGVRYDERGPAVSRDRARQRGAKMIRQLQRLGYRVELANSQPGSPA

SEQ ID NO: 449318 - protein, 461 aa, unidentified
MSRKKPTGKQKGAVQKRVDWKALEIVHPDAAGIDVGGSEHWVAVSPDCDPEPVRRFGCFTADLREMGQWLVQRGVRSVAMQSTGVYWMPVFEVLEQHGLEVYLVNARHTKNVPGRKSDVQECQWLLKLHAFGLLNNSFQPSDEIRIARTLWRQRGNLVAEASSVIQRIQKALTEMNVQLSNVLSDLSGMSGMKIIGAILEGERDRWKLAALVEPEVKATPEDIAKSLEGNWREELLFVLRQQVELYRIYQQKINDCDLQLRKHLESFGSKRDLQAQPIGPKPKGKKGSRNAPAFDLRTELYRITGIDWAQINGIDVLTAQTVIAEAGADLSAFPSEKQFASWLGLCPTNEQSGGKILNRRTRKVVNRATVAFRNAASTLLRSQSYLGAQYRRLRTRLGAPKAITAMARKLACLFYRLIKHGQPYVDKGTEYYEARYREQQIRSLAKRAQKLGLQLIIPKTA

SEQ ID NO: 449319 - protein, 430 aa, unidentified
MKSNTQNAKIEAITEKTLVLGIDVGSEMHYARAFDYRGIEYSKKPFKFSNTEAGFVTFKEWILDLKERHEKDKVIPGMEPTGHYWFNLGKFLQDNEMKPVLVNPHHVKKSKELDDNNPTKNDRKDPKVIAGLVREGRYMIPYLPDGVYADLRTASNIRFQLQAELTRIQNRISRWFNIYFPEYKTVYGKPDAKSGMLILKAAPLPEDILTLGIDGVNQIWRDAKLRAVGKARAKTLIEAAEHSVGSKEGAVSARMEIRMLLEDYESRNTRLQEVMVLIEELVRKIPMTEKLLEIKGVGIRTVSGFLAEVGDISRFNNPKELQKLAGLALVENSLGKHKGETTISRRGRKRLIYLLFEVAMSLVSKNQEFRELHNYYTTRRLNPLKKMQSLMAIAAKLIRVFYAMLTKGVDYDPKKMVSDIKRPAVYLQAA

SEQ ID NO: 449320 - protein, 412 aa, unidentified
MQTLIERGCGLDVHQATVVACLLIVRKDGKVQKEMRTFGTATRELVGLRAWLLSEGCTHVAMESTGVYWKPIYAILEGALEIVVANAQHIKKVPGRKTDVKDAEWIADLLCHGLLRSSFVPPKPIRELRDLMRYRRKLVESQAAERNRLLKVLETANIKLANVATDVFGMSGRLMLRALIAGKATPQEMAELAKGLLRKKIPELQLALEGKLEEHHRFLLELQLQRLEAAEKDLAVLEQRIRQMLEPYAAPLALLDEIPGVDWTLAAVIIAELGVDMSVFGSVSQLASWAGVCPGNNESAGKRKSSRIPSGNVYLKSGLVEAANAAGRAKGTYLRDKFFRLKARRGYKRAVVAIAHKILVAIYHMLSQQVSYNDLGDLYLDKLNKNHLTRNLVHRLERLGYAVTLTLQQKAA

SEQ ID NO: 449321 - protein, 456 aa, unidentified
MPRGHRRTTRAVTMPVLHPHAAGIDIGATEIYVCVPLDRDPQPIRRFGTFTEDLLALAAWLKACGVTSVAMESTGVYWIPLYQILETRGLEVCLVNARHVKNVPGRKTDVQDCQWLQYLHSVGLLRASFRPPETVCAVRSLLRHRDALVQLAATHTQHMQKSLTQMNLQIHHVLSDITGVTGVAILDAILAGERNPQVLAQHRDRRVKASPATIAKALVGDYRAEHLFTLRHSLDSYRHYQRLITECDLEVQALLGAFASQVDPAAHPLPPAPAARRKPHRQAPRFDLRAELYRVLGTDLTQVPGLQTPTVYTLFAELGADLSPFPSGDHFASWLGLCPDNRISGGKVLSVKTRRVKHRVAQALRLAAQSLWRSSSVLGGFFRRMRAKLGAPAAITATAHKLARIIYHLLTTRQPYDESRLAAAEADHRRRTEARLRAQARALGFQLVPAIEQSVS

SEQ ID NO: 449322 - protein, 361 aa, unidentified
MEYYIGLDVSQRQTAICIVNGQGTKVAEGKALTLPADIYAWITRHIDARAVVRCGLEAGAMSAWLHTELENNGLPMLCLEAYQACQFLKTQRNKTDKNDAHGLAQLVRMGGTFIKPVVIRTQASQEARALLTMRHYLVSQKIGLENNITGALKPFGLVTPRGKANAARFRDNVLTSLIRADERKIDLRETVMPSLDLHGDVCKRLEILNRKVKILARNNATCRRLMTAPGVGPIVALSFVTAIDDPHRFADISNVGAYLGLTPRQYQSGETDIRGNTSRRGDIMTRTHLVQAATVLLTSTKKWCSLKAWGMKIAKRHGFRNARIAVARKLSIVLCKMWLQEQDFFWATPQADAPLADATSA

SEQ ID NO: 449323 - protein, 351 aa, unidentified
MNQITTVGVELAKDVIVVCAADPAGRTVFFKQFGFQGFASWAANLPPCTIAMEACSSAHYWARTLSSLGHHAKLLAPDLVKPFRKSQAAKNDRNDAQAILITALQPDMRFVSVKSVEQQSILACHRMREGWKIERTALINRVRGLLAEFGIWLGRSPQNLARSLPRLIQDEQLPARVQGLLVQAQGHLQQLEALTEQGERDICEHARHEAAQRLCALNGIGPITASALVVSVGDARDFRNGRQMAAWTGLVPKQSSSGGKDRLGKITKRGDTYLRGLLTQGARSALNAALTRAPDKRSRLEHWIVALRHRVGYHKSLVAIANKHARICWAMLARHESYAPQAGRHHTATAA

SEQ ID NO: 449324 - protein, 349 aa, unidentified
MPILADLVDVVIGVDAHTDTHTAAMLSAAGAVLAELTVAADDDGAAVLAAWADDQAGGLRRQWVVDGARSHGVGLTRFLLAGGETVFDAARIPGSARRRGGKSDRLDAIAVARIALSAEHVATPRADGDREALRILHVARRHYTDTRTATVNLLKSLILTADDTLRRQLRGLNTDQQVRRLSHLEAEAETDLDAVGRVRRAQLRALATDIAALDQTLAHNLTQLRDLVEAMCPTLLEQPGVGPVTAAVALTAWSHPGRLRNEAAFAALGGANPIPASSGRTIRHRLNRGGDRTLNAALHTIALTRRRCHQPTRDYVARRTAEGKTLKEINRCLKRYIARQLFRLMQASA

SEQ ID NO: 449325 - protein, 407 aa, unidentified
MYAIGIDVSSRHSTVAVLSSQATVVIKPFDVPHTPEGFSQLADKLNALDGEKRIVMEHTGRYYEPVAHSLHNLGFYVCAVNPLLIREYSENTLRKVKTDKADAVKIARYTLSNWETLRRYSPEDETRYLLKTMNTQFQLASKTLTAHTNNLVALMEQTYPGVRSLFDSPARADGSQKWVDYANTFWHLDCVRNLSETAFTERYRKWCRRNHYCFSASKAAMLYADAKNRIAVLPKSEISKKMIKETIALVNAVSRTVESLRREMDELASTLPEYDEVMSMFGAGKSTGPQLMAEIGDLRRFANKNALVAFGGLDPGKDDSGDKNTKSVKASKRGSPALRKTLFLIMTVLLQKQPVDDPVYQFLDKKRSQGKPYYCYMTAGSAKFLRIYYGRVRDSLKEQGLWNCAAE

SEQ ID NO: 449326 - protein, 421 aa, unidentified
MSYRIAGIDVHKKMLAVVVSNVEVESDFQFERRMFGSNPEQLRSLASWLLEQKSEEVVMESTAQYWKPVWGVLERYWKPICEKREGTRRKSGTLHLAQAQSNRGRRGRKRDFVDAERLVKRLVARELTLSFVPDAEQRLWRTVTRKKYQLRRARVRLHNQLESLLEEAHIKLSSLVTDLLGVSARRMLKALAEGETNPAALAVLAHERLRATPEQLCDALGACTDLKPVYRRLLKMALEQLHFLEQQIIQLDQELATLLHPHQDTVQRLAEMPGLGVDSVQQIIAEVGPTAATFPSGEQLSSWVGACPGDEESAGVNYSHRSPKGNRQMRRLLNQAANSAVKVKGSIFETVYRRCVPRLGHNQAIGVIAHRQCRLIWLMLHQGTPYEERGPAVNKRSKYQRTWRMIRQLQRLGYRIESPNP

SEQ ID NO: 449327 - protein, 448 aa, unidentified
MVRTKLKMDIINPNAAGIDIGSRSHFVAINQEHSDVREFGVYAQDTKELLTWLLDNDVKTVAMESTGSYWQNLYAELQNSTIEVILINGKFTKNIKGRKTDVLDCMWIQKLHTLGILSGSFLPDLQTEYLRTLVRHRGNLIETTSQASNRMSQNMRLMNLRLDVVVKDIVGLTGLRIINEICNGQTNGEQLAKLRHGNCKKSEEEIAKALQSNNRQDYLFVLKQELRKYQDAQQLIMECDDEIKRVLDEFINQDQVKKALCIDKKVHKRINKNTPKNIDLNLIAYQYFDGIDLYAIEGFSHGTVLTLMSELGEKGILEFQNAQHFTSWLRLAPNNKISGGRILSSRTPKGSNRLKIALRQAANAIGNLKDTHLSNFFNRIAYRKGRAVAVSATARKLATILWNMLYKKQQYSPPTIYEYLDQKRKRKVLELQKQIANLDARMSKIQPA

SEQ ID NO: 449328 - protein, 412 aa, unidentified
MADIVAYIGLDWADERHSVHLQAADGRIEHRELEQKPAVLHEWVAQLQQRFAGGKIAVALEQRKGAVIHALLMYDCFVLYPINPKALARYREAFTTSGAKADPRDSALLLDLVVRHRDKLRAWVPDTVESRTLQALCEQRRKLVNQRVALTNRLTSLLKQYFPQALDWVGDLASGQACDFLTQWPTLADVQAARRSTVRRFYYDHNCRKRAVVDTRLAGIANATPLTTDPAVVEPLSLSVQTYATQLRTLLAAIQTFDARIATVFSEHADRDIFGSFPGAGDVCAPRLAAAFGTDRSRWDSAAELQAHTGIGPVTERSGKSVWVHHRLACPKFLKQTFHEFADQSIRFSRWARAYYDQQRARGNDHHAALRALAYKWIRILFRCWKERRPYDEAQYIEALRRRGSPLAKHFA

SEQ ID NO: 449329 - protein, 404 aa, unidentified
MNNVAGIDVSKGKSVVSVLRPFGEVVAKPFSVGHIGSELKALADYLKSLDGETRVVMEHTGRYYEPVARFLHEEGIFVSAVNPKLIKDYGNNTLRKVKTDKADARKIARYGLDNWVELRQYTPMDTIRMQLKTLNRQQGLYSKTKTMMKNNLIALLDQTYPGANSLFDSPVREDGSQKWVDFAMTFWHVDCVRGMSLAAFTERYRKWCKRHGYNFSQSRAIEIHMDAQNLIAMLPRNPLTKTMIRQAVDALNAVSKSLEQLKAEMRTLAAQLPEYPVVMAMRGVGDSLGPQIMAELGDVTRFTHRNAITAFAGVDPGADQSGAHEAKSTRASKSGPPELRKALFLVMDCLLKTQPADDPVYRFMDKKRAEGKPYLVYMTAGANKFLRIYYGRVKEYLASLENSD

SEQ ID NO: 449330 - protein, 367 aa, unidentified
MKKISTVAGKQNRNISGQKQTIGLDLGDRWSWYCVLEEAGRVLLEQKVSTTPKAMQEVFGGMPRSRIALETGMHSPWVSRLLSELGQEVIVAHARNVRLIGESRKKDDRMDAQRLARLARIDPQLLSPVKHRSAKAQADLTVIRARAGLVRARTALVNTVRGLAKSYGERLRGCNVRNMNPEKAEGLSPELQKALGPLLAASAALSEQIAEYNERIEQMAKESYPQTALLKQVKGVGTLIALTFLLTLEDAHRFQKSRDVGCYLGLQPGRRNSGQSEPQMHISKEGDPYLRTLLVQGAQPILGPFGIDCDLRRWGLKLAERGGRKGKERAIIAVARKLAVLLHHLWVSGEGYEPLRNSNQRAIPAAA

SEQ ID NO: 449331 - protein, 401 aa, unidentified
MSKKNTRNALDTSLSYAVIGLDLAKADCAVAAVPCSDDELGLIDRMDYESLFEQAEKLEPTLFAMEPCCGYSQISLRLQNMGHEVKVISRHAVKNWIATHKSNQKTDLNDATALAKLALYDHDLQPIRVKNVEECRIASVQAIRIQLRTQATKSLVCFKSLCQCWGIVIRRGSLNTKKMAEAVAAVEKLLGAEVASSLMILRDAYKFTMKQINALDKLLDALVEANEQARTMKTVLGIGTQTAARLAVTTGDIKRFPMPRSYVAYFGLAPRNIITGHSGTPSPSKRGALKPVSSRGQGKVSRRGDRVARSFIIQGAATIYMLYCKDMLPECQLRRWLHEQIKRGKPYGKIIVSLAAKLLRIVWALLTYGEKFDSHKAGVPRSVLAAMEKPLKHDAAAESAA

SEQ ID NO: 449332 - protein, 507 aa, unidentified
MFRVACFGLAGVDTNNNEWEATMSDRRLVGVDLGIASAHTIRVLDGEGVVVAKRRASPTVESLVEIERAALAGTPAGTRLEVVMEPTGAAWLPIAVFFTRRGHLVYRVSSAKSHDLRLFLSRHTKTNGIDADTLARIPLFDPAGLTPLALIDADRAALDRRVRATDRLTKAGADHKRRIKDLIRQVMPMTPLTSAIRKSDLVVLERYADPNALVRVGAKRLTRIIAKASGNQQGHERACEWITAATLALELYADHPAVAFDAISEEIATEVRLLKAIEAELAHHAAAREHSYQTVDPEQLARSIPGFSTIGGPSLVACMGDPARFAKGKQFRAFTGLTPKASETGNTDRKGQPMSKAGSTLLRTTMVRAADYARKQDPQLARIYHLQMVERGKNHLGALCVVAANLAERAWTVMNRGTPYVVCDIDGTPVTPAQAKAIIADQWTVTADVRQRRRSAKTTVVGKAPQTVSTRQPKPHTNSVGKRGDLPRPTSSTPKRPPIKDLAETSA

SEQ ID NO: 449333 - protein, 331 aa, unidentified
MNYSHFVGLDVGKKTFDASLMSAAEKELSHKSFDNTPEGIQSLLDWIAGYHLSLSKLLFCAENMGSYVTELSVSSVSMGFSLALVCPLTIKKSIGLQRGKNDRIDAKRIANYAVLHYRKLELYKLPNKDLVRLRGWIIIRDNLVKQKVSSIKLLETFSWMAKLADVTESIAFLEEQLKSIKEKILEVEEDMEQLIAASTSLYTNYLLLRSIKGIGIINAIVLLCVTDNFQRFDNPRKFACYCGVAPFEHTSGISIRGKTQTSSLANKEVKVYLTRAAITAISWDPQMKAYYKRKIAEGKHKASVINAVRAKIIARSFAVIRRQTPFVTLAV

SEQ ID NO: 449334 - protein, 385 aa, unidentified
MQKRHDDSKACLTAFIQDNTVIVIIEMSLRSWLVAGMIPGINREPLKKIAADPEVLLRLLYRWRDEAIKAGKEITRIAVAYETGRDGFWLARWLRDRGIDAHVIHATSVAISREHRRAKTDRIDTAMLRRGFLGWLRGERGHCSMAVVPTIAEEDAKRPHRERESLVKERTRTINQMKAILTQFGVRNFKTASRKATEKIDDVRTPEGVPLPPNAGAALRRQIEHFRLINGQIKTIEKTRLQRLRQQPTDKFNAMVFLLVRIIGLGIETAEQLVHEILSRKLRDRKAVARYSGLTGSPDESGARRREKGLSRSGNGRVRKILIQLSWRMLQFQPDSSLVRWFKDRTANSQRSRKPMIVAFARKLIIALWRYVNTGVTPEGFKLAK

SEQ ID NO: 449335 - protein, 340 aa, unidentified
MTITTIGIDLAKNVFAVHGVDQNGKTVLVKSRVTRAALPGLIAGLPPCDIGMEACSGAHYWARLFRQYGHEPRLMAAKFVAPYRMAGKSGKNDAADAQAICEAVRRPHMRFVPVKDESQQAMQCLHRTRQGFIEEKTATYNRLRGLISEFGVIAPQSTDALRHMVSAQKSSLPLQVQQCVDDLLEHVDRIEANITEYDRILSRMAKTDHRSQRLMELKGVGPTTACALVACIGNAHDFKNGRQLAAWLGLIPSQYSSGGKSKLGRITKAGDSYLRTLLVQGARSVLIGAEKRTDSFSRWVCSLVERRGYWRAVVAIAAKNVRLCWASLHYGDDFRLYSAS

SEQ ID NO: 449336 - protein, 285 aa, unidentified
MYYIGLDVHKKTISYCVKDAAGHVHREGKIGSTRCELDCWLQNLPQPRTIAMEATIFTGWIYDHLLPHAEKVKVAHPLMLRAIAAAKKKNDKIDAGKIADCLRCDFLPECHMASTTIRDRRRTLRYRNLVVRQMVQMKNRVSGLLMETGVSYNKQRLHKVGYFAELMSSNEEVQESIRPLLKLSREMIGRSQKLEYALVSSLERDPLLKERLRRLRTVPGVGSITALTWALEIGDITRFASIKQAISYCGLCGDENSSADKVMRMPLSKQRNKHIQRVLVEAATL

SEQ ID NO: 449337 - protein, 374 aa, unidentified
MNNFHGFNTFWDRIMKTRNTHDLKEIVVGFEPTGPYGEPLTNFMKKKKVKLIQINPMHTKRVKELEGNSPNKTDQKDPKVIADIIELGHALTVVQPEGPAAELRRLTHARERAMQRRTAIFNQLQDLVFVIFPEFSQVFKDVKVRSAIFILENCPTPEDIIKYKLKNLITTLRKVSRGQLGEERAKELYAAAKTSVGIKEGRQSILFEIKEILSIIKTTEDFVAEIEAEMSLHLEHIPYSRFILSIKGVGDITVAGLIGEVGDFREYKTISEILKFSGLDLFEISSGRHKGQRRISKRGRSLVRKLLFFAAINVVRKGGIMHGYYQGCLARGMLKMKALIAVSRKLLGLILALVRDHSEYIENYTVEQDLKKAA

SEQ ID NO: 449338 - protein, 436 aa, unidentified
MNKKIRYRTVPVEQFDATGALEGWSPTVTVVVAIDVAKTKFVAAISASAGDTPDLVAWEHPRQTAVFLELIGTLATAGRQVVAVLEPTGTYGDALRHQLSSRSVEVRRVSPKQVHDAAELLDGVPSKHDAKDARLISWLHFQGKSHPWPPANKAQRMLRALVDERELYFRPMQAALGMLEALNARHFPELGRAFDVPRRRSLSAVLEAFPAPADIARDPEAVRSVLRKASHGQLTRRADELVAIAMSSTGAPMDEHDKRLVQHVVREVRRCQLELDRVDAEIKGAVDVPPLAPLRDVLGPVTTAVIVAHLGSPADYGSAAAFQKACGLNLKERSSGQHIGKLHITKRGPGIVRKYLYLAALRLVQSDPVVRAWYLARAAHRAEAKSKAVIAVVRKLALALVHVARGAPFDAARLFDTRRLDSSASPDTPTFTEAAA

SEQ ID NO: 449339 - protein, 342 aa, unidentified
MKITTIGIDLAKNVFQIHGADARGKAVLKKALKREQMAAFFTNLPPCLIGMEACGSAHYWARKLEALGHTVKLMAPQFVKPYVKTNKNDAADAEAICEAVTRPTMRFVPIKNGEQQAVLAVHRARQGFVKARTAQANQIRGLLAEYGIAIPQGISHLATSLPDILEDGENGLPGVFRQLIDRLGAHLKELDRQVHELEVQIQTWHRANDASRKLAEIPGIGPITASALVASISDANAFANGRQLAAWLGLVPKQHSSGGKQTLLGISKRGDSYLRTLLIHGARAVIRLADRKANHAGSWLAGIMGRRHKNVAAVALANKNARIVWALLAHDREYTAAYAPLA

SEQ ID NO: 449340 - protein, 408 aa, unidentified
MTVVGIDVSKGKSMVAAMKPGGELVAAPYEVRHSDIELSRLALDVLCMEPDTRVVMEATGRYHEPVAALLHSEGIFVSILNPLLIKQSGAGSLRKVKSDPKDALKIAKYGLDNWSTLREYTPTEAIRQQLKLCERQCDLYSKNIVMLTNNLISLSDKTFPGVNELFSSPEKADGHLKWVDFYRTFWHCDCINRMSPDAFGERYKKWCKKKGYHFSADATDALYAASCGLYTTLPRDNNAKLLVTVAADQLIALRENQSKLEAEMLNLCKQLPEYETVMAMYGVGKSTGPHLMAELGDIRRFLHRSSIVAFAGVDPGVVGSGKMQLSSVATSKRGSPQLRKALFQVVSTYVKRKPENEAVYQFYAKKRDEGKPFFVCTTAAANKFLRIYYARVKECLNAAESAVQTEEG

SEQ ID NO: 449341 - protein, 339 aa, unidentified
MTWWTVAIGVDTHKQWHVAVALDRLGGLIGSVVVDATGGGYARLLAWARSLGEPAFGVEGCGSYGAGLTWFLAAHGEAVFECERPRRGERRAGKNDLIDATLAARRIVNGDGLSLPRGQGRREQLRVLLLERRGAIRARTAAMNQLDAVVVTLPDDLRRRLAAVAKKQLVVKVARLRPRPDGATEPLRRLARRVQLLSAEITEIDQQLGRIVSDLAPELLAECGVGPVCAAQLLVSSGDPRRMRSEASFAALGGTNPLEASSGNHRRHRLNRGGDRQLNWALHVIALQRVHHHPETGAYYHRLLDNGKTPKEAKRCVKRALARHFYNRLKELHPVALTT

SEQ ID NO: 449342 - protein, 347 aa, unidentified
MLADELDYVLGVDTHRDEHVMAVVAAPAGGVIAGGVVAANARGYRELLRLAERHAPGRRAWAIEGTGSYGAGLARFLAGRGELVLELSRTPRAERRLRGKDDSLDAVRTARAALASETLALPRAGERREALRLLLVARRSAVDVRREALSQLRAVIVTAPEPLREQLRRLPVGQLLERCSRLRRSGTTDELATRIVLRSLARRIQAATREAQELEREILSHVRAIAPVLLDEPGVGPIVAAQLIISWSHPGRLRSEACFARLAGVAPVPASSGQTTRHRLSRGGDRQLNRALHTIVLHRRQHDPATRDYIARRVAEGKTRREATRLLKRYLARYLYRVLEQQEPLMT

SEQ ID NO: 449343 - protein, 344 aa, unidentified
MIMIGIDPHKATHTAVAVDDHEIVVAELTVRASASQADRLCRWADSFDDRRWAVEAANGLGYLVAQQLVAAGETVFDVPPMLASRVRILGTGHAQKNDPNDARSVAVAALRSERLLQVRADDHTRVIRLLVKRHRDIARLRNKHCTRLHALLVEFIPGGIRSEITVAKARDLLEQFHIGDPVAHHRVLIANELIAEIARLDVAMKASKRRVAAAVAASGTSLTCIHGVGPIVAAMIIAHTGDITRFPTRGHYASYNATAPIEASSGPKARHRLNPRGNRQLNWAIHTAAITQLRYDTPGRRFYDRKVAEGKTTKEALRALKRRLSDVIYRHLAIDARRLEQQPR

SEQ ID NO: 449344 - protein, 346 aa, unidentified
MKITTIGIDLAKDVLQVHGVDSKGKAVLRKQMRRGEMTKFFVNLPPCLIGMEACGSAHYWARKLSEYGHTVKLMAPQFVKPYVKTNKHDMADAEAVCEAVARPNMRFVPIKNMEQQAILSIHRGRQSFVKARTAQANQMRGLLAEFGIIIPKGIHSISERMPLILEDAENGLPGMMRNLLARLNDHFKVLDQQVDELEAQIKHWHKESELSRKLEAIPGIGPITASAIVATVGNAAEFRNGRQLAAWFGLVPKQHSSGGKQNLLGISKRGDVYLRTLLIHGARSVLRFAEAKAAPDSWLRKLMARRNNNVAAVALANKNARIIWALLAKGATFHPNHAEAAYAATA

SEQ ID NO: 449345 - protein, 314 aa, unidentified
MATSWVGIDVSTCRLDVAVVPARDAWSIENAEDGIRTLVAQVQALGDALVVLEATGGLEYPAVAALGLAKIPVVVVNPRQARDFAKALGKLAKTDRIDAFVLAEFAQRVQPEPRLLPDAQAHALRALLTRRGQVLEMLLMERHRLSQALPRVRRDIEESIAGLKQRLERLDEELGESVRQSPLWCEKDDLLRSVKGVGPVLSLTLVAELPELGTLSRQKIAALVGVAPLNRDSGTYRGRRGVWGGRASVRQALYMGTLVATRYNPQIKTFYHRLLQAGKPKKLALTACMRKLLTILNAMLKHKTSWDPSYAHTP

SEQ ID NO: 449346 - protein, 411 aa, unidentified
MEVIHARCAGLDISKRDAKVCVRVAGAGRRKTVETVTTWGSMTSQILALRDHLIAERITCAVMEATSDYWKPFYYLLEGAGFDVLLVNARHVKNLPGRKTDVADATWLAQLGAHGLVRGSFVPPEPIRQLRDLTRARTAITRERSREVQRLEKLLEDAGIKLSAVASDICGVSGRAMLEALIAGNNDPAALAEVAKRRLRSKIPALTEALTGRFTEHHAFLARVHLDLIDQHTAAIDDITTRIEATIAPFHGFRDLICSIPGVSTLTADVIIAETGADMTGFPTAGHLASWAGTTPGNNESAGKVKSSRTRPGNPYLQGALGAAAMACAQNPRTYLGARYRRIASRRGPQKANVAIQHSMLIAIWHMGTNGCLYDDPGADYFNRLHPERAKKRAINQLQAMGYQVTLTHAS

SEQ ID NO: 449347 - protein, 365 aa, unidentified
MKKISTTTVEAFRKMQKLTIGLDLGDRSSWYCVLDESGAAVLEQRVSTTPKAMKEVFGGMPRSRIALETGTHSPWVSRLLSELGHEVIVAHARNVRLIGESRRKDDRLDAKTLARLARIDPQLLSPVKHRSAKAQAHLTVIRARAGLVRARTALINVARGLTKSYGERLKGCNARNLNSQKAQGLSPELRDALEPLLEAMESLSERIRECNQRIEGIAQEHYPQTALLKQVKGVGTLVALTYMLTLEDPHRFSKSRDAGCYAGLQPGRRNSGQSEPQMRISKEGDAYLRGLLVQSAHHILGPFGADSDLRRWGLKLAERGGKNGKKRAIVATARKLAVLLHHLWVTGEVYEPFHSRQRATLAATA

SEQ ID NO: 449348 - protein, 341 aa, unidentified
MDEVITIGLDIAKHVFHAHGADERGRAVFSKKISRAKLLGFFASQRRCGVALEACGGAHHWARELARLGHEVRLIPPAYVKPFVKRQKSDAIDAEAICEAAQRPGMRFVAVKSEAQQASALVFRARDLIVRQRTQTINALRSHMAEYGWIAPKGPSHMASLAALIEQDGAIPDAARDVFRLLLDSLGSLDGKIAELDKEIARRAREDAVARRLMTIPGIGPITATAIVALAPAAESFARGRDFAAWLGLTPRQHLTGGKQKLGAISKMGERTLRRLLIIGSSAVVRHASKHGAASGSWLEQILARKPRMLVTVALANKTARIVWAVLTKNEDYRAPVAAMA

SEQ ID NO: 449349 - protein, 346 aa, unidentified
MIAIGSDVHKGRCLMAMLPAEGKLKVLEPIECTREAWRKRLAELPPESEIALEVSTSGYFVMSVLEEAGWRPRSHWVHTAGIDSLRKHKSDRLDTRSLTQKLAVAHLEPLPEAWFPPAPVRELRLLARQRCWVAVLRAQTKNRVRSLLEMHGLRAERSPFSAAGRAWVEAQELPKPVHEVLRQMMRTYDFLKAERETAETSLIGYASRFPEVARLETLPGIGHILAAVIWSEIGDLSRFSSADALVNYTGLVPSLYESGEVSVSGPITRQGPRWLRWALITAANAVTVSKSPLARRYHRLRRRKLPNVAKTALATSLARCAYGVLKHGEDYQEERWGRKTGDEMES

SEQ ID NO: 449350 - protein, 392 aa, unidentified
MTIQSQVSVYPEVFVPRDYDVFAGLDVDHHSIAATFTDHDRLMQSLRLPYSAGQLLSYVRKHFPQQRVAFVYEAGPTGFGLYDELEAAGHPCLVVAPSMVPRALGQRVKTNRLDSRKLSTALRGGELKSIHVPAPKYRELRHLVQLRDTHVQQLTATKCRIKALLLYEGIPFPSDEGKEKQWSQRVVNELLELPCSESVRFKLDQLVGTLHFNFNSAAAAQKQIRHFCQKDPELRQSMAWLKSLPGIGEIIATHLVARLGDPSLITNVRQIAGFLGLVSSEHSTGDKQNRGEITRAGDSRLRNKLIQSAWVSIRKDPELREFYQRVYQRHPQQVAARKAIVAVARKLTTRIYAVLKEQRPFVLRQVSAAPLTTEETAGHRERLDGQQNEQSR

SEQ ID NO: 449351 - protein, 340 aa, unidentified
MNVTAIGIDLAKSVFQLHGVDAQGEVVFRRKLRRSAVLGFLRDLRPCLIGLEACATAHFWAREIGALGHDVRLIPPAYVKPYVKRQKNDAADAEAVCEAVTRPHMRFVPIKSAERQGVLMLHRTRDLLMRQRTMTLNAVRAHLAEFGIITAQGPHKLLTLIRAIRTGEAPGLPQIAGIALESLARQLDSLTDEIRKLERQLMLWHRADETSQRLKTIPGVGVITATALAASVPDPGVFKSGRQFAAFLGLVPRQNSSGGKDRLGRISKMGDGYLRRLLVVGATSLVRRANSNTSETGAWVRCLLERKPARVVTVAVANKTARITWAILARGETYRASMAA

SEQ ID NO: 449352 - protein, 407 aa, unidentified
MDVVHPTCAGLDVHQQTVVACARTGSGKAVAYDVRTFGTSTPALLALSDWLTARGCTHVAMESSGVYWKPVWHVLEGHFELVLANAMHIRNIPGRKSDVNDATWIADLLAHGLIRSSFVPPAAVQELRDLTRTRKQLVREIAQHTLRIQKTLETANLKLTSVLADILGVSGRAILAALVAGESHPERLAALASDKVKASRAELTAALHGRVTAHHRFMLKLHLDQIEALETAVRDVEARLGEALAPFRAAVDHLITMPGVSETVARVIVAEIGFDMTRFPSPGHLVSWAGLCPRLHESAGKRLSTRTRSSNPWLKTTLVQAAWAAARKKDSYLRAQFLRIKSRRGPKKAVLAVAASMLTAVYHMLRDDADYRDLGADHFDRRDKTKLAKRLIARLHDLGLVVDVRAA

SEQ ID NO: 449353 - protein, 438 aa, unidentified
MIELNNPFCNQSSHAAYASVDWGHQTNCIHFLPAGSRSEQRFEVAADPGSMNAFMAGLRERVGQGRVAILSEQSKGALVNLLLDFEFVDLFAVNPLAAARFRKSLHPSGAKSDPIDSSALLRMLFTHRDRIKPVLKGDEASRRLDALNAHRRELVEQRVAVALRLKSLLREYYPQALPMVGDELWDPISLAFLRRWPCYSKLSKSKDQTLERFYYANGSRSAKAIAKRVAALRSSSKLSSDPLLEELGALRLGNCVEQLSVLNSQIRAIAKCVKSCFGSHPEKDLFATLPGAGPAMAPRLAAAFGSDRERFEDVSKFQVYVGIAPIKVSSGTKNYTFMRGRCHKFLRQSFHEWAGLTIQFSPWAKACYELMRQRGKRVGVAKRALAFKWTRILYRCWKDRTQYDEAAYVRCLAKRGSPIMGKMKELGFIDDENNLLFT

SEQ ID NO: 449354 - protein, 368 aa, unidentified
MSKVLFCGADVHDRNNLLKFAVDRGPLGKRTFQNNADGRAAWRKWLKEEARRVGATKVVIGYEASSAGFGIYDEMTAAGFECHVLAPSKMRPSAQERKRKTDEQDAERIVEVLRAHELAGTKLPGVWVPPKELREDREVARAYLDAQDKVTAVKAQVRQLLKRNGVETPPGLGQSWTKKYRAWVERLGTGETTGLGPWVRPGLNSLRRQLAQLEEECKTLGQTAAELAQTERHRAGVAALTKEKGVGLLTALVFWLEMGTLGRFKNRRQVGAYVGLTPSSHESGERNDCKGHITRQGSGRVRRLLCQAVWSRIRYEAKTRRWYQGWVRRQPKRKKVGVVACMRKLAIRLWRVGNEASGGAGVGPENSP

SEQ ID NO: 449355 - protein, 400 aa, unidentified
MLSIGIDVSKGKSTVCGMKPGGEIVYTPFEIQHTREGMSELVSLLHNSGEEVRAVLESTGSYHCPVVAALLENGIFVSVVNSLRMKRFCSQSIRKVKTDRIDAMQIALYGLAYWQELQPTKLPEDTYRELQLLARQYYQMTSMLIKAKVDFNAICDQVLPGMQELMSDHAGRHKLSDFVLRYRHTAHILEMGETRFRKDYCKWAEKKGYRNHERMAALIFATAQNGIPVLPNAPSTQIVITEAIRVLHTVEASRDAILTQMQALAKTLPEYSLVREMPCIGDTLAPRLIAEIGDVRRFHSKRALIAYAGIDAPPYQSGKFCANNRHISKRGNRYLRKTGYEVMQSYVMHKPANDPIFTFIEKKRGEGKSGKLAMVAGLNKFLRVYYGKVTELYRSLPAIE

SEQ ID NO: 449356 - protein, 391 aa, unidentified
MFLLGIDIAKLNHVASCIDSSTNEVVFSNFKFKNDFKGFSALLNKIKSFDAKNLIIGLESTSHYGENLINFLFIHDFKVAFINPLQTSHLRKANIRDAKNDNLDSLNIAKSLVFTKLNFVSKKNIECFSLKKLTRFRSNLIKQRSKAKIQLTSLLDLLFPELQYLFKSKIHSKAIYSLLKKYPSAEEIAALKDDEISNLLYASSKGHFKKEKSIELKSLAKTTVGIKDTSISLHLIQLIELIELYTKQIKDIEIKITDIVNNLDTTLLSVPGISVIACAIILGETNNFENFSSSKKLLAFAGLDPKIRQSGNFNASSCRMSKKGSPYLRYALIFTAWNIVRHSEKFNKYYSLKRSQGKSHYNALGHVAHKLVRILFTLIKKDISYQEEKLE

SEQ ID NO: 449357 - protein, 466 aa, unidentified
MKPFYMGIDVSKGYADFMIVNAEKKPVVNAFQLDDTFEGHRNLHNYMGRFLSGHEESTLFIAVESTGGYENNWYSSLIGFQDSLNIQTARLNPLGISHNSKAGLKKNITDKISAQNIAEYLIAHPEKVDYQQHDQMAGLRKQWGFIQMLNKQSTQLFNQLNTLLYTNNPELLRYCKNGVPGWVLKLLLKYPSAAKLKNARPKSVAKIPYVTPGRAQQLVADAKKSVAAATDPVAEQLIVATTKQILNLQKTIAEQEKLLADECAIPEVELLKTFDGISDTSAIGLMIEIQTVDRFAEVKKLASFFGVHPVFKISGDGSSGFKMSKQGRKAPRQILYMIAMSAIRCNPVIKEIYEKHQENGKCKMAAMGVCMHKILRIIYGMLKHNKPFDPQIDIANRQRKVRIETAKPKKDMDRRFQDYDRKAPVSRRQHKSRLERERSQSVGDTNRGITTPVPLADIIANILPEM

SEQ ID NO: 449358 - protein, 272 aa, unidentified
MDTPAKQKVVGIDVSKDSLAICHLAEEKVQHLETANNQAGFKQLVKQCGTDSLYVMEATGIYYLQLAYYLYEQGAQVVVVNPVIIKRYIQMHLGKGKSDKKDAQWIRRYGEQTQVAYWQPEESVIVECRQLEQVIEQLIKQKTMVINSLEALSQQPIVSKLAIKSLEQTLKVLEKQVKQIQDSLLATLEEAFTKEIKLLSSIPGIGKKTAGMLLLFAGGFRNVTNYRQLIAKAGLSPREHTPGTSIRGKVRITKMGGSLIRSKLFMCSFSAK

SEQ ID NO: 449359 - protein, 400 aa, unidentified
MDRNRTVDGLDVHKDSIYLCIMGHDEAIIFEKTYGVLTPDLRRMCEDMLERGVTEVAMESTAVYWIPVWNELCESMELKLVNPYFIKQLPGRKSDVKDAQWIAECLLKNLIKGSFVPEPVVQEMRKLNRRIMDLNEDMTYNTNKLDAALQRCGFRLSNYVSHIQSKSYQSVLKSIINGIRDPEDLVKLVHGRTVNKHGRDTIKAAVTGLFSDTDLIIFRQTKEVIDMIERQITECQNELTALCERHFPEQYRRLKTIPGVKERAATAIIAETGVDMKMFATAACLVGWCGLRPRNDVSNGRYKSRKVTHGNRYLRQILIEIAWSASRTRNCFFSNFSYIQTTVKKKSKMKIQVAIARKILVAVWHMLTKEEDFIDIYLKRLEKEREMDEKLKNLNSKAVV

SEQ ID NO: 449360 - protein, 419 aa, unidentified
MKRIKTGKRQIVNEKTLLVTVDLAKTTDMGYWRCPNGMDIKPFEFLNNRQGFDKFWDRISQAKIANHLEKIVVGFESTGAYGEPLVHYLMKKGVQLVQVNPLHTKRLKELQGNSPGKTDRKDPKVIADIVELGHALTVVIPEGISAELRRLTHARERALQRRTAFYNQLQDLVFILFPEFLKVMKDIKTKTAQYLLRHYPTPSDIVKCGREVLVSIVRQISCRRLGRDRAEALYEAAWQSVGIQEGQRGILFEIQEILFGIETCNRFVGKLEQEMSDLLEQIPYSRSILSIKGIGEVTAAGLIGEVGDFSKFRTLSEILKLAGLDLFEISSGQHKGVRHISKRGRSVLRKLLYFAAINMIRQGGVMYETYQRYLQRGMIKGKALIAIARKILRIIFALVRDHSQYMDNYSETKPLKLAA

SEQ ID NO: 449361 - protein, 406 aa, unidentified
MELVAILKRVIGLDVHQAQITACAIIEESDGTTRIEQRQFGAFKRDRRALAEWCASFAPDEVVMESTGIYWKSPYAALEAAGIRAKVVNARHVKNVPGRKTDVGDAQWLATLARAGLLRGSFVPPSKLCELRLISRQRQKLVGSLSSEKNRLHKVLTDGGIRLGVVVSDLHGQSARAMVKAIVAGQPPHEVLKLASRRLKASREELFDALQGELTDSHRFVLGELMQHIEEIEARIARFDARLLEGLADEQNALRLLQTLPGVDLIGAAMLLVEIGTDMTAFGSADRLASWVGICPGNNESAGKRKSGRVRKGNLYVRRLLCEFAHAASRTKSVFQSKFQALIVRRGHKRSIVALAHKLLRTIFFMLNRGEYYRDSATDYEALSVQRNAARWIKTLIRFGFIPKPV

SEQ ID NO: 449362 - protein, 358 aa, unidentified
MAVAEPGQAEPIYRGEIANKPKSVAKLLAKLSEDYTGGLLLFCYEAGRCGYVLYRQLLASGHDCQVVAPPRIPKAAGERIKNDRRDALKLARLLRGGDLTAVWVPDREQERMRDLSRARDDMKGQERKARQQLNAFLLRHGYHWPRGKSRWTPAHESWLAGLKMEHPWQQVVLEEYIAAERAAGERVAQLNDQLMRALPEWSLAPVVDSLIALRGVDKLAAIVLLAELGDISRFDSPRQLMAFLGLVPSEHSSGGRRRQGGITLTGNAHARRMLVESAWSYRFPARQTKHLKGKARHASKEAKQIAWKAQTRLCGRYRTLTRAGKSTKLVCVAIARELAGFLWDIVRQEMPRLAVQEG

SEQ ID NO: 449363 - protein, 349 aa, unidentified
MLHVGLDLSRRRVDVCLISSEGELVEHFRAPADRDGLYGLTRRLAVYGEPVRGVVESMNGARFVHDELVKYGWEVLVADAQRVKGLAPLACKTDKVDARVLAELSFRDLVPAIWLPTPELRAERERSRWRLHLVKHRSILKNRVHASLIAFGHQVPMADLFGAGGRRLLADLDFPEPWLSHVRASVELIDDLDRRIGEIERWLQRSGADHRYIPLLMSAPGIGWVTGFTIAAEIGDISRFSSPVKLTGYTGLCPRVNQSGDMDRRGPLSKHGPRYLRWGLMEAAIHAAAHPLYKERYQRTKRRLGRQRGAKVAQIELARKLTEAIWYMLTRNQPFKPFAPASAISRLTA

SEQ ID NO: 449364 - protein, 415 aa, unidentified
MPKNRARSCESTSQRLALKKESRSREGLFTLVERLKQRTGCKPVEVAVAVEVAWGALIETLVENGFSLFSINPKQVDRFRDRLTVAGAKDDSRDALVLATSLRTDRKSYKRVEVESPDILRLRELSRFEEELKAELRRATNRLWQQLHRYHPQMLSLSPAADDRFIWKLLSEIPTPAQGANISRLDIERILATHRIRKFTADEVLSNLKATPLVLAPGAGEAAAEHVLLLLPQIRLLDQQLRDVSRRIGQILSTLAKSDAEDAALPSDASLILSIPGIGPAVASTLLTEASRPIRERNYQALRCYAGTAPITKQSGKKKTIMMRNACSGRLRKAVYHWASTSINCDSRSRQQYDALRASGHHHARALRGLADRLLGILVSMLKHQTTFSHLRRQSSSAASASGAGVTQLIRSPRR

SEQ ID NO: 449365 - protein, 339 aa, unidentified
MVIVGCDFHPGWQQVAVFDSGTGEIRELQLRNSEGEAERFYGSLPSPALVGFEACGNTHWFEDMLDRLGHEVWIGDAAEIRASYVRKQKTDKRDAAHILRLLMEGRFPRLWRPSKADRDLRQLLIHRDRLVGVRTRVKNGLHHLMLNKGVQLKRKLWSKAGQKILHELPLEGWAAQRRTDLLQLLRTLDPQIEELDVAVERAAYANERARLLMTQPGVGPITSLAFVITMGDVTRFPSGKQVSSYLGLIPSEHSSSKRRRLGAISKQGSPFLRMLLVESVQTVCRLDEGFRKQYNHRCHRMKKGIAKLAAARKLAVRLYWMLRTNTAYPEIAHIEGSPR

SEQ ID NO: 449366 - protein, 340 aa, unidentified
MNTTRVGIDLAKSVFEVAVSRTPGRVDERQRLARSRMHTFFAQQETAEIVMEACGSAHHWGRELEAMGHRVLLLHPGDVARYRDGNKTDRADAKALLEAARNEDIDRVPVKSVDQQALGALHRLREGYLRTRTARINALRGHLREFGVVISMGAKHVLPEARAALDRDVVPAYLRDALEELLVEIETLRAKAEGLRTELERLADRMPEAQWLMSVPGIGVLTATAFIAFVGDVRRFRSGRDFAAYLGLTPREHSSGFSRRLGSITKRGNTYVRMMLIHGARSALRAGKIAKEPDNLRTWALAIEQRSGHNVAAVALANKLARVCWRVWRDQRPFERRLAA

SEQ ID NO: 449367 - protein, 352 aa, unidentified
MSQITEVGVDLASRVIQVHAIDACGRVVVARPFKPARFFEWCATLPPGTAVTLEACGGAHHTARRLALMGLSVKLVAPPFVTPYRKQGAGGKNDANDAAAICEAGSRPSMRFVCVKTVAAQGWQAIHRLREGYKEERTALVNRIRGLLFEFGVLAPSGIEALRRELAGLIEDASNELPGVLRLGLQRAQLHWIDLDVQLAWCDEQIARHVASEPQAQAATQLCGVGALTASALLAQAGDLKQFKSAGQFGAWLGLVPSQHSSGGKTRLGRITKRGDDYLRTLLIQAAKSAVMTAHKRSDRLSCWVQQLKARVGWQKAVVALANKHARILWAVLTKGRAFDPNHVSAMPAAAS

SEQ ID NO: 449368 - protein, 373 aa, unidentified
MVAGKKSRKTKGYGMNSIVAGIDLGDRESLATVLSPIGDVADRFTFPMNEEGYAFFASRVPKNARVAFESTIMAYPISRALRTHGYNDVTVAHPKTLAWIVRSKKKNDRVDSLKIAKLHMAGMLPESHLLDRNDQIVRDLLVQRVKLGVEIGRLKNSVIGYLKREGVYESLPKSGDNFSARRRQAIHSLRFNDNRDLVLGTMMDRLRFLEKQCTPLEDTVRENAKLNDDVKILMTITGVDYYLASLISSFIGNVERFPSDDHLASFFGIVPASRDSADVKRRGKMTKDGSSIARWTLSIMVDTVMQHNQPIREYYTSVKKRTGSGKLAHVSTMRKLTRMLYHMLKTKQHWKWENPRLTERKMARLQMLGGDGS

SEQ ID NO: 449369 - protein, 294 aa, unidentified
MAPLPSPTAPLKCVVGIDIAKDSFVACVGHSTLSQQLHFSKETTFANTASGFAALLSWVAKLQISGSPLWFVVEATGVYYEELAYFLADNHQLLSVLLPNKVKHFARSTELKSKTDQLDARLLCRLGLERALPAWQPPTSALRQLRALARERQVLVRQAAQLKTRAHAYQHSYQPDSRTLARLTAQQQLLVSQLKALDQDLADLLQAEPELARKLGQLTSIPGIGLTTAIVVVAETNGFVLVENERQLTSYAGLDVVQRQSGLSAHATRLSRRGNVRLRTALYLPAVNPAASPV

SEQ ID NO: 449370 - protein, 361 aa, unidentified
MDDGNKGRPKMTAGLDLGDRYSHLCLIDTRSGEVVEEGRLRTSPEAMRRRFASQERPMRIAIETGTHSPWISRLLEECGHEVLVANARKLRLIYANKRKTDEVDAENLARLARLDPKLLYPIRHRGEGAQAHMAMIRSRQALIGSRTQLVNHVRGAVKSFGARLPKCPARSFHKRVAEHIPEALRPALGPILEQIGSLTEGIKDYDRKLQEISEEHYPETALLRQVEGVGPLTALAFVLTVEDPYRFEKSRSVGAYLELVPARDQSGDRDPQKRISKEGDEMLRRLLVSGAHYVLGPFGSDSDLRRHGEKIASRGGKNAKKRAVVAVARKLSVLLHSLWVSGEVYDPLRNTHRRERREEAA

SEQ ID NO: 449371 - protein, 365 aa, unidentified
MTRKRYYIGMDVHKDSVQIAVYEETGLEPISERRLTSDPSLLLKEAKKFNAKGPTEVAYEAGCMGYIIHRVMMKGGIPCYVLPANKVAKKREDRIKTDKRDARLIARELRSKSIRPISVPDETDEATRDLLRCREDVNCDLRRSKQRLLKFLLRHGYTRNGEGESHWTVKHWKWMDSIEFSQEHLRVVYEEYRSQIRSFEERLCRLEKQVVETAESNRYKAVVSKLRAFKGIDYIIALALICEIGDFKQFGSAKAFMSYLGLVPSENSSGGKRNQGEITKAGNGHLRRLLIEAAWHYTRNTRPGRRLEQRRLSSPVSVIDAADRALHRLHKKYFRLLLGGKHKNKAVTAIARELAGFIWAVQVAA

SEQ ID NO: 449372 - protein, 372 aa, unidentified
MIQRFHGIDRHKKHSTISVLNREGQDVEFLSKCPELRGYIEQLGPEDAVVIEAATGAFFWADLVESTGATCYVLHPYKFKIIRDFWNKTDKQDARNMAKALWVYLVTGEFGIPTVYKPSVAIRELRRLFSQYYLLNRQVILLKNTIQAILADNGVSLTYRQKTMLSSDTDAIEMLSAYELSPASLLSIQINLEVLWKVEEQKNNLKKEILLAGEPFAAEVKLLITVRGITPLNALAFLADVADIRRFKTLRKMNAYLGLVPRVNESGGNCKTGHITRESRRLTRTLFTQSVMHFADASPSLRLYYSNLISRRGVGRARIALIRKICGIMRRMLLEEEVFRWMRPSNFERKFKRYENQLKKIKKIKEEERKSA

SEQ ID NO: 449373 - protein, 360 aa, unidentified
MQTKITKDSFNGQSFYVGIDSHKKSWKVTILGEQYEHKTMSQDPDPDILAAYLKRNFPGANYHAVYEAGFSGFESCRKLNQLGVNCIVIHPADVPTSLKEKLQKTDIADSRKLARSLRSNEFEAVHIPDPGLEADRALVRQRFRLVKDVSRTKNRVKSLLFQFGIQIPDRFSSDQTRHWSKVYINWLKKLTIDRQSLKLVLDNYIKIGEGQRSDLLLLNKQVRGLSQIERYRINHKLLLSVPGIGLMTAMTFLVQIGDVGRFERLDDLCNYIGLVPKMYGSGEKMQVGKMIHRGRKELKIMLIEASWEAIRKDPALMLKFNELSKRMHKNKAIVRIARKMLSRIRFVLHNQQPYELSVVK

SEQ ID NO: 449374 - protein, 480 aa, unidentified
MAAGKKNAGKDTDGKGAAGGEAASGSDGAEVAEDRVQVVTYAAAIDVAKGFGMVCTRVPGSRPDRRRQKVWRVEATYGEVTALMDHLRCEGIQRLVLESTSDYWRTWYYLAEAAGLEAWLVNARDVRHLPGRGKSDRADCVWHCKLNERGMLRRSFVPPQAVRDLRALTRTRARLAQDQARHQARVEKILEDALLKISVVISDLFGASGRRFLDALVAGERSPAALAALGDPRLKATRQQLEDALTGRFRDIHAFEISTHLRIIDAINDEITRLDEKIEEQLAEVPRTAPACTACGLAGGGHAPGCLDEQVPLLGLAGRLDEITGIGECNARVLIAELGTDPSVFPTPGHAAAWARLTSRTMQSGQTARPGRTGKGNRYIRGALGQAAMTAAKTDTRLGAMYRRIARKRGKQKAIVAVSRAICEIAWILICDPGARYQELGPDYYTPRSRARQTRDKIREIERLNPGKKVILADAGPEAA

SEQ ID NO: 449375 - protein, 398 aa, unidentified
MVWVGIDAGKASHHAAAIDADGRLLWSVKVASEQRRIEELVARAAGSGGQVRWAVDLVSPMASLLLAVLLTSGQDVVYVPGRMVSGLAGALGGEGKTDAKDARVIADIARMRRDLAPITASDELVVELARLTSHRADLMADWVRGVNRLRELLGSIFPALESAFDYSTRSALILITGFCTPAEVRQAGQDGLATYLREHGAWRKGISSMAATAVQAAAGQTVTLPGEATTAALVRQLARKLLDLDREIKDIGKLITSRFRAHPQARIIESLPGMGPILGAEFLAATGGDARAAFGRPARLASYAGLVPIPKDSGRVTGNWRRPRRYNRTLRRVFYMAALSSLKPDGPSRTYYQRKRAENRIHTRALLALARRLVDVLRALLRDNRAFSPAPPAITAAA

SEQ ID NO: 449376 - protein, 402 aa, unidentified
MNAVGIDVSKSKSVVAIMRPFGEIVSTPFEIKHTASDIHSLIELINSVEGESRIVMEHTGRYYEVLAHQLLEANLFVSAINPKLIKDFDNDSLRKVKSDKADAVKIARYALDKWQNLKQYNVMDELRNQLKTMNRQFGFYMKHKTAMKNNLIGILDQTYPGVNTYFDSPARSDGSQKWVDFASTYWHVDCVRKMSLNAFIDHYQNWCKRKKYNFSQSKAEEIYGKAKELVPVLPKDAITKLIIKQAVDQLNSASTTVESLRTLMNETASKLPEYPVVMAMKGVGTSLGPQLMAEIGDVSRFTHKSAITAFAGVDPGVNESGTYEQKSVPTSKRGSADLRKTLFQVMDVLIKTHPQDDPVYQFLDKKRAQGKPYYVYMTAGANKFLRIYYGRVKEYLASLPES

SEQ ID NO: 449377 - protein, 303 aa, unidentified
MKQQTSAATETKIKGRNIIDFTGKTIYVGIDVHEKDYQVAKVFDGICLGNHRMAANHQMLIDHLNSRYPGATFKCVYESCAWGFTLQRALNSAGIECIVVHAADVSSSDKEKKRKTDKVDALKLARNLASGDLTGIHIPDEDLQKERNLIRFRKKLVGDLNRSKNRLKSLLKYQGIKIPEHLGKKNNWSYNFMNWVEQEANKDVLLKDTLLLMLEEIKFLRQLLLKTERALRKLMKERHNEKATLLMTAPGIGRTIAMQFVLEVGDIKRFHSFDALNDLIGFCPDTDSSGDMQRDRGITSQAA

SEQ ID NO: 449378 - protein, 377 aa, unidentified
MGDHSEAFVGLDTSKLRNAVAIADAGRGSEVRFLGEIENTPAATAKLVRKLAAKYKRLTFCYEAGPTGYGLQRQIKGLGFECVVVAPSLIPKRPGDKVKTHRRDALNLAKLLRADELTSVWVPDGHHEAMRDLTRARETAMLDLRTKRQHVSAFLLRLGRPYAESKKTWTKVHVSWIASQKLEHAQQRLVLEEMMLAIRQAQDRLQRLEQAIAAAVPEWSLAQLVTALMAMRGIDLISATTLLAEIGDLSRFQTPTELMAYLGLVPSEDSTGDTVKRGSITKAGNRRARRMLVECSWSYQHPPRVGQAKQPKVDAAPPAVREIAWKAQCRLYRRYRALIRKGKLKTVAIVAIARELAGFIWAVARAATTARTAAASA

SEQ ID NO: 449379 - protein, 332 aa, unidentified
MQIYGIDLASEKFDVSYSDADGNARHTVVRNNRTQIEKFLSQLPSDCRLVAEHTGVYGDLLLKLADIKGIRISLVSGYGIKHSMGLVRGKSDPVDAARIREYGERNADKLEDSHFPSETLYALRELYATRRLLVEQRKRLRAVLKSDGHRPDKNPTAQRIKQQMIEQLDVQISALEDEMKHLVDNDETLSKISAIVQSVPGIGPVTTTELIIKTDNFTRVRTAKKCATLAGIAPFPNSTGKSDKGTHVSNMGDKQLKSLLFMCARAAMVHFEKMRIYKMKKHQIEHKHIFVVLNNIANRLLKILYALVRKGEMYNPLYLPRDPRLKQRINVI

SEQ ID NO: 449380 - protein, 361 aa, unidentified
MNEELDTSSRHLVVGGVDTHKDLHVAAVVDGNDRVLGSECFPTTRHGYKQMLIWMRSFGELVRVGIECTGTYGAGLLRYLQQASVTVLEVTTPDKSDRRKRGKDDILDAQNAAHAAFSGVRTVTPKTRDGMIESLRVLKVCRKTAIAARRVALQLIHNTIVCAPDELREPLRVMTRMQLIRTLAAWRPDLSDYRNLASAYRITLKSLGRRYLELHDEIADLDVMIAALVDELAPDLVSRNSIGYESASQLLLTAGDNSSRLQSEASFAALCGVSPVPASSGKVTRHRLNRGGDRAANSALHIIAIGRLRTDPRTKVYVDKRVSEGHSKLEAIRCLKRYIAREVFYVIRQRNRQIGQAQITT

SEQ ID NO: 449381 - protein, 349 aa, unidentified
MLIIGCDFHTRYQQIAMAKEETGELLLERRLDHQSGEANAFYRSLQAPVRVGIEATGPIHWFERLLAELGHELWIGDSARIRASEVRKQKTDQRDAALILDLLLARRFPKIWVPTPGERDFRQLLVHRHKLVCLRTTLGNQLHALAMSQGLCRKKKLFTRKGRVELAGLTLGLWASRRRAELLKLLDQLEPPIAELDRAVLQEAERREDAVLLMTHPGIGPVTALAFVLTIGPVTRFCRSRKLVSYLGLNPSEESSGGRRRTGAISKQGNTMLRWLLVEAAQRAARCDPALRQDYQRLKFRRGHAVAKVAIARKLAVRMYWMLRSGADYARLVRMQGSPRGTLVHASTP

SEQ ID NO: 449382 - protein, 340 aa, unidentified
MSEITTIGLDLAKHVFQVHGIDAEGTTVLRKRLRRGQVLAFFSRIPRCVVGLEACATAHYWARELGALGHEVRLMPAQYVKAYIKRNKHDAADAEAICEAVQRPTMRFVPVKTAEQQATALLHRGREQLVRQRTMLVNALRAHLAEFGIIAAQGLRNVGELIAIVRNDGDTRLPDVARQVLQVLADQIEQIETAVAGLERQLLAWHKTNPVSQRLASIPGIGPIIATAIATTVADPKVFRSGREFAAWLGLVPRQNSTGGKTRLGGITKRGNRYLRRLLINGASANLLRSKATKADPWVIGLRRRRPPLVVAVALANKTARIAWAVMLREKEYQPRAVAA

SEQ ID NO: 449383 - protein, 263 aa, unidentified
MNHSENNEINIGIDVGKSQLDIFVRPIGDYFSVPNNENGVREAVKRFCKYQPKRIIIEATGRLEHKLVFACVEHNLPIVVANPVHVRRLAQAIGQLAKTDKIDAALIANFGDTIKPDKTIIKPKNIRTISDLLARRKQLLTMQTMEKNRLGIMPQELHASIKSIIKAFKSAIDKVDKLLDTLIIENKEWAIKNDILQSVPGIGKVVSYTLLSNLPELGHLNSKEIAALVGVAPINKDSGSYEGQRRIRGGRHQVRTVLFMSMM

SEQ ID NO: 449384 - protein, 463 aa, unidentified
MPLGVGQHDHDHHGQYHKPLHEPLSHGGHPSGYRKSSPLPYQRKEAKWSGHGNGPDATLKGVISSPSAPALLADGFGAAGQIILLVPRAVAIDVVDDARSRHRMCQRVIVEQRITRGGVHMQISTIGVDLAKNVFQVHGVDSAGKVVITRQLRRKQVIEFFSKIPPCLVGMEACGAAHHWAREVSKLGHTVRLMPPSYVKGYVKRSKNDAADAAAICEAVTRPSMRFVAVKSTDQQASLMLHRTRDLLIRQRTQLINALRAHLAEFGLVAETGREGVAQLAALITDESNREALPFAMKQALQAFVDQLAALELQIGTLDRAIHAHHRANDISSRLETVPGIGVIGATAIASTVTDPSNFKSGRDFAAWIGLVPRQHSTGGKERLGGISKQGDRYLRRLLVVGATAVVRHARQHPQKHPWVMRLLAKKPAKLVAVAVANKMARIAWAIMAKGGYYRAPELAAAA

SEQ ID NO: 449385 - protein, 371 aa, unidentified
MTMVGIEGMETKVEVILGVDTHLDFHVAVVLDHLGRRLGELSVPTTAKGYEKLLCWVEGFGPVRCAGIEGTSSYGAGVARYLKAQGIEVLEVERPKRRRRSSRRNAEKSDPLDAEGAARAVLAGETSGVPKSGEGRVEMIRALRAARRSAMKARTQAANQLQGLRVTAPEELHHRLRGLSTKELVAVAARFRLGDDPHDVAAATKFALRSVARRYKALSAEIAELDAQLDRMVRQAAPELVSLAGIGTDHAAALLIVAGDNPERLRSEASFASLCGVSPVEASSGKVVRHRLNRGGNRDANRALYMICLARMRRDRRTKEYVTRRSAEGKSKREIIRCLKRYVAPGRFTACWSRCLFNVDKTRRRRPRPRW

SEQ ID NO: 449386 - protein, 366 aa, unidentified
MDHFAGLDVSVKETSVCIVDDTGKIVREVKVASEPEALLAVLKNPFYHFRRIGLEAGPLSQWLYSALAEAELPVVCVETRHMQALLKAQINKTDRNDARGMAQMMRVGLYRPVHVKTLRSQKLRMLLTHRKLLQSKAIAIENDLRGTLRNFGLKVGMAGTVKFETRIKELVGNSPELAALVEPLLVVRRVLREQLVILHRRLLAIVRDDEVCQRLMTTPGVGPVVALTYRATVDVPARFRKSKSVGAVFGLTCSKYQSGEIDRSGRISRCGDEMMRVMLYEAAQSMLYSKKWSWLKAWAMQIARRRGMKKAIVALARRLAVIMHRIYGPAVCCKGIRTEWSFWSALIYPASRRSSCSGPSWLSAHT

SEQ ID NO: 449387 - protein, 373 aa, unidentified
MKRILKIAMDVHSKNYTLCAMEPTIGAEDRVYGEIQVAPDYKEVLRLIDSLKMKLGPNDEYSIECGYEAGCLGYTLYHQLTEAGVKCVILAPTTMLTQQGKRVKTDKRDARLIAQCLCYGGYHPVYIPTGEDDAVKEYLRMRDDHKLALKKLKQQINAFVLRHGHQYTRTKWTIKHVAWLHKLELAPMYRETLDEYMASYEEQEAKIERYDKRIEEIAAEARYQENAKKLSCFLGIRTHTAMSLIVETGDFNRFSKGSTYAAFLGLAPGEHSSSTSVNRLGISKAGNTHLRCLLIEAAKGICKGAIGRKSKELRSRQNGQSAEIIAYADKANIRLRSKYYKMIRRGKKKNVAVAAVARELACFVWGMMTGNIA

SEQ ID NO: 449388 - protein, 351 aa, unidentified
MGYLLRCLKVRKIMEKIIHFIGIDMSKKTFDCCVIIDNQRSNTTHKQFSKTAMGLKGFQAWLMSFGVKLNEQTLICMEFTGLYNRMVLDFLTTSDAVVWVEMAVHIKKSLGLQRDKSDKLDAKRIALFAWRNKDEIKPWHSPDPDVQKIKDLLSQRDRLVDAKTRLLVPLKEMEQEGLVAGANELKKLQKPVITQLEKSIINIEKTIAQIINSNVELKKKSEIVKSIKGIGNVISWYLIALTNGFKQISSGKSLACYCGVVPFSKTSGTSIKSKPRVSHIANKKLKALMHLAAVCAVTHDKELKAYYDRKIAEGKHKMSVFNAVRNKLILRVAAVLREDRKYEDNYVRKAA

SEQ ID NO: 449389 - protein, 449 aa, unidentified
MNRHDSKRRGLPVIHDRAAGIDIGSRFHVVAVPVDPAKEAVQTFKAFTADLERMADWLVDLGITTVAMESTGVYWIPVYEILEGHGLQVVLANARDARAVPGRKTDVNDAQWIQRLHACGLLRASFHPDREISALRSYLRLRERHLDYSAAHIQHMQKALTHMNLQLHHVVTDITGVTGMRIIRAIVAGERSPSVLAAMSDTRCKAGIDVIQASLVGNYQPEHVFALSQALSMYDAYQAQLVVCDQQIAQTLIRLSQEKTLPAEPLPKPRHRTRQPNALNFDVRTLLYQLVGVDLTQIHGIGPYLALRLVAECGTDLSRWRTCHHFTSWLTLAPGCRISGGKVLSAHTRKTKNRVTAHLRLAAVTVGRTNTALGAFYRRLAARIGKAKAVTATARKIAILFYNAMRFGMNYQDPGADHYEQKYRERVVKGLYRRAAEFGFTLQPAEGVS

SEQ ID NO: 449390 - protein, 341 aa, unidentified
MNASKTVVGVDTAKRVFQLHWIDQVTGEIVSLQLKREKFLAHFASRGPCLIGMEACGGSQHWARKLTGLGHQVKLMPAKSVRPFVGGNKSDAHDARAIWTAVQQPNVKAVAVKTEEQQAILALHRMRQQLVKFRTAQINGLRGLLTEYGEVMPQGKSGIKKGIAEALQRLSDRLPAMVIDTLREQWERIRTLDEQMGEIERRLKMWHKEDQACQRIADIPGVGLLTATAAVATMGDAKAFKSGREFAAWLGLVPRQTGTGGRVRLLGISKRGDTYLRTLLIHGARAVLTHAREPAPWITELRQRRPLNVAVVALANKMARTIWALLAHERTYQKAFVSRPA

SEQ ID NO: 449391 - protein, 322 aa, unidentified
MAMLSFCGIDVAKDRLDVMVLPEQQCLSVRNDVDGWAELVEQLRSFAVAAIGLEATGGYERGIMRALLAAGMSVRQINPFRLRQFARASGVVAKNDPIDARMIASFVAVMPTRLAQRNAPAVERLTEMLAVRRRLSNEKVAAENAARLLEDAMLQRLSRRRIARLSTDIDTLDERLVEIVAADAALAHRYRLLISMRGVGPVLACTLIALLPELGRLNRKQVAALVGVAPYNFDSGLLKGVRRIWGGRAPVRHVLYMAAMSASQHNPVLKAFHDRLKAAGKEPKVAIVAVMRKMITTLNAMVRDDTVWADNSTGRHIVPTAR

SEQ ID NO: 449392 - protein, 335 aa, unidentified
MQHDSSSSDSSALSVVGIDVSKATLDCYIDPSGKRLALANDDKGIAKLISHLQALRIKLVVIEATGRLHRHVAAELLDANIPVTLVNPQRAREYAKSIGRLEKTDRVDAEVLARFGTGGADHLLLQKRPEKQVELDDLISRRRALVHMRVAEKNRLAEANQPKLAKTQARQLLRLIEQQIQDIDRAIAKLIDSDDDWKRKSQIITSIPGVSTGTANQLLADLPELGDLSRQTIAKLAGVAPLANDSGPRKGLRSIQGGRQCVRNALYMAAFNAMKNCERFKQFAARLTKAGKAFKVVVTATMRKLLITLNQMIKTNTVYEPKSFSLKPAFSVPNT

SEQ ID NO: 449393 - protein, 332 aa, unidentified
MENFYFIGVDISKKKLDFCVMFEGKVVHEEETANHQNAIMSLIRHLEKDYGIDGSRMLICAEHTGQYTFPLACACKAAECKLWLENPAEIKYSSGIQRGKNDKVDAKRIAVYASRFQDKVQYYERPSEDIERLKQLESERSLYVTDLAKYKGQLKDQREYMPTALYERKVKRLTALMENLEQAIQAITNEMDEVITSCPVLSRQMELLMSIDGVGRVVATNMIITTEAFTRFDDPRKFNCYAGVAPFSYSSGTSQQSKARVSHRADKVMKRLLHMAAIAVTHRNGGELKRYYDRKVAEGKNKMSVINALRAKIVARMFAVIKRNELYKPILS

SEQ ID NO: 449394 - protein, 443 aa, unidentified
MSTSSTQPQNEPEYVALVAIDWADKKHVWSLEVTATNRRECGSIAHTPEAVEAWVTSLHSRFGERPIGIAVEQSRGALLYMLTKYAQLHLYPIHPRTAAQFRAALFPSGAKDDPQDADLLLDLLIHHRSRLHRLEPDTEQTRTLQMLVEERRRMVNEKTRQSNRLTDKLKLYFPQVLNWFNDVDSELVGAFLERWPTLDALQRARPSTLHEFFRQHNCRSEQRIQERVEQSRKAIPATHDQAVIRSAVATVSVLVRLIQTLRDGIAALDEEIRQLAITHPDFSIFDSLPGAGKVMVPRLIAAMGSCRERFSSAQEIQSYVGIAPVLQRSGKTQCTHFRWACPKFLRQTFHEWAGHSIAWSSWAKTHYQRLRARGKAHHAAVRALAFKWIRILFRCWKDRKPYDAALYENTLRRREPSAPESASHPQLVWKNCAGFFKLTQLPS

SEQ ID NO: 449395 - protein, 360 aa, unidentified
MDFLPIHKDQETLVILGIDTHADVHVAVALDGHGRRLGHKSVPSTEAGYAALVAWVEEFGTLERAGIEGSGSFGVGLARFLRARGVEVVEVNRPNRQHRRRFGKHDTADAEAAARALQANTATGEPKSADGPAEMVRTLHVVRRSALKARTQAANQLRALLLTAPEELRAQLRGLSTAKLVATAACFRPGCFPDDVRSATKLAMRTVARSHRWLSEEIVELDEQIGRLVSEAVPALVALRGVGTDTAASLLVAVGDNPERLKSEASFARMCGVAPAPASSGKTVRHRLNRGGNRDANRALHVLALGRMSWDERTREYVARRTTEGKSKREILRCLKRYVAREVYRILTASGALPSSVSVP

SEQ ID NO: 449396 - protein, 337 aa, unidentified
MDYFAGLDISMDETHVCVVDREGMVIHEGKSASLAEAIADELAKAPSCRRIVFETGRMAPILFHRLSQLGLPVVCIESRQAYQTLKSLATHKTDRNDARGLAHLARTGFFKPVHVKSLSAHAVRSLIIARKKLVGQRVTLENQIRGLAVVFGIRLPRALTAAFIDRALKASEGVAGLSAAIRGLIAARTAVMTAVAAIDADMRRMTKASEACRRLMTIPGVGQLTALAFVAAIDDPSRIRRSRDVGAYLGLVPRRYQSGEVDYVGGISKCGDRRMRTLLYEAANVMLTRYKGQLKLKDWAFTIAKRSTMRKARIALARRLAIIMHAMLRDGTEFVAA

SEQ ID NO: 449397 - protein, 335 aa, unidentified
MKKIYVGIDISKEKCNLCYRDGLEIVLEEESVNDVKALKKSLTAALKTFSVTIDEFLVCAEYTGRYIYPLTVACQELDIFLWMDDPTRIKNSMGLTRGKNDAIDAARIAEYAYRYSDKASRYCIPDAELVSMKSLLVDREFLLVDKKRYQSQINDQKRYMAPGDFKHKYARWKKVIKAIDEQIKAIDAEIESIIAANPVLTRQRELLTSIDGVGDRIAINMIAITGGFTRFQNARQFCSFAGLTPYKYDSGTSVRSKAKISKRANQTMKALLHLAAVGAATHMKESEYRDYFERKTKEGKHVMCILNVVRAKIVHRMFSVIIRDTEYTKAYKPAV

SEQ ID NO: 449398 - protein, 339 aa, unidentified
MYYTGIDQHKHTSYLTTVDSKGIIIKEGNLKNNSFEILNYFHQLKGEHKTTVETTGGWYWISDLLKENNIDLKLAHAKYVKAIAYAKVKTDKVDSHILAQLLRMDFIPEANKIDEELRPLRDTLRARLRLTQKRTSALNFMHRMLEKFNIQNPSELSEQYQLQYKQFCEQAEFIKNQILTLEESLYPRLAPNQDIQHLLAIPGIGKMNAFTSFLEIYDIKRFDTVKNFLSYCRLAPQASNSGGRTKQSKTPKDGNKYLKIVFSDAAIHAIQYYPVIKKHHNSLLRKKNKQIAKYIISKEIASIVYYTLKTKKRFNNKFKNKDLQHIKSLQWPRITSPVV

SEQ ID NO: 449399 - protein, 375 aa, unidentified
MSKANTLFIGLDVHKETTDVAWVSDKSAETVHYHGTIPTNLRSFDKLIKNQTVKTSKLCVIYEAGPCGFWLYRHLLRRGIECWVVAPALIPKAPGDRVKTDKRDAMTLARLARSGDLHSIYVPDERDEAIRDLIRCREDAMLDLRQARQRLKSFLLRHGHPCTGRQNWTEAYRRHLADISFPQSATKITFQHYIHIVTERYERLQRLELELQSLAESWRWYPLVQRLTVLRGVRFLSAMTLLAELGDLRRFASPRSLMNFVGLTPSEHSSGQRERRGGITKCGNSHARRILIESAWAYRFPARVSRELESRQQEHSIKLQTRSWEIQQRLCRRFHALKARGKEYNKVVTAVARELTGYIWDLAQGFDADMPQQAY

SEQ ID NO: 449400 - protein, 437 aa, unidentified
MVAGLDVGSTQHWVCGPARADGKPNVRVFGTMTSQLEELAAWLIEEGVESVAMESTHVYWIPIYELLESKGIEVVLVNARQLHNVPGRKTDFSDCQWLQLLHSCGLLRGSFRPAEAITRLRALQRQVANLVAERTRCVQWMQKALDQMNVQVHRAVTDITGLTGMTIVRAIVAGERDPVCLAMHRDSRCQKSAKEIAQYLAGNWREEHLFNLASALRLFDALEREIASYEQRLLKEVEALQPPERREEPVPPHPNPAKEKAIKRRGEQQARTTLWRFAGVDLTRIDGISTGVARVVLTEAGPDLVAFPSEDNFVSWLRLCPRTPISGGKPLKKRRNGLGANRINAALRMAATTLQRSKTALGASFRRIARYKGGAVAVFATARQLARLIYRMLRYGHDYVDIGEKAYEHQFQIRRLAAITETAKHLGFSLVPKLAVG

SEQ ID NO: 449401 - protein, 411 aa, unidentified
MIKENYIYVGIDLHKETHTAVMIDCYNQKLGEITFPNRPADFPKLVAKVKKCNTDGKTIVFGLENAYGYGRALAVWLIDKGYLVKDVNTAISHRQAKHRGAMYRKSDSDDAEAIALATLNMLDKLPDAYPNDAYWSLGQLVHRRDNIMKQRTRLVNQLHEQLCIAYPSYKQFFNDISRPTALYFWEHYPSKKYLKGKSVEDLRAELVPVSHNKCSTKTCEKILDAVASDKVKNNAYQDARDMVTLSIVSDLQHYDSQLTEVDKMLEQMYKMLGCTLTTIPGVNVITAVKILAEIGDIKRFANANKLAQFAGIAPLHLSSSGKGKDVATKQGNRRLQATIYFLAIQMVQVSSKGTPRNPVVRAYYEKRKAEGKTSQQALICISRRLISIIYGVLKNSTEYRMPVVENAGENV

SEQ ID NO: 449402 - protein, 424 aa, unidentified
MSPKKQDISTVSVVHPICCGLDVHKQTVVACVLWAGQDGREQSEQKEFGTLTDELIALKEWLMAHECPVVAIESTGVYWQPVHNILESSHRVVLVNPKHIKGVPGRKTDISDSKWLAALLRHGLVKGSFIPPKEQRQWREMTRMRKSYVQTMGDFKRMVHALFHRANIKIDCVASYLFGASGRNLMKLLCTCESTPSLSEVLGCLRGSLTEKAEEHHRCVQGFFEVHHREQLKILLETIEALERQVFSLDETIARAMKPHNDLLRRLEEIHGIKETASSTVVAEAGITLVDFVNAAAFASWIGLCPGNNESAGKRRSGRTRVNRNHLRTMLIEIAWVSVKKKGSYYKDKYYRLRGRLGPKKAIVAIAHRIAKAIYHIIKDGAAFKDLGEKYLAEQNKESKLRYIKKQAQLLGHELVPATNQVHC

SEQ ID NO: 449403 - protein, 385 aa, unidentified
MYRGLAVLKRHTTNLTGGQKMTEKRYYIGMDVHKTSVQLSVFAEEGEAIYERRLNNNIGLLIKEAKRFSVEGKTEVAYEAGSLGYGIQRAMEKEGIRCYVLPANKVAKKRDERIKTDKRDARLIGRELRNKNIRPISVPDEVDEAARDLLRCREDVNIDLRRVKQRLLKFLLRHGHIYSGGGNNWTGKHWQWMDKLEFVQDHERLVYEEYRSQIQSLEERLTRLEQHVKETTESPRYKEAVSRLRAFKGIDYIIALAVVCEIGDFRRFSSAKAFMAYLGFVPSEYSSGGRRSQGGITKAGNSHLRWLLIEGAWHYTRNARTGKRLEQRRRGCPAHVVEIADRALHRLHKKYLRLVLKGKHANTAVTAVARELAGFIWAIQVSLAA

SEQ ID NO: 449404 - protein, 351 aa, unidentified
MTILAEQFVHVIGVDTHKLTLSAAVLNASGGLREVCEVGASAAGHRQLMTLASRYAGPVLWAVEGTGSYGASLTEHLLAAGQTVTEVDRPKRGARKRGKSDQIDAIRAGRDGLAMSHLNPPRRRREREQLRVLLTTRAELVKTRTSLSNHLQQLVVTSSERLRGHLLETRGQAHSSERLSHKCLSLRVGHQLTTEEQTRVRTMREVAQLIEELTTRTDAYQTQIKALVEQLAPGMLGQPGLGPLTAAQVLLSWSHAGRLTNEAAFAALAGVAPIPASSGQTVRFRLNRGGDRKLNAALHIVVLNRCRYHPPTRDYMARRLSQGKTTREIRRCLKRYLARQLFRFLGRLDKG

SEQ ID NO: 449405 - protein, 348 aa, unidentified
MPTLLDTIGLDLHKRETQVCILTADGELIERRIATTRARFTEVLGNRPRARILLEASTESEWVARHLESLGHEVIVADPSYAPMYATRSRRVKTDKRDARTLAEACRLGAYRAIHRVSDAQRHVRSELAVRDALVRTRTRYVALIKARVRSEGLRLPQGEPERTVAKLDALGELPSATRAELTPLLTLLEPINAAITTADRQIAALVASDPIVMLLTTAPTIGPVTAAAFVATLDDVTRFPSADHVTAYLGLVPSEHSSGERQHRGRITKTGNTRMRWLLVEAGWRILRSTNPDVAGLKAWGEAIAARRGKRVAVVALARKLAAILYAMWRDNVPYRPATPRVAGVAA

SEQ ID NO: 449406 - protein, 355 aa, unidentified
MDKIKTNFEGQTVYVGMDVHKVSWNLGIYLNDVYVKNVHQKPNPDILHNYLQKHFPGAVYKAAYEAGKFGFWIQRQLSSRGIECLVVNPADIPKSQKDSLQKTDKRDARNISLRLQSGVLRGIHIPDEQQEADRLFFRHRKRIWKDLTRCKNRIKGCLAFSGIDIPEQYDNASWSHNFINWLKELDCKQVSRRTALDYMIKQMEFLRHELLSISNAIRKMMREQRYKTNYYLLRSIPGIGPLTAASLLVEIGDVKRFLTFNHLNSFVGLLPMEHSSGQSENKLCLTVRKHRQLRSDLVESAWTAKRTDPAMALYFQEQIKRKDSKIVIIKMARKLLNRIRFVLLTQQPYEFGIVK

SEQ ID NO: 449407 - protein, 397 aa, unidentified
MTKKHTQTTLDVSIEYAVIGLDLAKYDVSLAAVTLNEGEVILIDRVTYAELYEIADKLSPTLFAVEPCNGYSQLNLELEARGHEMRVISGKAVKMWIDTHMSGQKTDINDALALARLTADPDLRPIRAKSLEECRIMTVQGVRQQLVGQRTKTIVSFKGFAQAWGIGIPAGRRNLKKMREAVEAKAELMGAAAVSALTTMLDRVKTLDDQIHQLDKDLEALVSANANGRLLKSVMGVGTQIAGRFITVVGDVKRFEKPRSLVAYIGCVPKNFITGHVNKPRQKKSSAPDLRSKGQGRISLRGDKLLRSLLMQGAACIYMQYCKRQLPDCQLTKWIDKQLAVRKPYGKIMVSLAAKLIRIAWAVLFYGEKFDIHRAGVPRSVLAAMAGQSSNEDAAAA

SEQ ID NO: 449408 - protein, 429 aa, unidentified
MIMGFTKPIEHFNLQRKKVITMNTLYVGIDVSSKSNVVYLMLPNGDKHSNFSVANSHEGSTQLVKRILSALTSHSLDTVLIGLEATSVYGDNLVYFLREDATLAPFNRKIHVLNPKQVKKFHDAYNDLPKNDYVDSFVIADCLRFGRINKEVYMGDYRYKALQNLTRARFFAVQNLVKEKQRFMNVLFKKYSTMTQEKVFSDTFSTTALAVYDEFESAEALANMDLHELTDFIIEKGKNRFPDPDAVAKAIQKAARSSYRLPKTVNDSVNQVLSISITSMKALESQIKEFDKAIKAQMELLPNVLISIPGIGPVYSAGIMAEIGDINRFNSQAALAKYAGLAWKQHQSGGFESEVTRLIPSGNRFLKYYLCEAAFSLVRCDKEYSDFYRLKYKEVNRCQHKRALALTARKFVRLVFRLLKDNRLYCPAK

SEQ ID NO: 449409 - protein, 349 aa, unidentified
MWPRQRLTRAFGCRCRKASPVRDIPVRTFSRTREGVRAYLQWADSRIAPADGLVPFTLHVILEHTGRYSVQLIAWLLAERPALRWTLVQPQRAAHYARSLAASTKTDKTDARALTRYGVERRPACDEPIDPKRAELRELSRYRTTLVEMRTAEGNRAQEPCPSPLVRQLQNKHLAQLDRDIERVEKEMKELIRELPDLHRDAQYIDSIAGVGFITAAAIVAELGDLRRFRRARQLTAFVGVAPRLADSGSSVHRPAHMSKAGDARLRALLYMCALSAIVHNPHMARVYQRLTAAGKTRMCALGAVMRKLLVLMRAPVLSGQLYQADYAPDAKQGNPRWKTPAPQEEKCA

SEQ ID NO: 449410 - protein, 544 aa, unidentified
MSNYLRRNMSKVQPQPHTPLTAGQLLAQPVIPAAGQKFLFVGKDVHTDSIAVSLAPSDSTEVRRYGIIGGSHDDVFRLAKKLQAAHPDFHLRFCYESGPHGYPLCRFLHAHGFDCIIVAPSRIPRNPGDRVKTNRRDADQLARLYRAGELTAIHVPDPQDEAVRDLIRARFQVHKQQHRARQQLKMFLLRHNLRYSGATAWTPKHLRYLAALKLPFPEQQFLFQEMLNVISEAADRLARYDAQIPRVVAGWRWEPVVKALMSLRGMALLNAATLVAELGDLHRFTHPRQLMGYLGLVPSEDSTGEDRIQGGITKMGNAIARRALIEAACNYRIPARISRKFRPRPDGSIKHAENPPKKYEDIVNVEFYNPDRPELWRELRDTVLFWIDQGVRTFRVDKPHTKPVPFWEWLIREIARRKAFSIEKVGDEIEAGGDELSDWAKAVGGPLFLKPDAEVLKGMGSVSQWVTENGYTPAAVNTFLQVADYWLVSHALAHGQVVVTHEKPASTPHKVKIPNVCVGLGVKVMTPFEMLRHERARFVLGAGS

SEQ ID NO: 449411 - protein, 361 aa, unidentified
MNCPPVPKKRGQRVAGYQNAQHRVVAQCDWTSARCPSTTGGDAMTSIGEGKGEGVTIGVDPHPGSHTATAVGQIGEVLGTITVDNNREGCRKLRLWADRYPSRRWAIEGAGNRYVARFVTELLEEDERVYSIPPSMTAQYRRRRGRKKDDQVDAENAAKALLANPDLTPYEPVNYEKELKDLARNYLRLSHQLKANRMSLKAGSDPLVTNVSRALIKVLEEGLASLKREMEKTVRSVAPELLELRGVGPIVASVVLAEAGRITRFTNRDHFAAFAGCAPVRWESGAHHTARVNPGGNRRLNWAAHIIVISRLRIDETTKAYRDRKLAEGKTQRQIIRQLKTYACRELYKQLRSCQITYQTT

SEQ ID NO: 449412 - protein, 430 aa, unidentified
MKSNTQNAKIEAITEKTLVLGIDVGSETHYARAFDYRGIEYSKKPFKFSNTEAGFATFKEWILDLKERHEKDKVVPGMEPTGHYWFNLGKFLQDNEMKPVLVNPHHVKKSKELDDNNPTKNDRKDPKVIAGLVREGRYMIPYLPDGVYADLRTASNIRFQLQAELTRIQNRISRWFNIYFPEYKTVYGKPDAKSGMLILKAAPLPEDILTLGIDGVNQIWRDAKLRAVGKARAKTLIKAAEHSIGSKEGTMSARMEIRMLLEDYESRNTRLQEVMVLIEELVRKIPMAEKLLEIKGVGIRTVSGFLAEVGDISRFNNPKELQKLAGLALVENSSGKHKGETTISRRGRKRLRYLLFEVAMSLVSKNQEFRELHNYYTTRRLNPLKKMQSLMAIAAKLIRVFYAMLTKGVDYDPKKMVSDIKRPAVYLQAA

SEQ ID NO: 449413 - protein, 314 aa, unidentified
MEIFVGIDVSKEQLDVLVRPGGELMQWGNDAAGIAALAQKMVSLAPTVVVMEATGGYEMDAALGLTRAGVPVAIVNPAQVRSFAKATGRLAKTDALDAEAIAHFAEAVKPVPRPLPDEEARELIGHVMRRQQLLEMLSQERNRMGLAHASQRKGIAKHIAWLKSELDDTDATLKRLIRKSPIWREKDDLLQSVKGVGPQLSAMLMTRLPELGYLNRKKIAALVGVAPFNRDSGTMRGHRAIQGGRADVRKTLYMAAVVSIRHNPALRAFYTRLRTAGKPAKVALTAVMRKLLCVLNAMLKTRTPWRDSLVASTP

SEQ ID NO: 449414 - protein, 337 aa, unidentified
MEFKRIAVDTSKSVFTLHGVDEHGRPILRRDLSRARFETFLAKTSPTEVVLEACGSSHHWGRVAQASGHTARLIPPQYVKPFVKRGKNNRNDAEAIGEAASRPTMRFVPVKSATAQAEAMDLTARDLLVRQRTQLVNAVRGHAAEFGVIAAKGIAQVEPLLRRIAETDIPQAAKETLAQLGRVITQLDAQLAEIDQRLTAQHKANPVSQRLAAIPGIGPVTALTVAMKVDASQFESARHFAAWLGLTPREHSTGSHQSLGGISRAGNERLRQLLVVGAMAVIRHAKPGSKTASPWLLQLLERRPRKVAAVALANKMARILWAMMANGTAYRRTPQAA

SEQ ID NO: 449415 - protein, 356 aa, unidentified
MSHDVKYIGTDVHKEATVIAVLNGSGKQVMESIVETKTSSILQFIHGLRGELHVTWEEGTWAAWLYDLLQPQVQRVLVCDPRRNALLKEGNKSDKIDARKLADLLRTGMVRPVYHGEHGLGTLRELGRSYQTIGQDLNRVMNRIKALYRGWGIPGAGTQVYAPRYREEWLHKIEHVGVRRRAELLYQQLDGLQTLRRTLRPELLAESRKHKASKLLRQIPCIGPIRAARLLALMQTPHRFRSKRQLWTYSGLGIETRDSAQYRWVDGQLQRTKKPQQIRGLNRNHNHEMKEIFKGAATRASCGVGPLREFYVALLDKGMKPEMARLTLARKIAAIALTLWKKEERFDAEQLKSQAA

SEQ ID NO: 449416 - protein, 358 aa, unidentified
MANSIISEIQRTIGMNDSASIWMGLDVHKHSYHIALVSGESRPVTWSAPADPSSVVKTLHSNGIHLQGACFEAGPTGFKLARVLKSEDIPVIVAAPSKVPRSVSPGSKTDRLDCIKLAQFASKGLIRPIAIPTEQCEAERDLLRRRHQLLDSIRKTKQRIKALFLFHGMKEPDEVVHWSSKSIQALLATPFLVDDKNVLKSHIRELSFFLREKKLVETQIHEICSRADHCDVYDALRTVPGVGFVTASTFCLELFDPERFDRAEEVTSYLGLAPTVRHSGLKTPRGHLVPVGQKRLRSLLIEAAWVWIKRDAKAHEQYRKLLGKTGVPQKAIAAMARRLAIIMWRLSVEKRAYRLSNY

SEQ ID NO: 449417 - protein, 341 aa, unidentified
MSEVTTIGLDLAKAVFQAHGADATGSVIFRKRLRRNQVLSFFSALPRCLVAMEACASAHYWAREISTLGHETRLIPPAYVKPFVHRQKNDMADAQAICEAAQRPTMRFVTPKSAQAQGAAVIFRTRDLLVRQRTQLINALRGHLAEFGFIVAQGPGHVSKLIDLIDDPASDMPAEARPVLAMIATSLQMLQSNIAELDRKIAARSKADPVAKQLMTIPGIGPIAATALVALAPAAHTFRRGRDFAAWLGLTPKQHSSGGKERLGRTTKMGERSLRRLLILGASSAVKVAARDRSRASPWLDGMLARKPRMLVTVALANKIARIVWALMAHGGSYRAPTAAA

SEQ ID NO: 449418 - protein, 406 aa, unidentified
MAAVMIGVDPHKGSHTAVVIDQAERALGQVRVRACVAQAERLLAWAQAWPERTWAVEGAGGLGHLLAQQLVAAGERVLDVQPKLAARVRLLAAGDVNKNDPNDARSVAVAALRSAACPPVRADDHAMVLKIWAKRHRDLSRARNQVVCRLHAVLCELIPGGVSKQITAGQAARILEAAEPCGAAGAARWVLAAQYLTDLRRIDIQRRDMQKKLAVAVRASGTTVTEIFGVGPAVAAAVIGDAGDIHRFASRDHFAAYNGTAPVEVSSGGRVIYRLSLRGNRRMNHAIHMAAVTQIRYRHTKGRAYYVKKLAEGKTSKEALRALKRQVSDAIYQHLKADARRAAGPGGHPGNGSVASAAGSHPADRLFGQATPGPEPTLRPRRGPSKATRPGSSRPARRPAPGHTPA

SEQ ID NO: 449419 - protein, 321 aa, unidentified
MSTKKSRRSFIGIDVSKRLLEVAAHQSDYHFRCPNEPKAFPALSAELINLRPARIVLEATGGLERPLLQALQAVGLPVVLINPRQVRDFAKALGQLAKTDRLDARVLAHFAAAVAPPLRPLKTAEDTELDALMGRRNQLSDMLGAEKNRRGSAATDAARTDIEAHIEWLEQRLKELDKQLKDQLKRSVTWQQKDQILQSVKGIGFVTSVSLLADCPELGQLNRHQIAKLAGVAPLNRDSGKQRGTRHIGAGRAQVRSKLYMATLTAIRCNPVIKAFYERLRARNKLKKVAIVACMRKLLTIINVMLRDNKTWNVKAQPVSA

SEQ ID NO: 449420 - protein, 427 aa, unidentified
MSLDPHEEPAAIQTHIGAIFISLELSRSKWLITSLVPGGGQKMSKHWVDAGDLAGLLARFWAIRDKVLARTGKSYPIVVIQEAGLDGFWIHRSLVKEGIESHVVDAASIAVSRRRRRAKTDKIDGEGLLRALLAFKRGEPRVCSMVRVPTPQDEDRRRICRERKTLTAERIRHVNRIKGLLFSQGIGDYEPLRRDRRRALEAARTGDGRALGANMKAQIGRELDRLELLLGQIAAIEAERDAMLARQVEAEAVQGAQGAPARVQKPTDLNGPGAETVPEAEAAPGVQSAPAHVQKLMDLNGLGAETVAMLSTEAFYRSFDNRRQLAAFGGLAGTPWKSGSIDHEQGVSMGNHRLRQTMIQLAWLWPIHQPNSALTRWYRERTKGATKLQKKKMVVALARKLLVALWRYVDAGVMIEGAVLKRAARAR

SEQ ID NO: 449421 - protein, 435 aa, unidentified
MDQLIERCCGLDVHRDTVVACVRGPGPNGRRQHEVRTFGTTAVELLALRDWLEAHAVTDVAMESTGVYWKPVFYVLEEAFTCLLVNAAHIKQVPGRKTDVKDCMWIAQCLEHGLLRGSFVPPAPIRELRDLTRHRKVLIQERTRAANRLHKLLEDAGIKLASVATNILGVSGRAMLEALVHGTTDPAVLADLARGKLRKKLPALRQALAGRFRPHHAFLVGQLLAHVDYLDEAITTMSEEVEGRLAPFAAQLTQLDTIPGINTRTAEVIIAELGVDMSCFPSDRHLASWAGICPGNNESAGKHQSGKTRKGNRWLRMTLIEAAGAAIRTKDSALGARYRRVMRHRGHKKAVVAVAHAMLRAVYHLLAEGTTYRESRAPTTTTATTLTGSHAARSNSSNARVTAWFSNRLPKRMPKREPRLTEDFPSRQSVGEFSE

SEQ ID NO: 449422 - protein, 443 aa, unidentified
MSRKKRTHLRGERGQAFADKIRGIPLEQILCVSLDIHKYFHVVIIHNALGEIVTPPFEIDIFQAGFDRLCQAIDEAVARTNAQVVLIGMEPSSHYFENLARHLRERPHPVTLINSYAVKENRNQQMMRYEKDDEIDTAAIGDLLRRGEGTPFQPAAGVYLQLQHLDRVRISKVKMRTMLQNQIIGHLDRIFPGLIIMGDEAKARYTPLFATDFWACKTLQHLIRVCPGPRRLAAMSPQDLVDAFHAQNYSLGRLTAAKIIAYAKQVLLPDADLIAIRCELLPHDLALLEDVERHIAQLEERLVALLAQTPYQVLTKFKGLSAVQVVSLAAAIGDPACYTYARQVFRRSGLVPGRHDSGTRQRKGKGKKVVKVGDVYLRRALLNALATLILHQPVLQQYYNALKQSKPAGVARVATARRTVGILWATLRDQHSTTLILKKGAAM

SEQ ID NO: 449423 - protein, 467 aa, unidentified
MRVYVGIDLAFKSSHKAYAVTAAGDELLSGYRFRTDAEDLDRLVEKVESMAPGAEVWSISEPTGSVWRNVGAYLKSKGWKAHIVSNQKAHDLRRFLHRHTKTDAVDAEALAQMGRIAPEALQPIRIDPKAQSLLRWAKRYSKASLQLASLKRGFVNQVEEVLPGVGTVAPDLLTAAGKAFYRHYISPMKVRRLGLKRFTRALEKRAGRKLQPGAAQRLFDFALKMNQLSAEGVLEVDFTELEDLVQIELDALEAKEEQLARLKDGLVKLYRELHPSGALHSIQGVGEVTAASCLAILLTHSFPNAKHLRSYLGVIPRVNESGVTTSKGSRLTKQGPAWVRRLLYIAAESARRWDPQLAEVYRREMVDKANPHRKAVLAVVTRLVDRIWALYRDDRGYELRDQDGNSVSAKEARAVVTEHLEVPKEVRARLKKQREEDDQEKREEARAEAPKGRGQPKAVSQSAASFY

SEQ ID NO: 449424 - protein, 400 aa, unidentified
MDVHEKKVDVCIIHGPLDKPPKFEIRTFSTMTSDLEDLKIWLKKYEVTTIGMESTGVYWKPIFNVMEGDFEVVLANAQRLKAIPRKKTDIIDCKRIATLLRFGLLPNSFIPPREIRELRDLNRTRRKLVGMMTSEKNRLIKVLEAANIKLSSVVSKIYGVSSLAMIRCLLEKDKLSQEEIAQMAKGKLRKKIDLLEKALNGKITDHHRFLLKMHLENIDHLSKQIAIIDEEIQKKMIPFQKESKLIQTIPGISEVNASAILAEIGVNMSQFPDEAHLSSWAGVCPGNNESAGKKKSGKTQKGNSFLKGALTESAWAASKTKGTSYNAFYHSLVGRRGKKRALVALAHRMLTDIYYVLIAGEPYLDIGAKEVAERAIKRRVKSMIRSLEKAGYSVIMAATA

SEQ ID NO: 449425 - protein, 338 aa, unidentified
MKLYGGIDLHSNNSVVALLDEEDRVVYRKRLGNDAALVLESLAPYREAITGLVVESTYNWYWLVDALMDAGYRVHLANTAAIAQYSGLKYSDDDSDAAWLAKLLRLGLLPEGYIYPKAQRAVRDLLRRRSRLVQQHTANVLAVQNLFSRNRGRSLSANAIRRLTPETVGELLPDANLALAVQSTLLAMRGQEAAIDLLEREACAQVRGRPAYRHLLSTSGIGQVLGLTILLETGPIERFARVGNYASYCRLVGSERLSNGKRKGRGNTKSGNKYLAWAYLEAANFAVRYNPAIKRYYQRKRAKTNGVVAIKTVAHKLARACYYMLSEGTDFDVDRAFA

SEQ ID NO: 449426 - protein, 344 aa, unidentified
MEKDQYVGWDVHQASTSYAVLDSGGRLVEEGVLATDPERLAGWVSGLGSRVHLTFEEGPYAAWLYELIEPLVAELVVANARRHLGTGEGKSDRLDARNLAERLRGGFLVPVYHDRSRLRDLQHLVHGHRALVQDSVRLQNRCSALARSRGLSVNMVLTGSSLGSASALERFTWLTDELAAITALRKKAYKAVAQASRRSDACKILQTVPGFGPIRSAIVVAKVRTPHRFRTKRQLWKYAGLAVVTHTSSDYVVGPQGLERRSWQRTRGLNRHYSRALKEAFKSAAVDASRRGVLRPAYEARLAAGQRPEMATLTMARKLAATCLALWKRGETFDAGKLSKISTG

SEQ ID NO: 449427 - protein, 341 aa, unidentified
MMIIGCDFHPRFQQIAFLDQDTGEYGERRLNHPQEAVEFYRRLSGLPVRIGMEATGNYFWFHHLAEELGHELLLGDAARIRAAAPRKQKTDKRDARHILDLLLTDKFPRVWQPNAANQDLRVLLVHRVKQVRMRTRLKNQLDGLAKSEGYLSPRVWSEGRRAELEALPLRGWLDRRRQDLLELHDELDERIAPLDEALREAANQDAAARLLMTHPGVGPVVSLAFVLTIGDVSRFQRGKQVGSYLGLIPSEESSGEHRRLGGVSKQGNSLVRWLLVQAAALAQRYDPSWHRQYVRLSMNKHHGVAKVAIAHKLAVRLYWMLRTGQNYQQLAVRGSHAGQSV

SEQ ID NO: 449428 - protein, 354 aa, unidentified
MKRTTKYVALDVHQATTVASVREESGRVIARSVLPTDPGALTEFVRGMRGARHVTFEEGTQAQWLYELLAPLVDRVIVCDRRGAPRQGNKGDRVDADQLSELLRRGALRAVYHGSADRVTLKELTRTYRNLVEDATRVMLRLKALFRARGIATAGTAVYHSRHRARWLAQLLEDGARFRAEALYAELDVLRKLRPKAKAVMVTEARQDPAWPVLRTIPFLGPVRVALLLATMQTPWRFRTKRHLWAYAGLAVVTRSSADYTLVAGQAVRRRRAPMTRGLNRNHNRVLKDVFKGAATAATARPGPLQDFYHSVMARGTREELARLTLTRKLAALTLRLWKKGDRYDPTKLTTPAR

SEQ ID NO: 449429 - protein, 339 aa, unidentified
MERQYVGIDLHRRTSTIYRMNADGEVLGCVRIPSQPLELAEAMAEAGDHPEVVLESTYGWYWAADLLKELGANVHLAHPLGNSWGNRRVKNDEVDAKDLAAMLRLGRLAEGWIAPPEVRELRELVRYRFRLISMRSSVKSQIHGVMAKNGILPVVKEMWHTSGPAQLDELCETLPEAYALRLQSLRDLLEVFDAEVVTVDDYLHRQLRDDPGYRAILKLEGVGKVIGAIFVAEIGDVHRFSNPKKLCSWAGLTPKHRESDAKVWRGSITRQGSPLVRWAAIEAISKYRGGDKLRADYHRIAEHAGKYKARVAVARKLLTLVYYGLRDGEIRSLQAPEAA

SEQ ID NO: 449430 - protein, 336 aa, unidentified
MEQKYYIGIDISKEKVDICVMTGTYENVETCICINRITALKYYFNKLLSRLKVTPQEVLVCCESTGIYGRPLERVCVAMNLPLWVELAIKIKNARAELRGKTDAKDAARIADYARRNEDKVRLYQEPPQSVRSLQTLLSSRDSLLLQANQLKQQLKEAQACDMEKYKLLQFCYGKPLKTLTGQLQEIEAEIAAIKEQDVEMKANAALIKSIPGIGDQTALHFIVYTRNFTTFQTANHLACYVGVAPFPEQSGKVKKPDRVSHFANHKLKKLLHLAAMAAIRSKGEIRDYYQRKVKEGKSKMLVLNNVRNKLIKRMYAVLKSRQPYTPNKSEPALVL

SEQ ID NO: 449431 - protein, 341 aa, unidentified
MQKVTTVGLDLAKMVFQAHGADASGQVVFRKTLRRSKVLEFFGQLAGCVVAMEACAGAHHWAREIGCLGHTVRLIPPVYVKPFVKRQKNDTSDAEAICEAAQRPTMRFVTVKSEATQASAAIFRTRDLLVRQRTQNINALRGQLAEYGLVAAKGPANLPKLVALIEEPARGLPVTAREMVDVLLDMVALLEKRIARLDREIAHRAKTEDIPSRLMTIPGVGPITATAAAALAPPPEMFRNGRDFAAWLGLTPVQRSTGGKQKLGAVSKMGERTLRRLLIIGASALVQQAIRKGPSPESWLARMLARKPRMLVIVALANKMARTVWALLARNESYRAPAVTG

SEQ ID NO: 449432 - protein, 426 aa, unidentified
MSEIEVLQQEPQFAAFVGIDWADQKHVWCLQAEGAAQRESGELEHKPEAVEAWVGSLCQRFDNRPIAVAVEQVKGALVFMLSKYEPLHLFPVPSAMAANLRAALYPSGAKDDPRDADLLLDLLLLHRDKLRRLSPDSEATRRVQNLVEERRNLVDEKTAQINRLTNHLKIYFPQMLDWFERLDTELVCALLERWPTLEELQKVPPARLRAFFRKYRCRDQELIDRRLVGIRQTIPAIRDRAVIEAKSAVVKVSAQLIRSLVRGIADLDRKIEEAAAAHPDFFIFDSLPGAGTALAPRLLAAFGSRRERYGSAREVQSYSGIAPVTEKSGQKKWVHHRWACPKFLRQSFHEWAGHSIAHSVWARSYYQQLRSRGKGHHAAVRALAFKWIRVVFRCWKDGVAYDESKYLAALAKRSSPVSALIVGKIL

SEQ ID NO: 449433 - protein, 387 aa, unidentified
MEAHIVNTPSAALDNEPARCFFAIELSKTIWLVAAQGPTGNVRRYQLPGCDANALLELIERIRARVERETGRPVEMVSCYEAGYDGFWLHRFLVARGVRNCVIDPASLQVDRRARRAKTDRIDAERMLRALIRYLRGEPDACSVVRVPSVEEEDAKRLHRERHRLVAERVQHVNRIKSLCALQGIYDYQPLRPDRMERLDHLRTGNGQALPVRLKAEIERELERLQLVLEMIVSLEAERNAITKDKAPTAHLHADKIRKLVRLKAIGPEFSTALVGEVFYRQFANRRQIGSYVGLTPSPFSSGATARDQGISKAGNPKARTMMIELAWMWRRHQPGSALTVWFNERVGSLKGRPRRIAIVAMARKLLVALWRYLETGLVPTGAILKA

SEQ ID NO: 449434 - protein, 355 aa, unidentified
MNSEKYIGLDVHQATIVVAVMDSTGKVVMESILETKAATILEFLAGLRGTLSVTFEEGTWAAWLYDVLKPHVAKVVVCNPRKNGLLKDGNKSDRIDARKLAELLRLNNLKSVYHGETGVRMLRELARSYLNLVKDQTRVMNRLKAMYRSWAIPCAGREVYYARHRAEWLAKIREAGVRRRAEHLYQQLDMLQHLRQQARRELLAESRKHSITAKLRQIPSLGPIRVALAVALIQTPHRFRTKRQLWAYSGLALETRTSGEHCYIQGQLRRSKKQISIRGLNKDHNHDLKGLFKAAATRASVQPGPFQDFYQASLAKGIKPTMVRLTLARKIAAITLTLWKKGENFDAEKLKSQAA

SEQ ID NO: 449435 - protein, 347 aa, unidentified
MTIVEDRRAITGGVDTHADVHVAAALDPIGGLLGVQEFPATAAGYASLLSWLRSFGTLAVAGVEGTGSYGAGLARHLAAAGVRVVEVDRPDRQDRARQGKSDPLDAVSAARAAQSGRASGAPRGRDGAVEAIRALMVAKRSARQERTQAINQARALIMTGPEELRARFVRRSPAQLIEAIAALRPRPGDVPGYATRVALRELGRRAQFLDAQLDRLDELIGPLVTARAPGLLALHGVGPDTAAMLLVAAGDHPERLRSESSWAHLCGVAPIPASSGKTAGRYRLNRGGDRQANSALWRIVIVRMSSHPATRAYADRRSEEGLSKKEIIRCLKRYVAREVYRQLRDGT

SEQ ID NO: 449436 - protein, 428 aa, unidentified
MSNHKATRRQQFCQIQSEINGSDQYLVVGIDVAKDRHHAFMGTATGKTVLKKLVFENDIDGFRKLLQRCKVARVQNDLAKIVFGLEPTGNYHKPLANHLIESGCHVVLVTGKAVKDNRRLLDGRWDKNDTKDAANVADLVSRGRCLYYDVPCAQIEQLRDLLSLRRRLKKEEHSIKMRIRNTVLAKYFPELDRFYSACESESLAIVRWALDPAKIAGLDVDRFFMMVTRSRRGIAQKLRLQKIHQLAAQSVGCPMGPAAEFEAALLVQKLKQLREQIKQVEDLMQQVAGDFDQYQILLSIPGFGPYVAAVVLAAIADPLRFEGSQQVVKLAGYDLCANRSGKSSDDALPVISKNGNAQLRYALYQAALIASVHNVHFSAYFTQLLRGRQRERGIKTKMRVKLAAKMLIIAWTLMKKKEPFNPDYLHRQ

SEQ ID NO: 449437 - protein, 424 aa, unidentified
MFAESSDDEQIIERVAALDIGKAEIVCCIRLPADGERRVQEVSTHSTMVPSLCELANRLVGFGVQRVVMEATSDYWRPPFYLFEAHGLEPWLVNAKDVKHLPGRPKTDRLDAVWLCKVAERQMLRPSFVPPGDIRRLRDLTRYRADLVGVRNAEKNRVDKLLEDACLKLSVVASDIFGVSGRAMMAALIAGERDPKALAELAQTRMRTKIGRLEEAFAGLRLGTFDDHHRFLLARMLARVDAVDLDIAAVDTQIGQHLAPFADAAARLDEIPGIGPTAAAIIIAEIGLDMTRFPTPAHLASWAKFAPGINASAGKTKGNGSTGHGNRYLARILGEAVVCASRTNTFLGARYRRLTRRRGKKKAIVAVGRSMLVIIWHLLADPDTRFHELGADHHDRHVNTHAKRRNHVRQLEALGYHVTLEPAA

SEQ ID NO: 449438 - protein, 324 aa, unidentified
MIDGLLGIDVSKDTLDASMSSCNKVRAKSFANSPDGWRHLLDWLISQKIRRVHACLESTGRYSLGIACKLNEAGHVVSIVNPAQIRDFARTKLGRNKTDGVDASHIREYCELFKPSPWAPPSHAHRQLGELQTIRAGIVAGLTEWKNRKNSGMVDAVAQSLADATISHFTSQLGAVEKAIAQTIDNDSDLRRKRDLLLSISGVGETLASVVLAELPGPDVLRSSAEAVAYTGLNPRRHQSGTSIDRLTRISKIGNAVLRAALYMPAMSAMRYNPAIVALVTRLKARGRLNPKQIVVAAMRKLLVLCFGVLKTGKPFDPALAMGC

SEQ ID NO: 449439 - protein, 322 aa, unidentified
MLATVLGIDIAKQKFDVALLLDGKTKQKVCKNSTEGFETLMVWLEKQGVQKVHACLEATGNYGEDLAICLHEAGHIVSIVNPARIKGFAQSELIRTKTDKVDAGIIARFCLAMKPELWIPPSPEIRILRALVRRADSLIDMRSQEKNRIGTAHESVIFLIKKHIVYLDQEIEKIRKQITDLIEQNPRLKQKKDLLDSIPGLGKVTIPAILAELDNLEKFTNVREVVAFIGLAPKETLSGTSIKGKPRLCKIGHVRLRKALYMPALVSIQCNPVMIAFYNRLKEKGKNGKVIVCAIMRKLVHIIFGILKSGKKYDPNYKSALA

SEQ ID NO: 449440 - protein, 358 aa, unidentified
MQKYNISFKGQRIFIGIDVHKKNWDVAITPEIGIIKRHSQKASAKELFDFLKKHYPDGDYLAVYESGFSGFSTYYALKEVGVNCIVIHAADVPTTQYEEVMKTDRLDSIKLVKSLKAGLLKGIYIREKENIDDRSVIRIRKTIQKELSRYKIRVRHMLHSNGVPLPDRFEKPGSLWSRAFIKWLKEDVKLLSTSRNSLDLLIRQVETIRITLLEATNMMRNMSQTERYKRKFDLLTTIPGIGVTVAMCILTEVYDVRRFHNEREFAAYLGLIPTCHSSGDKVVHGEMTFRGNKQMGPMIIEAAWTTIYRDPGLGSLYLRYKERMKPQEAIVRIARKLSNVIFAILKNETEYIPYQTGK

SEQ ID NO: 449441 - protein, 347 aa, unidentified
MNKPSIAPEATLFCGIDVSAETLAVAVIEQDQPLQQREFANLASGHKALVSWLRKRKSVSRVSMEATGIYSLDVALALDAVEGIEVAVLNPKLVNRFAQTLRRSKTDAADAAVLAEYSRRMPFQPWQRPSVKALQLRAISRQIESLTVHHTRELNRLHASAGSKATPRCIVQDLERSLVELKRRIEKLRRAAYTLIQADATMCLRFELLIGMPGIGQISALQLLGELMTLPPGMNVRQWVAHSGLDPAHRTSGTSVHQPSRISRAGNRHLRRALYMPALAAVRRDPHLKAFYEALIERHKAKMQALVAVARKLLHAIYGIFKGQTPYDGSKLFPGLEIACAVQSTSR

SEQ ID NO: 449442 - protein, 326 aa, unidentified
MTLSHLTDNTFVGIDVGGAGLDVAWHRGDSAHYANRPDAIAALVERLRTGPEVTRIVLEPTGGYEKPLVKALRQAQLPVEVIHTTRFNAYRALVGVKAKSDASDARLLASYAAAPDEVRGRKAGRVELPEDAIREALSELAGRRDQLKHMIHAETCRLGTVRLTELRQAITAHLEALRAEDKQVHRMMLELVRQRIDLRRDQRLLRTIKGIGVKSALGLLASVPELGRIDNKAAAALIGVAPFVRKSGTMSAPARIHGGRAAVRSILYMAAVTASRHNPVLRPFYERLIAKGKPPKLALIAVLRRLVVFANAVLRSGQPWRGASAT

SEQ ID NO: 449443 - protein, 374 aa, unidentified
MPRHQRYWVGLDAGHLETAVCLVDAEGHVFFEAMTETRAAPIRDILRRFGVEPVQSITIEAGVGTQMVRDLRSFGFPVQVVDVRKSSKFLAIRRHKTDANDARGLAELGRVAQSMGPQVFVKPMEHQDIRIMINIRRTLLKQRAKTDALLQSIFRLHGANIKLLNGRGSLAAEVASQLRLLRTGGVTIRVDLDPLVSMGEALRSHISNIDREMRTMATSIPACARFQTIPGVGTITALSFYSAVGDPYRFKNNRDVGPYLGLTPNLYQSGVTARRGRISRYGNKLTRSHLITAATVLLRTIKTESSLRTWGLQLATKIGFLKARVAVARKLAVIMMAMWKTSTTFHPDESRPRLLHPEQAGLDPVRISGSTIPL

SEQ ID NO: 449444 - protein, 336 aa, unidentified
MIKYIGLDIHSSTCSFCVVNDEGEILDQREIVSNGRLLIDYVQSIEGHKKLSLEECELSAWAYELFVNRVDELIVCDPVKNSVYKKAKTDKLDAKNLAALLRGGFLKPVYHDGSGRQQFRALMSGYQDIVDTGVRMKNRYASLFRKAGMRQRGSAFYDDESLVNELPRPDQRFVAKSFYGMISSLEAQRETYVDEIKKMSRGFREIKLLKTIPGIGDIQAAKIVSQVVTPERFENKHKFFSYCGLVRQMQRSGGRDYPSARIHGNRILKCVYKMAAHRAIAGSSALREYYDSLRRKGANAKAARNAVSRKIATISLGVWKNGSKYNDALILESVKS

SEQ ID NO: 449445 - protein, 365 aa, unidentified
MPIPYMEFTTMIVQAARLPAGQHVCVGVDLHKDTLMNCTLIRGSGEISWRKIPCKNREQIVEFFQSLPRPHTVAIESVGFYRWLWELLEPIVDELVLADATQARALAGRRLKTDREDAANIAELLAAGRLPLAYAPPLEVQILRDWTRQRNRLSRAHARALHGVKSIMNTNNRPGPARLSAARLSGYLIAYQSCLPQRHVRMLWQHQRQLSLVEEEIGMCEREIVTHLRSSQMASLAELLQTAPGVGPVVAATVLAEIGDFTRFPDPRAIGRYAGLTPRLFASGGKARHGSICKTGPSDLRWVLQQAAWTAIRCDERIKRQWLKISRSAGRKGAAVAIARKLLVSLWHMAVKNQPYQPLSIRQAA

SEQ ID NO: 449446 - protein, 407 aa, unidentified
MNQITSVGIDVSKGFSMVAIRQPGGVIVEPPFRVNHTSRELNALVQRLHILPGEIRIVMEHTSCYWRPIGLTLVNAGFFVSIVNAMLIHDFHDNSIRRVKTDRADALKIANYALTFWTELKPYSPEDELRQLLKMQCRLYERTLSTSVTLRNGLISLLDQTFPEINRMFHPLVKQSNGHVKWVDFVKTYWHKEKIATMTESRFMDSYRRWCKREHYQYYTSHARRIYGLAKETVASMPRSESTRQLICQAVDSLNAVYEALHQLRKEMLRLAQQLPEFEAVMSLPGAGNITGPKLMGEIGDVRRFTSKRALVAFAGVDAMPYQSGIMDSHSRRMSKRGSPLLRKTLFQMCSICLQLSRVDDPVYLFMDRKRGEGKQFYVYMVAGAAKLLRMYYARAKSVFDADKITA

SEQ ID NO: 449447 - protein, 373 aa, unidentified
MSEYNTVFVGLDVHKESISVAYAPDERETEVNYVGQIGTRHCDIDKMVRQLQSKAPQVLFAYEAGPCGYWLYRYLSGKGLSCVVVAPSLIPRKSGDRVKTDRRDCVSLARLLRSGDLTPEYIPQIQDEAVRDLTRAREDGLSDLKASKLRLKSFLLRHEIRYQGTANWGPAHLRWLADKVALPTTAQRIVFQEYLRAVTQHTERLDRIQEQLHEQVTHWRMAPLVEAYQGLRGVQFQVAATASAELGDLRRFDKPRQLMAYVGLHPSEHSSGGVRRQGGIAKTGNTHAGRVLIEAAWAYRYLAKVSRQIQERQEKLPPAIRDIAWKAQLRLCTRFRRLSARGKNPNVVVTAIARELVAYMWAIAQQVQLPAVS

SEQ ID NO: 449448 - protein, 377 aa, unidentified
MHSENIAAYIGLDVHKETLAVAIAAPERLGEVRYYGTINDEAQAVRRLFQKLQGLYGNILSCYEAGPCGFGLYHQLTAMNIKCQVIAPSRIPKSPTDRIKNDHRDAISLARLLRAGELTPVWIPDLTHEAMRDLIRARAAAKRDSRVARQRILSMLLRTDKRYAGKHWTGKHRTWLANQSFSQPSQQIAFQHYCQSLEQIEDRILQLDQEISRLLPEWSLCNLVCQLQALKGVGQLTAITLVAELGDFSRFSSPKQLMAFLGLVPGEYSSGNSIRPRGITKVGNSELRRLLYEAAWSYRTPAKVGAWLIYYRPDSVTQYSKDIAWKAQQRLCSRYRSLTAKGKKSQVAITAVARELTGFMWDIALAAQSSFSQQKQN

SEQ ID NO: 449449 - protein, 482 aa, unidentified
MTLVSSDDDLDWEFVFDSRLGHPTGRSEEPMVKRSKKRCEELPILHPHAAGIDVGASELFVAVSADRDPQPIRSFPTFTRDLNALADWLQQCGVRSVAMESTSVYWIPVYQILESRRLEVCLVNAQHVKNVPGRKTDVSDCQWLQYLHSVGLLRASFRPPGFICAIRSLWRHRSSLIQMAAEHVLHMQKALDQMNLQIHRVLNDITGLSGLRILEAILAGERDPVTLARLCHGGVKNSEDTIAKSLEGDYRPEHLFALRQSLAAFHYYQQLVVEVDQEIQGQLGSLETATTAEPTVPKRTKASAYQRRRYEPKTFDLRGELYRIFGVDLTNVPGISAITAQTVLCEIGTDVSRFRNASAFASWLGLCPENKISGGKVLYTKSRRVRSRVATALRMAANSLHHAKDYLGEFFRRITRKLGKPQAITATAHKLARIVYHLLSTKEAYNETVFHRCDEEAIKRAQYRLRKQAAHLGFQVIPLQNG

SEQ ID NO: 449450 - protein, 424 aa, unidentified
MNLTQNDKIEQIKNETLVVGVDIGKETNYARALDNRGRELKKHVKFTNSREGFRAFDKWVSEVSLANDKTDVIVGFEPTGHYWFSFGDHCKKLGHKLAIVNPMHVKRTKELDDNSPTKNDKKDPKTIAMLVKDGRYREVYIPEDIYQELRESVYEKERLTDLAIAINNQVIRWLDIRFPEFTKVFSKWHGHAALMALKNFPTPEKVLKAGVDNIVSKWKEEISRAVGRKHAEKLVNAAAESIGRTTGSISSEASLKNLIEQYELIMRQMEEQEALMLELLFRVPNADKLLGIKGIGLIAVATFVSEVGDISRFESPKQIIKLAGMNLKEDSSGKHKGKTRLSKRGRKRLRHSLFKAMITVLAKNTEFKAIHRRNITREINPLSKMQSIFALCGKLIRVFYAILSKGTEYDPNKLMIEIPSMKAA

SEQ ID NO: 449451 - protein, 412 aa, unidentified
MDVLYPCCAGLDVHKDSVYACVRRIGPGGAVRETVKVFGTTTPELLQLADWLAGEGATHVAMESTGVYWKPVYYLLDERFTLVLANAQQLKRVPGRKTDTQDCAWIAKLMQHGLIAASFVPPEPQRDLRELCRQRVQLGRQKAAVSNRIQKVLEDANLKLGSVASDVLGKSGRAMLRALIAGETDPGKLAALALGRLRKQLPRLRPALTGRVTEHHRFVLKLLLDEVEMIEGLVIRLEERIGAVLGPFAEAVRRWMTIPGVDVRTAQAVAAEIGTDMSRFPSECHLSAWAGMCPGNDESAGKRRSGKTPKGSPWLKRALVQAAWAASHTKDTYLSAYYRRLAARRGRKRALVALGHTILVIIYHLQRNGTDYTDLGGDYFERRDKDKLTRRLLRRLESLGMKVTVESSEQAA

SEQ ID NO: 449452 - protein, 332 aa, unidentified
MVAILGIDISKTKFDVVLLQASKQRHKVFANTEAGFNNLQAWLVKQQIGTLHACMEVTGQYGDNLAIYLHNAGYRVSMVNPARIKAFGISQLTRNKTDKVDAQIIALFCQTLVPDAWSPLPVELRDLQALVRRYDALMQMRHQEVTRLQSGAHPPAVLASLQSVIEQFDQQIKTLKAAIEQQVKQHPSLEQQQDLIASIPGIGTLTAAKILAEIPHLKRFKSARQAAAFAGLTPKQRVSGSSVRGRSHLSKTGSARVRKALYMPAVAALKWNPLMQALSERLHQRGKHSMAVLGAVMRKLLHLIYGVLKSGKPFSLDYGKHSSIAPAPCGAD

SEQ ID NO: 449453 - protein, 413 aa, unidentified
MSEEAFAWFVGVDWGSEKHQVCILDQQGTVVGERSFPHGGAGLAELGDWLLSITGAANTVAVAIEVPHGPVVDSLIDRGFAVYAINPKQLDRLRDRFSVAGAKDDRRDGYTLADGVRTDRRLFHRLHVADPRLVELRAWSRLTQELTEERVRLSNRVHHELWRYYPQIAKLTDDLTAPWFLELWTLAPIPAKARRLRKSTIEQLLKQHRIRRIDAETVLRTLREPAIKVSDGVANAASVHMRSLIARLRLVNRELREAERQLDEICTVIGETDAAAGDGLQRQDVMILKSIPGIGRLNLAVLLSEGSGPLSRRDYPALRTLCGAAPVTRRSGKSCVVMMRYAAHIRLRQAVYHWARTATQHDPKSKARYAALRQRGHSHGRALRGVGDRLLGLACVLLQKQTPFDPQYGHPVT

SEQ ID NO: 449454 - protein, 352 aa, unidentified
MKAVVKQVVGIDVAQDELVVSIGKMYADFSFEIVSRATFGNKLKGFEKLMLWLEPLADKAVQLRFVMEATGVYHQSFAYYLNDNGYAVSIVLPNKISNYFRTLSVKTITDKTMSDTITQFGLERNLDDWQPPKGIYRMLQQLTRERSQLTDEKVVIKNQIHAEQAEARPHKKSIERSKKRLVLIEKQIAEIESELKTLIKSDEDVKKIVLLICTIPGIGLLTAATVLGETNGFELIRNKRQLTSYAGLDVKEKQSGTSVKGKPCISKKGNKHLRKAMHLPALSAIRHDERSKAIFVRLVGKHGIKMKAAVAVQRKLLEMVYTIFKTQTAYDKNYFKRQENEVIIEQEVREVA

SEQ ID NO: 449455 - protein, 414 aa, unidentified
MEKQWNIVCGADIHKTFLIATILSRDGTKITKRFGMTSNDLLNFKNWVIENGCEQVAVESTGTYWVPIHTVLEGSVGLIVGNAYKIKHTPGNKNDLADADWIAELCLNGMIEPSRIFPRAERDLRRLTRIREGYVNDMTREKNRIHHALDSCGIKLSSVLSDIFGKAGQTILNGLLEGRTIDDILKGINLKSIKATTDEIREAIKGSLDFTQILLIRGSLEQMEAIQSRIDEIRKEIKGRIADRKEDLKIAMSIPGVGFTSASTLLAEIGDVTDFKKPEQLAAWAGLVPSVYQSAGKLITGSITKHGSRHIRWILVQVARVIARGRNSKLKRFFLRVKSKKGSNVAIVALARKVLCILHHLLINREIYQEKGINKKVKIDVRKEFSPHEMGLEEMIAYLVRAGYVVRKGSEGGG

SEQ ID NO: 449456 - protein, 471 aa, unidentified
MPKPKSAGHQNLTRTNPGAAAIDIGSTMHMAAVNPDSSDTPIRAFGTFTDDLHDLADWFKACGVTSVAMESTGVYWIPAFEILEQHGFEVILVNARYAKNVPGRKTDVSDATWLRQLHSYGLLRGSFRPNAQVATLRAYLRQRERLVEYAAAHIQHMQKALMEMNLQLHHVVSDITGATGMKIIRAIVSGERDPDVLASMRDVRCHSSTATMRAALIGNDREEHVFALSQSLELYDFYQQKMLECDRRLEAAIAMMAIEQEAPLAPLPKIRARTKQVNAPSFDVRAALYGLVGTDLTQIHGLGSSLALKLVGECGTDLRAWPTAKHFTSWLCLAPGNKISGGKLLSSRTRRSSSRAAALLRLAATTIGRSDTALGAFYRRLAGRIGKQKAVTATARKIAVLFYNALRLGMRYQDPGAASYDEQHRGRILANLQRRARSLGYHLEPMADGVSVYKAGRPARSFCCPIFSSAC

SEQ ID NO: 449457 - protein, 405 aa, unidentified
MVDIMVSDFMKGRYNLMKIFVGIDIAKLNHFAAAISSDGEILIEPFKFTNDADGFQLLVSKLESFDKNSIIIGLESTAHYGDNLVRYLVAEFYQVCVLNPIKTCQMRKNNVRKTKTDKVDTFVIAKTLMMQDDLRFITFFDLDMMDLKALGRFRQKTIKQRTRLKIQLTTYVDQVFPEIQYFFKSGLHQNAVYALLKEAPSPKEIASMHMTHLANLLKVNSHGHFTKEQAKELRILAQKSVGANDSAISIQITQTIQQIELLDSQLEKIEAEMTDIMKFNDSVIMTIPGIGYINGGMILGEIGDIHRFSNPNKLLAFAGLDPSVYQSGNFQAKTTRMSKRGSRVLRYALVNAAWNVVRNNATFKAYYDAKRAEGRSHYNALGHCAGKLVRVIWKMLTDKVEFNLE

SEQ ID NO: 449458 - protein, 351 aa, unidentified
MIIIGVDYHPSFQEIAFMDQETGECGERQLKHSDGEAEKFYRELKQRGVSVRVGMEATGHSRWFERLLAELGIELWIGDAAKIKTMRVRKQKTDREDARLMRKLLLENRFPRIWVPSPENRDLRQLLWHRHRLVQMRTRIMNQLQAVAMNEGYRWKKKLFSTQGRALLEKLSLAPWASRRRKELLELMDQLDPKIAELTAAVEREAKQRPEVLRLMTHPGVGPITGLAYILVIGTPDRFPSGKKIGSYTGLIPCEDSSAGRQRLGHISKQGNTLLRFLLVEAAQAAARCNPDWRRRYLHLMMRREKRIAKVAMARKLGVRLYWMWRNNWQYSQLVEFGSNAGKLGTGHGAK

SEQ ID NO: 449459 - protein, 304 aa, unidentified
MKALSKPERLAGSKSRIEHKEGSNNMEQFVGIDVSKAWLDGEAVPQSRPMRHGNDSAGIAALVSTLVAEQPALVVLEATGGFETEVASALAAAGVPTVVVNPKQVRDFAKAMGILAKSDRLDARVLALFGQRIRPQVRPLPSPEQRDLAELLDRRAQLVSMRAQERTRLATALAVPKPSLREHNQWLDARIGSYEIELTARLPELGHLNRCDIAALAGLAPFADDSGKRRGQRFIRGGRAEVRKALYMATLSATQHNPAIKPFFARLTAAGKPFKVAMTACMRKLLTILNAMLKTNQPWQPRVA

SEQ ID NO: 449460 - protein, 309 aa, unidentified
MLSSVGIDTAKATLEICIKPQKIRFEVANNSAGFEALLERLKDFNISRVLIEATGGYEKDVLIALASAGLETICINPARARKFADAMGKKAKTDKIDAEVLADFAAHLSAPQGQPVSPEREELRELVKQRAQFVQSRDDDKRRRQQCRSATVMAHFDEHIEQLKVLIKRLDEEIDQAMVQLDDTRARQLLAVTGIGRVTAANLLASLPELGQLDRRQIAALVGVAPYNNDSGSHRGHRQIWGGRAHVRRVLYMSSWIIIRHNTEFKARYEALRERGKCAKVALVACMRVLIVRLNAMLRDNTPWRVQTA

SEQ ID NO: 449461 - protein, 400 aa, unidentified
MNAVGIDVSKGKSTVAIMRPFGEVIAEPFEVSHTDTELRKLACFLKKLPGETRIVMEYTGSYWQPIAKVLHDAGFFVSAVNALLIYKYGNNSIRKGKTDKLDAVKIANYCLDRWTDLERYSPTDQIRQTLKTCRRQYDQYIRLKVNLKNNLIALLDGTFPGVNTLLKSAPRDTDGHEKWVDFAGKFWHRQCVCGNSEKAFANQYRKWCAKAGYRFNAEKAVAIYSHAGSQVDTLPMSSAIQSLITHAVAQLNMIIETISAIQHEMLTLASQLPEYPIVMRMFGVGPVLGPQLMAEIGDVRRFHCKQSLVAFAGVDAPPCQSGTFESKNRHISKRGSPRLRKTLFQVMSTIIQHAPADDPVYQFLDRKRREGKHYYVYMTAAANKFLRIYYGTVMAYFEKP

SEQ ID NO: 449462 - protein, 325 aa, unidentified
MEAKKLCCGIDVSHTTLDVCYQNNLGELFNLKVGNNNQGFAKILEHTGSGYHSVMEATGVYYIRLAFYLHGQGCRLSVVNALSIKRYIQMHLERNKSDKKDAGWICRYAIEQQPPYWEMPDNTYFECKQLYNTIREYAEQMKRFNNQLHSLRLLPVPSKDTIKSLEKINQQLEKEMKSLEVNLEAQLQQWQPAQLKSISSIKGIGKRATAMLIVFTQGFKYTKNHRQLISFAGLSPTEYSSGSSIQGKPRIYKRGGKNLRDVLYMCSMNAIKTNPACKALYERLRANGKTGKQGLIAVCNKLLKQVFAVVKNNSIYQPNYCSAKQ

SEQ ID NO: 449463 - protein, 387 aa, unidentified
MQKPHDNSKASPAAFMQDNTLIAVIELSLSNWLVAGLIPGVSREPLKKLEPNPEDLLKLLHGWRDEAIKAARPITRIAVAYETGRDSFWLARWLRERGIDAHVIHATSVTVSREHRRAKTDRLDTAMLKRGFLGWLRGERGHCTVAIVPTMEEEDAKRPHREREGLVHEQTRVVNRMKSALIQFGVRNFNPKLRKASVKLETVRTPESKSLPPNTIAALRRDMERLKIIKQQIKAIEQARLQQFEQKPEALANRMIYLLARIYGLGLETADLLVHELLSRTLRDRKAIARYAGLTGSPDESGSKRREKGLSRSGNARVRKIMIELAWRMVKFQPDSALVQWFKQRTENAKRSRKPMIVALARKLIIALWRYANDGVIPEGFKLHSAA

SEQ ID NO: 449464 - protein, 343 aa, unidentified
MNIHTLGIDIAKNTYQLHGADPSGKAAMRKRLPRHKLAAYIANLPACTIVMESCGGSNYWARVFKRSGHTVKLISPQFVKPFVKTNKNDANDAEAIVEAASRPSMNYVPIKQVEQQDIQSIHRIRTRVVKNRTALINEIRGLCLEYGIVVTPGAARVKSSLCTIIADSTNELTPCSRESMQNLYKELVEIEARLKNLNTKIRQLCRENENCKRIQKVPGVGELTATAIVAAVPNPNEFRNGRHMSAWLGLVPKQSSSGDKQILLGISKRGDRYLRTLLIHGARSVLSHYKDMDNDYTRWVGRKKATLSHNKAAVALANKNARIIWSMLNTGEEFSYEDQSAAA

SEQ ID NO: 449465 - protein, 356 aa, unidentified
MSEGTTREGSWTIGVDLGDRFSQVCVLDARGEVAARFRVATTRKGLERGLARFRGARVVIEVGTHSPWVSHWLEELGFEGIVANPRKLRSITHSDRKDDRADAEQLARLGRVDPKLLSPIRHRGIAVQRDRACLAVRDGLVRARVLLVNQARGLAKPLGQRLPRCATEGFARRMRRDGLLDAFPGMAALVATVEQLTLQIAALERQIEQLSEERYPETAQLRQVAGVGPLTALAYVLTIEDPQRFRRSRSVGAYLGLRPRRRQSGDYDPMLRITKAGDPYLRQLLVQCAHYILGPFGPDTDLRRFGLQLAARGGRAGRKKALVAVARKLAVLLHRLWVTGEPYETLRATAAEPAAA

SEQ ID NO: 449466 - protein, 294 aa, unidentified
MSVYLGVDFHTRTQTVCWCDQADGIVHQRTLDHQHDDIRSFYTQFAAPAIVGLEATGYARWFHRLLESVGHRLLVGDAYVIRKCALRRQKNDRRDAELLLDLLLHGDFPAVHIPSIASQAVLRLLRYRQRLVEIQTKLRNGIQALALNHQLRLGAKLWSKQGQQQLLALELDDSDVVQRENSLELLGQIRTRIRAIEKELTLRAEQDARVRLLRTHPGVGLLTSLVVVHALEPVTRFDRARRIAAYCGLDPRESSSGDTVRMGHISKQGNRLLRHLLVEAAHRAVQSKADADLR

SEQ ID NO: 449467 - protein, 416 aa, unidentified
MNTQRRWFAGVDWARESHHVRLTDEHGNDVGERIFTHSGAGLAEMASWLTTTCQVDAPEIHVAIEVPHGPVVETLMERGFAVYAINPQQLDRFRDRFSVSGAKDDSRDARALASALRTDPQCFRHLTPVDPTVVELREWSRIADEVVAERNRLTNRMREQLWRYFPAFLKLDEDLGADWLLDFWELAPTPLKARRIREPTVAKLLKRHRIRRVDAAHVLTIVREEPVTVQAGTMEAATAHIATLVARLRLINQQLADAHRKIDALTARLIGGEESAPGQPVEQHDAAILRSLPGVGRIVLATLLAEAWEPLRRRDYHALRNLCGVAPVTRRSGKTHIVLRRRACHPRLANAVYHWARVAVQNDRTSRAKYEALRDRGHGYARALRSVADRLLNVACAMLRDGTLFDPSLHLQKSAC

SEQ ID NO: 449468 - protein, 369 aa, unidentified
MHSENIAAYVGLDVHKETLAVAIAAPERLGEVRYYGTINNEAQAVRRLFQKLQGLYGNILSCYEAGPCGFGLYHQLTAMNIKCQVIAPSRIPKSPTDRIKNDHRDAISLARLLRAGELTPVWIPDLIRARAAAKRDSRVARQRILSMLLRTDKHYAGKHWTGKHRTWLANQSFSQPSQQIAFQHYCQSLEQIEDRILQLDQEISRLLPEWSLCNLVCQLQALKGVGQLIAITLVAELGDFSRFSNPKQLMAFLGLVPGEYSSGNSIRPRGITKVGNSELRRLLYEAAWSYRTPAKVGAWLIYYRPDSVTQYSKDIAWKAQQRLCSRYRSLTAKGKKSQVAITAVARELTGFMWDIALAAQSSFSQQKQN

SEQ ID NO: 449469 - protein, 324 aa, unidentified
MVAVSLKKKSGSVRHLSGVKNTVHGISKFLLSLPSSAVLCAEHTGVYGDLLLRLCTLNRTCLCFVPGYQIKHSLGLQRGKSDPLDACRIREYAERFYDLLRPCFYPGEEMSELQELYRTRSLLVESRKRLDTLNIGDNCKSSVSLAAGHARRAVLAELNTQISGLDHEIEALIQNSSEFSRNYQILTSIVGVGPVTSCELIIKTENFRKLDTAKKCAAYAGIAPYPKESGKMKCGHKISPMGDKQLKTLLFLCARSAKEHNKEIRLYFLKKHKVEKKHFFVAMNNIANKLLRLIYSLIQKQQTYDRDYIQRDPRCVVISDTNKC

SEQ ID NO: 449470 - protein, 317 aa, unidentified
MNSSQIQTSVNIGVDVGKANLDIALHPSGQFYSIPNSEAHIRRFIKILKNYDIERIVVEATGRHEHALVQASNQAGLPIIVVNPISVRRYAQAIGVLAKTDRIDAQVIAKYAATLKPEFRPIPDKTSQKIRDLLARRAQLMEMSTMEKNRLQIMPKPLHRSIKSLLRMLQNQIEAVTRQIEQEVAKVGHWRTKMEVMTSMPGVGKVLAYTLLSELPELGSLNRKEIAALVGVAPINRDSGKLNGKRRIRGGRHRVRTVMFMAMLSSIQCNPVFKRFYERLKAQGKIPKVALIACMRKMIVVLNTMVKNQESWRGEMA

SEQ ID NO: 449471 - protein, 402 aa, unidentified
MNAVGIDVSKGKSMVAIMRPFGEIVSAPFEIKHTASGINSLVELINSVEGESRIVMEHTGRYYEILAHQLSEANLFVCAINPKLIKDFDNDSLRKVKSDKADAVKIARYALDKWQNLKQYNVMDELRNQLKTMNRQFGFYMKHKTAMKNNLIGILDQTYLGVNTYFDSPARSDGSQKWVDFASTYWHVDCVRKMSLNSFIDHYQNWCKRKKYNFSQSKAEEIYGKAKELVPVLSKDAITKLIIKQAVDQLNSASTTVESLRTLMNETASKLPEYPVVMAMKGVGTSLGPQLIAEIGDVSRFTHKSAITAFAGVDPGVNESGSYEQKSVPTSKRGSSDLRKTLFQVMDVLIKTHPQDDPVYQFLDKKRAQGKPYYVYMTAGANKFLRIYYGRVKEYLSSLPES

SEQ ID NO: 449472 - protein, 346 aa, unidentified
MKSTIVGVDLAKRVIQVCVYTNKAVRSNKEMTPNEFTEFLAKSKPMTVVFEACGTSNYWLQKALDFKHDAKLISAQLVASVRQNQKTDKNDALAIVQSAMLPEVNFVVGKSVKQQELQSIVRFRELCIKQKTALSNQLDGLLAEFNISTAKRNGGLKGAVESTLEDAENGCSDLFRQALDTAGKLYVETIESLAIYDDCLEQSISHHPECKKLLKIEGVGTINAINLYIALGCAELGQFKKGKDASACIGLTPLQHSSGGKTKLGSIGKYVKNSMLRSLLIAGAMSCVIQVVKREARTTKEKWLQGLVERRGKQCAAVALANKTVRTAFAMLTQGTEYRAELISAS

SEQ ID NO: 449473 - protein, 382 aa, unidentified
MQPINTVNPTIYLAIELSASTWLIAARLPGSEKPHLHRIEGGDTAALFALISSLRARVARRLDAAIGVVCCFEAGRDGFWLHRLLTAHGIANYVLEPTSILINRRARRAKTDRLDAIGMLRVLAAYLRGDRQSCSMVRVPTPEDEDAKRIHRERENLVQEKLRIENRIEALLFTQGIRKRPSLRSWERDLAVLRTGDGREMPRHLRAELDRLRRRLVTILELIREVEAERDEVVTTNPEHQTSRKIVALCRIRGLGENFAGVLTREVFYRSFDNRRQIASYVGITPMPYQSGSMDRDRRISRAGNPRARTTMIQLAWLWLRYQPGSELAEWFRKRVGTLAGRTRRIAIVAMARKLLIALWRYVETGVLPAGAEIRPESAAAA

SEQ ID NO: 449474 - protein, 331 aa, unidentified
MVLSILGIDVSKRTFNVTLLVGGKEKSKKFSNDAVGFEELQEWLKEWAPDGVHACMEATGRYYEALGEFLYSAGHLVSVVNPTRIKGYAQSELKRSKTDELDARLIARFCQKHHPRPWEPLATEVREVQEAERYLDALKGMRLQESNRLGSGLTCDAVKKAIEKHIEQIDSEIAEIEKWLKEQLKKHERLTEHYKLITSVIGIGNVTAFTWLGEIGYGDNFELTRQLESFAGLTIKKNQSGTSVRGRERLSKVGNHYLRKALFMPAMCAMQHNPVIRSFAERLRERGKPPKVIVGAVMRKLVRIIFAVVKSGRPFDPQYRSLPRSPQLVTG

SEQ ID NO: 449475 - protein, 375 aa, unidentified
MKEKVRFLGLDVHAETIAVAVAEPDGEVRSLGTIPNRGESIRKMIRKLGPAEKLRVCYEAGPTGYVVYWQLAELGVQCEVVAPTLVPVKVGDRVKTDRRDAEKLARCYRSGDLTAVWVPDEGSEALRDLVRAREAAKQDQMRARHRLSKFLLRSGQRPPTGIRPWTRPYLIWVAQLRFTQVAQEATRQDYLHEVEHMRERVARLEQAIMEAVKLASPALQQVINDLQALRGIADISAVTIAAELGQVSRFGSARQLMGYCGAVPSEGSSGKRIRRGSITKTGNAHLRRIVGEAAWSYRRPPGIWYGLRRRQESISEEVKEIAWKAQHRLHKRYMKLGAAGKPQGKIITAVARELLGFIWAIGTRAEIAVSQRAAA

SEQ ID NO: 449476 - protein, 349 aa, unidentified
MAGRKYWVGLDTGVAETAVCFIDEFGEVLFEGKRETNAGQIKDILRPFGVEAVQRITIEAGVGTHMVRELQAQGFPVYVAEVRRASKFLAIRRQKTDSNDARGLAELGRVGRTIGAEVFVKPLDCQNLRSLLNVRKNLIQQRMKIDALVQSIVRLHGGKLKTSSGVGKLASGIEDQLEVLRADGLDVDADVRPLISIAENLRSHIAGMDKRLRAAALAHPVCSNLMTVPGVGPITALSFYSAIGDPSRFQRTRDVGPYFGLTPSIHQSGVLARVGRISRFGSKLTRTHLVSAATVLLCSTKAESALQAWGLALRKKVGLSKARVAVARKLAVVMLHMWKSGSSFDPART

SEQ ID NO: 449477 - protein, 353 aa, unidentified
MEQVKIQSEVILGVDTHLDVHVGVVIDAVGRVQGTLAIATNCSGYEQLLDWAQGFGVLRRAGVEGTGSYGSGLTRFLEERGITVIEVNRPDRSRRRSRGKSDPTDAESAARAVLADDATCIPKAQSGLAEALRTLSVARRSAVKAKTQAVNQLRALLVSAPSFIRDGVLKVKPEECVAACAALPHEDVNPVLASLKTTLQLLAKRWTALHEELRELDKQLARLTKLAAPRLLARFGVGPQTAATLLVTAGDNPSRLRNEAALAALCGVSPLDASSGKMIRHRLNRGGQRQANNALWTIAMVRMRSDARTREYVARRTREGLSKKEIHRCLKRYIVRELYPLILADLKEPMRPA

SEQ ID NO: 449478 - protein, 342 aa, unidentified
MMIIGCDFHPGFQQIAYVELETGEYGERRLNHPTEAEQFYRSLAGKQVRIGVEATGGLRWFRKLMHELGHELLLGDASAIRASSPRKQKTDMRDARHMLRLLEENRFPAIWQPPMENEDLRQLLLHRCRMVRMQTRIKNQLDMMAKNEGLVSSRSWSKKRRQQIEALPLSGWHVQRRKDLFQLMEELDKRIEPLDKAVLEASKQSPEAVLLMTHPGVGPVVSLAYVLILGDWRRFPRGKQVGSYLGLIPAEASSGKRQQRLGHISKQGNTLLRWLLVQAATKAQRHDPSWHRQYLRLSIQKHHGVAKVAIAHKLAIRLYWMLRSGQDYKQVKERGSHAGQSV

SEQ ID NO: 449479 - protein, 345 aa, unidentified
MPVATIGLDLAKAVFQAHGVDDAGQTVLRRRLGRSELLAFFAKLSPCKVAMEACSSAHHWARELVRLGHEVRLIPPQYVKPYVKRNKTDAADAEAICEAATRPNMRFVPIKTRDQQAVLALHRSRSLLVRQRTASINAVRGLVGEFGLVAAKGRYRMSELRQRMNSMSPDDLPGIACQTINTLFDHIDMLDEKIAAVERQIVEWHKNNEDSRRLATAPGVGPITASAIVAAVGDGRQFQSARHFAAWLGLTPRIHASGKKERIGRISKGGDRYLRALLIHGARAIVGTLFRKSVTPRPWLLALAARRPTNVTAVAVAHKTARALWAMLTRDEAYRKPMAATRSAA

SEQ ID NO: 449480 - protein, 429 aa, unidentified
MNYNTQNAKIASITEKTLIVGIDVGSETHYARAFNWRNYEYSKKPFAFSNDEAGFSSFKDWMDDIAEKHGMKVVIPGMEPTGHYWLNLGAYLQEQGMKPVHVNPHHVKKSKELDDNNPSKNDRKDPKTIAGLVNEGRFSYPYIPTGIYAEIRNLSNLRIQTQEEITRIKNRIARWFSIYFPEIKDVYRNPDAVSGLMVIKQAALPCDIRELGVEGVNKIWRDARLKGAGIKRATTLVTAAEHSIGNTEAPRSARKEIRNLLNDYEIYKNRMDELMEEIEKTLSEIPYIDKLMEITGIGIKTVSCVIAEVGDIGRFDNPKQVQKLAGYAIVADSSGKHNGESRISHRGRKRLRYALYEAAISVIGKNKEFKEIHSYYRTREKNPLKKMQSVIAVACKLIRIFYTILTKGVDYDGQRMLADIVRPEMQLAA

SEQ ID NO: 449481 - protein, 397 aa, unidentified
MYIVGIDIAKRKHEAAVIDGEGTVIIKPFSFTNNCSGYNRLLAMLTKAKLPLDEVSFAMEATGHYWLALFTRLQKEGFRVQVINPVQTNSIRSFYIRQAKTDPRDALLIAEVIRFGHFSESTLHPENIYELRELCRGRHAIVSMQADVKRKVVALLDQVFPEYETAFANMFGDTSMAILQTCPTPKELSEMRLEELCHLIEVSSHKRFRMAKAQELQALARNSFGFAMAGDVFSTMIRLYAKHLVFLKQQVQEMDRKIAEIMDTLDTPITTITGIGPTLGAYILSEIGDISRFSSAAKLAAYAGIDPTMRQSGEYNGVRNRMSKRGSPYLRHAIWLAASSAVLHDPALKLYFQKKRDEGKPYMASVGHACRKMVSIIYAVMRDNKAYTPCIPNEISV

SEQ ID NO: 449482 - protein, 396 aa, unidentified
MTNERLSMNDTDTLNGTLSGVSGDRGVNTPPRLLVAIEMSLKTWRLVMAPEGGLRKRVKTIEGGQYLQLEAAIAEAKERFELAAETPVVCCYEAGRDGFYPYRRWRELGHEVWVIDSASIEVSRRAKQAKSDGIDGEKLAELMQRQARGEPRALRILRVPSPEVEDERLLPRERESLLQERGRLRNRIESVLFTQGYREVPKPAGALKKWLKEPPGVLPHLSARLERETERLELVEKQLRTVEASLAQPVKSAPSLGLAGVAWSLMQLCGIGLIGAWVLAAELFGWREFRNRREVGAVLGLTPTPYSSGQDQREQGISKAGNRRARAMLVELAWLWLRYQPDSALTQWFKARFAGGGKRLRRIGIVALARRLAIALWRYLTQGAIPAGAVLKTAPG

SEQ ID NO: 449483 - protein, 370 aa, unidentified
MAKSTPLFVGLDVHKDSIAVAHATEGRSEPPVFVGTIGTRQADLDRLIRRLQGKAAELRFAYEAGPSGYGLYRYLTRKGLACDVVAPSLIPRRPGDKVKTDRRDAVELARLFRSGDLTAVHVPTVEDEAIRDLCRARDAARVTLKNARLRLKAFLLRLGLHYVGRADWNAAHKRYLAKVVCPTPAQQIVFQEGIRAVDEQVDRLQRIEAELLALAPHWGRYPVVQALQALRGVQWIVALTVVAELGDLTRFDNPRQLAAFVGLVPSEYSGGTARRLGGITKAGNGRARRVLVEAAWAYRHPAKVSLHIQQRIDQLPKALQDLGWKAQVRLCKRYRRLVARGKHPNVVVTAIARELIAFMWAIARAMPGHA

SEQ ID NO: 449484 - protein, 408 aa, unidentified
MRYYLGVDWADEAHVVWVMSGDGTKIATRTVPHTTDGMIEWARELDEWRGQSIELWAAIERSDGRVVDFLLDHGVMVYPVNPKALNRARDRFRQSGAKSDPFDARVLADFLRTDHAQLHALHPSSQAAQELKLLADDCQRHIRQQTRLVNQLTMTLKAYYPRALEVAELTTALARQFLQDFPTPAAVAALSERQWQRWARAHRLKHARTQELWEILQQPQLPVPAHVVRAKARLMGSLVGQLSLVVAAVAQYREAIEEFFATIPAAQWARTLPIGKHGITAPTLWARLGDAPGRWESFRHLQAHAGAVPVTKRSGKQQRVVHFRFACDKALRSMVDHVAFLSLRSSEWARAYYDQQRGRGHSHYEALRALGAKWLKIIFVMWQRHAPYDEQYHLATMTRQQLRRQKIA

SEQ ID NO: 449485 - protein, 407 aa, unidentified
MKYKEFNRLKGSMFMQSVLAIDVAKGKSMVTLINSCGEVLIEPYEINHSIKDFSNLLNRIKQLKLDNISVIMESTGIYHRPVERFFLENNFKVYTINALYSKMYKRNLRKTKTDKLDCLSLSELYFTNNFKQYIKPDNIYLNMNALARQYFALDQLCTNLKNRYKNLVYLCFPEYELLFKQEVIYSDIALSFIANYPHAEIISNTRIDHLQHYFKNNNYKRWKQKPMLIKEAAKNSYPSVSKDDEIVSDLSQLAKLIRNYQNEINSIKLKLINYGKQTKYFTAINSIFGIGEFTASIMIAELNDINRFNNIKELTAYCGLDPSIKQSGKSINIHGPISKSGNKYMRKLLFVSCLNIIRLSSKCHVKNDIEIYYRKKRNEGKHHYAAMVACTTKLLRQILALCKQLDK

SEQ ID NO: 449486 - protein, 341 aa, unidentified
MDEVSTIGLDIAKNIFQVHGADASGVVVLRKKIGRARLLAFFAAQPPCVVAMEACGGAHHWGRELAKLGHTVRLIPPAYVKPFVKRHKNDAADAEAICEAAQRPSMRFVPVKNEEQQASAVVFRARDLLVRQRTQCINALRGHLTEYGWVIPKGVPHVAQLIVRIEDPAELLPESARAILCVLIATLRALDEQIAGLDAEIGRRAKADPVARRLMTIPGVGPITATAIVALAPPPETFKAGRHFAAWLGLTPLQKSTGGKQKLGAISKMGERTLRRLLTIGASAVVKQALRRGAPVGSWLAQMLARKPKMLVIVALANKTARIVWALLAQGGVYRARVAAA

SEQ ID NO: 449487 - protein, 359 aa, unidentified
MQRNKISFTGQKIYIGIDVHAKTWEVCVLTESGYKERHPQQASAKTLFDFLKKHFPDGEYHAVYESGFSGFSTYYALKEYGINCVVTHAADVPTTQYEEVMKTDKVDAAKLARSLRAGDIRPIYIREKENIDDRSVIRIRKTIQKQLSGYKARVKHLLHCNGVEIPEQFARPGTHWSRAFIKWLKEDVVLLSSSRLSLDLLVKQVETIRQTLLDATKSIRRLAQTDRYRNNYELLMSIPGIGVSVAMCILTEIYDVKRFRNENQFASYLGLIPTCHNSGEKTASGEKTFRGNKHLGPMIIEAAWIAIYRDYGLGMAYARYKQSMKPQEAIVKIARKMSNIIFSVLKNSRKYEPYRWDKE

SEQ ID NO: 449488 - protein, 355 aa, unidentified
MVVLGVDVHKDTHTTVAVDEVGREIGCKTVKARDRGHAALVRWARTENPDEQRVWAIEDCRHVSTRLERALLAAGERVVRVPPKLMAGARASARTRGKSDPIDALAIARAALREPNLPAAEHDRTSRELKLLVDHREDLVTERTRMQSRVRWHLHELDPDLDIPSRGLDRFCVLDRLLAWLEGHGPAAESVVVARIATELLVDIRAVTVRINALERELTRLAEQAAPQLQALSGVAGLTAAKIIGEAANMSRFRSEACFAMHAGVAPIPASSGRTNRHRLARGGNRQLNAALHRIAVTQARMPDSLGHAYYQRRIAMGNTKMEALRALKRRLARVVFNLLAAPKSSTTGHQPVAA

SEQ ID NO: 449489 - protein, 401 aa, unidentified
MVSDFMKGRYNLMKIFVGIDIAKLNHFAAAISSDGEILIEPFKFTNDADGFQLLVSKLESFDKNSIIIGLESTAHYGDNLVRYLVAEFYQVCVLNPIKTCQMRKNNVRKTKTDKVDTFVIAKTLMMQDDLRFITFFDLDMMDLKALWRFRQKTIKQRTRLKIQLTTYVDQVFPEIQYFFKSGLHQNAVYALLKEAPSPKEIASMHMTHLANLLKVNSHGHFTKEQAKELRVLAQKSVGANDSAISIQITQTIQQIELLDSQLEKIEAEMTDIMKFNDSVIMTIPSIGYINGGMILGEIGDIHRFSNPNKLLAFADLDPSVYQSGNFQAKTTRMSKRGSRVLRYALVNAAWNVVRNNATFKAYYDAKRSEGRSHYNALEHCAGKLVRVIWKMLTDEVEFNLE

SEQ ID NO: 449490 - protein, 311 aa, unidentified
MNEFLDKCCGIDVHQASFTACIMKGSGKSMYKEIREFSTFTDGIQAFAAWLKEHGIVHTAIESTGVYWKPVFNILAEEQLDLMLVNAKHVKNVPGRKTDIKDSEWLCKLLKNGLLERNFIPPEDIRNLRDLTRYRSKLIAGMASEKNRIIKVLETANIKLSSVLSDVFGESGRRIIEDLVKGETDPKKLVEHIVGRVKYSKKEFIRALTGRITKHHRFLIQQALDHICEIGDIVKKVEKEIDGITSEHAQEFELLQSVPGINSTIAAAVVAEIGVDMKQFPSDQHISSWAGLSPGSYESAGKKKALVSYRG

SEQ ID NO: 449491 - protein, 453 aa, unidentified
MSQPSTLPQLNPQAAGVDIGAHSHFVAVPPGSDPDGRDVREFDTFTADLYALADWLSQCGVTTIAMESTGIYWIPLFQILEERGFDVKLVDPRRLKHVPGRKTDVVDCQWIQRLHSFGLLDGAFRPSDEIVLLRGFLRQRAMLLRCGAQHIQHIHKALEQMNLKLHLVVSNIVGTTGLRIIRAILAGERDPDKLAALRDRRCKNDVATIARALHGHYRSDLLFSLRQAVELFDIFQTKVAECDAEIEALLASFPDASQGRTLPPARRKGGAYRNAPAFDARSHLFRISGVDLTRIEGIDTSIALTLVSEIGLDMSRWPSEKHFASWLGLCPGSKISGSRVLSSRSKRCANRAAVAFRLAAHGLHNSHSALGAFLRRKKAQLGAPKAITATAHKIARLVYALLRYGSDYVEVGEQEYERRYRARIVNNLERRARTFGFTLVPDPRTLPASALPA

SEQ ID NO: 449492 - protein, 409 aa, unidentified
MAAVMIGVDPHKGSHTAVVIDQAEMALGEVRVRASASQVQQLLEWAAAWAERTWAVEGAGGLGHLLAQQLVAAGERVLDVQPKLAARVRLLAAGDVNKNDPNDARSVAIAALRSAACPPVRADDHAAVLKVRAKRHRDLSRARNQVVCRLHAVLCELVPGGVSKQIHAAAAVRLLDQIQPAGAVQAARRELAGQFLADLRRLDAQRRDTKKKLAAAIRASGTTVTEVFGVGPAVAAAVIGDVRDISRFPGPDCFAAYNGTAPVEVSSGGRVIYRLSLRGNRRLNHAIHMAAVTQIRYRHTKGRAYYDKKIAEGKTPKEALRALKRQVSDAIYQHLKADARRAAAAAGPGGHPGNGSVASAAGSHPEHRLFGQATPGPEPTLRPRPGPSKTTRQGSSRRTRRLVPEHTST

SEQ ID NO: 449493 - protein, 355 aa, unidentified
MSKLKYIGLDVHQASISVAVREESGRLVMESILATRAAAILEFLGGLRGTLHVTFEEGTYSTWLYDLLVRRVHQVVVCNPRKNALLKKGNKSDRIDARKLAELLRSGLLSPVYHGQNSIRTLQELTRSYLTLTQDTTRVMNRLTAIYRSQAIAYGSKKLYTRRHRGEWLGKLQQPGLLRRAERLYEELDLLQQLRRKARQEVMVESQKHPVCARLCSIPYLGPIRAAVLAARVQTPHRFRTKRQFWAYCGLGLETRSSGDYQQIEGQLQRCRKKVLIRGLNLDHNHDLKNIFKGAAMSASIFSGPLQEFYQERLRAGIQPEMAQLTLARKIAAIALTIWKKGDRFDRTKLKAQAA

SEQ ID NO: 449494 - protein, 343 aa, unidentified
MTNTISPSHGLRPCLGIDVSKASLDVCLLQDSASHHRYRRKFSNSRSGIKALLEWLMAHCPGPVAAVMESTGCYGELCAHLLHEAGHRVSVISARRIQQYAQSRCRHNKTDQVDAEVIARFGFLQDDELLPQWLPTPQAQGQLRELLRRGDELEAALQAERNRLEGAAERSALLKSLKGHIRWLEKELIRLQKMITALLKTFPDLAEDCRRLEAIEGVGAKTARWLVAELPLHLESSRTAAAWAGVAPRLFESGTIKRPSRIGRSGNRYLRKAMYFAAIVARTHNPRFKAFADRLAQRGLSKMAVIFAVLHKLLRTAFAILKHKTAYDPSHQSVIHKNSPIPA

SEQ ID NO: 449495 - protein, 404 aa, unidentified
MMNAVGIDVSKGKSMVTALNLHGEILFRPFEVIHNHPNFATLVDKIKMLGSDTRIIMEATGRYHEPIAAALHAQGLFVSVLNPLVIKQFGAGSLRKVKSDKKDANKIAKYGLANWSVLRDYSPMDTTRQQLKLLSRQYNLYMNMATSMQNNLISLLDKTFPGANKLFDSPVRNDGHQKWVDFALDFWHCDIINALTLQAFTLRYQKWCVRRGYNFSTAKAEKIFAASADHFCTLPKSDDTKLIITSAVQGLIAVMKQRATIKNEVIRLARQLPEYDCVMAMYGVGDITGAQLMAELGDIRRFANRGAIVAFAGIDPGVNESGSYNKTSNSSSKRGSPHLRKTLFQVVSTYLKRSPHNEPVYCFLDKKRSEGKPFYVYMTAAANKFLRIYYARVKESLAPFDVAE

SEQ ID NO: 449496 - protein, 350 aa, unidentified
MYFAGLDAHLKYVTVAVLDRLGTLVLETTVPTREPERLLAVLAPFRPLEVVVETCPFWPWLYDLLVPAGIGFHLAHAKRLRAIATAPQKNDRVDARLLARMLLSGLIPEAYPRPGDQRELLRLLRHRTTLVRFRTRLAGRIHSQLHQQRLLLPREQLLRQATRTWLRETAWPRLTTEQQAIVTTHLELIDHLTPLIQALERRIDTAAGANPTAALLATIPGIASYRSLLLAAELSPLSRFPRVEHLASYAGLAPVTRSSGGHTRHGSIPQGANRWVRGALVSAIPSHVRWAPTSPVTRAYAQLTARLGWRVARVAAARKLLRIVYIMLRRGEAWRSEPVAGADVRDEVHV

SEQ ID NO: 449497 - protein, 369 aa, unidentified
MSEVTLRLIARVGVDIAKGVIQVHAVDAAGRMVASRSLKRDQFLPWCVQHLPPGCLVAMEACGGAHHWARRLMALGFQARLIAAHFVAPYRMQGKGGKNDANDAAAICEAASRPHMRFVPIKTAQQQGVMALHTMREGFKEERTACINRIRGVLVEFGLVFGKGPKVLRAVLADVLEDAGNELTGTARMALQQGFEHWRHLDDCMRWCDRQIGQHVRSCTAARRAARISGIGEIGASALTAAVGNFALFDSGAQFGAWLGLVPRQNSSGGKPSLGRITKRGDDYLRTLLIQGAKAVVMSAHKRSDPISQWVLKLRERAGWQKACVALANKNARILWAVMTREPGYEPHHVSVKPVAKRPPAPQPQFAAA

SEQ ID NO: 449498 - protein, 325 aa, unidentified
MQAVTTIGFDIAKSIFQVHGIDAEGQAVIRQQLRRSRVLGFFGKLSPCVVGVEACASSHHWSRQLQALGHTVRLMSPAYVKPYLKRQKNDASDAEAICEAVQRPSMRFVPTKTPDQQACLMLHRTRHLFIRQQTAVINAIRAHLAEFGIVAPVGRNGVEELLDVVANPDDGRVPEIARECLEALGNQLRRLKGQILAFDRRINAWHRSNETSHRLDELPGVGPALATALVASIPDPRVFRSGRDFSAWIGLVPKQNSSGGKERLGNITKQGDRYLRSLFCAGALAVIRYGKIHGTKHRPWLAKLLERRPTKVAAIALANKLARMA

SEQ ID NO: 449499 - protein, 451 aa, unidentified
MSKRGSKSAGLPVIHAWAAAIDVGARFHVAAVPAELCDEPVQTFEAFTSDIERMADWLVSLGIKTVAMESTGVYWVPVYEVLEDRGLEVIVANARDARAVPGRKSDVNDAQWLQRLHACGLLRASFRPGRDIAALRAYLRLRERHLDDAAAHIQHMQKALTFMNLQLHHVVSDITGATGMKIIRAIVAGQRDPEVLARMRDVRCRANFEAVRAALVGNYQPEHLFALRQALALYDLYQERVDECDAEVEATLARLNIDKQFPAEPLPKARHRTQQPNAVNFDTRPLLYQLTGVDLTQIHGIGPYLALRLISESGTDLSRWPTAKHFTSWLTLSPGCKISGGKVLSARTRKTNNRLAAHLRLAATTVGRTNTALGAFYRRLAARIGKAKAVTATARKIAVLYYNAMRYGMTYADPGADQYERKYRERVVKQLHRRAAEFGFTLQEATPRGVS

SEQ ID NO: 449500 - protein, 338 aa, unidentified
MNEKDISQSDDSMRMFVGLDVHKKYTEVAIVDECGVVLEHGRIENDPEKIEDFSKRLSNATVVMESSSSWYWLYEILSRRHRVVLSNPVKTKAIASAKMKTDRMDALMLANLLRGGYIAECYVPSRRVMGLRELVRYRANLVGMRGMVKNRVHAYLQMNNINIGYGPFTEGFLEELRKVKDARIEGYLRIIERLNLEIHEASKMICSEALNDEGARLLMTIPGISFYSALLIISEIGEIDRFPDSSHLVSYAGLAPSTRCSGGVTYHGRITKTGSPYLRWVLNQCTWVHIRAEPDGNIATFYRRLSKKKGNAKAIVAASAKLLKIIYWVLKDRRPYHS

SEQ ID NO: 449501 - protein, 312 aa, unidentified
MYYIGIDVSKKDLSVFDGKKDLKFINQEGLKSFKKYLKKKYNLQEVAIIFEPTGVYSLYLKEFCAKNSIKAYIINPKKSHNFTRALGKRSKTDKIDARVLYQFHKHIDLEDIKVPQIDQQAKTLASYLVSYEFALKQRISLSNHLESLRDKGLIALMKKDLKRAERLEDKLFHGIKEYVSKNQNLREDYQRLITISGVGEKTAIALLTLFKTYQGTNRAQITALAGLDPVKRESGTSVKDKAKISKNGKGIYRKIFYLPTVCATVHNQKIRVFYQRLLAHHKTKKLAVIASMRKILLIAHAMYRDKTEYIAV

SEQ ID NO: 449502 - protein, 348 aa, unidentified
MIVIGCDYHPSWQQICWLDTATGETEEKKLEHASGEAERFYRQLGSPALIGMESTGNCQWFVEMATTLGHDVWIGDAAKIRASDVRQQKHDKRDARLLLQLLAERRFPQIWTPSSEQKDLRQLLIHRHKLVRVRTQMKNALQHLAMNQGVLKKRKLWSAAGQKALCELPLRPWASWRREDLLKVMSVLEEKISVLDQAAAEAAAKDEKARLLMTQPGVGPITSLAFVLTMGDVRRFPRGKQVASYLGLIPREYSSGGHRRYGSISKQGNTFLRMLLVEAAQCAVRCDPQMRSEYLHRCHRKAKGVAKVAAARKLAIRLYWMLRTNTGYPEVVRVESSSRVPLVVRHSG

SEQ ID NO: 449503 - protein, 347 aa, unidentified
MNITTIGLDLAKNVFQVHGVDERGKVRVRKQVKRAQWMGFFANLPPCLVGMEACASAHFWARKLTELGHTVKLMAPQFVKPYVKTNKHDAADAEGICEAVRRPNMRFVPVKNAEQQALLGLHRARQGFVIARTAQANQIRGLLAEFGIVFAKGVHWVTKKMPEILEDAENGLPGMSRELFNRLLAHFRELDRQVKELDGQIQAWHREDAASLRLQGIPGIGPITASALVASIGDASAFKSGRQLAAWLGLVPRQSSTGGKVQLFGISKRGDTYLRTLLIHGTRSVLRHLKSEGTPTQRWLERLLTRCHPNVAAVALANKNARVVWALLAHGRDYQPGYVTARATAAA

SEQ ID NO: 449504 - protein, 347 aa, unidentified
MSLYIGVDFHPHQQTVCWCDTETGETKTQTLPHELAKVSEFYQSMPPAVIGIEATSKAIWFENLLAETNHKLVVGNPTLIRKKATSRHKSDKRDAELILNLLVKDEFPTLWRRSSANNQVLEILQARLNLVRQRTKIYNRLQVLAHNFGLPKGRMQSKYFQDLVKQLKTDEAGQLQRNQLFEALEHISKQIVELEEWLDKKSKLDEQVKLLMTQKGVGYLTALCLVNTIGEITRFTKPTKQVAAFLGIEPLGHESAGKSKAIGISRAGSSLARYLLGQSANIVARYDVKFKTFYKRLAKKKPKPVAKTATARKVLVKLVIMLRDKITAEEFDQRGRKSERCSLSFKV

SEQ ID NO: 449505 - protein, 362 aa, unidentified
MSVKATCLVGLDVHARQTHAAVLDLGSGELVVRRLVGAPEEMVVFLDGLPRPIVAVYEAGPTGFGLVRLGRERGIDVRVIAPGSIPKGPGDRVKTDRRDAIRLVRLLAAGELRFAFVPSIEDEAFRDLVRCIEDVRGDLMRARHRLSKFLLRRGHRYTDAQAWSLGHMRWLRALRFGDGCSRAAFADYLASVELLAGRRTSLLSALEQQIPDCSHAPVIARLRCFRGIDTLTAAGVAAEVGTFARFPKPALLSGFLGIVPSERTSDLKRRQGSITKAGSGHARRLLVEAAHHYRRQPTIGETLARRQAGQDPRIIEIAWRAQQRLHQRWQHLRDERHKPAAVVTIAVSRELASFLWEAATLD

SEQ ID NO: 449506 - protein, 408 aa, unidentified
MNENTITSEPAALIAIDWADQKHDIALLPAGAERAEHLQLAHGPQDLVQWACGLRQRFAGRKIAVAVEQKRGALIHALMAYEFFVFYLVNPGTLANFRKAFKRSGAKSDPLDRDLLLELIQKHRDRLTRWQPDDVHTRHLDLLVQDRREAVNECTRLGEQLRATLKNYFPAMLDLAGNVTTVLACKLILKWPNFASLQRAKPQTLRTFFYAHNFRRPDILEQRLESVQAAAPLCKDVAIIGAGQLKAIRLARAILTLLPAIKQYDKEIARLFETHPDAPIFDSFPGAGPALAPRLLTAFGSQRDRWQHSLELATFSGIAAVIEGSGKRSLTHWRWACPKFVRQSLHEFAGISIRFCPWAKRFYQTQLNRGKGHHVAVRALAFKWIRILFRCWQDRSTYDPAKYAPANL

SEQ ID NO: 449507 - protein, 372 aa, unidentified
MEQSSKTLYVGLDVHKDSIAVAYAPEDRGAEVVSLGAIGTRQCDIDKLIRKLQSKGATTLVFVYEAGPCGCGLYRYLTGKGFACHVVAPSLIPRKAGGRVKTDRRDAITLARLMRSGDLRAIYVPGVEDEALRDLSRSRDDAMQDLKRSKRRLKSFLLRQDIRYEGRASWNAAHLRWLSEVVCPTPPQQIVFQEYVRAVSEQQERVQRVERELHEAVQGWRLYPMVQAIQALRGVELTGAVILLTELGDITRFENPRQLMSYLGLTPSEYSSGERRRQGGITKAGNSHARRALVEGAWAYRYPAKVSRHLQLRLEKLPTEVQAIGWKAQVRLCRRYRQLTARGKHVNQVVVAIAREMAAFAWAIARLVPLGA

SEQ ID NO: 449508 - protein, 377 aa, unidentified
MREKLRFLGLDVHAETIAVAIAEPDGEVRSLGTIANREESIRKLIRKLGPAEHIRACYEAGPTGFVLYWQLSQLGVACAVIAPTLVPKKPGDRVKTDRRDALKLARSHRSGDLTAVWVPDEDSEALRDLVRQREAAKQDQLRARHRLTKFLLRTGQRPPLGLKAWTERWMRWLAQVRYTQPAQEVTRLDCMNEVEHMAARVKRLEEAILEVVKLAPEPMQELIRGLQALRGVAHISAVTIASELGNITSRFESARKLMGYCGVFPSEDSSGKRIRRGGITKCGNAHLRRIVVESAWCYRHLPRVGEKLRKRHQGVPAEITEIAWKAQNRLHKRYMKLTMAGKDQRKVMTAVARELLGFIWAIGIKAEAVASRQQFAA

SEQ ID NO: 449509 - protein, 355 aa, unidentified
MEDAMIHIGIDLHTRNMTLAAVNDNGDLLKLESIRCCSLALDRFFSKISHPAQAVVESTSSWYWLDDWFRHKGITLKLAHAKMLKAISYAKVKTDSVDAHMLAELLRTGLVPESWKSEKRQRELRELTRARLRWILKRNQFQNFTYSIATRYNLTVKSSDWRNVRNLRMSLRNHLPDEAWLEASLSIDQVIEMQNSIDRIEKAIDRQLWYREEVKRLMEIPGIGPVSAWSILSEVGDITRFPSDKQFASYCRLVPGSNDSGGKQRHKTGSKDGNKYLKIAFGQAAIGAYTNYGEVKKFYNKLRRRKGPKVARTIVAKELSRIVWYVLAKNQPYKGFKGQMTKKSKSYSWPHPVSP

SEQ ID NO: 449510 - protein, 426 aa, unidentified
MTYRIAGIDVHKRMLAVVIADVAVEGQYQFERRKVGTSPSEMCRLADWLVAEQVEEVIMESTAQYWRPVWATLEQRWRPKRLQEGTGARSGQLHLAQAQSNRGAAGRKKDFPDAERLVKRLVAQELKLSFVPDVEQRLWRTIMRRKHQLTRNRVQFQNRLECLLEEAHIKLSSLVSDLLGKSARQMLQAVAEGATSPEAIAALADHRLRATAQQLCDALGACRDIHPVYRRLLKMALEELKLIEEQIDKLDQEMASLLSAHQDVVQRLTEVPGLGVDSAQQIIAEVGPAAAAFPSAKHLVSWVGVCPGEEESAGVNYSHRSPKGNRQMKGLLNQVSNAAVKTKGSIFEFIYRRLVPRLGHAQAIGAIAHRLCRLIWIILHRAIRYEERGPAVSRSKTERRAAKMIRELRRLGYHVEPMTCQTGVSV

SEQ ID NO: 449511 - protein, 349 aa, unidentified
MPKSNTAVVTIGIDPGKNTLHLVGLDARGAIVLRERVARARIVSRLANVPPCLIGIEVGMGTHYVTRELLALGHDVRQVPPVYAKPFRQTHKNDFRDAHAIAEAVQRPTTRCVPPKTDEQLDLQALHRVRYRLVGQRTAIINQIRCFLLEHGIAVRQRLHWLRQALPDILAQRADVLSPRMVRILEDLAQDWRRLDDRIEAISGEIEALSKTTEPCRHLMTIPGIGPIISSAVVAAIGDGTAFTRGRDFAAWLGLVPKQISTGDRTILGRITKRGNRYLRMLFMQAARVVLLRPRNWMKHSYGPWLAAAAQRLHHNVLATALANKLARIAWSVLAQHRVYEARLSLAAV

SEQ ID NO: 449512 - protein, 366 aa, unidentified
MLGPKEAEVKIIGCDLHARQQTLAMLDTTTGEVEKKILKHEANNVREFYSHLAKPVRVGIEATGSMQWFLNLMEELGIECLVGHPTQIRAAEPRKQKHDRRDAELILSLLAANRFPAIWLPSKELLDLRALLRHRHQWVRLRVKIQNALQAIALANGLRRGSSLWTQAGQHAIASLPLSPHATYRRNELQRMYVQFETEIEKLNQRVDQQARERVGARLLMTHPGVGPITALATEVFLGDPSRFADSKELASYAGMIPGEHSSGKRQRLGGLTKQGNPLLRFLWSEAAIHAVSRDPELKHFYRRKLIQKGLGKARAAAARKLGIRMWIMLRDRIEYNEFCRRGQMQQSGDACAGMPGPRYGAKVTG

SEQ ID NO: 449513 - protein, 475 aa, unidentified
MNSKGTKKKNQVVTANIFEQQEIIARAEEIKKNLSASTWHELETNGKFDKNKKLSFISDDMLILGCDVGSEIHYMRAIDTRGRELSKSAFPFNNDSEGFQSAKEWAVRIAAEHDKRQIVLGLEPTGHYWFCLATWMISNGISVVQVNPYAVKQTKEVEDNSQLKDDRKDPKLIANLVKDGNFGMPYLPEKLYAELRRLSMFRDQLNEDRIRSINRLHREMKIYFPEYKDALGKVDGAFSLELLKQAPFPDDLTALGTDGIRQIWHDAKLRGRGYSRAGEILKYAKVSVGIKDGADAGRTAVKWFVQRILELDAELAIIEDQINQKCREIPHAENILEISGIGENTLSGILAELGDISRFDDVKEIQKLSGLGLVACSSGKHKGETKISHRGRKRLRYWLFQAAKSAVAHAEEFKELHVYYTTRKDNPLKKMQSLIVIACKILRVIYTILTRGTKYDPKKMLGDIVRPNQQLTQAA

SEQ ID NO: 449514 - protein, 359 aa, unidentified
MRGQRNEISFRGQKIYIGIDVHLKSWSVTVLSETSVLKKFSQHPSPEALHGFLARSYPGAEYHSVYEAGFCGFWIHERLTALGIDNIVVNPGDVPTKSSEKLRKSDAVDSSKLARSLRANELKGIYTPDSASLEMRSLIRLKNSITKDTTRQKNRIKSQLRYLGIGIPQEFLEPFSNWSKRFIAWLKEVETLTPSGRQALDIQIRHLEELRRQKLEMTRALRTLAKTDRFREPLRLIMTVPGFGQATGMAFLSEICDIARFRNAEQLAAYIGMIPMCHSSGEKDGTGDITVRRNAVMRCNLIEAAWVAVRQDPAMNLFFTEQCKRMPKSKAIVKVARKLVNRLYFVLKHQTDYVNSVMS

SEQ ID NO: 449515 - protein, 356 aa, unidentified
MNSTKYIGMDVHKEATTIAVMNTAGKLVMESIVETKAATIVQFLEGLRGELYVTFEEGTWAAWLYDLLKPHVTKVVVCNPRKNALLKAGNKSDRIDARKLAELLRAGLLSPVYHGETGLRTLKELSRSYLAISKDLTRTMNRIKALYRSWSIPCGGISVYAPRHRAEWLSKITEPGVRRRAELFYQQLDGLQKLRQQARCDLLAEIRKHGAAKLLERIPYIGPIRSALLIALLQTPHRFRTKRQLWAYSGLALETHSSGEYHYVQGQLQRSKRPIALRGLNQNHNHDLKSIFKGAATKASSTKGPFHDFYTGLVAKGMKPTMARLTLARKIATITLLVWKKGVCFDAQQLKRQVSV

SEQ ID NO: 449516 - protein, 342 aa, unidentified
MKIIGCDFHPSFQQIAMVDTETGEQTEKKLTPAETVQFYGQLSGPVLVGMEACGNTLWFERLLAKLGHQLWLGDAGKIRALEVRKQKTDRRDAELLLQLLLEKRFPRIWVPSPEQRDLRQLLLHRHKLVGMRRQVKNQLQHLALNQGVQQKHKLWTAGGRKQLEELALTGWTAQRREELLLLLDDLEPRIGKLDQAVKESAEKDRVAQRLQTHPGVGPITALAYSLTLGEVGRFAHSRQVVSYLGLNPAEHSSGGRQRLGSISKQGNPMLRSLLVEAGQSAARLVPELKRAYQRLKHRKHSSVAKVMVARKLAVRLYWMWRNEQPNSATRMQGSPSHPVAEV

SEQ ID NO: 449517 - protein, 367 aa, unidentified
MTFIGIDLHTNRFTCCYRDGHSPPEGKRTETFEISMLGLADFYKTLNKETYVLLEATITTFSFARLIQPLVKEVIVANTYELKQISLGRNKTDKIDADKLCRILKMQVLSGESTISPVTIPPVEIQELRGMFCTCRLLKKQTVQIKNRIHSLLKEKLHGFTQEHIFGKGSRKSLRAMEGDPVLSFQINELFETLEYMEAKIEVFEGKIKERAEPFMREINILTSMKGVSVFIAIAIIADAITVDRFKNSKAFTSYLRSAPRVESSNTTKGNKGTNKMGRKLAATLLTQILNHALDGSPKLEKWYNRLTQYKKAGSVRTGLRRRVFAEIYQMLKKGEYHYGRDPKKHEEKMRQYKRFLEKGKNLLKSA

SEQ ID NO: 449518 - protein, 380 aa, unidentified
MKTHLKFVGLDVHKDSITIAVAEHGRDGEVRILGTISSDLHALERALTKLRADGATLHVAYEAGPTGFVIYRHLQKMGIACLVVAPSKMPVPGGKRQKTDRRDADLLARLLRAGELAGIAVPDEVDESVRDLTRTRSDAVDDLRRAKQRLKSFLLRQGYHYHGTADWSDKHLRYLRQLSLPHAAHRAVLEEYLLAFDQCVSRVARLDDLLAAQVPQWRMYPAVQALMNLRGFQLIAATVLVAEIGDIRRFAHPRHLMAFLGLVPHEHTTGDSRRLGAITKAGNVHARWMLVETVQSALRPPKVSKELTERQEGQPADRKELSWKTQCRLYKRGWTLINRGKLKPKVTVALAREMAGFVWAMLQLVPAPTPPPAGPALRRA

SEQ ID NO: 449519 - protein, 345 aa, unidentified
MNLTQNDRLKQVTSDTLIVGVDVGSKTHFCRAFDWGGFELSRRVFKFSNTGMGFFTFLRWTEELMNKTEMKKVIVGCEPTGCYWLTFQKFLQDHDIQLVTVNPFTVNRSMELDDNSPEKSDLKDPKTIALLVKDGRFSTSYLPSGVYAEIREASVCRDQIMKQHVRLSNQIQGWIQKFFPEYFECYADWDSTSGLMLLREAPLPQDILKIGAGGINQIWRNAKVRAAGIKRAQTLVEAAQNSVGLEAGEAARLEIWVLVNDYILKAEQQKRLDEYLEEKVKEVPNVEKLLAIKGVGMSTVIGFIAEVGDIGRFTDPKQIQKLAGLEIVKKSSGKKKGQPRISQRG

SEQ ID NO: 449520 - protein, 371 aa, unidentified
MKEFSKYVGLDVHKETIAVSVAEAHCGEVRYLGEIANTPEAIEKLVKQLRKGGANLSFCYEAGPCGYGIHRQLTDLGWDCQVVAPSLIPKKAGDRVKTDRRDSLMLARLHRAGELTAVWVPDGAQEALRDLTRAREDMKHLQRQAKQRLLAFLLRHGKRYDGKSNWTQAHYRWLEAVKFDHPVQQIVFQEYVDTVKAMTKRVAAFDKQIESAATESVFWPVIEGLMSLRGVNLLTATTIVAEIGDLRRFASAPQLMAYLGVVPSEHSSGGTKSRGGITKTGNGHVRRVLVEAAWTYRHPARKTTVLQKRAERTSEAVQEIAWKAQTRLCGRYRLLEGRGKLKVQACTAIARELAGFIWAIGQALPQPTVKA

SEQ ID NO: 449521 - protein, 339 aa, unidentified
MKLYTGLDLHSSNSYLGIIDETGKRVFKQKLPNERERILEALKPYQNDIAGIVVESTYNWYWLVDLLMDAGYQAHLANPAAIKKYTGLKFADDQHDAFWLAEMLRLGILPEGYIYPKEDRPVRDLLRKRMHLVRLRTSLIVSLQNILCRNNGYRLKTADVKALCEDRVAPLLTRNEDLALAGMVSKEAIDFLTRQIKKIEAVIEDKVELKPSYAKLQSVFGVGKILALTIMLETGPISRFAKVGNYASYCRKVSSKWLSNDKVKGKGNKKSGNKYLAWAYSEAAEHARRSYTPARTYYNRKMQKTNFMAAHNALAHKLARAAYYVMRDNVNFMPERIFV

SEQ ID NO: 449522 - protein, 347 aa, unidentified
MNFYNNTHPYYCGIDLHARSLYVCIIDQEGNTCLHKEITASPDKLQALLEPYMGNVVVGVECMHCWYWVSDFCEDLGVDFILGHALYMKAIHGGKAKNDRIDSFKIANLIRGGNFPLAYVYPKQMRATRDLLRRRMKIVRHGANLKAHVGNTTSQYNLPPNKVNLKNVSAREQLKSTFPDQVVQRNIDLDMAVLECYARELSKIEWFLEQQARQHNPVHLHILKSVSGIGRILALTIIYEIGDIHRFESVQKFASYARLVKCKAESAGKSYGTQGNKIGNAHLKWAFSEAAVLYLRGNKKAQKYLQTLQKRMTKAKALSVLAHKLGRCVYFMMKNEKVFDESQFLKS

SEQ ID NO: 449523 - protein, 401 aa, unidentified
MSKKNTRNALDTSLSYAVIGLDLAKADCAVAAVPCADDELGLIDRMDYESLFEQAEKLGPTLFAMEPCCGYSQISLRLQNMGHEVKVISGHAVKNWIATHKSNQKTDLNDATALAKLALYDHDLQPIRVKNVEECRIASVQAIRIQLRTQATKSLVCFKSLCQCWGIVIRRGSLNTKKMAEAVAAVEKLLGAEVASSLMILRDAYKFTMKQINALDKLLDALVEANEQARTMKTVLGIGTQTAARLAVTTGDIKRFPMPRSYVAYFGLAPRNIITGHSGTPSPSKRGALKPVSSRGQGKVSRRGDRVARSFIIQGAATIYMLYCKDMLPECQLRRWLHEQIKRGKPYGKIIVSLAAKLLRIVWALLTYGEKFDSHKAGVPRSVLAAMEKPLKHDAAAESAA

SEQ ID NO: 449524 - protein, 340 aa, unidentified
MATLALLGIDIGKNFFHLHGQDIKGHQVLRKKLSRNQLLPYVAQLPSCVVAMESCGGAHWLARKIIGLGHRVKLIAPQHVKPYVTGNKSDYIDAEAICETASRPKTHYVAVKTVEQQILSTQHRLRESLVGRRTATINQVHGFLLEFGIIFPATFGALEQVPALLDDPAYDLAPLFRRLVEQLLGDIKRLTVEIKAMELAIKEQLAANDAAQRLLSIPGIGPITASAVVADVGDASNVASSRDFSASLGLVPRQYSTGGKTVLLNISKRGDKYLRRLFVQCSHSIMRGINKREDALGAWVRNLLTRKHPNKVACALANKLACIVWSVLARGGTYNPQYMG

SEQ ID NO: 449525 - protein, 339 aa, unidentified
MKDITTIGIDLAKNVFQLHGVNDTGKVVLRKRLTRRNILPFLANVRPCRIGIEACCGSHYWARELELLGHEVLQMPPQYVKPYVKTNKNDANDAEAVCEAVSRPNMRFVPTKSEEQLNLQALHRIRERLVRNRTSLCNQIRGLLLESGVSIPQGVSKVRCALPAIFEDLSNQMTLIEQDFLSDQYTELVDLDAKINKYEGQLETLAKQSTECQKLQTIPGIGMLTATALVSAIGDAQAFKNGRQLAAWLGLTPRQHSSGGKDRLMGITKRGNCYLRKLLVHGARSVIYRCRNKDDSRSKWLAGIEDRRGTMKATVAQANKTARIVWAVLAKDEIYRQAA

SEQ ID NO: 449526 - protein, 355 aa, unidentified
MSQEKYIGMDVHQATISVAVMDAGGKLIMECLLETKASTMLEFIQGLHGTLALTFEEGTSAAWLHDLLKPHVSRLVVCDPRKNALLKDGSKSDRIDARKLAELLRTNQVKPVYHGEHGVRTLKELGRSYLTLTQDVTRVMNRIKALYRSWAIPCSGTTVYAPRHRAEWLAKIVEPGVRMRAQRLYQQLDGLQPVRLEARLELLRESHQHPAVKLLRQIPSIGPIRAALLVALLQTPHRFRTKRQLWAYSGFAVETHDSGEYRYVKGKLQRNRERITVRGLSDNYNRDLKNLFKGAALSASTRPGPLHDFYEALIAKGMRPTMARLTLARKMIAITLTIWKKGVSFDPQQLHRQAA

SEQ ID NO: 449527 - protein, 470 aa, unidentified
MPLQEVAAQMKVLYERVAGIDVHKDMIKVAIRSPGEKRWTRKTEIFEFRTFYGVLQEMARELRRRGVTHVVTEASGVYTEPVYHALCEQDFEQVAVINPAHAKALKGHKTDAKDCARLAELFECGLLHGSYMPSAEQKEVRDLTRYRMKTVQARTSGIQRLAKALESAGIKLGSVVSGITGVSATAMIDALIDGERRGAMLADLARGRMRTAGKLADLSMALTGRFTEHHALLCRLHRDRIAGFDVAVADLDERIAGKAARWHCEADLLTTVPGFGDVVTWAWLAEIGPAPHLWFASHEKLASWVTLCPGNNISAKKRKHGRTGDAGTYIKPMLVQAAWAAIRTRGRLQARYNRLVRRFGGDKNPGAKKKAITAIAHTLLKIAYQVLKSGMPYAEPGADFYTRRESPDQRRKYHERQIQKIYPDRTVTVIIGPPPQSPPDDNDAPGGPRAATRDPACALARPPDRHTPDR

SEQ ID NO: 449528 - protein, 352 aa, unidentified
MITIGVDAHKRVHVAVAVDDAGREVARWSGPNSPSGWRQLGVWGTTLGPECRWGIEGAWNYGRGLAQDLIGAGATVYEINPRWTAQQRQRARKPGKNDRLDARAVALLVWREAATLPAVTPDDETAVLDLLVTEREGAVAEATRLRNQVHQLLLQLDPEYHTHLPRLRTAAGVAAAARYTATAPGPLAQHRAGAVRRLAERLQLALAQAKALAAQITGLAVARFAPLTQICGVSLLTAGALAGILGPGRRFATDAQLAAYAGVAPLEASSAERVRHRLSRGGNRRLNAILYRIVLTQSRHAPAAQAYLARRVSEGKTRREAVRALKRFVVRAIWRRWQECLAPEATLAPLAA

SEQ ID NO: 449529 - protein, 343 aa, unidentified
MQIHSVGFDLGKTTFHLVALGAAGKVLVKKKFTQRQLLIYTANMQTSLIGLEACSGAHFLGRALRKQGHDVRLIAAQFVKPFVKSNKNDFVDAEAIAEAVERKNMRFVPIKTDDQLDLQAIHRVRDRLISRRTAVINQLRAFLLERGMVFAQTPAKLKAAMADILENAEADLTPQMRNLIDMLWSEWKTVEQQIEELTTQLERISAADAGCTRIRQIPGIGPIVATAIVAAIGNGAAFRKGRDFAAWLGVVPRQYSTGGKAKLLGISKRGNVYLRKVLIHGARAAVLRIKRDRAPIGPWLDRLDARAPKNVVVVAMANKLARIAWAVLSSGEDYRPLPIISAT

SEQ ID NO: 449530 - protein, 340 aa, unidentified
MKKVSTIGLDLAKNVFQAHGADASGDVIFRKKLRRAQVLEFFATQPACTVAMEACGGSHFWGREIGNYGHRVRLIPPAYVKPFVKRQKNDAADAEAICEAAQRPTMRFVAVKSEAAQGAAVVFRTRDMLVRQRTQIINALRGHLAEFGLIVAQGPAHVAKLIMAVQDPKQPLSEAARPILCVLVDMLGLLDQRIKLLDIAIARRAKEDEVARRLMSIPGVGPVIATAMAALAPPAETFKRGRDFAAWLGLTPLQHSTGGKQRLGATSKMGERTLRRLLIIGASSVVRWAARKGAPAGSWLASMIARKPAMLVRVALANKMARVIWALMAKGGTYRAPVVA

SEQ ID NO: 449531 - protein, 351 aa, unidentified
MDHIGIDVHKKDSQICILAEGGELIEQRIRTELECFAAVLGARPRARIVIEASTDSEWVARCLEGLGHEVVVADPNFAPMYATRTRKVKTDRRDARALADANLLGAYRPAHRLSDPQRHVRGRLTVRDAIVRTRTRYISLIRALLRQQGYRVPSGSAEGFLSRVRALTLPGRLGSTIAPLLAVMRHLNAQLAYSDETIARVTAHDERVQRLRTVPSVGPVTAAAFVATLDDAQRFRHAHQVEAYLGLVPRELSSGETQHRGHITKAGPTRMRWLLIQVAVSILRRRPPQAEALHAWALHIAARRGKHIAAVALARRVAGILYALLRDGTTFDPRRAPRPAGAATLPASAMG

SEQ ID NO: 449532 - protein, 453 aa, unidentified
MSRVTELPNEFEQINTNAAGIDIGAQKHFVAVPPGRDPQGRDVRHFDTFTTDLYALADWLQHCGIETIAMESTGIYWVPIFEILEQKGFHVRLVNPRSIKHAPGRKSDVVDCQWIQQLHAYGLLTGAFRPEEDISVLRAYHRQRTMLVNHAATHIQHMQKALEQMNLKLTNVISDITGSTGMKIIRSILAGERDPQKLAQHRHARCKKSLQEIQKSLHGNWRDEHLFALRQAVELYDFYQGQIQACDKKIQAQLCRFENRSGTGKLPPPSGKRNRSTKKLSFEAREHLYRMAGVDLTQVVGLDTPTVLTLLSEVGLDMSRWPTAKHFASWLGLCPGSKISGGKSLSSKSKPSANRAAHAFRMAAYSLHRSQSAIGAFLRRKKAQLGAPKAITATAHKIARIFYTMIKTRTEYKDLGVDYYQNRYKERMLGNLKRKAKAFGFTLVDQNQLVIEN

SEQ ID NO: 449533 - protein, 357 aa, unidentified
MEKLYLGVDLHKRSCWVTVLDADGHLLESRKLGTEKWELLGYFGKVKKPAALAVEATFNWYYFLNVVEPLGLELHLVHPWKTRAIASARIKHDKLDSRVLAELLRTGFLAEAWIAPRQVREQRQLLRYRVHTVQWATRAKNCIHGILNRNGIRSPLRSPFGPQGRAFLAQSELPGTDRWEVDGQLERLDLLRHQLGELDREIRQRSQASPIAQALEEIPGIGPFIASLLIAEIGDIQRFPTAKHLASYTGLVPSLYASGEHRWGGAITKQGSTVLRWALVQAAHRAALSPRFQDFYQRQRERHGAGKATVALARKLAVIAYYRWRQALHASSPPLKVEKVRECSCGSAWSKHRPLHV

SEQ ID NO: 449534 - protein, 306 aa, unidentified
MSKRVGIDVCRQWLDVHVHGLQQARRFANQAAGLRQLRDWLAPLTLHQVVVEATGGAEQLALETRHAASLPMVRINARQARDFAKATGQLAKTDRLDARALPHMAAVLPLTCDQPLEDWRRQLRAYQQRRMQVVAMVQQQRQQLSMLTDAWLKRQAHSAVRQLQQQVAQLDARIAQQLAARAELQVLRQVTGVGPVLLASLAAQLPELGRLSGKAIAKLVGVAPLARDSGAMRGVRRIWGGRAGIRQVLYMSTLVAVRFNPPVRDFYQRLRDKGKAGKVALVAAMRKLLVILNAKMRDQLAAATTC

SEQ ID NO: 449535 - protein, 390 aa, unidentified
MIYVGIDVAKDKHDCCILGLDTEELFQVFTVPNNSDGYGELFHKIESVSKDKSQIKIGLEATGHYSYNILGSLLDHGYHTFVINPLHTNLYRKGQSLRKTKTDKVDARSIAEMLVTDKTLKPYTGTSYHSEELKSLTRYRFELVKERAKMKTSVSRLVNILFPELESLVPTLHMNSVYRLLQELPGAYFIASSNLTHLKALLADASKGRYGREKAIEIRETAKSSIGSLMPAKSMELRQTIRRIDTLTSDIKEVEQSIQKIMDECGSPITTIPGIKYRMGAMILAEIGDFTRFSNADQVLAYAGLSPSTYQSGQLISSYAHMEKRGSKYLRYALFNAAKYASAWDERFRLYLSKKRAEGKHYYVAISHVIKKLVRTIFRMEITHTSYQPL

SEQ ID NO: 449536 - protein, 370 aa, unidentified
MGDGSKVFVGLDVHKDSISVGVAQSGQQSARFVGKILHDVPKLLKQLEQVASPGSMAIVYEAGPTGYGLQRALTDRGYDCQIIAPSLIPRRTGERVKTDRRDCLRLAELARAGELKAIWVPQPADEAIRNLARAREDAVNLRTQARHQLKAFLLRAGVTYSGKTTWTKTHARWLATLSFAYASDQIAFTQYCQTVSGAHARVQRLTAALSQAIAGWRFEPVVRALQALRGLDEVAAIGLVAEIGDIGRFAHPRQLMGYLGLVPTEASSGERVRKGAITKTGNAHARRLLTEAAWNYRFTPRVGYRAQRRQEGLSEAICAQAWKAQLRLTTRFARLRARNLQINKVCVAVARELAGFIWAIAHTATHPATP

SEQ ID NO: 449537 - protein, 449 aa, unidentified
MSDRSGVSRGDRNRNARLARLREAVPLSNAIAGIDLADSKQMVVVTDHESRVLARRTFRRRAWELGVALDWAAARAAAAGFAGVTVAVEPTGHRWQVVGQLAGERGMSFVCVQPLMSAWARRAEDLTFDKTDDKDAVLIARLAGQLRCYLPEPADAIWGRLRHLGIRRARLVADQVAQVQQMRDLLECVWPAVLDAARQPFKSTTWHAALTVALARADGGDLGRVTRLGRRRFDAAVRRQVARWDAVHPWQKIINAVLAACADPAGVTEMRHGALERVLLLLADWRDTRARLADTEQRMVAVLGELGLTELVTSITGLSAVGAASILAETGDPARFTSGRALVKHAGLAPRQKSSGNYTGRTRTTGQGRPALRLAAWRAVWGALKSNPVYAARFAYLTSREHNPLSTGQAHAAIAAALLRHLHAVITTGQRWDPAIAAGGKPNQTLIAA

SEQ ID NO: 449538 - protein, 339 aa, unidentified
MALYGGIDLHASSNHLGVIDGDRRRIMRKKMANDPELILRVLEPYKADLVGIVVESTYNWYWLVDLLMDEEYKVHLANPCAIQKYAGLKHADDTHDAFWLAELLNLGILPEGYIYPKEVRPVRDLLRKRQHLVRLRTSLILSLQNVVVRNCGVKVSSNRIKQLTEDHVHPHLLNNEDLALVGTVSKESIDFFTEQIARVESVVLERVKLQKPYQKLLTLPGVGKVLALTIKLETGPISRFAKVGNYTSYCRKVASKWMSNDKMKGKGNRKNGNKYLAWAFSEAAECARRYHDPSRAFYNRKMSRSNFMVAHNAVAHKLARAAYYMMRDNVPFDEAKLYA

SEQ ID NO: 449539 - protein, 424 aa, unidentified
MATRLRFVESKGIFGPQPIKQFRAENMYLNIGIDIAKNVHEVCFVDENGKQIGNFMKLKNSRKSLEKFRNKIESISKELNAKPRIGIEATGIYWYSLYSELSKYYEIQVYNPSQISGFRSVNIRVSHNDKIDSRTIANMLRFGEAPKTDYSDKQILEMREYCRFHFKLITIKTNLKKRFRRNLHLIFPGYDMVFKNVFTKTSRGILVQSPTPDDILDMGTEKLRDLMKDLSRNHINPDKANELMEKARDTIPSEIIKESALFELQMLLYLIETLEKQIEEVESKILIIWDSVKDRYYTQTITGIGDIRVATICAEIGNFDHFSHPDKILAFAGLDPKVTQSGNKEIVRGPNKRGSKMLRWALGWAVEEAKRTNPVIGSCFQKKLDEGKHYNTARCATAKKLVRIIWSVEINKKPFQIPPNYLSS

SEQ ID NO: 449540 - protein, 405 aa, unidentified
MDIIIEKGCGLDVHKETVVACIMGTGIRKEIRTYTTMTHDLLRLRGWLQEAGITHVAMESTGVYWKPAFNILEDHVEVILVNARHVKNVPGRKTDVQDSEWLCRLLRSGLLKGSFIPPRGIRELRDLTRYKRKLIQAISAEKQRVEKVLEDANIKLSSIASDTFGASGKRIVEELIRGKLEAEEMAELSRGRLRRKREHLKEALVGEVREHHKFMIKTSLQHIRAMEKILLGIEAKIREKIERDYKEEDKLLQTIPGVKENASTVIAEIGVDMDIFPNEMHLSSWAGMSPGNNESAGKKKPGSTTHGNKSLKAMLIEFAWVASRTRDTYLRSKYHSLVGRRGKKRALVALGHKILIMCYHILKYKRPYKELGADYLDKRRKDKITRNYVKKLNHLGYEVILQEAA

SEQ ID NO: 449541 - protein, 348 aa, unidentified
MSWNLSAAVAVIGIDIGKNSFHIVGLDGRGAIVLRQKWSRGQVEARLVNMPPCLIGMEACVGAHHLSRKLKAFGHDARLMPAKYVRPYSKGQKNDFRDAEAIAEAVQRPTMKFVATKTADQLDLQALHRVRERLVSQRTGIINQIRAFLLERGVAVRQGLRFLRAELPRILAAPPDVLSPRMVRVIEGLAEDWRRLDERVNHLSGEITALARQDVGCERLMSVPGIGPIISSAMVAAIGTGDAFSKGRDFAAWLGLVPKQISTGDRTILGKISKRGNRYLRVLFVQAAWVVLIKPKSWERHGLKHWIEAAKKRLHRNVLAIALANKLARIAWSVLANGRIFEARLQAA

SEQ ID NO: 449542 - protein, 322 aa, unidentified
MSQPGSLCVDIDVSKAILDIAASSAIEQFSVGNDSDGFDAIIAELRMYAIALVLMKATGGLETAIVCALQAEGFELAVVNPRQARDFARAMGYLAKTDSIDARVLSQMAEVLNRHPERERFIRALPDTECQVLTAMVVRRRQLITMLVAERNRLHPAHPLNRKSINIIIKALEDELARLDADMNSHIHSHFKELAKRLSSIKGVGTMTAAALLAEVPEQGNLSRREISVLVGMVPVNRDSGTMRGRLTIFGGRAGVRTALYMAALVATRFNPVIKVFYMRLLAAGKPKKVALVTCIRKLLTILNAMLRKNEEWNESYHHVAP

SEQ ID NO: 449543 - protein, 318 aa, unidentified
MTCAGIDVAKEHLDLAIGFGSEEEVETHHFENNSEGIAQLEELLCEADPERIVLEATGGYERPVSAALGAAGLPVAVVNPRQVRDFARATGRLAKTDEIDARILALFGERIQPEIRPAPSKDQEVFSGLVTRRQQLQKMKTAEQNRLGTAPSDAVRADIEEHLSFLEERLAETERQIKEAIENSSLWREEEDLLCSVPGVGKKTAHVLMAELPELGEANRQEIAKLAGVAPLNCDSGKRRGQRSTWGGRASVRKALYMAALSATRCNQKIRTFYDRLIDRGKAKKTALVACMRKLLVIMNTMMKNGTQWNPEYQPSSA

SEQ ID NO: 449544 - protein, 341 aa, unidentified
MKPAMSVLGIDIAKRVFHAVGMDERGKIVLRKRLSRHDLMPFLAKLPPVRIGIEACGGAHDWARRFREHGHEVKLMAPQFVKPYVKSNKNDSRDAEGIAEAVTRPTMRFVPIKDVDQQDIQALHRVRERLMGERTALVHEVHGLLHEYGIVSPKGVSKFRQAVVGKLESEKDKLTPLSQEMFWKLVEEFAALEAQLAYYQEKLDTLAQSHPECQRLMTIPGIGPLTATALVAAVSDASAFKNGRQFAAWLGLVPRQYSTGGKERLLGISKRGDTYLRKLLVHGARATIRWVGLKTDRRSQWIRQLVERRGKNRTAVAVANKNARIVWALLTSHQDYQPATS

SEQ ID NO: 449545 - protein, 454 aa, unidentified
MSKSAKPREEMMSLEVVHPNAAGIDIGNAAHYVAVPPDRDAEPVRTFECFTEDLNKMADWLAQCGIVTVAMQSTGVYWLPEYEILVQRGFEVFLVNARHTKNLPGRKSDVQECQWLMKLHTYGLLNNSFRPTEEICVLRTYWRQRDDHVKSASASIQRMQKVLTEMNVQIANVITDISGVTGMAILNAILEGERDRYKLAELADRRVKASKEDIAKSLEGNWRPELLFVLRQQMQIYGVYQKRIRECDEAIEAHLKTMEDQAEPGSKPQTPKAGKRAGGNAPQFNLRGELYRISGIDLTRIDGINVMTAQTIMAEVGLDMSKWPTEAHFASWLGLCPDNKITGGRVYHRGSRHVENRAATAFRMAATSLWRSRTYLGAKFKRLRANLGAPKAITAMAHTLARLVYRMLKYGQDYVDKGMEFYQQRYQKQQINWMQKKAKDLGLVITLTAAPAAN

SEQ ID NO: 449546 - protein, 338 aa, unidentified
METYAGIDLHSSNNFIGIINEQDQRLYGKRIPNELDRVLSALEPFKKELSGVVVESTYNWYWLVDGLKDNGYKLHLANPSAIKQYEGLKHTDDKWDSFWLAHMLRLGILPEGYIYPKEDRPLRDLLRRRLLLVRQRTTHILSLQSMINRNLGIQISGNGIKKFKEADAEKLFDQTYLVLAAKSSILVIRFLKEKISIIEKEALSLLKHCHGFNCLQTIPGIGNILALTIMLEVGDIGRFPTVGDYSSYCRCVKSERFSNGKKKGTGNRKNGNKYLAWAYVEAANFAIRYCPYSKKFYQRKKAKTNGIVGIKALSNKLARASYYIIRDQVTYDVKKLFG

SEQ ID NO: 449547 - protein, 411 aa, unidentified
MAGRRRKVKQEPRRLAGIDWASRAHAVCVLEPGGGIRARFDVPTTGKSFAGLIKRLAKLRVGDVAIERPDGPLVEAMLKEGIRVFVIAPRMLKALRQRYGATGAKSDPGDAYVLADVLRTDGHRLKPIQADPPETKVLRALTRTRKDLVEARVALVNQLRAQLELCFPGAIGLFNELDSAVSIAFLRRYPTALRARALGEARLAAFLRRIGYCGRRPVGELLARVKEAPAAGIAGAEAEGRGVCVLALLDAIETCNAQARELEAEVVERLELHRDAHVFTSLPKAGRGVRAASLLAEIGDARERFPDEESLGALTGVAPVTRASGKARSVGFRWACDKKLRNALIDFADDSRHASPWAARVYTDAISRGKRHPHAVRILARAWVRVIWRMWQDREPYDVTKHGGAAMLQAA

SEQ ID NO: 449548 - protein, 355 aa, unidentified
MVEKELRSYTWRELEVNGKFAKNDKLSFITDDMLIVGCDIGSENHYIRAIDVRGRELSRGAFEFSNTSEGFENAKAWVLALAAKHDKKQIVLGLEPTGHYWFALAAWMISNGISVVQVNPYAVKQSKEIENNSQLKDDRKDPKLIANLVKDGNYGMPYLPEKVYADMRRLSMFRDQLTEDRIRNINRLHRELKIYFPEYMDAFGKIDGAFTLEILKVSAIPSDITALGAEGMKNIWHNAKLRGRGYSRANEIVSYAEKSVGLTDGTDAGREAVKWYAEQILRLDEQLAEIESALHEKCREIPYAENILAINGVGENILAGILAEMGDISRFDDVKEIQKLSGMGLVACSSGKHKG

SEQ ID NO: 449549 - protein, 352 aa, unidentified
MQVATIGLDIAKNVFQVHAIDSDEKVVVRKQLRRCQVLQFFQELPACLVGLEACATLHYWARELAKLGHEVRLMPAKDVKAYVKRNKNDAADAEAICEAVRRPTMRFVQVKSAEQQAQLMQHRARDLLMHQRTQLINALRSHLAELGIIAPQGREGIKELLAIIANDANTHLPNDARASLIVLAAQLQALQTTIGAIEKRITVQHRATKESKRLQTIPGIGVIGASAIAATVTNPKIFRSGRDFAAWIGLVPRQMSNVDRGESETRADIQTGRPLPAAHPRGRSGFCPAPGQAQSAEISLGDAAPGTATVQGCRGCACKQDGAHCLGAVDQRQDLSICLVCGSVSRSLPRGV

SEQ ID NO: 449550 - protein, 475 aa, unidentified
MNIKGSKKKNQVLSVNIFEQQEIIAKAEAIKAELKASTWHELETKGKFDKNDKLSFVSDDMLILGCDIGSETHYVRAIDTRGRELSKSAFGFSNTAEGFESMLDWSTKLAAANDKKQIVLGLEPTGHYWFCLTTWLVAKGISVVQVNPYAVKQTKEVEDNSHLKDDKKDPKLIANLVKDGNFGMPYLPEKLYADIRRLSMFRDQLNEDRIRNLNRLHREMKIYFPEYKDAFGKIDGAFSLELLKAAPFPDELAALGTEGMKQIWHEAKLRGRGYANASSILEYARKSVGIKDGADAGRQAVKWFVSRIIELGEQLSDIENQLNQRCNEIPYAKNILAISGIGENILSGILAEMGDISRFDNVKEIQKLSGLGLVACSSGKHIGETKISHRGRKRLRYWLFQAAKSAVAHSEEFKELHVYYTTRKQNPLKKMQSLIVIACKILRVIFTILTKGTTYDPKKLLGDIVRPDQSIPQAA

SEQ ID NO: 449551 - protein, 393 aa, unidentified
MLYLAIDQHKNHLTINIRNEQGDVMQKGQISTNHADIDDFFGTFAKKARKHRGYMAIVEVGSFNDWLLEKLKKTHCSEIVVIQPGKPGVHKTDKRDANTLGELLWNNRKRLQGGQRPNGIRRIFPADLADAQVRQLANFRQHLIKQRTKTINKIKGVINKHNMAQDAPTQDCDTKKFRQWIATVQLPVVDRIEVDMNIQSWELYDKQILNIEAELVKRSEARLADVFRLKAIPGISAMGAITLLSRVGDITRFKNPDSLANYFGLTPGCRNSAGKHRIGGITKRGNAVARQVLNFAVNHVIRKDSEMKAWHKKIKSKKGTKTARVAVMRRLATIIWHILRWGKPYQFRYDPPLVTLKKDDLRSSKEVLGGIGNRNHSKRKKGTPLKCRSKTKA

SEQ ID NO: 449552 - protein, 343 aa, unidentified
MQAVTTIGLDIAKSVFQVHGIDAEGKVLIRRQLKRRYVLAFFEKLPPCLVGIEACASSHHWSRQLKALGHTVRLMPPAYVKPYVKRQKNDAADAEAICEAVTRANMRFVETKTPEQQSCLMLHRTRQLFIRQQTSVINAIRAHLAEFGIVAPVGRKGVEQLLAVVADASDRRVPELARACVAALGAQLRGLKAQILEFDRRILAWHRSNETSRRLDAIPGIGPALATALVASVADPKAFRSGRNFSAWIGLVPKQHSSGGKDRLGSISKQGDRYLRSLFTAGALAVIRYAKLHGTEHRPWLTALLARRPTKVAAIALANKIARMAWAMMAKGERYKEPVALAA

SEQ ID NO: 449553 - protein, 404 aa, unidentified
MVFLGVDWAEEHHDAWLENEQGEMLGKARIGNDVGGVRQLHELVAEHADDPSQVVVGIETDRGLLVAALVGAGYQIYAVNPLSVSRYRERHRTSGAKSDRADAKLLADLVRTDRHNHRPLAGDSDLSEAIKVLAREHQDLVWTRKRFINRLRSALREFYPAALEAFETDLGGLDALAVLERAPTPWQGRQLSQAKIVSALRKAGRQRYLEHKAAEIQRALRSEQLQAPSQLQAAMATVVSSCVAMIKSLNLQLEQVGAEMTASFEGHPDAEIYLSLPGLGVVLSARVLGEFGDDRARFADAKARKAYAGTAPVTQASGSKKIVLARFARNRRLADACYWWAFSSLTCSAGANHYYRALRTRGKTHHQALRGLANRLVGILHACLAASQTYSESVAWPQPQEIAA

SEQ ID NO: 449554 - protein, 347 aa, unidentified
MAAVMIGVDPHKGSHTAVAIGTGEEPLGELRVRASAAQAQRLLAWAAGWPERTWAIEGAAGLGHLLAQQLLAAGERVLDVQPKLGARVRLLAAGAVNKNDPNDARSVAVAALRSASRREVTADDHAAVLKVWSKRHRDLGRTRTQVACRLHAVLCELIPGGVSKRLTAAHAGGLLEAITPSGAVEAARCELAAAFLEDLRRIDAQMRDAKKKLTVAVAASGTTVTEVFGVGPVVAAIVIGAVRDVSRFPSRDHFAAYNGTAPIEVSSGPRKIYRLSRRGNRRLNHAIHMAAVTQVSHRHSDGRAYYERKLAEGKTPKEALRALKRQVSDTIFARLQADAQRAAAGTR

SEQ ID NO: 449555 - protein, 369 aa, unidentified
MKKIVKHLGLDVHKSSIVIASADSGRKDGSRYIGTIDNNMKQLDKIIRKYISQGFDVDCVYEAGPCGYHIYRHLTGNGIKCSVIAPSRIPRQSGDRVKTDRRDAESLARLHRAGELTAVYVPTPEDEALRDLVRAREDSKQSLRRAKQQLGAFLLRRNLIFPGRTPWSKAYFKWLADLAMEQPAQQIVLQEYVDTICNCQERVNRITKQIRELSEQSRLKPLIDALASMRGISSLIATIVAVELGDLSRFDHPEQLMAYVGLIPSEHSSGPRVRKGAITKTGNGHVRKALVEAAQAYRLPARKSRAILKRQEGVPEKIQAISWKAQCRLCDRYRRLTGKGKKANVAKIAIARELVGFAWAISHELPQAA

SEQ ID NO: 449556 - protein, 403 aa, unidentified
MSRVFIGVDPHKLSATIEVVDDRETVLATGRFATDKAGYAAMRRHVSAYPNRTWAVEGSNGAGRPLAQRLLADGETVVDVPAKLSARARMFDTGHNRKTDPHDAHAVAVVAVRTKGLRVLAYDAQLEALRLLVDRRAELSRARIQCVNRVHRLLSELVPGRTKRNISTAQAKRILATVKPRDLAGRTRRRLAAEQIAELVTIEQKAKAVTRELKQMVAATGLTLMELPGVGPVVAARTLADTGDVARFTDRNRYASWTGTAPIEASSGEIVRHRLSRAGNRRMNHMIHIAATTQLRHDTEGRRYYRRKLAAGKTKAEAMRCLKRRISDALYRQLVNDAKAAAAADMDAGPGGHCGAALQSSAAGSHPRTGTSDQPQPGPAPTTLPATTTPRKTTRSRTLQPAP

SEQ ID NO: 449557 - protein, 375 aa, unidentified
MKKGIAYVGMDVHKKSINVAMLLPGEKKPVEWQFKNDARSLRRFARKVVREAGVEAWCCYEAGPCGYAVQRQLRAAGVGCVVVAPSLIPIKPGERIKTDRRDARKLAQLFRGGLLTEVCPPTREEEAVRDLCRCREDARKDLTRSRHRLTKMLLRRGLVFGGARAWTQKHRTWLRSIRFEHVAGQTAFDDYFFGIEQLEERVKALDARIEEVAQSEPYREKVGWLRCFRGIDTLTAMIILAELHDFRRFHSAEKLMSYLGLVPSEYSSGESPRRGSITKSGNCHVRRILTEAAWQYRHRPSLSQALRKRREGQPPCVLAIADKAQSRLHHRYWHLVLRGNKPTNKATTAVARELAGFIWAVLYLGAGDAETKAAA

SEQ ID NO: 449558 - protein, 387 aa, unidentified
MDHLIKYTIGVDISKDKFDVCMLSIDVKLRSKIKGTRKFGNTLSGFKEFLLWLTKHSKTDTAVEILMEATGVYHERLAIWLTEQGQQVFVVLPNKSSKYMQALGLKTKNDGVDARGLAMMCIGHRFEQWKPIGRYNYELRLLTRHYQSTQEIKTVFQNQLHALSHSGYTSKEVGKQLKKSIDLFDKQVKSLKKEVVRHIDSNKEVKRKVEHICLIKGVDVLSVATIIAETNGFELFTNQSQLVSYAGYDVVENQSGKRVGRTKISKKGNGRIRRILHMPALNVVRFDETPFKRLYQRVYDRSKIKMKGYVAVQKKLLIVMYTLWKNDLPYSGEHEEKMISGNDEQKDLFPFFSERESKKIVPQLSSTTQDELQYNESLKVLFPLLQN

SEQ ID NO: 449559 - protein, 385 aa, unidentified
MAPTRMPEAVIGLDVGKSSHWACVATRDGEVLLSAPVANREGDLDSLFVRFPDALVVVDQSRNIGALALARARAAGMSAAYLPGLAAHGAARLFAGDAKTDERDAMVIAKTALGIPDALLPVGDPGPTIAAARALAAQRNFLTCENTRNKNRLRSILLESCPDFEALVDLSDGPQLRLMASLGGAWSVADAGPRRAAALTRGAARGKIEALVRSTASSTRPDAAAVAAEDRAVKLLARRISENSAEIEAITAEISALLEGDDTYRCLLTVPGIGPKTASELAISIDIEDFPSHDRLASYCGLAPRNRQSGTSISSVTASRQGNKRLKNLVIFSCNCLTRTEGRWGDYYTRCRERGMSHGKALKALARKRLKVIYAVMRDRVPYAA

SEQ ID NO: 449560 - protein, 343 aa, unidentified
MQTVTTIGLDIAKSVFQIHGIDAAGHVIVRRKLKRRYVLPFFQKLPPCLVGIEACASSHHWSRELQAFGHTVRLMPPAYVKPYIKRQKNDAADAEAICEAVTRANMRFVATKTLEQQSCLMLHRTRHLFIRQQTSVINAIRAHLAEFGIVAPVGRNGVEQLLDVVADVSDKRLPDLARTCLLALGAQLRTLKAQILNFDRQIMAWHRSNEASKRLDEIPGVGPALATALVASVADPKAFRSGRDFSAWIGLVPKQHSSGGKDKLGSISKQGDRYLRSLFTAGALAVIRYAKIHGTQHRPWLTALLARRPTKVAAIALANKIARMAWAMMARGERYKEPIALAA

SEQ ID NO: 449561 - protein, 290 aa, unidentified
MPMLEGQVDAVIGVDTHRDCHAAALLDPNGGVRAILEVPSDRAGHARLVQLAQVQAPGRRVWALEGTGCYGAGLTRFLVDQGEWVVEIDRPKRPRGRHGAKSDVLDAVRAGREALARDHLTSPRQRGHREALRVLHSTRAGIVAAGADARRQLKALIVTAPEPLRDALRGRPWRQQVGACAGLLALPTDPVEHRATVRALALTAQRVLAARQEVKQLEAELRQLVTVVAPALLAQPGIGPISAAQVLISWSHPGRFRSEAAFAMLAGAAPVEASSGQVVRHRLNRGGIGS

SEQ ID NO: 449562 - protein, 415 aa, unidentified
MEGLSPLHRRVAGIDVHRMLHVVTVLIEQPDGSIEKHSREFGGFKRDCRALAAWLSQLQVQLVVMESTGIYWKSVFSHLENAGLNAWVVNAHFIKHVPGRKTDMLDSEWLAVLARFGLVRGSFIPPKDLRELRLVSRYRRKLNAICSSQINRLHKMLDDAGVKLGAVVSDIHGVSARAMVRGLIHGESQATLLTHARGALKRKTEALAASLDGDLSQRHLFVLRHLSQSIDALQAQIADIDAYLMGAMQPYAWAHALLQTIPGIDAIAAALILIEIGDDMARFGSPERLACWAALSPGNHESAGKRKSGRTRHGNNSIRHILCECANAARMTKSTLASKYRSLMVRKSHKKSIVAVAHKMIRLIYILLSRRQPYLDQAIDYAAMSAKKNAPRWIKKLKAIGKWPAPSASVAQAAT

SEQ ID NO: 449563 - protein, 426 aa, unidentified
MNRTQNEKISQIKIETLVVGIDIGKETHYARAFDYRGIELAKLLKFSNAAEGFEHLDRWMQETCKQHGKTEVIAGFEPTGHYWFSLGDHLNHQGHKLAIVNPFHVKRTKELDDNSPTKNDRKDPKTIAMLVKDGRYREVYIPEGIYQELREVVAERERLQKQLNVIHNRVVRWLDIRFPEFNGVFKKWTGKAALQTLREFPTPAKVLEAGEDKILATWRKVVKRSVGPKRAQALVKAATNSIGRTNGHVASEASLQNLLAEYDLYRTQHEQLEQLMWELLLQVPNADKLLKIKGVGMVTAATFVGETGDIHRFADPRQIQKLAGFNLVENSSGKHKGKTTISHRGRKRLRHGLFMTMIAILGKNQEFRELHRRNLTREKNPLNKMQSIVALCGKLIRVFYAILSKGVDYSAEKMMGDMQQSVKVAA

SEQ ID NO: 449564 - protein, 439 aa, unidentified
MLQTINPHAAAIDVGSERLHVAVVNQAVRVFDTFTDSLQALRDYLLSAGVTTVAMEATGVYWLPVYEVLEAAGLEVCVVNGAHVKSLPGRKSDMQDCQWLAELHSHGLLRSGFVPPHDIRRLRDYQRLRQDHIRMGSAHIQHMQKALDRMNLKIHEVLSDLTGLSGLRLIQAILQGVRAPHLLLECCDVQVVTRKREALLKAFKGNWQAEHLFALRQAYEGWQFYQQQIAACDREISAVLGELAASAPPGDTPSGGAPAKRLQHNAPQIADLHKLLLRITGGQDLGALPALSDYSVLQLLSEVGTDMSRWPTVKYFTAWLGLAPSSRRSGKRRRREKRFRNPAGQIFCVVARSLARSKHLALGGFYRRLRAMHGAQVANIATARKVAVLFYNTLRYGLAYVEQGLERYQDLYRQQSLRRLERQARQFGLTLLPATHANL

SEQ ID NO: 449565 - protein, 397 aa, unidentified
MYIVGIDIAKRKHEAAVIDGEGTVIIKPFSFTNNCSGYNRLLAMLTKAKLPLDEVSFAMEATGHYWLALFTRLQKEGFRVQVINPVQTNSIRSFYIRQAKTDPRDALLIAEVIRFGHFSESTLHPENIYELRELCRGRHAIVSMQADVKRKVVALLDQVFPEYETAFTNMFGDTSMAILQTCPTPKELSEMPLEELCHLIEVSSHKRFRMAKAQELQALARNSFGFAMAGDVFSTMIRLYAKHLVFLKQQVQEMDRKIAEIMDTLDTPITTITGIGPTLGAYILSEIGDINRFSSSAKLAAYAGIDPTMRQSGEYNGVRNRMSKRGSPYLRHAIWLAASSAVLHDPALKLYFQKKRDEGKPYMASVGHACRKMVSIIYAVMRDNKAYTPCIPNEISA

SEQ ID NO: 449566 - protein, 325 aa, unidentified
MAKRITVCAGIDTGKRKLDVAIDGNGEQLQVENTAEGHKVLLEWLQRHKVKRIGIEASGGYEQPVVAALRRKRFVVIVFQPAQVRAYAKFHLQRAKNDKIDAALIAACTAAVKKIYPAPDPRLSPFAEQLTMIDQIGEDIMKLKNRIETCRNERIQAVWKEDIARLAKRVRTELKALVAAIRQYPDLAKRLELIYSVGGAGLPTSVAILVRMPEIGQLTREQAAALAGLAPYDDDSGNQVGARHIDGGRERLRRALYLAALPASFRWNPQLIALYQRLRAAGKEHKHALIACARKLLIFVNTVVARGTPWQGEPPAAHTANPSTA

SEQ ID NO: 449567 - protein, 342 aa, unidentified
MKIIRVGVDLAKNVFQVHGVDRTEKPVWKRKLKRDEWIQVLLEKIEPGCVIGMEACGGAHHWARLLRAKGYTVKLIAPQFVKPYVKSNKNDANDAEAICEAMSRPNMRFVSIKTVQQQDAQAVHRIRAGLMEQRTAKVNQIRGLVSEYGLVAPTKVSHLRAAIPEWLEDAENGLTGLFRQLLNGVWSDLLSLDQRLKELDQEITVLAADAVAQRLQQLRGVGPMIATALLATVGDASQFANGRQMAASLGLTPKQNSSGGKEKLLGISKRGDSYVRCLLVHGARSMIKVSKGKDDRLSQWVMRIATTRHPNVAAVAMANKTARIAWAMIRNGSDYQPELAAA

SEQ ID NO: 449568 - protein, 344 aa, unidentified
MNISRVGVDIAKSVFHVHGVDRHEQPQWRGKYTRAKWLDAVCRRVPQGAIIGMEACATAHYWARQLQARGYQVKLVAAQFVKPYVKTNKNDRADAEAICEALGRPTMRFVAVKSVEQQDAQATHRIREELISQRTAKANQIRGLVGEYGLIAPTGIQQLRRALPLWLEDASNGLSDHFRRLLAELANDLRYLDDRVEQLTTAIEKHANTDPVAKRLMTLRGIGPITASALAGVLGDGTIYQRGRDFAASLGLTPRQHSTGGRERLLGISKRGNGYLRKLLVHGARSVLRYAVTQEDGLSQWIKRLAMRKHRNVAIVALANKTARMAWAITRHQVPYDPELAAAA

SEQ ID NO: 449569 - protein, 372 aa, unidentified
MKYVGVDLHKQIIVLCVVVVEGGRRRVVTRRKLACRDVAAVDEFFGRLGSFQVAVEATSAYEWLLERVEQSADRMVLVHPRKMRIIAESRRKTDKLDAQILAEFLAAGELPEAWRPTPRVRQHRALVRQLDYLRRKTSGLKCRLRALLARYNADVPELFTAQGREHVAHTPLNAADRFVAEQLWAALDFQHAQRLAIQRQLRGFAATAPLAEREARAVLESVPCVGPVTIEVLLSELGEVRRFGAQNDVVQYAGLAPGIRESAGYRKNQGITKEGCPLLRWTMIQLAWRLVNKSRRWAFVYEKLKHRCGSKKAIVAVARRVLCVLVSLLHSGQRYNMALDAISMSRPKLAPRERNQRPQVPPPNPHLLPSSL

SEQ ID NO: 449570 - protein, 316 aa, unidentified
MNTTECFVGIDVSKSQLDVAALPADEVWQVANDEVGHTQLINRLKALGPVLIVLEATGGLEMAVTVALAGAGLPVAVVNPRQVRDFAKATGTLAKTDRIDARIIARFGAVLRPPVRPLKDEALQALEAHVVRRRQLVDMLVAEKNRMALAPKPIRRNIKQHIAWLERQLNDVDNAIREAIKTSPIWCVQDDLMQSVPGVGPVLAVSLLADLPELGHLDRRQIAALVGVAPFNRDSGTLRGRRMVWGGRARLRAVLYMGALAAIRCNPVIKAFYRRLRAAGKESKLALTACMRKLLTILNAIIKSGTPWQKHQSQST

SEQ ID NO: 449571 - protein, 436 aa, unidentified
MKRFLETCAGIDVGKREIAVTLLEGAADAEPVAETRTFGTTTKQLTECTEWLRGAGCSTVVMESTGSYWTPVWNVLHGALAVIVANPEHVKARRGEKTDAEDSRRLAERLRVGDVRGSFVPPENVLILRDLTRRRKRLLTAANSERNRVQKLLERGNAKFGNVVSDVFGVSGQRMLHALLNEEAPTAEQVAQLAKGRLRNKLAQIAEAVEGCRLTDHLKWMIRHSLEHLVFLEKQMADLQQQIAAALAPLEREFQILQTIPGVGAEVAAVILAETGGNMAQFPSERHLTSWAGVCPGNNRSAGRQKSGAIKRGNKWLLSALVQAGWAAVRTRGTIFKKRFYRQMQHRGRKRAVIAAARSLLSVVWITLRRGEPYCEPANDFQLHERSRKVRHHLRKLAQLGIDISALQLPSPTPAELRLPDRLRPPRIGALGIHAR

SEQ ID NO: 449572 - protein, 350 aa, unidentified
MELHTIGIDLGKTVFHMVGLDLHGGVVVRKKFSRKQLLYFTANLKVELIGVEACGGSHFLGRALREQGHEVRLIPAQCVKPYGKTNKSDFIDAEAIAEAVARPTMRFVPIKSDDQLDLQSLHRVRERWVMRRTAVINQIRGLLLERGITLRKGRCHLDAALPGILEDATTKLSGAVRLLLAQLKVELDQLVIRLEEADTLIKKIAQESEVCRRLDAIPGIGPLTATALIAAIGNGAAFRKGREFAAWVGLVRREHSTEGKQKLLGISKRGNCYLRRLFVQGARAVLQFREKQSSGLSTWLAQLASRTHHNVVGVALANKLARMAWAVLAKGEVYRPKILASSASTSLACS

SEQ ID NO: 449573 - protein, 318 aa, unidentified
MNTASFVGLDVAKAQLDVAVRPSGEGWSTTNDEAGIAQLVTRLRALHPTLIVAEATGGFEHAAIAALAAIGLPVVVANPRQVRDFARATGQLAKTDQLDAGILALFAERVRPAPRPLPDAAAQLLDALLTRRRQLLEMLVAEQNRLGFAPKPLHRSIRQHIHWLERQLDDVTTELAHQIEQSPVWRAKDDLLQSVPGIGPIVSATLLGELPELGTLSHKQIAALVGVAPLARDSGTLRGKRMVWGGRASVRTALYLAALCGRRWNPQLRVFYERLRAAGKPKKVALIACARKLLTILNAMVRSNTRWTVPASSAQHSC

SEQ ID NO: 449574 - protein, 415 aa, unidentified
MDVLHDRCAGLDIGKKDLKACVRTPSPSGRRSRHQEIRTFATMTNALLELRDWLVEEKVTLVVMEATGDYWRGAYYLLEDTLNVILVNAAHAKGLPGRKTDVSDSAWLAQLGECGLLKASFVPPEPVRRLRDLTRYRSTLTVERTREAQRLEKELEDAGIKISSVASDILGVSGRAMLAALIAGEDDAQVMAEMARGRMRPKIPALVQALTGNFGEHHSFLCRIHLTRIDELSATIEELSARIDQEMRPFVRQIERLVTIPGVKKTTAQVIIAETGADMTRFRTPGHLASWAGVCPGHHESAGRQYSGKRRHGNRWLGGALGIAAMAASRTSERTYLGARYARLVPRLGKQKTIVAIEHSILTAVWHMLTDNVDYQDLGGDFFTKRNPERAIRRIIRQANELGLTVRFDPIPDVA

SEQ ID NO: 449575 - protein, 350 aa, unidentified
MLIIGCDYHPSFQQIAFVDTDTGELQERRLEHREEAEKFYRDLVVQGMKVRVGMEASGHARWFERLLGELNFELWMGDASEIARKRERKQKTDRQDAQHILRLLLKDDFPRIWVPSWENRDLRQLLWHRHRMVQARTRMMNQLQAVALNEGLRCKKKLWREGGRKQLESFRLAPWASRRRHDLLEMLDRLNPTIAELSQAIEQEVEKCPAAQRLKTHPGVGPLTALAFVLMIERADRFECGKQIASYLGLVPLEDSSGNRRRLGHITKQGNSLLRFLLVEAGQVTARSLPEWRSKYVHLTMRRGRKIAKVAMARKLAVRLYWMMRKECDYEQLRKFGSHAGKPGTGDGVQ

SEQ ID NO: 449576 - protein, 343 aa, unidentified
MTHFVGLDVSQKMTAICVVDNAGHRLWRGQCPTVPEQITVLVRLHAGDDARIGIETGAMTPWLVHELRNLGLEVVCLDARHARAALKMQINKTDQNDAEGLAQIVRTGWYRSVHVKSFESHRARALLGARTQLTGMTTRLSNHIRGVLKTFGLLPGAMRGLPFDRKVEALLLDRSDVALIVRPMLVAWRQLREQIVAFDKAIRALVKSNSACRLLMSVPGIGVLSALAYVSTVEDPARFGRSRSVGAHLGLTPRQYQSGEVDRSGRISRCGDTLARTLLYEAAVVILSRVKRASRLKDWARAIAKRSGNGKARVALARKLSVILHSVWRSGEPFRWSEHARAA

SEQ ID NO: 449577 - protein, 355 aa, unidentified
MKRLKYIGMDVHLATISMVVLNAAGKVMMEVTIATQAGAILDFIDGVSGTLHVTFEEGTYAEWLYDLLLPKVAGVVVCDPRRTPRRRGENKSDRIDARQLAEWLRLGTLKSVYHGNAERRALKELAKSYLALVGDTTRVMNRLKALYRARGIACKGTRVYSIQLRPQWLEQLREPGVRGRAELLYQELDLLRPLRQQARAAMIAESRKQPAHKILCSIPSLGPVRSALLMAILQTPHRFRGKRQLWTYAGLALVTRSSANYQLVNGQLTRSRKPVLIVGLNANHHHALKAIFKDAAVSALAHPGPLQEFYAARVAQGIKPELARLTLARKIAWLTLNLWKKGERFNAQHLKPQAA

SEQ ID NO: 449578 - protein, 394 aa, unidentified
MFLVGIDIGKNKHSFCIIEKETGELIVKPKFFDNNNIGFEELISSIQNLSNQDILIGMEDTGHYHFALLKFLLDKKYQIALINPVTTNLTRKLQGGITKTDKLDTLTICDVLSSSQRVKSYRITKVDRFDMYEQKQLTREHHNLKEQLNVLKNRLQKSIDIVFPEFNSLFDSKYGTVYVNILKEFGSADAVARADIRTIRKCFDTKGKGRRIALTAEKLKEAAKNSIGFPSTAEVVQIKHLINQVKLIEEQISEIDKKIEEFSISNNSPILSIPGISHFSGTSILAELGDIHNYSKPSQIIKFAGIAPITYESSQFTAQHTAITKKGSKYLRKTLYQIITSVIKNNEVFRNYYQLKLSQGKGNRCAQGHCVRKLMRVIFHLLSTNTQFNPSLLV

SEQ ID NO: 449579 - protein, 407 aa, unidentified
MYYCGIDIAKHRHELAVLDEAGVCVLSMHFANSQQGLKKLLDALASLKIGPENILFCMEATGHYWLALYCQLKELGYQLHVINPIQSDALRNLYVRKAKTDKKDALLLADLVRLGRAPATELSSETTLKLQTLSRLRLEFVHQIGGLKNRVLGILDRIFPEYPECFSNVFVRTSRELLKSYPEPELLAEADLSELTAFLNQHSRGRLHRDRAEQIQALAKGTFGIRLALDAFTLELKLLVEQIEFIEEQVNILEEAIEQILEEFRTDPEQPYRHVIETIPGIGPVLTAAIIGEVGDISRFPNAKALVAYAGLDATVKASGQFEGTRNRISKRGSPTLRNSLWLAAVTARRFNPELKAFYEAKRAQGKHSGVATGAVARRLVHLIYSIWKDNRPFEPDYKWSPPGGNH

SEQ ID NO: 449580 - protein, 462 aa, unidentified
MSKKNVKRETGNSSGKMRVESEMTKLNHDVAGMDLGSEEHWVCVPADRVEENERCFGVYTCDFCELADFLRACGVKSVAMESTGVYWIPLYEFLDKKGFEVVLVNARHLKSVAGRPKTDIYDCQWIQRLHSYGLLQGSFRPSDDICELRGLVRHRAGLVEEATMHIHHMQKALQQMNLRLDKAVSDISGKTGTLIIERIIAGERNPKVLAELRDPRVVANKKEIAAALDGNYRNEHLFALKQSYEALCFVHRQMEECDAEIKRVLDGLDRKVDANLAQLSPSPKGSKRSNKNQSLFDLRPALYEIYGVDLTQVNGFQSGTILNILAELGPELHKFPSEKNFTSYLGLCPNREISGGRLLKNSTKKVQSRAAKAFRLAAQTLKNSECYLGKFYRRIKARAGAPKAITATARKLAVIFYKMVKDKVEYKPLDPSSFERKHRERALKSLKNRAKSMGFEIIPLAS

SEQ ID NO: 449581 - protein, 344 aa, unidentified
MKIAVLGVDLGKNVCSLVGLDDVGVVIVRRRARRDTLIDFVGKLPACIVGMEACCGAHHLGRLFAAQGHDVRLMSPEYVRPYVKAQKNDDRDAEGIAEAATRPTMRFVEIKTPAQLDMQTLHRSRDRLVGERTALINQLRAILLERGIVVPQGKRKLEHYLVMLMGEHQGGALTARMRMLVADMQAQWRELDRRVAAFEAEFTSFAKEDEDARRLTTIPGVGIMNATALIAAIGKAETFAHGRDLAAWLGLVPRQWTTGGKPRLMGISKHGNKYLRKLLIHGARAALPHVAERNTPLGRWTKGLLARVHPNVAVVALANKLARISWAVLRHGQHFAAKEAPMLA

SEQ ID NO: 449582 - protein, 463 aa, unidentified
MSNGSSRRLSRGDRRRNERLARLRAVITRESAVVAFDLAADKQVCAVTDQDSRVLARRTVRCKAWELSEVVEWGLARAAEAGYSQFVVACEPTGHRWRVLDQIAADLGVRLVCVQPLLVARAREAEDFTRNKNDDTDAMIIARLTTELRCYLPERPDPTWARLRHLGARRAGLVTAAGAARQQVRDLLECAWPAALGAASKPLDSASWVAAVTVVLDRVGEGGDLSVITRWGWARFAAAVRAQLGATRWYSRIVRAVFDAATDPALAEVGVRPQRAGALERVGDAMADLAARRTEITAVDARMVGVLDQLGLTELVTTIPGVSAVGTATILAETGDPTRFSSARALVKHAGLCPRDNSSGTYQGKTAISGRGRPELRLAAWRAVFGALHHNPVLAARHTHLTGRADNPLTDTQARVALAAGLLRQLHAVIVTRAPWDPAIAAGLDRAPDPRTDQHENGAATAA

SEQ ID NO: 449583 - protein, 346 aa, unidentified
MKYNSKVFEISVVGIDLGKNCFHMHGTDASGHVLLKKQVTRTGLLSLMSQLPSCLVGMEACGGSHDWARRMLKMGHDVRLMGAQFVKPYVKSNKNDFSDAAAICEAVTRPNMRFVPIKGMEQQDVQSIHRARSLAVSHRTAQANQMRGLLMEYGIVLPQGMASLRGRIPDILADADNDLTPIFRELLYQLADEVQRLDERITGYDRQIRQLAEQSDACKRLMSIPGMGPMSATALVAAVADAKAFGNGREMAAWLGLVPRQHSTGGKPRLLGISKRGDSYLRKLLIQGAQSALRVASKKTDRQSKWVCGLSERRGRNVAAVALANKNIRTAWALLSKHECYHPAMA

SEQ ID NO: 449584 - protein, 372 aa, unidentified
MRFAGIDIGSERHVVAIVDQSGAVVLKATPIMEDATGYKRLLELLGNASDCLVAMEATGHYWRNLFAALVTAGFKIALINPLRSSRFAEEELQRTKTDAIDALGIARFAAQKRPEITQLPALQELRELVRLKEQLVQQFGDRVRQLHRAVDLGFPEFTRHIRTLDSELATAVLGRYPTAAALRTVSVRRLARLCYDGSHYVGEELARALLEAARQSVGAHHGEPYQLQVRYACEDLDVLRRRLRSLDSDIERRLAQHEVGKLLTTIEGIGPQTAARIIAEVGDPARFHSARALASYVGVIPRVHQSGKRKFSSSAKVPLGERPTAARVVDAGDYRHSSQPLVACLLPTSPSRWQAPQGRAGRHHPQTDDRSL

SEQ ID NO: 449585 - protein, 397 aa, unidentified
MIAVGIDVSKSKSTVAILNGDGSIRAKPFDVHHVADELQALVDYIKRTSEPPTILMEPTSHYHYPLLKAFTEAELPVCLINPYQMKKYGDTELRKAKTDKRDSLRIAQYALEKSYSLIPYTPQDQKYEDLRFLSRQYSQRISTLTVAKVQLFSLLDETMPGITTILPLKSRDPDNCVLLRFIKRFKSFDVIRKMGKTRFLDSYQVLVKKTKDRFAGSKGLAIYELVLNSVTTRGENPLSAMTQDQCVDLVSTSQKAADEINLQMRIIAETMPEYKVLRSMAGVGDRLGPIILGEIGDIRRFHSGKALNAYAGNDAPPYQSGQFESRNRHISKRGNPALRKACFEVMQALKLTKPQDDPVYLFLLKKEQEGKPYNVAKMAAVNKFLRIYYARAMELYK

SEQ ID NO: 449586 - protein, 324 aa, unidentified
MKNYVLNVGIDVSKSTLDICVLSSSSRESYDIKNDRRSIQTFFKPYKGFDIRVCCENTGKYNWTLLEVLTDYNITCYQVNPLHLKRSIGLVRGKDDQIDAYRIGLFISKNYQDLTVYQPMDQDIMKIKVLLTKRDLLVKQRSQHKANVKEDKLYKEINLEFLEDYTTPLVEFLDVKIKELEGMIRKIIKENALLKKQHSIIASIPGVGSIVTWNVLVKTNAFQNITNAKKFACYSGVAPFQFQSGSSVYSRPKVSHYADKSMKKLLHMAAMSAIQSNNDLRTYYQRKVAEGKNKMLVLNAIRNKIIQRIFAMIKSEKKYQFNLD

SEQ ID NO: 449587 - protein, 429 aa, unidentified
MNFRPIAGIDVGKFFSEMAILSPTNEVVARMKIHHDSNTDVERAVELLNKTEKDFASRPFIVMESTGHYHKILFHSLCKAGFEVSVTNPIQTDSIKNIGIRKVKNDKVDARKIALLYRFQELKSTNIPNEDIECLRSLCRQYYKLCDELTAYKNRLTGIVDQLMLNFKDVFSNIFSKAAMAVLEEYPTPAHILKADRNKLISLIQKKSRKSLKWSTAKYELLVSKARDFAPLSIHNASNVIMLGVYISMIKTLEESLEKVLKSIRLLIAEDMAKDMPMLALTLELLQSLPGIGLLSAATILAEIGDFSAFKKPGKLVAYFGVDPSVMQSGEFTGTRNKMSKRGSRLLRRVLFTIALANIRTKRDKTACNPVLLEFYQQKCQSKPKKVALGAVMRKLVCIIFAVLRDRKPYQLRSPQEHAQMLAAKHTAA

SEQ ID NO: 449588 - protein, 333 aa, unidentified
MKANKWIGVDIHKKQITVCILRGKEKENKVYERTLEGIQEFLKEVDNETIIGVESTTWTRDFAIKCLDKAKDVIIFNTIELSKIMSKVKKTDKIDAGCIALILKRFDKEELSKCMIKSKEYAEIKGLLKIRESLVEKKRRTKNEIISMLDYWGCYREERFRFNEKDKKWIETQKDLPESIKKEILKLIELIEIYENQIKEIEMELNKLLEKDKKYKKLLEIKGIGRITGAYVVSKIENINRFTNSKKLVSYFGLAPRVSISDGKGCNGRITKNTDKDLLRVLVQSAWIMIRYNREMLMFYNRLKSRTCKQKAIIAVARKIVIMIFYVLKQAEA

SEQ ID NO: 449589 - protein, 347 aa, unidentified
MRFYTENRKNYCGIDLHTKEMYVCILNQAGEILVHQNIPAKPAPFLKLIADFRDELVVGVECIFSWYWLADLCGSEGIEFILGHALYMKAIHGGKTKNDKLDSEKIARLMRGGNFPLAYVYPAELRPYRDLLRRRNFLVNMRSEVLAHIKLTNHQYNLPVFEKHIGKKGNRQDLAERFTDATVRKNVEVDLAVADQMHEQINALENYIIRHVKQFDPRMYFRLQSVPGIGKILALIILYEVGDLSRFPTVQSFCSYSRLVKCPKESAGKKYGYGGGKIGNAHLKWAFSEATALFMRESARAKAFVAKHEKKHGKGKAMSILAHKLGRAIYFMWKRNDAFDEKYFFKT

SEQ ID NO: 449590 - protein, 340 aa, unidentified
MQQLLKHKDMKYKEVVGIDVSKLTIDAHHHQSNVHARFDNNSKGFRKLSTWMKKYSVGSVNELLVCFEVTGLYSLNLASFLSQKSIDYVMENAIQIKRSMGLTRGKADKVDAKRIAEYAYMRKDALKLTVLPTSEIIKLQNLLALRERMIKQKAGYQASLGEYKRVFIQKHEKDFFQMLNSLIVALKKQIQKAEKALLEIIESSSTLKKQYDLLTSITGIGIILASNVLVTTVCFNKFDNSRKYACYCGTAPFEYSSGTSIRGRTKVSQMANKKMKALFNLAARSAIQHDPELKLYFRKRMDNGANGMSTINIIRNKIIHRVFAVIKRGTPYVTLTHNGI

SEQ ID NO: 449591 - protein, 345 aa, unidentified
MKHYAGLDVSLKETSVCIVDEMGAIRREVKVPSHPEDLVRLLQDPAWQFERIGLEAGPLSQWLFDGVAEAGLPVVCIETRHTKAFLKAQVNKSDRNDARGIAQMMRVNLFRPVHVKTLASQKRRALLTARKVLQEKSLAIENDIRGLLRNFGLKVGVVGKIGFEQRIRELVEGMPDLTEITAPLLSARRTLREQFATLHSKLLSIVRDDAVCRRLMTIPGVGPVVSLAFRATIDIPARFRNSKAVGPMLGLTPVLNQSGESKRVGRISLCGDEMMRHLLYEAAQVMLTRVQKWSWLKAWAINIARRRGHQKAIVALARRLAVIMHRMWIDGTEFRWTREATPIAA

SEQ ID NO: 449592 - protein, 383 aa, unidentified
MTNQVSRFIPRDYDVFAGLDVDKKSMAVIFTNHDGPLRALRMAHSAKPLLNYVRKHFPGQRVAFAYEAGPTGFGLHDELVTEDYTCLVVAPSKVPRASDERVKTNRLDGRKLSENLRGGQLHSIHVPTRAYRDLRHLVQLRDTHVRQLSASKLRLKALLLYEAIPFPDPQEKWTARAMRELQTLPCSETVRFKLDDLLNTLHFHFQAAAAATKQIRRYCLHDAELQQSIDLLLSLPGIGWIVGSHLVARLGDPQQIKNGKQIAGFLGIVSSEHSTGEKQNRGEITRTGDSRLRNKLIQSAWTAIKKDPELRAFYRRIYQRHPKKVAARKAIVAVARKLTQRIYVVLKEQRPYVMRLDSSIAPLTAEETVGPRERLDSAQNDQS

SEQ ID NO: 449593 - protein, 360 aa, unidentified
MLIIGCDFHPSGQQVFVMDRESGEVMAEQWLNHSGDEVDKFYAALPPGTEVGVETSGNMLWFERKLAGYGHRLRTGDAAKIRAADPRKQKHDRRDAQHIAMLLREGRFPDLRWTPSLRERDLRQLLMHRHKLVRMRAQVKNQLQHIAINQGQQKKRQLWTRKGRELLQRLELEPWTARRRDDLLALLDTLQGYCEGLDLAVEQAAKGNADARLLISHPGIGPVISLAYVLTLGDVGRFDRSRQVVSYLGLNPAEDSSGERRRLGSISKQGNRFLRLLLIQGAQTAVRGDAELGRQYRRLAVKKNKAIAKVMVARKLAVRMFWILKTQQPYPELVRMRGSPSHPGVETTAALSERPASPSV

SEQ ID NO: 449594 - protein, 443 aa, unidentified
MGRRCIGLDVHREFAQVAVWEGGVVRQLGKIMLSDEGLGIFADSLGPEDEIAVEATCNTQAIVRLLEPHVARVVVSNPQKTRAIAEAKVKTDKVDAEVLAQLLAADYLPSVWVADEDTQALRRHVARRAHIVRQRTRLKNQVQAILHRNLIPRCPAADLFGIKGRGWLAGRSLPADERLAVDALLRQLDFHAQELRIIDAALGRVGLGSPEVKRLMTIPGVDATVALSIVAAVGDFHRFRRPEQLVSYLGLNPRVKQSGSQPATHGRITKQGRAHARGMLVEAAWAASKTPGPLRAFYERIRARRGMQIAVVATARKLAVLCWTMIERGEDYAFARPSLTGKKLRALELRAGMPSQRGQKGNAAAYSLKETRQRERELAEQGERAYRQLVADWQAKRPTKLKPGVAATNGTRLNRPSKGQAARQASVPEPALRSGVDHALTEA

SEQ ID NO: 449595 - protein, 363 aa, unidentified
MNEDNAVAAVAANTIVSIDLGKFRSVACLFDPLTGGHRFETIPTTPSAVHDLLVACSPATLVIEACSVSGWVSDLAGALGIGTQVANTNGEAWKWKRVKRKTDRDDALKLAKLCATDQLPLAHAPTLDVRQHRALIKYRHGLIDRRTGIKNTIRSLLDAQGLSLPGRSKGWTLEAIAELTKLSKPLGECGISELWRGQLAMELQMLQQLQALIKEADRKLDALAAQDARVLRLKTIPQVGARLAELVVTTLDDAKRFKSAGQVSAYAGLVPKQYQSGQMNRLGRITGQGPGLLRRVLVQVAWGLQRREGTRGRAVFERLCHGSRTRRKQAAVALARKILIWCWAILRDGGTWDESRGVPVAAG

SEQ ID NO: 449596 - protein, 338 aa, unidentified
MPLYGGIDLHANNSVVVLLNEQDQVLYQRRLANHLPTILEPLAPHQADIMGVVVESTYNWYWLVDGLMEAGYRVHLANPAAMQQYNGLKYTNDHSDARWLAHVLRLGVLPEGYIYPKAERAVRDLWRKRAHLVRQHTAQVLSVQNLMARNTGSRFSAKRLVDLTPADLQGMLPEAAHVLAVTSSLAVVHCLGQQIKTLEKTVNTCLKPTPAYAQLQTVDGIGTTLAQTIVLETGEIGRFPTVGHYASYCRCVGSTKISNGKRKGQGNIKNGNPYLEWAYMEAAQFAIRFSPTVQRFYQRKQAKSHLMIARKAVAHKLARACYYILRDLVPFDVHKAFG

SEQ ID NO: 449597 - protein, 340 aa, unidentified
MKMIGCDLHAAQQTIAMLDGETGEIVEQTLKHEAGAVREFYAALPAPVVVGLEATGSMGWFLQLLDELGITYRVGHPATIRKAETRKQKHDRRDAALLLRLLTENRFPAIWIPSTDLRDLRALLLHRHQWVRLRTRVQSALHAIVLGYGVQRGHALWNRDGQAMLAALPLSPHAAHRRDELQALYQQLDEQVDRLDVRVKVAATQRPRATELMTHPGVGHVTALATEVFLGDPLRFADGKALASYVGMIHSEYSSGPRQRLGGLSKQGNPLLRFLWGEAAMHAVRRDLELQRFYRRKLHQKGLGKARMAAARKLGIRLWIMLRDQIDYLEFCRRSPRRQS

SEQ ID NO: 449598 - protein, 366 aa, unidentified
MTPDFKVGKNNKWFRQCVGIDIAKDKFNACLFMYDIASDMGCGTKSIEFKNTKQGFNQLLKWARKECLKEYPLAFIMEPTGVYYEPLAYHLCKIQQTVYIVMPNKARDFCNYEGIKTKTDEMDARCLALLGCVNRKLTPWQPPKAIFRELRQMTRFVEEIQKVRTMLLNHLEALSHGAEPVASVVEHYEKLIADIDKQLETNLKNIKAKIATDKELEDKVERICTIKGIGYLTVVTIIAETNGFNLITSRKQLASFAGLDVIASQSGNEDPKHVISKKGNTHIRRALYWPGISSSRFNPQMKDMYGRICKRNPKVKMIGIIAIMRKMLLLTYTLWKNGDVYDEKKTGTCTPDKRRIDGEEPPTVQE

SEQ ID NO: 449599 - protein, 321 aa, unidentified
MQTPSAVLNIGADVAKNAIVVACCSEGSFLVREVANQRTAVLAFLKSLPAGSRIGVESTGTYHELFAEAAHQLGFLVFLLNPKDTRHYAKAVGLRGKTDRVDAELIARMIAHEHTKLHAWIPPTPQQREIDRLIKRRATLISLREAVEMSLHELDGFAADLKALRTHFNQLIARIDLRVKALIDASPDRKQNFTRLCTISGVGPVIGTALVNILERVPLKSADAFVAFTGLDPRPDDSGQHRGKRRLSKRGPAELRRLLYLAAMSAIKTKTWRPLYEHYRAKGLSSTTTLVILARRIARTAWSIYTYKTEFDPARLTNHLT

SEQ ID NO: 449600 - protein, 426 aa, unidentified
MNTHNDWTQHTHFAALDWASDHHDVVIVAHSGAIAAEFRFAHTAAGWAQFTEKMQPYAGAPLALETSSGPAVDQLLQRGWKLYPVNPKAAERYRERKVPSGTKTDRHDGWSLADALRTDGHGWRPLLPQDEATATLRALCRDELALIEQRTALVNQLLAALREYYPVALELFDDWTQPFTWALIQQFPTPLALQNAGKRKWETFLHTHRLWRTDTAPARLELFAHANALPASAAVCHAKSLLATSLVKVLQTLETQLREYRRRINEAFAQHPDHDIFGSLPGAAEKLAPRLLSELGAVRAVYPDADALCCQAGVSPVSFQSGKLDQARIRWACDVVLRHTVHLWADCSRKKSAWAQAYYQGKREQGHDHASALRCLGKRWLKVLWRLWQDGQKYDPARHEQSLQAHGSWVQARLAASLPTTQTPCE

SEQ ID NO: 449601 - protein, 331 aa, unidentified
MNYSHFVGLDVGKKTFDASLMSADEKELSHKSFDNTPTGIQSLLDWIAGYHLSLSKLLFCAENMGSYVTELSVSSVSMGFSLALVCPLTIKKSIGLQRGKNDRIDAKRIANYAVLHYRKLELYKLPDKDLVRLRGWIIIRDNLVKQKVSSIKLLETFSQMAKLADVTESISFLEEQLKSIKERILEVEEDMEQLIAASTSLYTNYLLLRSIKGIGIINAIVLLCVTDNFQRFDNPRKFACYCGVAPFEHTSGISIRGKTQTSSLANKEVKVYLTRAAITAISWDPQMKAYYKRKIAEGKHKASVINAVRAKIIARSFAVIRRQTPFVTLAV

SEQ ID NO: 449602 - protein, 412 aa, unidentified
MEPIYTSCCGLDVHKKSIQACVRCVGKDGKIHEEIRAFGTMTQDIRSLAEWMSQQGVTHVAMESTGVYWKPIYNILEGKFNILLVNARHIKNVPGRKTDVKDSQWIAHLLQSGLLKGSFIPDRAQRELRDLTRHRTKLVDQRASVVNRVHKVLEDANIKLGAVATDILGKSGKDMIRALIEGDMDNAEMADLARRQLRGKIPQLRLALDGHVTHHHRFMLGELMDQLDHLDRQIDRFSQRIEEISRPFAEAIKEVARLPGFEKRAAENVIAEIGINMDQFPSADHLNSWAGICSGSNESAGKRKSGKTTKGSKWLRSTLAQAAWAASRKKNSYFRAQYGRLAGRRGKKRAVIAVAHSLLTVIYYVLRDHVDYKDLGQDYFDKLNSKRIVPYLVKRLKNLGYEVNLAPLESAA

SEQ ID NO: 449603 - protein, 358 aa, unidentified
MNKSNNLDFSGSTIYCGLDVHLKNWRVNIRDQEMELRDFSQNPDPVTLHTFLTKNYPNASYKVGYEAGFCGFSIQRQLSVLQIECVVLNAADIPKSDKDKRQKNDKRDARSISEEIKNNKKVGIHIPHAAMEYARSLVRQRQRLVLDSTRQKCRIWHCLHFHGLELPDKADVGQYWSSKFIKKIESNACNGDTWLKMNLQLMIKDHQQKRALILETTRGIRSLCRQEPFKKSIEFITGIPGIGEINAAIILFELEDINRFKSPDQLYSYAGLVPDTDDSGDAKKSKGITHRQNSRLRKAIIESSWVIVRQDPAMLMLYKQYCKGMHKNKAIIRIGKHLLSRIRYVLKEQKPYVQAVLK

SEQ ID NO: 449604 - protein, 324 aa, unidentified
MNKYKETFGVDISKAVFDVQGSKCGPHQFSNSPNGFRSFLKLLPDDSLVVMEATGYYHYRLSQFLCKNKIAVSVVNPLSVKRFIEMKLSRIKTDKSDAQSICDYGIYNKVPLYNQISAVQSECRQLLSLKSSYLKRRTSTKNKLHGERVLDVPSKLVVRSLLLDKKHIDRELVKIEKRLLLLVKQSSQRELTLLKSIPGIGDKTAVFLIVATDSFRKFSNASQLCSYLGTTPMIKRSGSSVRGRSRISKMGNRNLRNLMFMCSMSAYKHNRSCKAIHDRIVSKGKSSKLALMAVCNKLIHQAFAIVRSGVEYNPDYVSVRKRLI

SEQ ID NO: 449605 - protein, 412 aa, unidentified
MKKHTYRAKKVNKINWIKLKEQLAGSKVIFAIDVAKKKQYALLTTEDGSVTVLMYWNHLDQTRELINQLKALECPLDFIMESTGTYGDSLRHQLNAAGFTAYQISTKRVSDAREVFDGVPSMHDAKAATVIAELHRRGLSQAWQEKSEAERTLDAQRREYDMHQSQHQRNQNRLEAYLSRHWPEILPELSLDSVTLEQILIAYGDPAHIATHAQTAAEQMREWSHGMLGEDKIKRIIDAACHTLGAPCLESERQYLQALGRELQHSRLAKKQAKQQLEAQIKADDSLMQMGLMIGFVTTAVLISCNLDPNRYGNARRYQKAFGLNLKETSSGTYQGRLSITKRGSSIARRYLYFAALRLIKDDPVINAWYQRKADSRAKKKTVIALMRKLSKALWHVGRGETFDARKLLTVG

SEQ ID NO: 449606 - protein, 348 aa, unidentified
MIVIGIDSHKRTHTAVAVDGTGRKLAEKTLAATSAGHLELVRWAARFADRTWALEDCRHLSRRLSNDLLVGGERVIRVPPKLMAGARRSSREPGKSDPIDALAVARAALREDLPVATLDGPDREVRLLVDHREDLVAERTRAQNRLRWHLHELDPGHEPVARGLDRMVVLAAVERDLAAAPGTVGRIARELVVRIRDLTATINGLEREIEGLVADLAPSLLALTGCGPLTAAKLVGETAGIGRFRSRAAFARHNGSAPLPVWSGNTERHRLSRTGNRQINVALHRIAITQLQREGPGRSYLEHRRVQGDTKPEAIRALRRRISDEVFRRMRNDEAVRAASPSGLAAAA

SEQ ID NO: 449607 - protein, 428 aa, unidentified
MSDRKITRREQFCQIQSEITGSDQYLVVGIDVAKDKHHAFMGTASGKTLHKKLIFENDLGGFGKLLQRCEAAGAQNDLGKVVFGLEPTGNYHKPLANHLIENGCQVVLVTGKAVKDNRRQFDGRWDKNDTKDAANVADLVSRGRCLYYDAGSAQINQLRDLLSLRRRLKKEEHSLRMRIRNTVLAKYFPELDRFYGACESESLAIVRWCLEPAKIAGLDFDKFFAMVTAGRRGIAQKLRLQKIHQLAAQSVGCPMGPAAEFEAVLLVQKLKQVREQIKQVEDLMQQVAGEFDEYQILLSIPGFGPYVAAVALAAIADPFRFDSSNQVVKLAGYDLCANRSGKSSDDAVPVISKNGNAQLRYALYQAAFIASVRNPHFSAYFTHVLRGRQRERGIKTKMRVKLAAKMLIIAWKLMKKKEPFNPDYLHIE

SEQ ID NO: 449608 - protein, 359 aa, unidentified
MKCNPAVATIAIDLAKSIFQLLAVDARGHVLESHRLSRAAFIAFWHNRAPVRVVMEACGSAHHFGRWLTALGHQVILIPAQYVRPYVRRSKTDAADCLAMIEAARAIDLKPVPIKTELQQVIQLLHRARQQWQETRTARINLARGLLREFGIVVPEGAERGQQAMRAALGHEALDQRMRDLIASLLDEIRALEQRVIDIDRALASTAKDDPVIAQLESLPGIGWVTATAVRASIGDIHRFKTGRVLSSWLGFTPKEHSSGSTRQLGRMSKCGDVYCRTLLIQGARAVLAAAKRAQAAGKPLDRLRTWALALAERRGFNKAAVGLANKMVRILWATWRHARSFDGDYAKRFDQEIAMSNA

SEQ ID NO: 449609 - protein, 328 aa, unidentified
MFFIGIDVSKAKLDCSLLLDVASNKRRAKVVANSKTGIVDLLAWCTKQQVPVHELHAIMEGTGVYHEQAALALSDAGATVSIVNPAQVKDFGRSLGVRTKTDGVDSFVLARYGALLKPKSWTPPAQEARTLQALLSRREAIAQDLQRERNRLEKADAIDTPPPIRQSINDSIDFLEKQLAKLQQDIDNHINNHPNLKDDRDLLISIPAVGPQVSNHLLSVMHNHDFQSAEQLAAYLGLVPVERQSGTSVLGRPRLSKAGPARIRAVLYMAAIVATQHNPHLKALYRRLQDRGKSKMSALGAVMRKLAHLCFGVLKTRQPYQADYGIST

SEQ ID NO: 449610 - protein, 341 aa, unidentified
MSDYSYFCVIDLAKNHFSLHAVDKNDKVILHKSVTRSKLLTTIANMPPMRIGVEACGGAHYWARTLNKLGHEARIMAVKYVIPYRTKGKNDLNDAVAICEAVQRPSTRFVPVKSPEQQAILSVHRMREHWVRERTALMNRMRALLSEFGLIIPVGRSSLMKQVPLMLEDAENELPHLARAVIADAYHHLGELNQRIADTEQVFDSFAKASTNVQRVMKVRGIGPQTATAILASIGNGSQFDKSRDFSAWLGLVPKQYSTGGKPRLGRITKHGDKYLRTLLVHGARTVIANLGDKQDKLSQWCRGVLERRGMNRAIVALAAKNARIIWSLLHNQTEYENYAA

SEQ ID NO: 449611 - protein, 318 aa, unidentified
MLYAGLDLSRQRLDVHVLDEDGRSIEVTAVHPDSDALRTLATHVLLHGQEVTAAIESMTGARFVHDQLERWGWDVAIADAVKVKGLAPLAAKTDRIDAHVLAELARRDLVPEIWLPDPTIRAERERARFRLHLVHHRTALKNRIHATLMTFGYSVPVSDLFGTQGREILGRLTIPEPWAGTLTTSMRMIDDLNVEIAAAEADLRGLGPDHPYIPLLLTVPGVGPLLAYTIAGEIGDIGRFESPKKLAGYTWLCPIVRQSGPKDRRGPLAKNSPKYLRWAPIGAATHAARDPRYRDRYRPDVNRAPSPYDGVLPYQSMY

SEQ ID NO: 449612 - protein, 383 aa, unidentified
MRSVALDLAVKKISYCEVAVGHVVARRTVTSLSSLKELLGPECLPARIAIEACREAWHVHAELTRWGNEVLLVDTTRVRQLGVGEHGRKTDRIDAEILAKAVEKGSLPKAHLLSKPRQQLRLELSVRRTLVETRSQYVTTIRGLARTHGVRLPSCDTNAFVSHLRKAKLDQNLQELIEPMSQVLEKVDADLARAEMRLQSIVEKDSKIQLLMTVPNVSVVVAAVFVSVIDDAHRFRNAHQVGAYLGLVPSEKSSGEHRRLGSITKKGNSYARTTLMQASWGLIRLGRSDDPLQQWAKAVAHRRGKFIAAVALARRLAGILWAMWRDDTVYDAARVGFCSAAGLKRQAQETKFRATAMQSAAKKARQRARPHERKLEHLKEMNL

SEQ ID NO: 449613 - protein, 403 aa, unidentified
MNTLYVGIDVSSKSNVIYLMLPNGDKHSNFSVANSHEGSTQLVKRILSALTSHSLDTVLIGLEATSVYGDNLVYFLREDATLAPFNRKIHVLNPKQVKKFHDAYNDLPKNDYVDSFVIADCLRFGRINKEVYMGDYRYKALQNLTRARFFAVQNLVKEKQRFMNVLFKKYSTMTQEKVFSDTFSTTALAVYDEFESAEALANMDLHELTDFIIEKGKNRFPDPDAVAKAIQKAARSSYRLPKTVNDSVNQVLSISITSMKALESQIKEFDKAIKAQMELLPNVLISIPGIGPVYSAGIMAEIGDINRFNSQAALAKYAGLAWKQHQSGGFESEVTRLIPSGNRFLKYYLCEAAFSLVRCDKEYSDFYRLKYKEVNRCQHKRALALTARKFVRLVFRQIGRAHV

SEQ ID NO: 449614 - protein, 357 aa, unidentified
MAEGSWVGLDVHARTTMAGVLDALSGELRLERVPPQSEETVAWLRELPQPVRVAYEAGPTGYGLARACQRAGIACIVAAPSKIPRAAGDRVKTDRRDAERLARLLRLGELVAVRVPDPVEEAARDLVRAREDARGDLMRARHRLSKLLLRHGLVYEGSAWTLAHDSWLRRQRFSNRSLALAFDECYGAVLQAKGRRDSLDRAIAQLAGQAPFAEVVARLVCLRGVSTLTALALSVELGDWDRFRPQSLGPFLGLVPSEDSSGERRRQGAITKTGNTHARRLLVEAAWHQRRPLRASGALERRRQGQPTAVRVRADESARRLHARWHALERRGKRRTIVAVAVARELAGHCWALATMK

SEQ ID NO: 449615 - protein, 339 aa, unidentified
MQVTTIGLDLAKNVFQVHGITKDDEVAFNRPLRRAQLLPFFSKLEPCLIGMEACSSAHHWGRELTELGHEVRLIPPIYVKPYVKRGKSDAIDAEAICEAVTRPTMRFVAVKTVEQQSLLSLHRARDLLVRQRTQLINGLRGMVAEFGVYIAKGLARIIDFAENILAGEVLDLPDIANEVIHNMCEHLMALHARIRWYENRLKQVAKEDARVRLLRTIPGVGAVTASAIIASIGDGHQFENGRAFAAWLGLTPSNKSSGGKEKLGRITKMGDQYLRSLLVVGMTSLVRQTKSHPERASKWLTSLLERKPARVATVAMANKTARIVWAVLTRNEPYAPHTA

SEQ ID NO: 449616 - protein, 340 aa, unidentified
MPKYIRIGVDIAKNSFQVHALESEDCSATKRKLSRSGIVKFLAEVEPCAIGMEACGSAHYWARRFRAMGHEVKLTPPIYVKPYVKRGKNDAADAAAICEAMSRPNMRFVAVKSEDQQATLMAHKTRELLIKQRTMSVNALRGHLAEFGVIAAKGISHVEELVERAAAADLPAMVQATLGVLLAQLRSLDAATDELERAIVANHRRDPVSRLAASVPGVGALAASAILASAPDPQAFKSGRDFAAWLGATPKQNSTGGKEKFGSITKQGNRYIRRLLVLGAISVLRAAPKRKGALCDWLAALRARKPAKVVAVALANKLARIVWAIITTGEAFRTSIYAKA

SEQ ID NO: 449617 - protein, 405 aa, unidentified
MIFVGIDWSEEQHEVELMAAAGQRLRSLRIGHGVEGLAKLQETISEFASDPSEVVVGVESDHGLLVNALVGSGYQVYPINPLTAARYRDRHSLAGNKSDRRDAVMLANVVRTDRHLLRPLAGDSEAALEIRARARAHLRAIRLRSQLRNQLRSLLPEFYPAVVPLLAEDDIRDALAVLAVAPTPALGRGLSLSKLAATLRRHGRQRNLAPRAQEIQGRLRAPQLDLQRPRLIAAHGDEVASLTRVLLQVRQELAQLEAQMAAAFRGHPDAQILLSFTGLADILGARVLGESGDDPTRYADATARRNYSGPAPVTRASGKKREVTRRVARNRRLADATFCWAESAVRHSPGAREFYRRLRRRGQPHNQAIRVIAYKLVGKLHACLRDRTLYDEHRAWSTDLTQCAA

SEQ ID NO: 449618 - protein, 412 aa, unidentified
MNPVIGLDVSKGESQVQAFLDKGKPYRKSFSIKHDLRGLGSLLEFLQDVEKAAGGHQPSVVLESTGHYHTPVIQFLEEQKYVYIIVNPLISHRAKSSSLRKVKTDAIDAYHLCELFYKEELEPYKKRGVQLLNLRNLTRQQESIAEISAKTKLQLHSLIDQVFPEYRGVFGSLYSKVSLLTLIEFPTSKAVLRVSEKELTDTIASLCTSRSESWAKEKANKLREAALRNPFQDNLYDSHIFNLEILVKIVLQYQEHLSNIADEIDALASEIEEYEILQSIPGVGEKIAATIISEIGEIDRFNDAKKLVAFAGIDPSVYSSGKFTASVNRITKRGSCRLRHALYMAVQSGIRDSRKKKTTDEIIPRNRRLREFYDKKREEGKPFRVAIIACVNKLLHWIYALLKSRTAFQDIA

SEQ ID NO: 449619 - protein, 349 aa, unidentified
MEHYAGIDVSLECSSVCVVDASGKIVREAKVASNPEALIAWFGTLGLVLGRIGLEAGPLSQWLYAAMKGAGLAVELLETRHVRDAFKAMPVKTDRNDARGIAQLMRLGWFRPVHCKSIGAQEVRAMLTARKLVQAKLQDVENSLRGILRGFGLKVGDTTRLRFAGRIEELVAGHPNLQAIAAALLAVRAVLLREFNGFEKRVRMMARSDARVRLLMSTPSVGPIVALTYAAAIDDPSRFKSSKQVGPHFGLTPKKYQSGETDRSGRISKIGDAAVREALYLAAHIMLTKPVKGCTELKSWAMRIARRAGMQKAKVALARKLAVIMHRMLADGAVFNPTINTRVATAIAA

SEQ ID NO: 449620 - protein, 374 aa, unidentified
MKVYVGIDAHTTNFTLATSVALDEDPVNVNTYPAKVSNIAAYCKNLRKKYGEELEIITGYEAGTLGFSLKRELDKKGIACIVIAPSTIAGTNLNRKRKKKTDKRDAMAIAKCLMTHDYSEVYMPDEEDEAVRDLIRMRQDLKKFQKSTKQQIGALCHRHGYHFNDGKYWTKKHLKWLRDLPIEGILKDSLEGYLRTLDYLTDRVTEIDSRIDEISEQDKYRESVHKLTCLKGIKTFTALAVIVEIGDFSRFIKAKNFAAFLGLVSGENSSSDGQTLLGITKQGNRFLRRLLTEAAKRFSVASTKKSKELLRRQKCNSEHIIAYADKANDRLRKRYYHLVMHNKKCANKATTAVARELACFIWGMMTDNTQTVLS

SEQ ID NO: 449621 - protein, 394 aa, unidentified
MGKMYVGIDIAKDRSSACGIEEGGRTLFELTFTMDGAGFAELLKTIEANGGTPGNVVAAMESTACYHINLYSFLSAKGIDAVIINPLLIANYAKLSLRKTKTDKKDAKTIAQFILAHKDSVTQLAISQDMQDIRDMARERESLCYQISAAKVEIQRVLQTTFPELAAMTNPLTKVMLHFIQRFPSARLVSIAKPSAIEKTLKEKPCSCRLRFTSKDLIEAARTSIATVSPAKELILSGKIETLIHLQKRRDELTKALTKYCESMIVEDLRIVTSISGINNTMATALLAEIGQIGNYLSHKHLIAFAGIDPTVYQSGKYEGASRISKRGNRHLRRVIWLMTISVIHHNSVFRDYFLKRRNEGQPFKKAVFATAHKLMRVIFAMLSKKTSFVAECV

SEQ ID NO: 449622 - protein, 410 aa, unidentified
MQLHDAIGIDPDSKGCVACLVKRLGGKAITKTFPLTSRGRGALASFIGSVPGVLVGIEGRRGQSSPIEVFLEEQDIAYHTIPALNVSSYRSAMVSQQKSNREDAQAVAEFLLDIEAKDRLSEYARHDKPDAELRILARERLRIGQEMTVYENRLWKLVKESAHDLYLSLTGSGDEATAKTSMASRRLLRLFIAVPDITRWSSLSDDELLACSGGKKANGWDNFVTTVRTPLARGVYVGRGAQVVMRNTAQILLQLLDQKAELEAELESSVDERPVAKALRDHYAGIGSFTAALLVSEIITIERFANDDRLASYAGLTKRSYSTGTNLNQRRSSSCNKRLKTAFITFAKGYLRCNKDSHLGKYHQYLLKRGMSRMEALMRVARGLARDLHRQLRALSAGAVDEEKKGKSVA

SEQ ID NO: 449623 - protein, 462 aa, unidentified
MQVTQFRSRYGGREPAVMSSVASPEGLIHLGMDTSKNTIVVATLLPGEESPVTDRVFNEEEAIRRLVGRFPDRSVLRAWYEAGPGGYDLYRLLTSMGVACQVVAPSLIPKGGSDKVKTDKRDSRRLARLGRAGELTPVRVPSAAEEAVRDLARARAVVLDDRKRARQRLIAVLMRHGRIWRGASYWTAAHRAWIAAQQFSEPALASAVGHYRAALEVREAELAAIEAELAPWAAREPLAGPVARLGCYRGIAELSGLTLAAEVVDWRRFPAARAFMSYTGLVPAEYSSGDRTRRGHITKAGSEPVRTALTEAACAYRHGPAIGAGLRRRQHGAAPETLARSWTAQRRLHARYVHLVHAGGKAAPEAVVAVDDPRGRGEALTGARAGRAIEPRNQRSGVPTLSRLWKAIPLAALPRAVSGPRAVKEPGQVRNLRAREPGEPVPARLADHRAGRSGNAEAVILR

SEQ ID NO: 449624 - protein, 343 aa, unidentified
MLYIGLDVHKEFCQACVMNKSGKVISNGRFLSTQEALDGFLDRFEDAKFVLESTGIWEFIYEGIEKRGFEVVLAHPLKVRAIAEAKVKTDKVDAEMLAHLLRADLIPRSHVPPRDIRNLRQLVRHRAYLVRQCTSIKNRIHAELLRRGIRRPDDLKKTFTFKHVGWMRSLGILTVTSSLNCLEGIQEQIKEVESFLLAEYNSRKDAQLIATIPGIGFYGALLILAEIDDIHRFSHPEKLCAYAGLVPTVHQSGSRGHNGSITKNGSPHLRWILIEAVHVHTNYCPGSKLSKFHAKVAQRRGKQRATVATARKLLHTIYWMLLTKEKFHCQGFNLVEKAATLIA

SEQ ID NO: 449625 - protein, 345 aa, unidentified
MKYYAGLDVSVKETSVCIVDERGTIIRERKTVSHPADLVALLSDPQLHLERVGLEAGPLSQWLYEGMAKAGLPVTCIETRHTKAFLKAHTPNKSDRNDARGIAQMMRVNLFRPVHVKTPTSQKRRAMLTARKMLQEKAIAIENDVRGLLRNFGLKVGVVGTLKFEERIRELVEDAPDLAAIMEPLLAGRRKLREEFAKLDRQVLKEAKYDPVCKRLMTVPGVGPIVALAYTSTIDIPARFRNSRSVGAVLGLTPVLNQSGESHRIGHVSRCGDAMMRGLLYEAAQVLLTRVAKWSWLKAWAMNVAKRRGVRKAIVALARRLGVILHRMWCDESDFRWSRETLPAA

SEQ ID NO: 449626 - protein, 451 aa, unidentified
MGRKKKLELEIIHPNAAGIDVGSRSHFVSIGQNLDEVKEFGVYAEDLKNLSAWLLKNNIDTVALESTGDYWQNLHAQLLADGLEVVLVNGKFTKNIKGKKTDVMDCMWIQKMHTLGLLSGSFLPDDITMQLRTYCRQRLNMLRWAAQASSKMQKYLKFLNFRLDVVVSDVCGLTGLKIIAAICEGNLNPKELAKMRHYNCRKSEEEIEKALQGNNRKEYLFGLKQEFESYKFFKQKIKECEEEIKDFLENYFLSQEFPIDDMPSKKPYKRLNKNAPKNIDLNVASYQYFGGVDLMAIEGVSHATLLTLMSEIGPDGMKKFSTAKQFASWLRLAPNNKISGGKTLSNRTPRGSGRLKIALRNAANAIGNLKEGQLAKFFKRIAYKKGRQIAITATARKLAIIIWKMVTNKEKYQPTESHMFLDEKRKLGIVKRMRKKIAKLGITNQDLGFTT

SEQ ID NO: 449627 - protein, 353 aa, unidentified
MKCDKYMGMDVHQAMTVVVVLDADGKVILETMVPTEAAAIIRLVQSLSGPLRVTFEETTQAAWLYEVIRAYVTEVIVCDPRRNKLLEDGSKADKVDARKLAELLRAGLLRSVYHGHEATRNLKELVRAYETLSIDTQRTMARIKAIYRARGIQTPGRGVYQPKQRERWLELLTDAGIRQRATWLYEQLDQLQPLRRKAKQAMLAESRRHRAVSLLRTIPQMGPIRCAFIVATVDTPHRFRTKRQFWSYVGLAVVTHMSSEYEMTAGRVVRRRKPVATRGLNHNCNRRLKEVFISAATGGSLHEPYKPFLERLKQNGMRAEMARLTLARKIAAVALIVWKKGVAFDSTKLNWTT

SEQ ID NO: 449628 - protein, 345 aa, unidentified
MDEQAAVDRQFVGMDLHRRRSVLVRMNQAGERLETVRIVNDVDRLAAVIARAGESPEVVLEATYGWYWAADALAEMGACVHLAHPLGVKAFSYRRVKNDERDAADLADLLRMHRLPEGWIAPPATRDLRELVRHRAKLVHLRTSLRQQVHALLAAHGIAIPVSDLFGVAGNQLLDRAALSPAARTRVISLRSLLDAVDIEIDSFTKLTAKRLRGDPRYQAVQTIPGIGPVLGAVFLAEIGDVTRFPGPAQLASWAGLTPKHHESDTTVHRGRITKQGSVLVRWAAIEAAQCAGKHSRTGRRRDQIGQRRGRNIGVTAAARDLIGLVYYALRDGQVRCLTQTPRST

SEQ ID NO: 449629 - protein, 360 aa, unidentified
MEITEGTTGPFVIGGVDTHKDLHVAAVVDDHDRLLGSQSFATTRHGYKQMLAWMRSFGPVRRVGVEATGTYGAGLLRYLQKASVEVLEVTTPDKGDRRKRGKNDDLDAQNAAHAAFTGKRTVTPKSRDGMIEALRVLKVCRKTAVAARRVALQMIHNTIVCAPDDLRDQLRKLTRMELIRTLAAWRPDMTDYRNVASAYRITLRSLARRYLELHDEIGDLDRMIGAIVDELAPDLVAQNSIGHESAAQLLLTAGDNSERLRSEASFAALCGVSPVPASSGKTTRHRLNRGGDRAANSALHIIAIGRLRTDPRTKAYVAKRIAEGHSKLEAIRCIKRYIAREVFSLISQRRREINQLPIAA

SEQ ID NO: 449630 - protein, 323 aa, unidentified
MTAILGIDIAKQTFDATLLDGPDEKRRRHFDNTARGHEQLHQWVQRYSQGEVHACMESTSIYWEALAEYLHQAGYLVSVVNPARIKGYAMSQLRRSKTDPLDGDIIGDFCRTQKPAAWEPPTAEQKKLRALMRHLESLKKNRTQQSNRLSTCGDEEVRTSILTLLQTIDGEIAVMKQRLDRFFDDHPDLKAKLDLLVSVTGFGRQTSTHIMAEMYDLEQYDNAKAAAADAGITTSHYSSGTSVRRRPKISRMGKASIRSALYFPAITAIRHNPIVRRMAERLAAKGKHKSVIRVAAMRKLMNLAYGVLKHGQPFDPNYGLAMG

SEQ ID NO: 449631 - protein, 434 aa, unidentified
MFNLSKYLNSLVIGIDVASEFSFTAILCPNGDQYRKPFKILHTADGFNYFLEQIKKAEEEFAMKPVFFMESTGVYHLTLFHFLKDNKFECLVINPLVTNSNKNKSIRKVKNDRNDALSIARLGKFEDIKVSSDSDINIFTLKLLIRDYYKLIDNRSVFKKKLSSTLCISFSGYKDVFSNTCGYVSINILKNYPSPQAVLSAPKQAIIDILLCSRKGIAWAEKKYLKLIECAKTAKFVSLPSPMLSISITTCISLYEAIDTHAIKLLSEIESFINSYGMPPTLSKNISLLMSIPGIGYVTAITILAEIGGIDKFITPKQLVAFFGVDPAVNESGKFKGDRVKMSKRGTRLGRRALYAVALASIRTKRNGEAMNPILLKYYQENLKGKKAKVALVAVMHKLIKYLFAVLRNQQEYQVRDPKLHQKMYLENNNRQVA

SEQ ID NO: 449632 - protein, 375 aa, unidentified
MQGKIRFLGMDVHAETIAVAIAEPDGEVRSLGTIPNRAESIRKLVKKLGSVEQLRACYEAGPTGYVLYWQLTELGIECEVIAPTLVPVKSGDRVKTDRRDAERLARSHRAGDLTAVWVPDEGSEALRDLVRAREAAKQDQLRARHRLSKFLLRTGRRPERKIKAWTGVHMTWVRQLRFEQPAQESTRLDYLHEVEHMEERVLRLEQAITEAIQLASPGMQKVIQGLQALRGIAEISAVTIVAELGQLSRFESARQLMGYSGAVPSENSSGKRTQRGGITKAGNAHLRRIVVEAAWSYRLRPGIGPRLRKRQENVPEEIKEIAWKAQIRLTKRYARLAAAGKDQRKIVTAVGRELLGFIWAIGIKAETASKQRMAA

SEQ ID NO: 449633 - protein, 344 aa, unidentified
MELFTLGIDLGKTTFHLVGMDQRGEVVLRKRFSRVQLLQFTANLKVKLIGMEACGGSHFLGRALREQGHDVRLIPAQCVKPYVKTNKNDYIDAEAIAEAVGRPRMRFVPVKSDDQLDLQSLHRVRERWVMRRTAVVNQIRGLLLERGTTLRKGRRYVDEALPSILASGSFKLSGAVLVLLAELKQELEQLAEKIDRADKSVEKIAQENEACRRLVAMPGVGPVTATAIIATIGNGAAFRKGRDFAAWLGVVPEEHSTGGKQTLWKIPQRGNQYLRRLFVQGARAVMQHRTKQSSGLSAWLAQLTARTHHNIAIVALANKLARMAWAVLAKNEVYRPPLLTGNTI

SEQ ID NO: 449634 - protein, 366 aa, unidentified
MKKTSTVRVNGNRNFKGHKLTIGLDLGDRWSNYCVLDEAGEILLEQKLATTPEAMKQTFERIPRSLVALETGTHSPWLSRLVKELGHVVLVAHAQKVELISKSNRKDDRHDARTLARLARIDPELLGPVRHRSAKAQIHLTVIRARAELVSVRTALVNAARGLAKSHGERLPKCGTEQVSRELAAELSAELREVLEPLLKEIESLNEHIKEYNARMETIAKESYPQVALLKQVKGVGTQIALTYVLTLDDPHRFAKSREVGCFLGLKPGRRDSGQSQPQMHISKEGDRYLRTMLVQGAHYILGPFGEDSDLRRWGLRLAERGGKNAKKRAVVAVARKLAVLLHRLWVSGEVYEPLRNSHKAMRAAA

SEQ ID NO: 449635 - protein, 359 aa, unidentified
MGSPRIVAKEQEASMKCIYYIGLDIHKKIIVFCIKDQTGHLIRQGSVSASREALRQWVTELPGPWIGAMEATIFTGWIYDFLKSYAMELKVAHPEMLKAITAAKKKNDRADAERMTDLLRVDLLPECYMAPEHLRELRRILRYRNHVVRNAVKVKNKISGLLMEVGASYNKKRLHGRTYFNNLLETVEDVPPSVKELLGLSRSSLEMFQAVQKRLINALRNDPQIRERVQRLMTIQGIGEITALTWVLEVGEPERFSSIRKAVSYCGLCSAQRESAGKEIRGPISRKRNKHLQTVLVEAAKLAPYWNPQLAELHARELSRGNRNRATLAVARRLVAYMLAVDKSGRDFVPKSAKEEEAA

SEQ ID NO: 449636 - protein, 324 aa, unidentified
MLPTLGIDISKDSFHVELSINDKLRHRRFANRKEGFAELCVWLAKHKAPLVHACLEATGPYSEALALYLHEQGHTVSVVNPAQIKAFGQSELLRNKDDRPDAALIRRFCEKQQPAAWAPAPVHLRELQALTRHRENLLETRQQQINRLAVTNTKEVAKSLRKLVTHLDAEIQRTERQINDQVDRHPDLKQQCQLLESIPGIGKCTATRLLAEIEDISQYKSARQVAAYAGLTPRNNRSGTRRGQTRLSKTGNARVRKALFLPALVAKQHNPVIRNFCQRLARHGKNKMQLVGAAMRKLIHIAFGVLKSGKAFDPNHQLLFNSRS

SEQ ID NO: 449637 - protein, 470 aa, unidentified
MSNQTTKMTGRMKYTQRKGKGLPKQLESINVHAAGIDIGAEMHFAAVPPREGEDEAVRSFGCFTADLHALADWFEECGVETVAMESTGVYWMPVYRVLESRGFEVLLVNARHIKYVPGRKTDVVDCQWIQTLHAYGLLRGSFVPPKNIDQLRAYWRQRKMLVESCSREVQHMQKALTQMNLHLPVVLSDVTGVTGMKIIRAMVQGERDPRTLARFRHGGVKKSEEEIVKALTGHYSDEHLFCLRQALELYDTFQKSIADCDAELQKHMARFERKEPQAPLDEEGHKKRKIKKRANEPAFDLRAEVHRIYGVDLTRIDGIEAMTAQTILSECGPDLSQFPTARHFASWLGLCPNNQITGGKVQKRHSRSVKNRAATALRMAAQSLHRSQSYLGAQYRRKRTKLGAPKAITAMAHKLAKLIYAMIRHGQAYVDYGQQKEEQHHIERTKRHLIRQAKKIGYELLDIETGELVS

SEQ ID NO: 449638 - protein, 293 aa, unidentified
MKSTTIGLDIAKNVFQVHGVDAKGNVVLRKMLKRRQVLEFFANRAPSLIGMEACAGAHYWARELGKQGHEVRLISPQFVKPYVKGNKNDANDAEAICEAVGRPNMRFVPVKTPEQQDVLALHRVRSGLVKERTAQANRLRGLLGEYGIVIGKGLAQLRKRLPEILEDAENDLSDLVRALFADLHGRILTLDQHVAAYGDKLKTLNQMSAVCRKIGQVPGVGPITATAMAASLGDGQAFETGRQVSAWLGLVPGQDSSGGKPKLLGISKRSDTYLRTLLIHGARAVGASRRQEA

SEQ ID NO: 449639 - protein, 400 aa, unidentified
MISVGIDVSKGKSTVCIMQPCGKVLRRPFDVKHDKTELEDLAETILGYDDETRVIMEATGIYHLPILTFLQSKGIFTTVINPYEMKQYRCHGLRKVKNDKRDSMMIANFGIDYWYRLTDFKASDEVYSELKLLVRQYNHYMVLHVNATQERTHMLDYTMPGIKNLMNSYNEANGKDKLGDFVNEFWHYDNITCMSEDEFIAAYNDWAIKKEYRQSQEKAKTIYTLALNSIPTLSSKNNSVKMLVQEAVRVLKEIDHTLSIIITQMRELAKTLPEYSVVREMGGIGDVLAPKIIAEIGDVRRFHNGKALVAYAGVDAPPYQSGQFTGTNRKISKRGSASLRKIAYEIMRCLKTTRQENDPVYCFIVKKEKEGKNKKSAKVAGINKFLRIYYARVNEIYQGK

SEQ ID NO: 449640 - protein, 370 aa, unidentified
MGNRSMFVGLDVHKETIDVSVAEGHRGGEVRHYGVIASDLEPLDKVVRALRAPDRQLHFVYEAGPCGFGIYRHLTKRGERCVVVSPSMIPKRSGDRVKTDRRDSQMLARLHRAGELRAIYVPDDADEAMRDLVRAREDAVVVGTQAKYRLKAFLLRQGRRYPGREGWTLPYRRWLTDLSFPTAPQHITLQEYRDTIDETERRLERVTEQLRQLTPTWRWAPLVAALQALRGVSFVTAVALVAELGDLTRFGHPRELMAYLGLVPSEYSSGPSVRRGAITKAGNPHVRRLLAEAAWAYQGMPRIGRQHAYRQEALPKVVCDIAWKAQLRLTTRFRRLVARGKAKPKVATAIARELTGFIWAIAQEVSASSQ

SEQ ID NO: 449641 - protein, 344 aa, unidentified
MQIVRIGLDLAKYVFEVHGVDCHGKTVLRRTLRRGAVMSFFANLPPCLVGMEASNGAHFWAKAISELGHDVRLISPQFVTPYVKSNKNDRNDAEAICEAVSRPSMRFVPVKSAEQLAVQAVHRIRSRLVADRVRLVNQVRGLLGEHGIVVAKDIGNLRRALARIAGEDEDRALNPLVRSLMRELREELAELDARIAGYDRKIRELYRNSEICQRLGKVEGIGPVTATALVAAVGDRSSFKNGRQFAAWLGLVPKQRSSGGRARSFGISKRGDRYLRTLLIHGARSALGRVREKQDPRSLWLGKMRQRRHPNIVAVALANKNARIAWSLLTSDSVYDASLSVGAA

SEQ ID NO: 449642 - protein, 404 aa, unidentified
MQVLIERGAGLDVHKKTVVACWFAGHELTSRAVKRTFGTFRWQLQELRDWLLRAGCTHVAMESTGVYWQPVHRVLEDHFQVILGNARHMANVPGRKTDMNDAEWIATLLRHGLIRPNFIPPKPVRELRELTRYRRKLVQTTTAAQLRVDKVLQSANIKLSSVASELFGVSGRRMLRSLANGVTDARALAELSRGKLRPKRDQLVQALSGNFTAEHARLLAIQLEMIERVEASVAELEHLIEEKTSPYQSSITQLDAVPGINRTIAVDVLAEIGTDMTSWPTHRHFAAWAGLCPGNRESAGRRRKARTREGNPFLKSILVQAATSARKRRGSYLAARFQRLSRRRGERVATVAVAHELAVSIYYMLLRNEPYREPAAADPQHARDKRKTQLLRQLHRLGYDVVIA

SEQ ID NO: 449643 - protein, 346 aa, unidentified
MDQIARIGMDTSKHVFQLHGVNFAEQPVLRKKMRRREMLDFFERCPPTVIAIEACGASHHWARSLSAYGHEVKLIAPQLVKPYVKRGKNDAADAEALCEAVSRPTMRFVPAKTTEQQAALMLVGMRERLVVAQTQLVNTIRGYAAEFGLTAAKGVSHVPVLLERIMMDKTVPALAKDLFASLAHEFAGLDERKRDIEAKLKAWHKGNEASCRLAKIPGVGPIGAVLLVMKAPAPQQFASGRQFAAWMGLTPKDHSTGGRVRLGIITRAGDEILRSTLVQGATAVLQQLRIGRGSNASRWLTELLKRKPPKLVAVALANKIARIAWKMMVTGESYRAQVSEEAMSAS

SEQ ID NO: 449644 - protein, 510 aa, unidentified
MMTTSTLHTVPIGIGIDTSRYGHYVTFLSADLQPAAAPLQITETRAGYDQLVATFHKLKQRHPAAVFHIRLDAAGQYAANLEAFLHKLPFEKTVSIGDPVRNKNYRVAHFPKRKSDAVESYCVARFAVIEQPKTTSEYPAELLALREMASRLEAQTREVTRHVNQLHSLLARVFPELATLISSLAANWVLQLLAKYPTPAKISRARLATIREIPRISQEKAQRIHQAAQTTIASLTGDIAEQLVKSLVRQIQASQRERREFERMLIQAYEALPFANRIDTIIGIGVPTAAVLTAKIISIDRFDSPERLVGYFGIFPQEVASGIDADGNQRPRRHTRMSKKGNDLVRHYLYNAAMSACRYNPACRALYQRLKAKGVSGNAALGHVMRKLLHLVFAVWKSGQPFDPNHYQWEQPHATESDIQPPRKNNAAGHKQETSPERQVVTAAEAINVSASDTRVNAAARAIPSLLRSPNSEQASEAPSERIRPKEFRTKSSTPTKERNKKGVITPDTT

SEQ ID NO: 449645 - protein, 366 aa, unidentified
MKKVAFLGVDYHIKTITIAVYLGTEKKFYETIRLNNDDKTIKKYMKKLSTQFDLKICYEASCSGYVFQRKMQSLGYHCDVIAPSLTPRKPGDRRKNDTRDAKKLAQNYANDLLTIVHPPSQEEESVRSLIRCRITMKESAKRVKQQINSFLLSKGCRWPKSKWTKQHHLWLSKIEMPNLYLQQVLDEYLGHLSYLESRLQHLEQQIEQIANSKLYAPSVNKLRTLRGIETLTAMILIVEITDFRRFPSPRSLMAFLGLIPGEDSSDDTRKDVSITKAGNHRCRNALIEAVQHCVKKPRISVKMKQLLSEVDAQSSVIAQKCMYRLHKRYWALVMKGKARQKAIVAIAREFVGFIWALMQPVFCAVA

SEQ ID NO: 449646 - protein, 417 aa, unidentified
MKSASNTLPDQAPNDVTAGIDWARDDHAVAIVDGRGQRVADTIVEHTATGLRDLVTFLGRHGASEVAIERPDGPVIDTLLAADLTVVVISPNQVKNLRSRYGSAGNKDDRFDAFVLADTLRTDRPRLRRLQPDTPATVALRRACRARKDLISHRVAAANQLRAHLRNVFPGAVGLFAELDSPISLAFLGRFTTQDQADWLSAKRLGDWLTKQGYSGRTDPAVLHDRLLAAPRGITGDDATNQAHITAALVTVLVTLVEQIKALETQITRQLHAHTDAHIVTSLPRAGRVRAARLLAEIGDCRAKFPTPESLACLAGAAPSTRQSGKLRAVTFRWACDKQLRDAVTDFAGDTRHDNPWAADLYTRARDRGHDHPHAVRILARAWLFVIWHCWQQGVAYDPAKHHALQRILDKQAAKAA

SEQ ID NO: 449647 - protein, 360 aa, unidentified
MIVQGTSVGLDVHALSVVAHAVDEETGKVARARLCPDHGEVLGWLHQLRAPVRVTYEAGPTGFGLARAITEAGMECLVAAPSKLQRPAGDRVKTDARDAAHLARLLRLGEITAVRVPEREIEAVRDLVRAREDARADLMRVRHRLSKLLLRQGIVYSGGTPWTCVHEEWLRRHRFDDIHLKAAFDHSFDAVLAATAARDRLDEQILVVAASRRFADPVNRLGCLRGISALTGLALTVEIGDWSRFSGSSIGAYVGLVPCEYSSGNSRVQGSITKAGNTHVRRLLIESAWHHRKSYSTSGPTLRARWAKVDPALRARGHAGNRRLNKRWRSFTERGKNPLVANVAIARELAGWCWSLATMQ

SEQ ID NO: 449648 - protein, 339 aa, unidentified
MGMYCGIDLHATNSFLCVIDESGALRFEAKVPNRLEVVRSRLEPYRESLEAVAVESTFNWYWLVDGLSSAGYPMRLANPSAMKRYEGLKYSDDRSDARWIAELLRLGILPTGYIYPRESRPLRDLLRHRARLVRNRTARLLTLQNLLARETGRQITGNDLKRFAPGEIPSLGLSCETNLAISTSLEIVALLDEKILEIEKVVVRGVRGRVELKLLRTVGGIGKALGLTILLETGEISRFRSAGHNASYGRLVPSERRSNERRKGEGNRKNGNPYLSWAFSEAAEFARRFQPEARRFFERKRAHTSELVAYRALAHKLARACYFILRDRVEYDPALLFRN

SEQ ID NO: 449649 - protein, 344 aa, unidentified
MTYYAGLDVSLRTVNICVIDDDGELVAETKLASDVQDIVAYLDDRDIQIESVALEAGTLTQYLTYGLQAAGFAVICMEARQVKGALSAMRNKTDKHDARGIAQILRSGWYSPVHVKSIESHHIRMLLSSRRAVLSKCVDLENEVRGLFKIFGIKLPPKLGHGAFDGTVRDIIEADGALSHALLPLLEARLVLYHTFRELDNRTRKMANKDSICQRLMTVPGVGYITALTFKAGVDDPTRFKQSRTVGAHFGLTPRRSQSGEIDIDGHISKAGDPDVRCALYTAANAMLTRSAQWSSLKAWGMKIAKTRGHRRAVVAVARKLAVILHRIWIDDTQFRWGTEVARS

SEQ ID NO: 449650 - protein, 401 aa, unidentified
MGSLWAGVDVGKTHHHVCVVDDDGTVVLSEKIPNDQQAISGIAGRLGKRRKPIRWAVDLRGGPASLLLAVLFDRGAEVRYVSGTVSSRMAEAFHGERKTDAHDAYVIAQTLRMRGDLPTLTLADGVQQQLKLLVSRRLDLVADRVRITARIQDLLAMISPALEKALNLRSKGALRLLAQWQTPAALRRAGEARILAYLRQHGVRAAKTLTAKVLTAARTQTVSVAGEATAAGIVAQMATDLEAVNDRIAALEETIAAVVAEHELGKIVTSLPGIGTTLAAEFLAHAGTLTTYASPAALAAHAGLAPISRDSGRRQGHQIRPHRYHRGLRRVFSMSSFTALTHCPRSRAYYDKKRAEGKTHRQATAALSRQRLNVLWACIRDKTPYQPKQPRSAEVASCELA

SEQ ID NO: 449651 - protein, 323 aa, unidentified
MIDKEGINNEAQCFVGFDISKASVDALSLPDGEYKRFENTDCGLQQCLAWVQGKRHCLCVVEASGGYETALAGVLAAAGVPIAVVNPKHVRDFARGMGILAKSDRIDARVLALFAQKRRPPIRALPSETQRGFIDLVDRRRQLVSMRGQEQTRLTQAKGRPRKSIQAHIKWLNGAIDDVDRNLNDTLRGCELWLVDSQLLDSVPGVGKVTICTLLARLPELGHLDRAAIASLVGVAPFVRESGQWRGRRFIWGGRAEVRSVLYMAVISAIRCNPVIKAFYHKLLSARKAPKVALTACMRKLLTILNCMMRTRTPWNPPLAQNT

SEQ ID NO: 449652 - protein, 343 aa, unidentified
MQAVTTIGLDIAKSVFQVHGIDAEGKVLIRRQLKRRYVLAFFQKLSPCLVGIEACATSHHWSRELKALGHNVRLMPPAYVKPYVKRQKNDATDAEAICEAVTRANMRFVETKTPEQQSCLMLHRTRQLFIRQQTSVINAIRAHLAEFGIVAPVGRKGVEHLLAIGTDGSDQRVPEVTQACLAALGAQLRMLKAQILEFDRRILAWHRSNETSRRLDAIPGIGPALATALVASVADAKAFRSGRNFSAWIGLVPKQHSSGGKDKLGSISKQGDRYLRSLFTAGALAVIRYAKIHGTQHRPWLTALLARKPTKVAAIALANKIARMAWAMMARGERYREPVALAA

SEQ ID NO: 449653 - protein, 378 aa, unidentified
MATTRSVLRHELTTKSGDLYMSLDLGDKRWHISIGDGRCGLSRYTVGAGQTDELADCIAKAKNRLHSSRKAIVHSCYEAGRDGWWLHRWLTEVGVDNIVVDPASIEVNRRARRAKTDRLDADKLVAMLVRHHSGERVWSVLREPSPQDEDARRAHRELQRLTHERVAHTNRIGSLLVLHNLRPSVVIGGRYWSAWWERHRAQVPPSLAAELEREVLRLQLVKQHVRAIEAARTEELVDGKQPQVAQLAQLRAIGTKGAWVLVKEVFGWRNFANRRELAGSLGLVPTPYASGDSQLEQGISKAGNRRVRGLLVELAWGWLRLQPGSALTQWFNRRFASGGKRLRRIGIVALARRLAIALWRYLKNGEIPAGAQLKPTGA

SEQ ID NO: 449654 - protein, 435 aa, unidentified
MSSKAYRATRVNEVNWEQLARGKEGLGVTVGIDVGKFDLWVICRWADGRFERPWRVKNPWEIPPLVGVLKQVKADRKLVVALEPSGTYGEALRQALGDNGIEVQRVGTKASHDYAEIFDGVPSQHDGKDAAVVAELAELGKAKPWAYEAADSWEEELVYWVEEMVAQRQMLMPWQGRLEGLLARHWPEASQVLKLSSGTLLRILKRYGSPQALAADGDAATQLARWGRSRLSPAKIEELLTGARSSVGVRPGPWQQRQIQEYAERALAARQQANRAQRRLRHLAAGHPVLQAQGKVVGVPTACVLWVSTGDPRDFDSAGAYRKAMGLNLAERSSGTYQGRLRISKRGSARTRQWLYFAVLRLVQRCGVRPWYEAKKARHEGEARRVLVAVMRKLAVALYHVGVRNEEFQPRRLFGRIGRRSGQPAQRSGASKQRA

SEQ ID NO: 449655 - protein, 368 aa, unidentified
MTAQTLPRPSRYEHRSYPGPGSVIGGVDTHADTHYGAVLDCVGRLLATQQFPADACGYRQLLEWMRSFGHVDRIGVEGTSSYGACLTRHLRAAGIQVIEVNRPNRRARRLHGKSDPLDAENAARRALSGEEDIVPKDTTTTLESIRVLRIARTGAVKARTAAFNQLKDLLITAPDAVRDRWRGKTLYRVSLEAARSRPDAGHAEDPTTATRLALRSIGHRIQSLNEEITALDKQLVDLVARTAPTTIALTGVGTETAAQLLLTAGANIERLHNEASFAALCAASPIPASSGKTTRHRLNPAGDRDANKALYIITIVRMRYYPRTKAYVERRQAEGLTKKEAIPRGQALHRPRPLPRHPSRPHPSAQPP

SEQ ID NO: 449656 - protein, 335 aa, unidentified
MQIYGIDLAKEKFDVSFFDLTSKKVSNQPSHKVVKNNFKSIGRFLETLPSDAVLVAEHTGVYGDTLLKCCMDSNVKIAFVGGYVIHRYRATPDRAKTDVLDCALLRDFGERYPDKLKYKTFPEEALYELRQLARHREMLVEQRKQLITADRSEDCRPIRSLAVKRSMDRIKEMLDTEIAETEKEMLKVINGHESIHHNYELVKSVDGVGLITAVELLVKTENFTKITTARQYAAYAGTAPYEKSSGKMDKGAHISKIGNRRSKTLLYICAESARLHNKEIKLYYERRTLIDKKPRHYVLNAIANKLLRIIFTLVEKGEYYDANFIRQDPRVVKYN

SEQ ID NO: 449657 - protein, 422 aa, unidentified
MDDEVYYERCAGIDVHKTFLVTCLRIGRKQETREFGTLTHEIRDMVAWLKDNGCQMIAMESTGSYWKPLYNIFEQEDIPAMVCNAYHIKNVPGRKTDVNDAQWIARCLSQGLLNPSFVPDRAQRELRDMVRFRKSQIEERSRNINRLQKFLEAANVKLGSWLSDIEGKSATALLELVIGQTDFTVQDVSDRMHPRMKSTAEELFLSLEGSITPSQREFFTHVMTVIREQTSQIQRTDAMIKRSLNDNYLAAIQALEVLPGIATISAEQILAETSTVMKRFKNQHSFSKWAGVCPGNNESAGKRKTGKTPPGNKALKSTLTQCAKTAIKNKNSFFSAQYYRLVSHRGKNRATMAVAHSLLIAIYFVLSGYQFKDLGADYYNQFNREKKINSHVKQLSKLGVDIPDDFLRTSFENLAHPPHPPD

SEQ ID NO: 449658 - protein, 341 aa, unidentified
MDKLDFSGIEVSAEELVVALQRKGDRKALKTFPNTLPGHQAIIRHLSAAGRTVRVCLESTGLYALDLALALHRAGIQVMVANPRAVRHFAEALMKRSKNDRLDAGVLREFAARMPFQAWQPPATAALQLHALARRLQALTEMQTAEKSRLAAIQATATTPAALRRDLDRSLRSLRRSIARLSGEAVKIIDQDKELKLRFDLLLSVRGSIAATSAIQILAELAVVSPDLDVRQWGAYTGLDPRECSSGSSVHKKIRISKAGNAHLRRALYRPALVAIRHQPHLRAFYQHLRAQGKLKRVALVGVMRKLLHAIYGMFKHQKPFDGSKVYSLPSPKISTEEVAA

SEQ ID NO: 449659 - protein, 340 aa, unidentified
MLVMIGIDPHKATHTAVAVDDDENVIGEFTLEASSSQAECLIGWAEGFAKREWAVESGNGLGYLVSRQLVAAGETVFDVPPVLASRVRLLGSGRSQKNDRNDARSIAIAALRSDRLATVQPDDHVTVLRLLVKRHRDMARLRNKHCSRLHSLLVELTAGGIGVKVSVTNASQLLDDVGVTDEATRHRILIAREVVGDIGRLDQSLRASKQRIATAVQASGTSLTGIVGVGPIGAATIIGYTKDVTRFPTRGHYATYNATAPIEASSGGHTRHRLNPRGNRILNHAIHIAAVTQLRHDTNGRIYYDKKIAEGKTPKEAIRALKRRISDAVYRRLIADSNNQ

SEQ ID NO: 449660 - protein, 342 aa, unidentified
MQGTTIAIDLAKSVFEVAISERPGRVSTRRRLSRGAFARFLNEQEPATLVMEACGTAHYWAREAQARGHEVRLLPPRDVQRYRRGNKTDRNDAKAILEAHRNEDLHPVAIKSVDQQALVGLHRLRSAWVSARTARINTLRGLLRELGETIPTGARNVVPHVYARLAEEKIPAVSRPILASAAEEVRELERRIEEVEAQLEAIARQSELIRRLRTIPGIGLLTATAIPATVDLQSYPSGRHFASSLGITPRESSSGHTRHLGRITKRGDPHLRTLLIHGARSVLHHAKRQKDPDRLRSWALERERARGHNKAAVAVANKLARIVWAVAVHEEIYRPTPRATES

SEQ ID NO: 449661 - protein, 275 aa, unidentified
MTVYIGIDIARKKFDAAELCDGAYRCKTFENTPAGFTALYDWLKAGSIPDIHVCLEATGNYGTALATFLYEKNLKVSVVNPARIKGFAASELTRTKTDKADSRLIARFCKAAQPDPWRPVPAPVRKLQALVRRIGALNGMLRMECNRRENADIDAQESVERMINHLKMELESVRRAIKEHISNVPELKKQNDLLLSIPGIGTVSASLILSFMASKEFTKAKEVTAFLGLNPRHHQSGTSVRVKWHTEFGHLNRGDMLTSEQHRCSNEKKKFQRRV

SEQ ID NO: 449662 - protein, 321 aa, unidentified
MSRVLVGVDVCKDFLDAHARPAAVNHRFDNNPAGIEQLVAWVRTFAPERVVFESTGPYQKAAVGALLAAGLPAVVVNARQVRDFAKGTGQLAKTDKIDAGILAHFGAVVATVVRPLPAKEILEFRDLCDRRGQLVRMLAVEKNHRHAAAGCAPRVLKNIDKHIAFLEQQIEDLEGRMDRIVAASETFKAKDEILQSIVGIGPQVCRTLLVHLPELGQSSRQSIAALVGLAPFADDSGKCNRIRYIRGGRAKVRIALYQAAVAAIRYCPVMKAFYAGLKARGKATKVALIAVARKLLVLANALLRTGTRYQPRTNSVCPKNA

SEQ ID NO: 449663 - protein, 360 aa, unidentified
MPEQRKELTYEGQNIYVGIDVHLKSWTVSIQTETLHHKTFTQPANVSILVHYLREHFPCGNYHSVYEAGFSGFWVHYKFKEIGINNIVINPADVPTSQKEQLQKDDPTDSRKLARSLRAGSLTAIHVPSKQTLHERSLVRVRSSLVKDMSRFKQRIKSLLYFYGISYPKEFGSLGTHWSKAFIQWLKENVSQDENMSKEALLFILEEVEQQRKLLLEVTRKIRALSRSETYSSRMALLRTIPGIGFITVITFLTELEDIHRFGNTDQLAGYIGLIPNRHSSGSKENVEEMTFRGQKLLKCCLIESAWFAARLDPAMNLCFNQSCKRMEPNKAIIKIARKLLNRIAYVLKNEKEYVASVVE

SEQ ID NO: 449664 - protein, 355 aa, unidentified
MQKYKISFKGQNIYVGIDVHLKTWHVTTLTETGCKYSFAQHSDAKELFDRLNKKFPDAHFKSAYEAGFCGFSAHYALMEQGFENIVVNAADIPTTGKERTMKSDAVDSEKIAWALKRGQLTGIYVKDKSFMDDANLMRLRQRFIKDLSRQKNRLKHLLYTQGVTYPERFAKSGTHWSRNFMKWLREEVVLLSEEKLTLMLLCDQVDNTRDAVLRVTREIRRLSQSDKYKENYDLLTTIPGFGLITSMSLLTELDNNPMRFPNERKFVSFLGLIPTCHDSGEKKVNGEKTFRGNKHLGPLIVEASWIAIQRDYDLGAYHTNCCQRMKPQKAIIKVARRLASKAYAVMKTKKAYVLR

SEQ ID NO: 449665 - protein, 457 aa, unidentified
MSKRRSKTKSKSINVPKLPPHLQHMNLNAAGIDIGSERHMVAVPEGRDTVSVREFGTFTADLEALATWLKQCGVTSVAMESTGVYWIPLFEVLERHGFEVKLVDARHVKNVSGRKSDVLDCQWIQQLHTYGLLAGAFRPPDEICVLRSYLRQREMLTQSASMHIQHMQKALQQMNLLLHNVVSDITGVTGMKIIKAILAGERDPRVLARNRDERCHNTTATIAKSLVGNYREEHLFALRQAVDLYETYQAKIADCDRAIIKQVEKQPNRSDDGPPTPAKQVQARDRIRDGVDVRDLLFKKSGVDLFAIPGLAADTLLTLASEVGFDMAPWKTEKHFASWLSVCPGTKKSGGKVLNNKTKRNPNRATQAFRMAANSLSRSQTALGAFYRRIKARSGGQQAVTATAHKIARIYYAMLTQGTSYVELGQQAYEQRYKERRIDHLKVQAKSLGFQLVPCAS

SEQ ID NO: 449666 - protein, 386 aa, unidentified
MEKANDLSRSSTVLEQNSTLIAVIEMSLSSWLVAGIVPGLARHPLKKLDADPEALLLLLHRWREEAAKYGHGIARMAIAFEAGRDGFWLARWVRARGVEAFVIHSTSVAVPREHRRAKTDRLDTEHLKRAFLGWLRGEPNHCQMAAIPSLDEEDARRPNRERENLVNQQTSIVNRMKACLIRLGVRNFKPTLRHASERLEMVRTPEGAPLPPNTLAEMRRDMARLRVVREQIREIEAARSQRLQVSESRAQAMVKLLTRIIGVGIETADMLVHEILSRQLRDRRAVARYAGLTGAPDESGKRRREKGLARAGNARVRRGMIQLAWRFLLFQKDSALAQWFRARTAEARGGTRKTLIVALARKLLIAFWRLTMTGEMPVGIKLRPVV

SEQ ID NO: 449667 - protein, 352 aa, unidentified
MDYFAGLDVSLEMTSICIVDADGVVVKEAKVASEPDDLVAFFAQCGMAMKRIGLEAGAPSQWLYGGLAEAELPVVCIETRHAKAALSAMPNKTDRNDARGIAHIMRTGWFRAVHVKTQTAQELRFLLVARQTLVRKLMDIELAIRGMLRSFGLKMGVVSKRNFEARVLELAGDRAMLMRALNPMLAARRALAHEYANLQKAGLDFARHDDVCRRLMTVPGVGPIVALTYRATIDVPSRFRRSKSVGAHLGLTPRAYQSGEVDWNGRVSKSGDAMARAALYEAAHVLLTRVKRWSSLKAWGMRLVKNRGHKRAVTALARRMAVLMHRIWVEGTTFIWKTGDGQAIAPKPVHGV

SEQ ID NO: 449668 - protein, 427 aa, unidentified
MPYRIAAVDVHKKMLAVVVTDVEGKGEYQFERRKFGTTPGELHVLAQWLVQLEVEEVVMESTAQYWRPVWGTLELFWRPARRQREGAHKMSGTLHLCQAKSNHGPRGRKNDFLDAERMVKRLVAQELVLSFVPDEEQRLLRTVTRRKHQLTRAKIGFKNQLESLLEQGHIKLSSLVSDLLGVSARRMLKALAEGETDPAVLAAMADRGLRATAEQLRDALGASAQLNGAFRRLLKLSLEELEMIETHIERLGQEAMGLLKGHEDVVQRVAEVPGFGPDAAVQMIAEVGLEAANFLTEKNLSSWVGVCPGSQESAGESQSTRSPKGNRQMRRLLNQAAQSAVKVKGSIFEVTFHRLLPRLGYQQAIWAIAHRLCRLLWLILHKGVRYEERGPAVSAKSKRTRAARMIRELKKLGYRVEGGPLPAVARA

SEQ ID NO: 449669 - protein, 355 aa, unidentified
MNRKSSKLFVGMDVHKDSIDIAVAEEAGEVRHHARIGGEINALSRAVRKLESLGRPLVLVYEAGPCGFAIYRMLKARGHQCWVVAPSNTPRRVRDRIKTDRRDSLKLAGLARAGELTAIYVPDQADEAMRDLVRTREDAVAMQRQARHRLAALLLRNDIRYAGKTAWTEAHRRWIARLILPATPQRIAFEEYLQAVKESTERVQRLSRAIEHELVHWRWQPVVDALQACRGIQLIHAARIVAELGDLSRFSHPRELMAYLGLIPSENSSGDRRRQGAITKAANNSARRALVEAAWAYRHGAAVSSIIVRRQSGLPKAVIAIAWKAQLRLCARFRRLSARGINRNHKEIIHPHSII

SEQ ID NO: 449670 - protein, 457 aa, unidentified
MFNVRGEDCVRPDEEFYTEDDEQIVERVAAIDVAKASGKVCTRVPHASVPGRRVTKVWDVAATTNAIMVLADQLAQAGIERVVVESTSDYWRPFVYLFQAAGLNTWLVNARDVKQVPGRPKTDNLDAVWLAKLNERGMLRPSFVPPAEIRRLRDYTRLRADLTEDRSRYKQRMEKLLEDALIKVSTVATDIFGVSGRAMIEALIAGERDARVLAEMAKGRMRPKQAALVEALTGRFDDHHAELARMLLDQVDVLSAQIGSLTVRIDELIAQIPAAAAPVVDHPTTSTGGDPTTAPLGAVARLDEIAGIGLHAAQVIIAEVGLDMAQFPTAAHLVSWAKLSPRTIQSGPKSRSGKTGKGNRYLKGVLGEAAASAAKTDTFLGERYRRLVRRRGKLKALVAVARSILVIVWHLLANPNDRYADLGSDFYDHHLHKDRKTRNLVRQLQALGHHVTLAPAA

SEQ ID NO: 449671 - protein, 355 aa, unidentified
MTIISHLYAFVVGVDTHAKNHVYSVLTKSGEHVDTATFPTTKAGIKRALTWAGRRTGGDLETLWVIEGIGTYGAILADHIAEAGYTVAEAASMNARDRHATGKDDRIDARRIAGAVLSMDESRLRFPRQADGPRQGLRILVKARESMTREKTRTINALTALLRGQDLGVDARRKLSMVTIQTVAKWRIRDESVALTEARREAIRLAKRVVELDAEIKDYATRIEALVKASPGAALLAEPGIGPITAAVFYLAWSHHGRVRSEAAFAKLAGVCPIPASSGNVVRFRLNRSGDRRLNSALYMVAVTRLSHHKKSQAYMARRLSEGKTKKETIRCMKRALARSVYRILEATNPIGQAA

SEQ ID NO: 449672 - protein, 436 aa, unidentified
MTLINFVAANQKYYAFNLLSVFIMVFWSVQYLLQHLLVQTQVSHQLLQPLILILQLPQTPQFRHARPGKFFLPVNGMDYFLPLRLTVRNVLTRRITMNIVFLSIDLAKNVFQLCGLNQAGKPVYTKRTGRKELLQTLANIPACLIGIEASTGAFYWQRELEKLGHKVKVISPQYVRPFVRGQKNDGNDAQAIAVALMQPTMQFVPPKSPEQQDIQALHRARQRIVNHRTATVCQIRGLLLDRGIPIGSAVSRARRAIPLILEDAENGLSSRMRRTIAELYDLFNDLGRRIHFFDKEIETVFRQSEACPRIAKVKGIGPKTATAVVAAIGKGTEFKNGRHFAAWLGLVPRQHSSGDRQVLMNMTKKGDKHLRTLFIHGARAVVRVATNNNDGHMNQWVNQLKERRGFNKTTVAVANKNARIIWSMLRNDTGYQVVCN

SEQ ID NO: 449673 - protein, 428 aa, unidentified
MVPSDQIEHSHEHTEPALPYQWFVGIDWGSQTHQVCVLDRDRHRVGARSVEHEGVALAECAAWLTTLAAGEVHRVAVAIEVPRGAIVELLVERGFHVFAINPKQLDRFRDRHTVAGAKDDRRDAFVLADSLRTDRPSFRQVQVEEPHLLMLRELSRTEEALLTEFRRATNQLREQLHRFYAPLLQLCPAADEPWLWDLLELAPTPTHAACLTEAQVAGVLKTHRIRRVSAGDVLQVVQAPALPVAPGTAEAASAHCALLLPCIRVLAAQLQTCAHQVEALLHTLGTVEAPPARPSDVAIIQSLPGVGRKITAWLFAEAAQPLAERDYQMLRTQGGVAPVTKQSGKRRQVVMRRGCNPRLRYALYHMAHCIAQRDAYFASLYTALKTKGQSHGRALRSIGDRLLRMLVAMLREHTLYDASRGQKVLMER

SEQ ID NO: 449674 - protein, 440 aa, unidentified
MAMRKRDEEVFPNAAGIDVGASSHWVAVPPHLAEESVREFGAMTDDLNALADWLLACGVDSVALESTGVFWIPIYEVLEKRGLKVWLVDARQMKYVPGRKSDVQDCQWLQKLMSLGLLRAAWRPGDEVCVVRAVVRQREVLLSEQASWVQRMQKALVQMNIQLSEVLTDVMGMSGQAIIRDIVAGQRDPAMLAQHRNARVKASAVQVQRALTGNWRDEHLFVLAQALAMYDSVAQRVTECDAKLEVLLAPLGQHEVILTGRSKRAGKNTPGFDLRTALARWAGVDLTRINGLAVSSVLTVLSEIGPDLSRFANVKHFCSWLGLCPGTKISGGKVLSARTRRSTNRVRQALKLAVMSLSRNGSALGAFYRRLCARMDKPRANTAVAHKLARMIYFMITRGEEFVDRGQQHYEQQQRQRSIAALKRRAAALGFQLNPVPAGA

SEQ ID NO: 449675 - protein, 355 aa, unidentified
MKTTIPSITIGLDLGDKKHALCVLNHEGDIIDEREITNHLESLRRLSQKYPKSRIAMEVGSHSPWISRFLKSLGHEIFVANPRKLRAIYANDRKSDRNDARMLAKIARIDPQLLYPIQHGTEQSQRDLLQIKLRDNLVRQRVDIISSVRFTLKSLGIFLPSPNSACFAKRCRTLLVGAHEDFLEMIEPSLQVIDTMTQKIRELDRAIEDLCEEKYPVTKRLRQICGVGSITALSFVLTIEDPEHFERPREVAAYLGLVPRRDQSGKLDKQLGISKAGDAYLRRLLVGSAQYILGPFGPDTDLKRHGLMLATRGGGRSKRKAVVAIARKLSVLMLTLWKYERDYEPLRNEHEAQAA

SEQ ID NO: 449676 - protein, 429 aa, unidentified
MSYRIAGIDVHKKMLAVVVADVEVESEYTFERKKFSSTPEQLRSLSAWLLEQEVEEAVMESTAQYWKPVWETLERYWKPPCEKREGTRRKSGTLHLAQALSNRGRQGRKKDFPDAERLVKRLVAGELTLSFVPDAEQRLWRTVTRKKYQLRCDRIRLQNQLESLLEEAHIKLSSLVSDLLGLSARRMLEAIAKGETDPTTLAALADQRLRATAEQLRDALGACTELNSVYRRLVKMALEELRLIDKQIGRLDQEMASLLSKYQDAVQRLAEVPGLGVDSAQQIIAEVGPTAAAFPSEKCLSSWVGACPGDNESAGVNHSHRSPKGNRHMRRLLNQAANAAARTKGSIFEVVYHRSVPRLGHNQAIGAIAHRQCRLIWLILHQGVRYEERGTAVSKRSKQLRTWKMIRQLRKLGYRIEPPNPQPSHAPAE

SEQ ID NO: 449677 - protein, 348 aa, unidentified
MDTESDRVAEIVGGVDTHKESHTVAAVDGAGRLLGTSEFPATASGYRALLDWLGKRGAVSRVGVEGTGSYGAGLARYLAQEGVLVVEVIRPNRQLRRRRGKSDPVDAEAAARAALSREADAEPKSADGPVEAMRMIRLARSSAVKARTQAANQIDALVTCAPQSLRSQLKDLTLLRLTQRARRWRPGDIQEPLSACRATIKGLARRWSQLGAEIAGYDEQLLRLTRLVCPELLARLGVGFEVASSLLVAAGDNPDRLHTEASFAALCGVSPLDASSGQQRRHRLNRGGNRNANRALWVVAMTRLRVDARTQAYAARRTKQGRTRPEILRCLKRYIARELYPILLGATD

SEQ ID NO: 449678 - protein, 408 aa, unidentified
MPISTNNLIDVFVGVDIGKRFHCATAINGRGDVLLKAVKVLVSAEGFAVFEQRLNQLDDKSAVLIGLEASGHYWMSLWRFLQERDWTVQVINPVLSSKSARTHLRGRKTDADDALFIARTVRDADFIPLQPAPRDTQQLKLLCRQRRFISHELANAKRRLTGLIDLSFPEFSRHFKNIHSQAAHAVLKAAPSAAAIGELSLRRLQGLIARASRGRFGAAKAKALKKSATESLAARHRDPALDLLIHSMIAQLDFFQQQLAQLDLHIQGLFRSMAHPIKTIPGIGPITGPLIVAELGDLRRFAGHRPLHALLAYAGMDPRVRKSGQWNGKIKMSKRGSPTLRTALYQAASMARLHQPRLAEIYHRHRHQMNKHHSVAISHVARKLLAIIYVVCARGQSFDPAKICPQPT

SEQ ID NO: 449679 - protein, 404 aa, unidentified
MNNVVGVDVSKGKSMVSVLRPFGEVVTKPFSVGHTGSELKKLADYLKSLDGETRVVMEHTGRYYEPVARFLHEEGIFVSTVNPKLIKDYGNNTLRKVKTDKADARKIARYGLDNWVELRQHTPMDTIRMQLKTLNRQRGLYSKTKTMMKNNLIALLDQTYPGVNSLFDSPVREDGSQKWVDFATAFWHVDCVRSMSLPAFTERYRKWCKRHGYNFSQSRAIEIHTAAQDLIAMLPKDALTKTMVRQAIDALNAVSASLERLKAEMRILAAQLPEYPVVMAMHGVGDSLGPQLMAELGDVTRFTHRNAITAFAGVDPGADQSGTHEAKSTRTSKSGPPELRKALFLVMDCLLKTMPQDDPVYRFMDKKRAEGKPYLVYMTAGANKFLRIYCGRVKEYLASLESSD

SEQ ID NO: 449680 - protein, 387 aa, unidentified
MSQVDDLSRSLAAFDQNTTLTVVVELSEASWLVAGLVPAVDRQPLKKQEPDPRALLRLLERWRAEAAKTGRMIERIVLAFEAGRDGFWLARWLRARGIEVYVIHSTSVAVSREHRRAKNDRLDTGMLMRVLLGWLRGERGHCRMVAIPTLEEEDAKRPSRERESLVGERTRIINRMKSALARLGIRGFKPALRKAPQRLEALRTPEDTPIPPNMLDEVRRDMIRLAVVREQIDAIERARLVRLEQAPARGSHPMVRLLARVIGVGIETADMLVQEVLSRKLRDRRAVARYVGLTGSPDESGKRRREKGLAKAGNARVRRGLIQLAWRFLRFQKDSALAQWYRARTEGPKGVRKTTMIVALARKLLIALWRLVMTGEIPVGVVLRAAA

SEQ ID NO: 449681 - protein, 466 aa, unidentified
MQSSRDKTKQPGNEVEVEGLPVIRPKVAGIDLGSTQHWVCAPTKDGTGRDVEHFGATTPDLEQMAEWLKERNVESVAMESTGVYWIPPHEILERHGLEVILVNTRELARVPGRKKTDRVDCKWIQRLHSCGLLTGSFRPNEQVCMLRTLVRDKGNLVAEAGDWLRRMQKSLDQMNVRVHRAVSDIDGVTGLAIVRAIVSGERDVRKLAKLRDPRCRKSEEEIAKQLSGHWRADHLFSLRQALKMYDAIQERIADYEQEILRKLAEMEREECRGQQAPKLQNPNKTKAIKKRGEEPMRQALYRTSGVDLTRIDGIGVGTVQTVISEYGPDLSRFPTEHQFIQHITLAPHRPTSGGKPVKKKKRGSASTRVAGALRMAALSLQHSETALGAYYRQIARRIGADVAVFASARKLGTLIYRALRWGQPYVDEGAAAYEKRYQEARLKGLTAAAKSLGFQLTPKTSDLNPA

SEQ ID NO: 449682 - protein, 356 aa, unidentified
MGDGSWVGVDLHARSAVAGVLDGRSGGLRTERVPAASGPLLEWLLGLPRPVRVAYEAGPTGFGLARACARAGIVCLVAAPGKIPRAAAERVKTDRRDAERLARLLRLGELTAVRVPDELEEAARDLVRAREDARADLMRVRHRLSKLLLRHELLWQRSAWTREHDRWLAGLRFEGPLAVCFDESYGGVLAAKARRERLDRAIAELAVTAPYADVVARLCCLRGVSTLTALALTVELGDWHRFGPSSLGAFLGLVPSEQTSGQQRRQGPITKTGNGHARRLLVEAAWHQRRPLRPSLALTGRRAGQPAAVRAEAEAVARRLHRRWWDLERRGKRRTIVAVAVARELAGHCWKLATMP

SEQ ID NO: 449683 - protein, 341 aa, unidentified
MDEYIGLDASLKETAISVRRDGKRIWRGKCASNPNLLADVIRKRAPSAKRIVFETGPLSVWFYHALTAEGLPAICIDARHAKAALDMAANKTDANDADGLAQLAEVGFYREVRVKGYDSMLIRTLVAARLRLVRITTELSNQIRGLMKTFGLVVPAGKGGAFEHNVRALLGESEALSRIIMPVLDAWRAVRKHASELGRQLVAEARASQSCQLLMSIPGVGAVTATSFTTAIEDPENFKSSRAVGAWVGLTTRRYQSGEVDYDGHISRRGDAHLRGLLYEAATVILTRTSAESSLRAWGLKLREKVGFKRAAVAVARKLAVIMHAMLKSGEVFNRSAGLAA

SEQ ID NO: 449684 - protein, 348 aa, unidentified
MTIVGGFDVHRAQITFDYLDTDTGEVTRGEIRPATRSVLRTWVGRFAGRSDLSFAVEGCTGWRFVVEELATAAISPHLAEPADTATARGRKKRAKTDRTDARLLRELLCQRRLPESWIAPSHVLEVRTLARLYVALMDERRTWRQRIHAQLFHQGLPALGGLLTEDGRRALGAAALSPAGRQMVDTALAAIDQLSELVTPLRAQLQTVGRHQPGARSLTTQYGIGPLLAAIIWAELGDCRRFRSSDQAVRFSGLDITVWSSDGKRSAGHLARQGSPMLRWALFEAAMSATHGTSPDHDYYAQTTDRLGGKRPALSVARKLVRRCYHTLRELGDEAWSTVGSSSEQRAA

SEQ ID NO: 449685 - protein, 423 aa, unidentified
MSIDHARTETAAIRTQINAVFASLELSRSKWVVTSISPGAGEKMSRHVVKGGDLSALCGRLEAVEAKARTRTGAQKPYEIIVMQEAGLDGFWLHRALQARGYVSHVVDAASIAAPRRKRKKKTDRLDGEALLRALLAWARGEPRVCSMVHAPSLQDEDVRRACRERKEMVKERIVHVNRIKGLLFAQGIGDYEPLRRDRRRRLDELRTGDGRALEPNLKKQLNRMLDRLELLIDQLAEVEKARDERVGVEPKRKAAKKAKPTLQPACAASQGATNEGMAAPAAGAPRAVEVARKLIKLGGLGAEISSALSTEGLARDFHNRRQAGSYAGLTPTPWISGELDHEQGVSKAGNPRLRTTMIQLAWLWPTHQPNTKLARWYKDRLAHTHGRGAKQKLVVALARKLFVALWKYVAFGELIEGAVMKA

SEQ ID NO: 449686 - protein, 349 aa, unidentified
MLLIGCDFHTRFQQIAMRDSTTGERRERRLEHPEEARRFYSALPSPARVGMEATGPAQWFERMLRECGHELWIGDAAEMRASVVRKQKTDARDALHILDLLVSDRFPRIWIPSPAERDTRQLLRHRVKLVRFRTSVENQLHALAMGEGVCRRKKLWSKAGRNELEGLALGRWASRRRRELLEMLDRLHAGIEELDQAVRNEAASRPEAVRLMQQPGVGPVTALAFVLTIGPVERFRRSKQVVSYLGLNPRESSSGGQQRLGSISKQGNSMLRWLLTEAAQTASQFDPELRRDYLRLQFRRGRGVAKIAIARKLAVRLYWRLREAAQLAPPARMQGSPARALVEETLSRK

SEQ ID NO: 449687 - protein, 341 aa, unidentified
MPTVRTIGLDIAKNVFQVHGADVTGGVVFRKQLRRNKVLEFFSTCPPCLVALEACGGAHYWGREISKHGHEVRLIPPAYVKPFVKRQKTDAADAEAICEAVQRPTMRFVAVKSEEAQASAVVFRARDLLVRQRIQIINALRGHLSEFGIVAPQGPAHMGRLVEQMDDPHGAVPAAARAVLAIMVDTLRLLEDRIALFDKEIVRRAREDEEARRLTTIPGVGPITATALVALAPAVSQFRRGRDFAAWLGLTPKEHSSGGKQRFGATSKMGERTLRRLLIMGATAVVQHFGRRNPTSGSWLAQMLSRKPRMLVIVALANKMARIVWAMMTTGSNYRASAGAA

SEQ ID NO: 449688 - protein, 331 aa, unidentified
MTNASFEPTGAGCMRLFIGVDIARENFVWSSHGVAQTHCASNDAVGFESLLAALEGQQVGLIVMEATGGLERALASFLLRHHLPVAVVNPRAARDFARAMGHLAKTDSIDAQALAHYAQTLAAKSDQAGVQFVAPSPQVEHLQMLVSRRAQLLGMRTAEMNRLSGAVRVLQKSIQAVIKTLDKEIAKLDKDIDDALSKHFGEQARRIMGIKGIGITSCATLLAFMPELGHVDNARAAKLAGLAPLNRDSGKMRGQRHVWGGRAIVRSALHMAMLSAVRYNPVIKVFYDRLIAAGKPKKVALVACSHKLLRSINAMMRNNVAWSAEMHGLNP

SEQ ID NO: 449689 - protein, 425 aa, unidentified
MSEKIVVGIDVSKAFSDICILSPNNDIIKRLKISNDITGMKSLIYVLEKVEDKYKDRAVIIMEATAHYHQILANFFRKHNYEVIVINPIQSGALKNINIRKIKSDKTDAYNIALLYRIKNYNETITHSDTVNSIKKLCRQHKELTDEIVEHINRLIAFLDISFPDFKKVFADLQGKTPLSLLEKYSTIQEVLSPENKQDIIQLIKENSHKSSSYAEVKYEKLLKAAEKSIEVCIVSLSSAVLIQTTVRVIFSLQEALKAIDDEIKRLSLLDEKFHKEIVLLQSIPGVGEYTACVVLSELGDISNFSKPKELVAFFGLDPGVSQSGTYNRKNNKISKRGSPHVRSILHMLAKSNVYPNRNREYLNPVMRAYFEKKIAEKPYKVVMCAIMRKMVQIIFAVLRNQKSFELRTPEEHQKLIREKSKLVA

SEQ ID NO: 449690 - protein, 321 aa, unidentified
MNKDKEIYGIDISKSVFDVYSESAGHLQMANDQKGFKLLLKSLPERALVVMEATGYYHYRLAQYLYKKGVEVSVVNPLCVKRFIQMKLAKVKTDKSDAKWICEYGQKNEVPLYNALTDVQAECLQLFRLLDVYVKKSTATKNKLHGETTLDIPSRVVYKSLQRNLKHLKKEIEVLELRLLELVKQDQEQQLTLLQTIPGIGMKTALFLIVVTDGFKKFESASQLCSYVGITPTIKISGSSVRGRSKISKVGNKKLRNLLFLAAFSACNYNKACKALFDRIVAKGKSKKLALIAVANKLLKQAFAIAKSGLPYDENYVSKLA

SEQ ID NO: 449691 - protein, 330 aa, unidentified
MHASHSSQQHTRFAGLDVDSTGCVAVVDGARPRRFDASPAGAAELAGWLLHRTGSARIVAVMEHTGVYSHSWRELLAAQGVASALVDAQRVRSYATASGVRTKTDAVDARAILAYATHFQPRPQAQRSLAEWRLTGLLRLRDQLVRQRATLAVQDQSLRRLPGIAADDLAPGRQVQAALAAAIDRLETQIAEVIAGDAAMRRAAQILSSLPGIGKVNMAQFCSRLSVLLDCSANQATALCGLSPRHRQSGSQQGKSRIDKQGWEDLRRNLFMGALAAVRHCSTFEAFQQRLLDNGKPPRVALVAVARKLLITAHSLLRKGELFDPTFQYA

SEQ ID NO: 449692 - protein, 358 aa, unidentified
MQSMNENGRRVIGGVDAHADTHHAAALDDHGALRGSRSFTVSAAGYRELLTWLGSFGEIDRVGVESTGSYAAGLTRHLVAQGVRVLEVNQPHAHTRRRRGKTDAIDAEMAARHALGLASEVAPKQTTGIVEAIRQLRVARDSAVKSRSVALLQLGDLILTAPSGLREQLATRKTTLKGQAALCRRLRPETDQLRDPVNAAKAALRSLARRIALLEEEITELDTHLQPLVATAAPRTTALLGISTGHAGQLLITAGQNIDRLHGEGAFAALCGASPTPVASGKRGRHRLNPGGDRQANRALHMIAVCRLRYCPRTRVYAARRTTEGKTKKEIMRCLKRYIAREVYATLRDDLRSLSQSP

SEQ ID NO: 449693 - protein, 296 aa, unidentified
MNKCHLNTELSSLEGTRSEFNRSKAIIKLGIDVHQDYYVVVKQEDGTNPKPAQRFQKEAFLHWAAKLKSQGAEVHAVYEACGFGFGLQRQLSALGIRCYVVCPQKLDERNKRVKTDGLDAKALCLKLDRFVQGNRDALALVRMPTEEEEQKRAIYRQREQLVTFALLRVPPWMKELLSNSQTILIALEEKIRALTAQLQGAAAAKQPRGLGLLSSVVIDREVGNWDRFKNRGRVGSYTGLCPGEYSSGKTRLQSCVTKHGNPRLRAALVEAAWRLVRFQPEYRAVKNGDTCWLKEH

SEQ ID NO: 449694 - protein, 313 aa, unidentified
MGHHNTAMAGVDVGKSWLDAAIASSAARWRFANNPEGRGALVALLSKLGVRRVGLEASGGYERAIVEDLHKAGFDVILFQPRQVRAYAVYRLRRAKTDRIDAGLIAACTAEHGAVRPRPDPRLQALAEPLRLLEQVEDDIARLKTRREAYRSPDIRAALANEIKRLKLSRTALIKRLRAALAAEPDLAHRFKLIVSIAGIGVRTALTLSIAMPELGTLSREQAASLAGLAPFDHSSGKHDGRRMIAGGRANVRTALYAAALPAAFKWNAALVAFYRRLKAAGKSHKQALVACARKLLTYANVVLARGTPWQLQ

SEQ ID NO: 449695 - protein, 344 aa, unidentified
MQIAILGIDLGKNSCSVVGLDDSGRIVVRRRMHRVSVIKFAGGLTPCVVAMEACCGAHHLGRLLRAQGHEVRLMSPEYVRPYVKAQKNDDRDAEAIAEAATRPTMRFVELKAEAQLDMQTLHRVRDRLVGERTALLNQLRAVLLERGIAMPQGRRKLEQRLDAMLGAPEWSGVASRMRSLLQDMRAEWRALDRRIEAFDEEFAVRARTDPDARRLATIPGIGVLNATALVAAIGNGQTFARGRDLAAWLGLVPRQATTGGKPRLLGISKRGNKYLRKLLIHGARAAMPSLARSATVLGGWLRGLLARAHPNTVVVALASKLARIVWAVLRHGREFERADVVASA

SEQ ID NO: 449696 - protein, 343 aa, unidentified
MKITTVGFDLAKNVFQVHGVDERGHAVVNRKLKRAQVAPFFANLPSCLVGMEACGSSHYWARKLQELGHTVRLIAPQFVKPYVKANKTDAADAAAICEAVGRRHMRFVPIKCVESQALLALHRARQGFIRSRVAQTNQLRGFLAEFGIIIPQGAWKIEPRVADILEDAENGLPGTVRELLLQLVGHVRFLSEQEKLLEAQIKRWHEGSETSTRIAQIPGIGPLTASALVASIGDVGVFRNGRQLAAWLGLVPRQHSSGGKAQLLGISKRGDTYLRTLLTHGARSVIACAARKPGYAQSWLGRLMARRHTNIAVCALANRNARVVWALLKHDRQYRADYAAQAA

SEQ ID NO: 449697 - protein, 355 aa, unidentified
MSSLKYIGLDVHLATISIAVLNASGKLIMEVTIENQATALLDFLRGLRGALHVALEEGTYAEWLYSLLAPRVARIVVCDPRENPRRRGEKKSDRLDARKLAEWLRLGTLKPVYHGRPQGHALRELARSYRTLVSDATRVMNRLKALYRGRGISCAGARVYAPRFRPQWLEQLREAGVRQRAELLYQQLDLLLALRRQARGAMLAESRRYAAQKILCSIPSLGPVRAALLMAWLGTPHRFRGKRQLWTYAGLALVTRSSADYRLANGELVRSRQPALVLGLNANHNHELKALFKEAAASALAHPGPLREFYNARVEQGMKPELARLTLARKIAAIALPVWKKGERFNAEHLKPQAA

SEQ ID NO: 449698 - protein, 315 aa, unidentified
MQTPLDIGADVSKDHVIVACAKQSFAPRKLLNKRAQLSAWLKGLPAGSRIAMEATGCYHELLATLAQRLGLVVYVLNPKDVFHYAKGTGQRGKTDRVDAALIARYVAKEHTELHAWRPASPVQRQLQRLTRRRGKLTSARATLRSTLRALPALRAELRVMLEQFEAIITKLDAQARKLIQACPERKQAFERLDAIPAVGPTVGVGLLAALERWPLPRADAFVAFIGMDPRANDSGTKTGRRRLSKRGDPELRRLLYNAAMSGSRTRVWRPVYERALANGLTRVEALVVLARQIARTSWSIYTHKTTFDPARVHAA

SEQ ID NO: 449699 - protein, 341 aa, unidentified
MSTVTCFVGLDYHQDSVQVCVLGEDGRQLLNRSVPNDWRRVADAAGAVGAVKRAAVEACCGAADLAEELSAGAGWHLDLAHPGYVGRMKRSPDKSDFSDGRMLADLTRVGYLPKVWLASAYERDLRQLVNHRQALVDQRRAAKLRVGALLREHRAEPPTAGTKKLSRWTKAWVAWAASAAELSGHARWVVAELLSEITHLDKKVLAADARLREATEGDARVARLMNEPGVGEVTAWVLRAYVGRFDRFATGKQLSRYCGLSPCNASSGARQADAGLVRGCNKLLRATLVQAAHRLARTEPRWRELSQSLRARGKPACVAVAAVANRWVRGLWHRMNEEAAR

SEQ ID NO: 449700 - protein, 342 aa, unidentified
MLYVGLDVHKSFTSMGSFDPATGEFQDLGRVATDPGQLAQALAGLPAARIVVLEAGRNSWWLAGQLEPHADQVWVVDPKPVRSLEKGRPKTDRRDAAALARWASRGALTVLWRPDAQTMDVRELTRGRHALVGMATRLRNMIRALCARHGEELPKRADLLGARAQARLDSMQLEGWAAQVLALLRQLLPLLKQAAEALEVPIQQQAHLHPTAQKLMTIPGVGPVLALTIAAEIGDIARFPSRVQLRSYSGLCPAIHQSGPRTHTGPLTKRGNRWLRWAAVMAAQQVARASYPDNRLKRLWRRVLFRHGRNPAKTAVARALLDLIYHLLTAQEHYRPTQPVAA

SEQ ID NO: 449701 - protein, 344 aa, unidentified
MQITTIGLDLAKSIFQVHGVDATGQVVVRKSLRRSQLLPFFAKLPACLVGIEACGTSHHWARELIKLGHEVRLMPPAYVKPYVKRGKTDAADAEAVCEAVTRPTMRFVPVKSPEQQAALSMHRTRDLLVKQRTQTINMIRGLLAEFGIDIPKGLERALLMARQIVDGKSPDVPIEAAKIVGTLSQQALDTHVRLREIDRDLAVWLRGNEVARRLMTIPGIGPVGATALAASVTDPHQFRSGRQFAAWLGLTPLQKSSGGKERLGHITKMGDKYLRKLLIVGMTSLVRRAKYNPGKIDPRLADLLARKPTRVATVAMANKTARVIWAIMARGETYRTGHQPALAA

SEQ ID NO: 449702 - protein, 346 aa, unidentified
MKFYAGHHKFYCGVDLHARTMFLCVLDERGYPLLEKNIKTDPDIFLKTIAPYREDLVVAVECMFTWYWLSDLCSREGIPFILGHALYMKAIHGGKAKNDRIDANKIAVLLRGGMFPVAYVYPPKMRSTRDLLRRRMFLNRKRSALITHIKCTFAQYNLPDPEQNVSRVSQREGVAALIPDPGASRNVQLDLDLLDFYDQTLTKLEQELTVIAKDHDPDSYFRLRTVPGIGKILSLVILYEIHDINRFPSVQDFASYCRLVKPAKESAGKRLGSGGAKIGNVHLKWAFSEAAVLFLRKNESAKLYRARLAKRHGKAKSLTILAHKIARAVFFILKRKTVYQPESFFA

SEQ ID NO: 449703 - protein, 428 aa, unidentified
MDEVNRNRLEEFRQLRQEIRHSEEYLIIGIDIAKDRHHAFFGTATGKTLLRRLVFSNDREGFGKLLDQAESLRVQHGLKKVVYGMEPTANYHKPLGEYLINLGRTVVLVSGVTVKRNRESLDGRWDKHDVKDSANVADLISQGKCLYYEYPSAELTGLRGLLSLKRRLKKQEHGYRVRIRNHLIAQYFPEMDRDYERLGAVGLSIVRWCFPTSQITELDVEPFIERVTSRRIRMETRRRLEGVWEKAGASIGCDAVPGLGHEAKVMVEGLRQIREVIKETEDKIQELCEQFPEYHCVLTIPGFGPDVSAKVLGAVGDPDRFQNGKQVLKMGGLDLSADRSGKDSDKAMPEISKRGKADLRYALYQAALIASHKNRDVMIYYTNKLRGREREKGIHNKMRVKLAAKLLVIAWTLMKKKEKFDPTYLNVG

SEQ ID NO: 449704 - protein, 440 aa, unidentified
MKRKPNPAQDQQDSSFALPDTVLIGIDWADKVHAWHCVDPDGNVSYGELDQTPLRIQQWIASIKQRWPEATIEICIETSRGAVINALLEYDVVLYPINPNALSNYRGSHAHGGGKTDPVDARLIFKFLAERRSELRPLIQNSPLTRELAALSRDRRKLVEQRVKLSNELKATLKTYFPAALELKPAKMYADFMVSFLLKFSSLTAAQKAGATKLRKHFFGVGAKAKAQSRVDLLCNAKPLTTDPVVISTCGLQVESICSMLDNLNRAIRKYDRRLKERVVTHSDYEIVAHLPGASTKTQARMIAALGDDRSRYENTASFQSAAGIAPLTTQSGKQRYVSSRWACSKFMKQTFHEYAGLSINRCRWAKAFYDAKINAGKTPQAAKRALAYKWMRIIFRCWQDGVRYDDNRYMQRLKRNGSPLAAVLFPATKSTRQQPNAAV

SEQ ID NO: 449705 - protein, 426 aa, unidentified
MKYRIAGIDVHKRMLAVVITDIAGDGEFQFERRKVGTSPSELCRLADWLAAEQVEEVVMESTAQYWRPVWAALEQRWRPRRLQEGAGAGSGQLHLAQAQSNRGAAGRKKDFPDAERLVKRLAAQELRLSFVPDVEQRLWRTIMRRKHQLTRNRVQFQNRLECLLEEAHIKLSSLVSDLLGKSARRMLQAVAEGAASPEAIAALADRRLQATAQQLSDALGACRDIHPVYRQLLKMALEELKLIEEQIDTLDQEMARLLSAQRDVVQRLAEVPGLGADSAQQIIAEVGPAAAAFPSAKHLASWVGVCPGEQESAGVNYSHRSPKGNRQMKGLLNQAANAAVRTKGSIFEFVYRRLVPRLGHAQAIGAIAHRLCRLIWMILHQAIRYEERGLAVSRSKTERRAKLMIRELRRLGYRVEPIAAQAGVSE

SEQ ID NO: 449706 - protein, 320 aa, unidentified
MQTPSVVLNIGADVAKDEIVVACSEGSFPVRRIANQRAAVTAFLKGLPQGSRIGLESTGIYHELLAEAAHKLGFVVFVLNPKDARHYAKGVGLRGKTDRVDAELIARMIAHEYTKLHVWIPPTPEQREMGRLLKRRAKLSSLRQALAMSLTGLDGFGADLKALRARFDQVIARIDQRVKTLVEASPDRKQHVTHLRTIYGVGPVVSAALVNILERVPLNSADAFVAFTGLDPRPDESGKHRGKRRLSKRGPADLRRLLYLAAMSAIKTQAWKPLYEHYRAKGLSSTATFVILARRIARTAWSMYTYKTEFDPTRLTKTLT

SEQ ID NO: 449707 - protein, 344 aa, unidentified
MIKRKTIGLDLAKNSFFFVVLNEHGKRVTRKKLSRNQVLPYLANLDLSVVAMEACSSAHYWGREIRKLGHDVQLLPPQHVKGYLRGQKNDYNDAQAIAEASQHGAIRTVAIKSIEQQDQQSILHMRRLLNVERTRLINHIRGLLSEYGIVIAQRASTVKKEVPRILEDAENELTNVFRQFLNRQYLRLLDIEKELSAYQDYIEATVKSNDTCQRLITMPGVGSIVSISLTSWMGDGYQFKRGRDASAALGLIPRQNSTGGKNVLLGISKRGDSHLRSLVFNGARAVVAHAKKKTDKLSIWINRLVEQRGFNRAVIAFANKMLRMAWVIVTKKQEYKPIEKLAGC

SEQ ID NO: 449708 - protein, 411 aa, unidentified
MEKVYDKCCGIDVHKKLIVACFRKGNKQEVRDFGATTRELLELADWLKDGGCEMVAMESTASYWKPLYNILESSDLNAMVVNARHMKAVPGRKTDVKDAEWIADLLQHGLLQASYIPAKDQRELRELVRYRKSLVGERGRELNRLQKMLEGANIKLSGTVRDINGKSARNILEYILTGESFDEAKYDEMYEKKVIAHNLKASKEQIIDDLNGVMTPLQRRMMKELLAHLDELNAHIKNLDDEIDNFMKPEEKQAASAIEDVTGIGHTSAQAVISVIGTDMSRFPTDAHIASWAGLCPGDNESAGKRKSGKTRKGNALLRSTLVTCAHSAVRNKSSYFYAQFMRISAHRGKKRAYVAVAHSMLVAIYHILKDGVVFKDLGADYYNQFNKERKINAYLKKLKALGWEAPVVAA

SEQ ID NO: 449709 - protein, 345 aa, unidentified
MPIVGGLDIHRKQLTFDYLDTATGEVRRGQVAPADRAHLRAWLARFAGREDVAFALEGCTGWRYVAEELAAAGIAAHLAEPADTAAARGRKRRAKTDKTDSRHLRELLAEGRLPECWIPPPVILDCRALLETYHDLRAEHTAWVQRVHAVFFHQGAPALADGALGAGRCDLEALRAAACCLSPAGQLQVATALEVLTALEARLDELRHELLDAARHLTGARVLAAQLYGVGPVTALALTCWLGGAGRFSSSRKAVRFAGLDITVYSSDSKRSPGRLSRQGPEVLRWAVYEAGKVHARGTAPDHAYYAQVKDRKDGKRAALSEARKIIRQACHILAELGDDALSAA

SEQ ID NO: 449710 - protein, 427 aa, unidentified
MKKRIKIDHLSTLCVGLDIGSRNNYITAMDFDSNRLINMKPVPNAVSGVEQMESMILAVLEANSQFKYLLIAMESTSFYGVHVANYLSTCDRLKPYAVKVFCLNPKEVANYKKSFTGLGKNDGLDSFIVADYVRVGRIAIDPWRGAQYLALQRLTRQRRHVTEAITREKNYVLNNIFLKFSELALLGGEDSPLSSKFSATAEAILTEFKTTEDIANTPIEELVEFVTKASHGRFNDPDQVAELLQKAARNSYRLDKALYEPITTSIACSFNCIHAFEREKKSLDKAIEETVKGLNPTEYQILRSIPGIGPVYAAGILAEMGSVKCFPSNDALAKYSGIVWRDNQSGEFDADDTPMMKAGNRYLRYYLIQAAGSVATYCPEYTAFYEKKYAEVKNHPHKRALALTARKLIRLIFGLLDKNQLYSAAKG

SEQ ID NO: 449711 - protein, 353 aa, unidentified
MKQQAIHFVGLDVHQSTVVASVRDESGKVVMKATVPTEEKAIVSLVRSWPRVHVAFEEGTQAQWLHDVLIDQVERVVVCNVRGRGPLANKDDRIDADGMSERLRVGDLKPVYHGAPEILTLKELVRNYNNLVQDSTRVMLRIKAIYRARAIATPGVSVYRASQRKQWLAKLEGGARVRAASLLTQLDALLELRPKAKTAMIAAARRQPGWKVLRSIPFLGAVRVAQLLAIMRTPFRFRTKRNLWPYAGLAVVKHSSANQVFKNGKLQRSKKAPMTRGLNRNHNPLLKAVFKGAATAAAAASGPLGEYYKASVSRGVDKDLAKVTLARKIAAVALRLWKKGEVFDPKKLTMQAT

SEQ ID NO: 449712 - protein, 395 aa, unidentified
MFIVGIDIAKRSHEAIIIAEDGQVVRKAFSFRNNCTGYNLLLEQVRRLTLVKSQIVFAMESTAHYWLALYARLLKDGYAVMVLNPIQSHSLRELYIRKAKTDARDSLIIADLVRFGRCKASNVPQDKILALRELCRSRAYLIDMAADLKRKLIALLDRIFPEYESLFESVFSKASIAVLSKYSTPQKVKNAHLGKLTDILMESSNGHFGEWKAHQLKEAACSSFGIDDSGGVYSTLLGMFLEQILSLTAQADSLEKQISVFFQEFNNPLTSIPGVGTVLAATILSEIGDITRFSSADKLLAYAGLDPSVKQSGEFKSNQNRMSKRGSPYLRRAIWLASTVAVHRDPMFQTYYEKKISEGLHYMNVIGHVSRKMTAVIFAVLRDGQPYQPILQSAD

SEQ ID NO: 449713 - protein, 301 aa, unidentified
MTRQGGEKTMQCIIGIDISKNTLDAYRLSDGSRLQVSNDKVGYKTLIKWIRQTDVSLTVFEATGAYHRQLEAMLAAAVVPFAKVNPWQARRFTQATGRLAKTDRVDAAMLAKMGAVLGLEQHEPASEDLNELRELLTARRALMKDKVAAKTRLQTTRQTLLQHQIGARLRQIEVQIKEIDEAVAERVMKGELLSKRLATLVSIPGIAKITAISMIVEMPELGTLDGKQAASLAGLAPISQQSGRWRGKERITGGRTFLRRSIYMPALVAVQHNAIMRQRTVSLHWFNSAGQPISASCPLTA

SEQ ID NO: 449714 - protein, 352 aa, unidentified
MNATTVAVDLAKNVFALAVADGHWKIVERARLTRGQFERWFDNRKVDLVVMEACGSAHHWARTLRARGIEVRLLPAKYVRAYVKRNKTDAADAAALLEAARASDIQPVAVKSIEQQALQALHRTRSAWMSTRTQRINTLRGFCREFGLVVPEGAARGLACMARSVADEHSGLPQMLRPAMHLMIEEIRLLEARIGQLERDLAQIAKQSPACQVLQSVPGIGLLTSTAMVAAVSDPKSFASGRRYSSFFGLTPREFSSGNSRYLGRISKRGDRYIRMLLTHGARSVLRAATVARRAGRPLDRLKTWALEVQARTNHNKAACALANKLARIAWAVWVKQQKYQSAQPAMELPST

SEQ ID NO: 449715 - protein, 375 aa, unidentified
MMKHSEVFVSFDTSKLRNAIAIAEGGRAGEVRFLGEIENTPAATTKLVRKLEAKYERITFCYEAGPTGYELQRHIHGLGHQCIVAAPSLIPKKPGDRVKTNRRDAVSLVKLLRAGELTGVWVPDPRHEAMRDLTRAREAAVIDLRAKRQRVSALLLRQGRSYPADKKTWTKVHMNWLASQRFEQPELGVVFEEMMFAIRQAQDRIERLEQAIRTAVPEWSLAEVVTAFMAFRGIDLVSATCLLAEFGDLTRFPTAPEVMGYLGLGCSEGSTGDRIKRGGITKSGNRRARRTLVECAWSYQHPPRVGIAKEAKVAAAPAKVREIAWKAQCRLNRRYRVLLRRGKLKTVAITAVARELAGFLWAAARELSSPERVAK

SEQ ID NO: 449716 - protein, 348 aa, unidentified
MIIIGVDFHPEFQQIASVDSETGEFQEKRLAHPAEAEKFYRALVGQKVRMGMEASGHARWFERLVAELQFELRIGDAAEIRTKRVRKQKTDRQDAQLILRLLLEDRFPQIWVPSWENRDLRQLLWHRHRMVQARTRIMNQLQAVGLNEGLRCKKKLWRELGRQQLESFRLAPWATRRRRDLLELLDRLTPTIAELSHAIEREVEKCPAAQRLRTHPGVGSLTALAFVLIIGEVNRFRCGKQVASYLGLVPLEESSGNRRRLGHITKQGSSMMRFLLVEAAQVTVRSLPEWRSKYLHLVLRRGRKIAKVAMARRLAVHLFWMMRKEWNYQQLKKFGSHAGEPGNRHGVQ

SEQ ID NO: 449717 - protein, 344 aa, unidentified
MSEVIIIGLDIAKHVFHAHGADGKGRAIFSKRISRGKLLDFFAAQPSCTVALEACGGAHHWARQLTQLGHEVRLIPPAYVKPFVKRQKNDAIDAEAICEAAQRPSMRFVAVKSEQQQAAGLVFRTRDLLVRQRTQLINAIRGHLTEYGWVAPKGPSHVTMLTDLIEEEEMASSLPKAAHAMFRLMLDLLTDLNGKVADLDQEIARRAREDEVSRRLMTVPGIGPISATAIAALAPPIETFAKGRDFAAWLGLTPLQRSTGGKQKLGATSKMGERTLRRLLIIGSSAVVQQASKRGAPRGSWLEQMLARKPRMLVTVALANKMARIVWALLVKQENYRAPVAAMA

SEQ ID NO: 449718 - protein, 400 aa, unidentified
MVLASGGSTRRESGEVAHKPETVGAWIGQLCQRFGHRPIAVALEQVKGALVFMLSKYECLHLFPVPQTMSACMRKALYPSGAKDDPRDADLLLDLLLQHRDKLRRLTPDSEVTRRIQNLVEERRKLVDEKTAQSNRLTNYLKIYFPQMLDWFENLDTGLVCALLEHWPTLEELQKVPPAKLRTFLRQHHCRDQALIERRMQGIGQALPAIQDRAVIEAKRAVVKVTVQLIRCLLEGIAELEKQSEEAGRAHPDFFIFESLPGAGAVMAPRLLAALGSRRDRYESANELQTYSGIAPVTETSGKKKWVHFRWACPKFLRQSFHEWAGHSITQSMWARAYYQQQRERGKGHHAAVRALAFKWIRILFRCWQDRVAYDENAYLAALARHGSPLGVFVTTEKTL

SEQ ID NO: 449719 - protein, 346 aa, unidentified
MMIIGCDFHPSWQQIAWLDTATGETEEQKLVHASGEAKKFYRQLAAPVLIGMETTGNSQWFVELAEDLGHEIWVGDAAQIRASYVRKQKTDKRDAAHILKLMVEGRFPRLWTPDREQRDLRQLVVHRHKLVEIRSRVKNELQHLSLNKGMQKKRTLWSQAGQKLLRELALKPWAACRREDLLGLLAMLNQQIGKLDAAVQHAADEHPQAQLLMTQPGVGPNTALAYVLTVGDVSRFPRGKQVASYLGLIPREHSSGGHQMLGSISKQGNRLLRSLLVEAAQIAVRFDPGMKKEYLHRCHQKPKGVAKVAAARKLAVRLYWMLRTQVAYPEIVRIESSPRVALVGAS

SEQ ID NO: 449720 - protein, 375 aa, unidentified
MSDHSEAFVGFDTSKLRNAVAIAEGVRGGEVRFLGEFENSAAATAKLVKKLAAKYQRLTFCYEAGPTGYGLYRQIKKLGPECIVVAPSLIPKKPGDRVKTNRRDALSLAKLLRAGELTAVWVPDRGHEAMRDLTRARETAMMDLRSKRQQVSAFLLRQGLHYSEGKKTWTKTHMNWLASQKLEYAEQRLVFEEMMLAVRQAQERLERLEQAIRVAVPDWSLAEVVTALLAMRGIDLISAATFLAEIGDLSRFQHPRELMGYLGLVPSEDSTGDKIKRGSITKAGNRRARRMLVECSWSYQHPPRVGQEKQEKVAAAPRAVREIAWKAQCRLHRRYRALVRRGKLKTVAITAVARELAGFIWAVSREITTARAAAQ

SEQ ID NO: 449721 - protein, 337 aa, unidentified
MKRYWGVDLHRTQFVTCLRWESGEERVQQWRMEQLPQFVEQLQAEDELAVEAMGTTARFYDAVVGQVARVVVVNPHRFKVISESVSKTDRKDAAALALYLSKGLLPEVRMKAKPHRELAHLTETRDLLVKQRSALKSKINNLLAMQGINLKREALSSQVALERVLGLEVSALVKIELRVLVEQVRGLGESIGELEELIEEEGEPLPGHKNLTSIKGIGSLSATVLLTTIGSVADFADESKLAAYLGLVPRVQNSNESERSGRITKQGNKLARTALVQCGLVAQRYSPYLKQFYERIKQRRGHGKAKIALARKMAKIVYDTLKNDWVFEDFPSFTLAA

SEQ ID NO: 449722 - protein, 356 aa, unidentified
MSHAIAMTIGVDLGDRSSEYLALDAQGDVVRRGRVSTTRAAFEKSFKELRSARVVLEAGTHSAWVSRSLKALGHEVIVANPRKLEALTKHIRKSDRTDACTLARLARDPILLSPIEHRGEEAQADLAVIRARQVLVRTRTKLINCARGIAKSFGVRLAACSSRSFFRRALEETPAIVRPALEPLIEQLASLERAIATYDARVEAIAAERVAATAPLREVRGVGALTATAFVLTLEDPKRFRHSRTVGAFLGLAPRRSQSGERDPQLGITKAGNSYLRELLVQCSHYILGPFGEDCALRRAGLRLAERGGKGAKKRAVIAVARKLAVVLHRLWSRGERYERFPLRSGETPPSTPRSE

SEQ ID NO: 449723 - protein, 343 aa, unidentified
MYYIGLDVHKKTISFCVKDAAGCVHREGKIGSTRHELDAWIRTVPQPRMIAMEATIFTGWIYDHLLPHAEKVKVAHPLMLRAIAAAKRKNDRIDAVKIADCLRCDFLPECHMASTEIRNRRRILRYRGLVLRQAVQMKNRVSGLLMETGVSYNKLRLHRMGYFAELMTTNEEVSESIRPLLKLCREHIDRSIRLDTTLLRSLEQDPLLADRLRRLRTIPGVGPITALTWALEVGDTSRFRSIKQAIGYCGLCSAEKSSADKVMRTPISKQRNKHIRQVLVEAARLAPRYSDELALLYEKERQRGNGNRATLAVARKMVALMLAVERRNTDFVPAAEFRRTAAA

SEQ ID NO: 449724 - protein, 337 aa, unidentified
MKITTIGLDLAKSVFHVVCFDERHQEVGKRMLRRGQVRAYFAQREPCRVAMEACAGAHYWGRELEKLGHTVKLIPPQFVKPYVQGNKNDYNDARAIAEAATRPGMRLVGIKTVEQQDIQALHRLRAQRIKERTALSNQLRALVAEYGIVMNKGVATVRRSIPLLLEDAENGLSEAFRALLARGYDQLIEIDAHIDYYTRQVEAHGRQSAPVRRLRTLPGYGPILASVFASVVGDGRAFRRGRDVSASLGLVPRQHSSGGKEVLLGISKRGDKYLRSVLIHGARSVVRHAKNKEDALSRWVNRLRERRGTNKAAVALANKLARMGWALLRHETVYCPA

SEQ ID NO: 449725 - protein, 248 aa, unidentified
MEHRTFPTSAAGLHRALAWIRDRTQTRTCLVVVEGTGSYGAQLTEHFTQGGILVAEAPTVPAARRRGKDDVLDSARIARAVLGLRLDQLCWPRAGGTRTAIRVLVSARDQMSTERTKIINSLTALVRGVDLGVEARKALTSAQITTIAGWRTRDEDPATAACRREAIRLASRIRTLGRYLSANMAELRRFTAAEVPELLNLPGVGPVVAGTILLAWSHPGRVRSEAAFAALAGTSPIPASSGHTIRIG

SEQ ID NO: 449726 - protein, 414 aa, unidentified
MEIRRETAPTAAAHGDTAFVALELSGQSWLTAVQPPCCGGSISLHKLAAGDAAGLLRLIERLRAGGKAQRVVCCYEAGRDGFWLYRLLVAQDGVRCHVLDPASLPVDRRARRAKSDRLDVRMLLRAVIAYENGGGDRQACRPVRVPTVAEEDAKRLHRERTALIRERVRHVNRIQALLATQGVSGFAPLRPGSRAQLPALRRGDGSDAPLPPALLAAIGREFDRLELVRRQIAELEAARDTVVREAAAATRVPAAAATPASDGTAATVSADPDPVAAKIARLVEMKGIGAQLATVLGREVFYRSFANRRELAAYVGLCACPWRSGGMAREQGISKAGNPQARTAMIELAWLWLRWQPESTLARWFTGRVGTAMGRVRRIAIVALARKLLVALWRYLETGLVPEGAVTKAVAAAM

SEQ ID NO: 449727 - protein, 338 aa, unidentified
MKLYCGIDLHSNNSVIVILDEVDKMIYQKKLNNDLTMILEQLSVYKNKITAIAIESTFNWYWLVDGLMEAGYTVKLVNTAAVQTYSGLKYTDDKDDARWLAHLLRLEILPTGFIYPKEERAVRDLLRKRSQLVRQSTTNILSLQNILARNTAQSLSSYRIKKLEDEQAEKIFDNPNITLALKSNLNVIRCLQSTINEIETSVLQQTRIRAEFKKLLTVSGIGEILGLTIMLESGDMSRFAKVGNFSSYCRCVKSERLSNGKKKGENNRKNGNKYLAWAFIEAANFAIRYNDQVKSFYQKKKSKTNGIIATKAVANKLARACYHVLKDQVSFDVNKAFS

SEQ ID NO: 449728 - protein, 348 aa, unidentified
MERMLERCAGLDVHKKTVTAGVRVPGTHGDRTQHVRTFDTTTAGLLVLRDWLAAHAVTHVAMESTGVYWRPVYYVLEDAFACILANAAQIAQVPGRKTDVKDCVWTAQLLEHGLIRASFVPPAPIRELRDLTRYRKVLIQERTRHANRLHKVLEDAGIKLTSVASRLLGVSGRPMLDALVAGTTDPEVLADLARGRLRQKLPALRQALVGRFRSHHAFLVSQLLAHVDDLDEAIQTVGGHIDEVMVPFTDELARLDTIRGINKRTAEVIIAEIGVDMTVFPTAKHLASWAGLCPGNNESAGKHRSGKTRPANRWLRAALIEAALAASTRAAPGAFAARYRRIMPHRGH

SEQ ID NO: 449729 - protein, 348 aa, unidentified
MGYYVGLDVSMKETVICIVNEKGESVHKGRAKTDPEKIFQHLIYSKFKIEKAGIESGSLSHWLVNELKKLGVPAVCIDARKMAAVLSIRVNKTDDNDARGIADAMRCGMYTEVSQKSQTAVETNTLMQCRKTLVHQRVQLTNSIRGYLKTYGVRLSSSGEKEFPLKVRNSLPAIFEIACAGIESLLCCYEKLCEQIREMERKITDLAQGDEEVKRLMTVPGVGLITAMTFKAEIDDPARFKKSRDVGAYLGMTPRQYSSGETHKQGHISKCGSSEMRTLLTEAGLVCLTRSKKWSRVKAWGLKIMRKHGAKKASVAMGRKLAVIMHRMLVEKKDFVYGEETLKEAKVA

SEQ ID NO: 449730 - protein, 414 aa, unidentified
MGAMETRCVVGIDVAKQTHVVCALEAPSGAIQCRPSQIEASADGYARLQGWLESWARPEATLIGMEATGTLWEPLYDTLTQAGYHVLLLNPRQTASWAASLGLRAKTDGIDAHTLARGVLAGLARPSTLPSETIQALRALTRARRDLVQTRTAARQRLHDELVVLFPEFVPLLRELPGEADLGAPAVLQWLAAYPSAAALAQAPDDALLLVAERVSNGRWGAGEVARLQQAARRSTASSRAVSARSLVVRTFVEQVLHLQTQIAALQTAIQELLRDDADSRHLQSIPGIGPLGAATIRAELGDVARFSRVDEVVAYAGLDPRTCQSGAFIGQKHLSKRGPGALRHALYMAAFVAARCAPEWRVRYQRFLDRGRSKKEAFTILARALLRVIYHLLRTGEAYDPCRLNQPSPATAG

SEQ ID NO: 449731 - protein, 316 aa, unidentified
MSTPNSSFIGIDVGKSQLDAALFENPATHSFPYNPDGLVRLLAWIQDISPSLIAVEATGGYERALIHFLCQAGIRMAIVSPKRVLDFARANNLKAKTDKLDAHNIAHFAAVMKPRVFMPPSPAQEKLMALVTRRRQISHMIISEKNRLMQASQDIKPRIQDHIDWLEEEEKEIQDHMRDLIGSDTEMKEKLDILSSAKGIGDVSAFTLLAEVPELGTIGGKEISALLGVAPFNRDSGKMKGKRHTKGGRYGARAAFYMATLSAIRFNPVIKCFYQRLLSQGKERKVALVACMRKFIVILNAMLRDRKPFISQSSFV

SEQ ID NO: 449732 - protein, 359 aa, unidentified
MSNKHNYLDFSGQDIYIGIDSHRKQWTIKIMTEEVEHKSFTISPPNAEALRDYLHKYFPNGKYLCAYEAGFSGFWAQRKLESIGINCIVVNAADVPSRDKDKRQKTDRIDSRKIAKGLRDGQLDGIYVPSKEAQDDRSLLRTRTMLVRNQTRCKNRIKSMLYYNGIELNEPNVQSYWSKNYIRKLESIDSLNESAKVALDLLIVELKSLKELIVKITLQVRKLSQNERYNRQAELLKTIPGIGLISAMVILTEIIDVKRFGKYDKINSFVGLMPMENSSGDRIYKGRITPRCNKMLRYTLIESAWTAISIDPALLQAYKRYLNRGIKSNKAIIKIARKLFSRIIHVLIKQEAYSIGIVQ

SEQ ID NO: 449733 - protein, 394 aa, unidentified
MAFKIFRKNCCGLDVHKTWIYACMGITDTNGRTEYKQARFSSFTKGLQELADWLAKYDCNDVCMESTGKFWIPVFNILEKTCWVTLAYPKYTKPQKGNKTDHKDAKWICDLYMCDMVNPSFIPPPDIRQLRDLMRYRSKLTNIMTSEKNRALNCLTVSNLKLDDVFSDVFGKSSRSVIRYILEHPGETFQVAPFIDRRCKHPVEEIQAVIDGTISHQQAVKLRECLQHLDELEVHKTNVEKEILCLVQQYPYQLELLQTVPGFSGNIMTAIALISEIGADMSVFPSAKHLISWAGCCPRNDQSSKKVKSTRISRAGVYLKPLLVQVAIQPFTANADKLSAAGALEIRCQICDGRFLSMWAALFIFLGCPLPPCPKNLHVHNGRIVILASVAWIF

SEQ ID NO: 449734 - protein, 351 aa, unidentified
MKKVAYLAMDVHAGHCVLGHMDFDGTFIGNRRFPTSEQHIIEALKAVKAKEKYLALEESNLAYWAAQVARPYVTEVISSDPKENALIYRSPNKRDKVDTLKLCRLLRLGELKRVYHPENDERAIFKAAVQHYIDLRDQQVVLKNKIKAMYRHWGVIEVGGQFVYGIGTRDDYLQRVKHLHIRNQLHRLYRLMDETESMQKKALTAMKQLGRKYPEIKEFEKMPGIGEILSHTFDAFIQTPHRFADKRKLWRYCRLGITDRSSDGKPLGFKRLDRSGVSELKALSYRAWLSAMRSDNEVRRFYSRSLRLTVNHVHARLNTQRKIIAAMYGMWKRGEAYRPQLFLDSPQMSVV

SEQ ID NO: 449735 - protein, 341 aa, unidentified
MQITTIGLDIAKNVFQVHGIDAAENVVVRKQLRRSQVMAFFKALAPCLVGMEACATSHYWARELAKLGHKVRLMPAKDVKAYIKRNKNDAADAEAICEAVRRPTMRFVQVKSAEQQAQLMQHRARDLLMHQRTQLINAMRSHLAELGIIAPQGREGVKELLAIISNEDNKHLPNDARASLIVLAAQLQALQTTIGAIEKRIVVQHRASKESKRLQTVPGIGVIGASAIAATVTNPKIFRSGRDFAAWIGLVPRQMSTGGKPKLGPISKQGDRYLRRILVVGAVSVLRRAKLHPEKFPWITQMLARRPFKVVAVALANKMARVAWALMMSGKTCRAARFATT

SEQ ID NO: 449736 - protein, 371 aa, unidentified
MNQLNGEISKGIGAEATQDKALGRVLKLGLDVHYRQVTVAMQEDGGRIKAAGKMNHGAFVDWIGTKLEKGWQLYSCYEAGASGYWLHRELVELGVKNLVVAPKAMGGAEAKRQKTDKRDSAQLCDGLDRYLRGQDQALSVVAVPTLEQEQNRALIRYHRQIIKDRTRAEARGKGLLCTQGIEVGGRWWEGKGWAEVQSDPRLKDWMKEQLEGWQKKILSAQSQEKPLREQIEALAPERLPKGVGAYSAAVLQHEMKGWKRFSNRRQVASYTGLCPGIHLSDGRGKEGSINRCGNPTVRWTLVEMVWRLMIWQPHYGPVRQLAAGLVKSKRAKKRLVVKAARRLAIDLWRLETGQTTAEKLGLIMQLRSSSK

SEQ ID NO: 449737 - protein, 320 aa, unidentified
MDDQLKVVQEAGLGNNLEEIVRLLEPYREEIEGIAVESTWNWYWLVDGLMEAGYRVHLTNTWAAQQWDGLKYTDDRHDARWLARLLKLGILPEGYIYPKEERSVRDLLRRRAFLVRKRTSFLLSMRGSFECRTGKRTSSDALKRWTAEDVEKYVDDSVAALGITSLLEPMNALSAEIRTIEREALSRARLRDEFAPLLTVWGVGKILALTIMYEVGDIERFRKVGNFTSYCRLVKTSRLSVGKPKGSGNRKNGNPYLSWAFSEAAHHANRHHEQARRYFQRKRSKTNNIVAIRALAHKLARASYHVMRDQVDFDAARLFR

SEQ ID NO: 449738 - protein, 340 aa, unidentified
MRIIGGLDIHRRQITYDYVDLETGEASRGMIKPVCRSEFRQWLERLELRPAAFALEATTGWRFVVEELRRADIEPHLAEPAETRSLRGNKRRAKTDRADARHLRDLLIQGILPESWIPTDFIADLRTKARLRKALVDQRSGWIRRIKAQLFQHGLPTPPDLQTLEGRAWLARAELPTTARRVTELALSMIDFLTEQIDRLDGELKAIADAQKGCLALRAANYGVGPLIATAMLAELGDISRLSSSRKAVRLAGIDVTVSESDGKQRGRRHLSRQGPPLLRWALYEAGGNAWRRASPDHDYYLQAKERLGAKRAKLATGRRVLRRSFHVLASLGPDAIAPV

SEQ ID NO: 449739 - protein, 316 aa, unidentified
MNRQSYNEINVGIDTGQAMLDVFIRPSGEFQPFDNNAAGIRSAIRFIRKFKPARVLIEAPGRLEMAFFCAAYKAGLPVCVCNPIQVRKFAQSMGRLAKTDKLDAQDIAYYGETAKPQPTDLKPEKLRLLSDLLTLRSQCLDMSTMQKNRLQRMPKTVHKSIRNILNAIAKEVASIELQLDKLVAEIPHYQERVDQLISAKAVGKVLAYTLLGDLPELGQLNRKEIAALVGVAPMNRDSGKHKGKRKIRGGRHKIRTVLFVSMLSAIKCHPTIKPMYQRLVAAGKPKKVAIVACMRKQLTILNAMVKSGTYWNENMT

SEQ ID NO: 449740 - protein, 317 aa, unidentified
MASEMLIGIDVAKDELVIDSEQGLLTLANTAEAIDAWLKTLPTGSYIGLEATSDYHQLMAEQAVLMGMVVYVLNPRDMRHYALGLGRRGKTDRVDAQMIRRFITAERGHLRPYQPASAMQHQVALLQRRRATVVKHRQALQKALRSVKELEAPLIDTVAALDGLLKHIDQQLDDLLTLQPALKAEARRLESIPGIGRQTSTQLAVLFDRVPLSRSDAVVAFVGLDPRACDSGQKRGRRRVSKRGPGELRRLLYNCAQAAAKTAVWKPYYQELRAREFSATQALVIIARKLLRIAFSLWQQADARFDAQKIACLNNAA

SEQ ID NO: 449741 - protein, 425 aa, unidentified
MTRRVRASGQAQVHARYHITGGCDTDKNIIVAAVYQADTGDLQAKEFRQHRADALRAAAWFLEQRVEFVIIESTANYHLLYYDTLREQGINIAVINPIMVKSLLRVEGKSDKGDAMTLARLAASFDLKTSNMPDSQQRELRLWFKRIDSWKMQRTQLTNRANGVLTGFGFTVFRLVSINSPSGFRILQAVIEGRSATEIAAAHCRKAKRAEIEKCAQVELPEYVRPYLKETLDDIQLYNQRIRQGEAELLAKIDACQLTEQVDLMCTVPYVSQLLALRIIAEMGANYHQRYYSAAAFTKAIGVVPSNEVSGGKLLKRKASHGNQRVKMHLLQTAKVFALHGKGPLRDWYNTYRNHTTYMKAVSAIARRMAEGLWWVLVRNEPYRYWQGELARTGSEGFELGDHLVDPQTGEILVTLEPDPLSVEV

SEQ ID NO: 449742 - protein, 425 aa, unidentified
MDEVDEQELHVERVAALDLGKAVLEACVRVPHESRPGRRMQELRGFATTTSALLAMADWFRCWGVTRVVMESTSDYWKGAYYLLEAEGFECWLVNAREVKNVPGRAKTDKADAVWLAKVAERGMCRASLVHPKPIRELRNLTRYRRSLIRDRTREMQRVEKLLEDAQIKITSVVSDVFGVSGRAILHALIDGQRDPAVLAGLAVGRLRPKTAQLAEALRGFFTDHHATILAMMLDNIDRLSAQITALDTTIGDAVDPFAHQVAQLGEITGAGRTAAQELIAELGVDMTRFPSDAHLVSWAKFCPQTRESAGKTKNKGRAKGSPWLAATLGNIAASACRTDTFLGARHRRIAKRRGTQKAIVATGNAVLVIAYHLLADPTVRYHDLGADHYDTRINKHRRARNLATQLQALTGQKITIRDGKAIIA

SEQ ID NO: 449743 - protein, 418 aa, unidentified
MKKDNNSAHKSEPTSKRAKSRGPVQRDAKEVMAEVLGKLTGKLDAPTASTSVQENRRGNRIGPNRDRLTVGVDLGDRWSQYCILGLEGETLAEGQLRTTQEDVGEFFRGLTTARVVVEVGTHSAWVRDVITECGHEVLVANPRLMEGSKRRKRKSDRIDANKLARLGRVDPQSLYPIRHRSREVRQDLVVLRARDALVSVRTELINTTRGLVKSMGTRLPRCSSPSFAEKVKDAIPAEVGEALQPLVQLVETVNECIERYDERIEELGRKKYGHTTLLRQVKGVGPITSLAYVLTLEDPQRFASSREVGPYLGLVPKQEDSGDSQPQLGISKAGDRMLRRLLVGSSQYMLGAFGPDTDLRRYGLRLCERGGKNAKKRAVVAVARKLAVLLHHLWVTGDVYEPLHHTGVETRTAQATAA

SEQ ID NO: 449744 - protein, 345 aa, unidentified
MSCATEHDAKEGRVSKAWVGVDAGKGQHWALVIDVEGRILRSRPVANDQAAISELLAEVSGLADELVWAVDLSNGCTALLLALLWANHQQVVYVPGRAVNRAADGYPREGKTDARDARVIADQARLRRDFAPLAPTPELVADLRVLTGYRQDLTGDRTRMVARLRQHLTAIFPALERALDFTHLGPLVLVTRWQTPQAIRQAGVEVITAWLRAHHVPKAAVLARTALAAAEQQTVRLPAEQLTAQVSAELAGELLALRRRVKELDKLLGTRLAAHPQAAILTSLPGMGVLLAAEFAVAVKDLANFASPDHLAAYAGLAPVPHDSGRRVNNLHRPHRYNRDLLRVF

SEQ ID NO: 449745 - protein, 465 aa, unidentified
MKKSHKKSQRSKSKNKLVASGGRAVEVRASGELNRVNEHAAGVDIGGERDYVAVPPGSTEHAVREFGVFTKDLYAIADWLKECGVDTVAMESTGVYWVPLFEVLEERGFKVKLVDARKVKNVSGRKSDVLDCQWLQQLESYGLLQAAYRPADEIIVLRSYVRQREMLVKNAATHIQHMQKALQQMNLRLDHVVSDITGQTGMRIIKAVLAGERDVKKLGEMRDFRCHASSEEIAQSLVGNYRQEHLFSLRQAVELFEYYQEKIAECEAEMEKYLESLPHVTEEEPPELPLGEKRNTLSFNVRDHAYKLTGTDLFRIKGLNSETVLRIVSEVGVNLNAFPTEKHFASWLCLSPNRRISGGRVLSSHTKPSSNRAAAAFRQAAVSVERSDSELGAFYRRKRSQKGPASAATATAHKIARLYYSLVKNGTEYEEQGARAYEERERERTVAVLRKRAKSFGFDLVAKAA

SEQ ID NO: 449746 - protein, 348 aa, unidentified
MAMTIVEPARTIVGGVDTHLDVHVAAALDPIGGVLGVEAFAATPHGYKVLLEWMKGFGSVAKVGVEGTGAYGAGLGRFLARAGIEVVEVDRPNRQMRRSKGKSDPADAVEAARAVLSGRATGMPKSRDGNVEAIRALLVAKRSAREGRLRAVHQMRQLSYTAPDQLRCRLKDLSTTEFVAEAAAMRARVGGDPVVLATKVALASLGRRVHALEAEAAHLDERLAELVEETAPQLLALFGVGIDTAAVLLVAAGDNPERLRSEAAWAHLCGVAPIEASSGKVTRHRLNRGGDRNANQALWRIVMTRIATDPRTKDYMERRTKEGRSKREVIRVLKRYVAREVFKHLPRG

SEQ ID NO: 449747 - protein, 356 aa, unidentified
MPIPIKRYKGMKKIFIGIDFSKEKFDATVIKAEGVEERAERLHEVFDNKVSGFRRLLRWVKSVADEPDAGLWLFCGENTGGYSKALCNHLYGSGYDMWLENALSIKRSSALQRVKSDKADSGVIAEYAMRNYDQMRLYKPLGKNLERLREVFLYRHNLVKMKASMTVRKGEKKLTQEKSDISRFMAQSSKHLISEFNKKIAECDMRIDKIISEDKELRRNFEIITSVPGVGTQNAVCLMVYTDNFSRFDYDSRKIACYYGVAPFGRQSGTSVNTPPHVSPFANKLIKALLTQAALASINFCPQMAVYYRRLVEAGKKKPVAVNNVKNKLLHVITAMVRNGAMYNPDHDYYAALKVA

SEQ ID NO: 449748 - protein, 348 aa, unidentified
MTVTIVETRAITGGVDTHADAHVAAALDPIGGLLGVQEFPATAAGYAQLLDWLGAFGTVCLVGIEGTGSYGAGLARHVTTAGVRVVEVDRADRQDRRRAGKSDPLDAVSAARAAQSGRARGAPKGRDGAVEAIRVLMVAKRSARAERTQTINQARALILTGPDDLRARFSQHDTADLVAELAALRPRPGDVVGYATRVAVRELGRRAEFLDGQLERLDELIVPLVTARAPGLLALYGVGPDTAALLLVAAGDHPERLRSEAAWAHLCAVAPIPASSGKVTRHRLNPGGDRQANHALWRIVITRMSSHPPTRAYVARRTEEGLSKKEIIRCLKRYAAREIYPHLRAAAR

SEQ ID NO: 449749 - protein, 339 aa, unidentified
MNSMAVGVDIAKQVFQVHYVDRETGEIVNRQIKRAKFLEHFANRASCLIGMEACGGAHHWARELTKLGHEVRLMPAEFVKAFNIRNKNDAADARAIWLAVQQPGKPVAVKTEMQQAMLALHRMREQLVKFRTMQINGLRGLLTEYGEVMSKGRAALDKEIPAALGRIAARLPAALIDTLREQWNGLARLDEQIAEIERRMREWKQQDRAVKAISEIPGVGLLTATAAVAMMGDPKAFRSGREFAAWAGLVPKQTGSGGKVNLHGISRRGDTYLRTLLIHGARSVLTHTKEPGPWVEQMKQRRPMNVVIVALANKMARMIWAVLAHERPYRNDYVSVKPA

SEQ ID NO: 449750 - protein, 344 aa, unidentified
MEHYAGLDVSLELTSVCIVDVRGEIICEAKVASEPEALIGFLSGQQLEIGRVGLEAGPLSQLLHAGLIAAGFDTVLLETRHVKAALSAMSVKTDRRDARGIAQLLRLGWYRPVHAKSATAQEVRALLTSRKLMQGKLLDVESGIRGVLRGFGLKVGLVSRGRFETRIRELVAGHAILETVSDAMLAARAALETEFKRLHRELLEIVRADPVCRQLMSVPGVGAIVAITFKSGVDDPTRFRRSRDVGPHFGLTPRKYQSGELDVTGSITKVGDRMVRTALYEAASVMLTRTVRFSSLKAWGMAVAKRRGTRKARVALARKLAVILHRMWVDGTTFRWSNEETAIA

SEQ ID NO: 449751 - protein, 427 aa, unidentified
MKKEDSRLEEFRQLRNEIRGSEKHLLVGIDIGKEKQNAFLGTATGKTLYKRLIFENNKEGFEKLLTHTEAVKVQNNLSQVVFGMEPTANYHKPLGEYLITRGHEVVLVSGNAVAKNRQLLDGRWDKHDGKDAANVADLISQGKCQYYEYPCREVRDLRGLLSLKRKLKKQAQGLWLRIRNNLVAQYFPEMDRYYGSCAQDNLAIVKNCLSPSVIAGMEYNEFFKTVVSRKKGLRQHKHLYKIWQLAGDSICCEAGDAAVCEAEVLVEQLKQTRKAIEQVDKEVLKLCCLFSEYEFLMSIPGFGPDISAKVLAYIGDEYRFDKASQVVKMAGLDLNANRSGKTTDRAVPVISKKGKADLRYALYQAAMVASSRNQHFIKYFTEKIRGREREKGIKTKMRVKLSAKLLIIAWTLMKNKEPFNPDYLTVA

SEQ ID NO: 449752 - protein, 332 aa, unidentified
MKIKKEVIGIDVSKLTLDVFIHSLKHHFIVSNNPAGFSKLLQVIWKELPDKKGNLFFCFEDTGRYSLPLCIFLNGEKLSFAMVPALDIKRSMGMVRGKSDKKDASVIALYAWRKRDEIKPTVFPAGSIVRIKQLLSLRNKLVKHKKAYQTGMCDIQDYFKEGDSQFYLDVNKRIIKSLCSEIASIEKEIESLIKSDPEVQNNYKILKTVPGIGKIIAFYMIAYTHNFTKFENARKFCCYCGIAPFENSSGTSLKGRTKVNHLANKMIKALLNMGALSAIRNYPEFKSYYNQRVETGHNKMSTVNIIRNKIVFRAFSVIKRGSPYINLHKFAA

SEQ ID NO: 449753 - protein, 324 aa, unidentified
MQAIPIGCDVSKGKIDLCVWLNDGKQEYLLIGNNQKGYLKALAEIERLNIKPHICMEATGIYYEGFADFMAENGHLVSVVNPLKIKKFAESEFQKTKTDKQDARLIACYCLKMQPKADYIKPNPEQYAVRRNIALLKQLNADLNGIKNRIKVAKDEFVRQILSNQQKEIKKHIKEVRQHLAEITEQTSVGQVAEKLESIPAIGQTTALILAHYLNMYRFDSENKFVAFAGLAPGKHESGSSVRRPDKLTKYGNRTIKGALYMPAMVAYRFGYFGAFVNRLKNKGKPPKVILIAIMRKLAAIAWNLWKNGQTFDPARYGLNSKTA

SEQ ID NO: 449754 - protein, 373 aa, unidentified
MDQEIIFAGLDVHKATIAVALAPDGRSNEVRFQGSVPHRPGAMADLGRRLQSKHPGARLTFCYEAGACGYGLARELTDAGYECLVIAPSLIPSRPGDHIKTDKRDATMLAKMHRAGELTTVWVPDASHEAVRDLVRAREAAMYWRNRARQALSSFLLRQGYRYGGRSAWTASYWRWLATLVLEHPAQQIAMQEYILAIHEADARHDRLVKQIEGIIPTWSMAPLVTALQAMRGIAMITAATIVAEIGDLGRFATPRKLMAYLGLVPAEHSSGAKIRRRGITKAGNPRARRLLVESAWTYAKSPRVSQVIQRRQEGVELEIVKIAWKAQLRLHDRYRRLAATGKPKNVVITAIARELVGFIWAISQRISPPATA

SEQ ID NO: 449755 - protein, 415 aa, unidentified
MVVCRANNTSCRTEKDVAQPTLWAGIDAGKAAHHCVAINTGGQRVLSERVINDEGALLDLIRAVKELADGGSVQWAIDLNSGGAALLITLLLDDDQDLLYIPGRTVHHASGAYRGDGKSDAKDAAIIADQARMRRDLLPFRHRDKTAVDLRILCARRTDLASDRNRAINRLRAQLLEYFPALERAFDYAHRKAALILLTGYQTPDGLRRMGAPRLERWLRDRQAYNAGDLAARAIEAANLQRTTVIGQHVAAAVVARLAQTILDLNTELADVDTMIEETFQQHRLAAIIVSMPGFGSLLGAELLAAANGDLASFNTADRLAGISGLAPVPRDSGRISGNLKRPRRYDRRLLRVFYLAANNSIKTCPKSRNYYDRKRSEGKRHSQAVLCLARRRLNVLWAMQRDQTSYQPGMPRAA

SEQ ID NO: 449756 - protein, 356 aa, unidentified
MSREIKYIGMDVHKEATVIAVLNGSGKLVMESIVETKASSILQFIHGLRGELQVTWEEGAWAAWFYDLLKPQVTQVLVCDPRRNALLKEGNKSDKIDARKLADLLRTGMLRPVYHGEHGLRTLRELGRSYRTISQDLNRVMNRIKALYRGWSIPCAGTQVYAPRYREDWLQKIEHAGVRRRAELLYQQLDGLQTLRRTLRPELLAESRKHKASKLLRQIPCIGPIRAARLLALMQTPHRFRSKRQLWTYSGLGIETRDSAQYRYVHGQLQRTKKPQQIRGLNQNHNHEMKEIFKGAATRASCGVGPLRDFYVALLDRGMKPEKARLTLARKIAAIALTLWKKEERFDAEQLKPQAA

SEQ ID NO: 449757 - protein, 453 aa, unidentified
MDVIKAVGIDPASGDYECALIQQGKKKVIHKTFSVKNNSLFEFINWIKEEAIGIIAIEGQGGFCIPLEKVLRNANLSFYSFNPYLIAKYRQAILGQNKNNRKDAAAVALYAMTQYSQNNLEKYKRKWFPDDIFRPLTRMYEQKQKEATREINRLWKIIHRASGDLFLTLREYHKGNGKNSVLTQKWVLKLLSIYPDICSWQFLTEKELISVSEAKHPNTRKLITDLKALSPKISTIPEMLIMELQISATTALTLKQGVFLIHQQLEIEVKENPSTSKLISYKGIGPITASQIFSEIADISRFPNNHHLASYAGFGRREYKTGTNTKEKPSFLFNHRLKNAFFTAAKNYTVFNPDSHLAGFYRMLRDKGMKNTEAYKRVGRALIRRFFRDLMSVNIIEDDKTRCKGNLKIYQDGQINPEQPRTPTLINNTQPVKIPVKDISTFTMEVITSERIP

SEQ ID NO: 449758 - protein, 418 aa, unidentified
MEIVYERVAAIDVGKKIIAVAVRTPGQHPGKRRQQVRKYNTFHQTLAEMVAWLVAEGVTHVTMEATGIYWKPIFHALCAAERPMEVLLVNARHVKNVPGRKSDALDAVWLAELTECGLLRGSFIPPPQIAAIRELTRYRKKLIEQRASELQRLGKVLEDSGIKIDSVASTLTTVSAREMIEALINGERDPAVLADLALGVMRKKIPELRMACAGRFGDQHALMCTLHLEHIDHLTDMIARLDTRIDEASLPFDPQIQLLATIPGIGERAAQVIISEIGVDMTRFPTAAHLASWAGLCPGNNESAGRHRSGKTRKGNTELCAVLTECAWAAGRTSTYVGAQFRRFHRRFGKKGGRKAAVATAHTLIVIVWHVLADTTGYQDLGADYFTRRLDNPEARKRRLIRELEALGHKVTVEPAAA

SEQ ID NO: 449759 - protein, 423 aa, unidentified
MRTVYPICCGVDVHKTFFVATLITTQGIEPHYKKRRFSTFNKQILAFKQWLLDNDCRDVCMESTGKYWVPVFNLLEDSIRVTVATPKWVKTIKGNKDDVKDSKWIGDLFRIGIVPGSFIPPKNIRILREHTRYRFKLVSCKSSEKNRYQNVFTVCNVALDAVVSDMFGKSASSITDYITSSDTFDPNHCVSLLQKTLKKKADEVVDSIEGFQMTAPQKQRAKMVKEHYDFLVTQIQKLDAAIDRLAAPYEGAIALLETIPGVDRQSAITVLSEIGADMSQFESSKKLCRWAGLTPGNNESAGKKKSVRITRAGVYLKPALVEIAHAAVKSKQTPYYKIKYEQIFKRRGKKRAIIAIARMILTAVYHMLSTGEVWNPCDLKQIDMPPELREREIQKALRKAAKLLVAHGAVNPDAISIPQAAPA

SEQ ID NO: 449760 - protein, 425 aa, unidentified
MAGVMIGIDPHKGSHTAFAIDAREKRLGQLRVRASSKQVEVLLGWAAGWPRRIWAIEGARGLGQLLSQQLIATGERVLDVPPKLAARVRLLDSGQINKNDPNDARSVAVAALRAHDLPQLSGEDQTMVMRVWSRRYRDLGTLRTQAVCRLHTVLCELVAGGVRKQLRTSQAIELLTRIVVDTPIAQAKLELARDLVADLQRIDTQRREARRRTAQAVAASGTSITDIYGVGPIVAGTVLGYVRDIGRFPNRDRFASYNGTAPIEVSSGDRTIYRLSRRGNRQLNYVVHMAAVSQIRHRGSEGRAYYDKKIADGMTGKCALRALKRKISDALYERMIDDARRRDAGKDPGGQSGNDAVSSVAGSHPGRPALWTSHSRAETNSRTTTGQRSLASRPAPDRRRSSRSAGGVQVEPRPGPRCGRGQERP

SEQ ID NO: 449761 - protein, 381 aa, unidentified
MTAATRPTFGSVSEPTLYVAFELGKKEWKLAMTSGFGVPPWLRTVASGDLRGVERALTDGRRRLGLAASAAVVSCYEAGRDGFWIHRALTQLGVRNRVVDSASIEVNRRARRTKTDRLDALKLVMMLVRVCAGEPRVWHEVRVPSVEAEAARHVSRERSTLTGEQTRLSNQISSYLVTWGCVVSRRGRRPAGWWTRVRDWAHAPLPAAVQARIARAEERLAVLATQIAALEAQQAAAVATAPPASALGRLVRLKGVATTSASVLLDEGLVWRAFRNRRQIGGLLGFAPAKYDSGDSEHDQGISHAGNAHLQAISIQLAWNWVRWQPTSALTRWYREHFGPRRRARRIGIVAVARKLIISLWRYVTTGVVPPGAILKGAARA

SEQ ID NO: 449762 - protein, 355 aa, unidentified
MQKYNISFKGQNIYVGIDVHLKTWHVTTLTESGYKYSFAQHADARELFERLNKKYPEAHFKSAYEAGFCGFSVHYALTEYGIENIVVNAADIPTTGKEKAMKTDAVDSEKIAWALKRGELTGIYIKDKRFMDDTNLMRLRQRFIKDLSRQKNRTKHLLYTQGVTYPKRFLNSKTHWSRNFMQWLREEVELLSEEKLTLTLLCEQVENTRKAILKVTREIRRLSMTEKYKDNFDLLISVPGFGLIMAMTMLTEFDNNIMRFPNERKFVAMLGLIPTCHDSGEKKTTGEKTFRGNKQLGPLVVESSWVAIQRDCELASYYSKCCQCMRPPRAIIKVARKLACKAYAVLKNQKAYVQP

SEQ ID NO: 449763 - protein, 351 aa, unidentified
MQTQSKQIDFNGQNFYCGIDTHQKTWTVTIQTDVIVLKTFTQDPEPKILFNHLRKHYPGGNYIAGYEAGYFGYGIQRDFESLGMKCLVLHPADIPTTQKDKEQKRDPRDSRKIAKALRNDEVVPIWVPPIGLEQDRQLLRTREKLTVDHTRIKNRIKAALQFNGIEYPEAFKAKGTHWSARFIKWLNDIELSEPSATEAMKSRIRCILFVRGELLNLLRKIRELSRNDRYNKSYDELIKITGIGMITAMTLLTETGDIHRFKRPDNFKAFLGLIPRAYDSGGNERAGRITKRANSHLRYLLVEATWIAIRFNPYYLNIYQQYRKRMRANIALVRTAGKFANQIYFCLKRIS

SEQ ID NO: 449764 - protein, 462 aa, unidentified
MQEKRESEPGQNRRRQLQGLPLMRADVAGVDIGSERHWVCAPTPDGSGREIADFGATTAELLRMAEWLQARGVRSVAMESTGVYWIPPHEVLEAQGLGVLLVDTRQLAQVPGRDKKTDPTDCEWIQRLHSCGLLRGSFRPSEAICMLRTLVRDKATLVAESGDWLRRMQKSLDQMNVRVHRAVSDIDGTTGMAMVRAIVAGERDARKLAQLRDPHCRKSEAEMAEQLNGHWREDHLFSLSQALKMYEAIQQRMADYEKEILRKLGEMEQEGLRGQQAPPLRNANKARKIKNRGQEPTRQAFYRMSGVDGAQIDAIGVETVEVILSEYGPDLRCFPTEKQFVSHATLAPHVPKSGGRPLKKKKRYSASGRVANVLRMAAQSLSHSDTALGAYYRRMAQRKGADIATFAAARKLATLAYRLLRWGQPYVDEGAEAYEKRYQQNRINGLQSRAKQLGYQLTPLAT

SEQ ID NO: 449765 - protein, 343 aa, unidentified
MDYFAGLDVSVKDTSVCIVDETGKIVREVKVSSEPDALLTVLRNPAYHFKRIGLEAGPLSQWLFSALAEADLPVICVEARHMRAVLKAQINKTDRNDARGIAQMIRVGLYRPVHVKTLRSQKLRMLLTHRKLLQSKAIAVDNDLRGTLRNFGLKVGVVGAARFEARIRELVEGFPDLAVLIEPLLVVRRVLREQLDILHRRLLAIVRDDEVCRRLMTVPGVGPVVALTYRATVDVPARFRKSKSVGAVFGLTCSRHQSGERDRPGAISRCGDEMMRTALYEAAQVMLMHSVKWSWLKAWAMKIARHRGRKKAIVALARRLAVIMHRIWVDGTEFCWTREAAAA

SEQ ID NO: 449766 - protein, 389 aa, unidentified
MPTEVDRAETPIAIQTHFAAIFISLELSRSVWLITSLKPGGGERMSKHSVRAGDVAALLSQFSDLKQKALARTGKSFPLVTIQEAGLDGFWLHRVLKKEGIESHVVDPASIATSRRRRRAKTDKIDGEALLRALLAYKRGEPRVCAMVKAPTPEEEDRRRLSRERKVLIAERVEHVNRIKGLLFTQGIADYKPLRRDRRQRLEELTTGDGRPLPTHLKTQITRELDRLELLLDQIKLTEAERDALLATQQTTSPAPAGRMLLDFKGIGAEFAVVLWLEGLFRHFDNRRQLAAYAGLAPTPWQSGSIDREQGVSKAGNARLRTTLIQLAWLWLRHQPHSALSRWFHERVKRDGGRVKKTTIVALARKLLVALWKYVTTGVVVEGAIMKAA

SEQ ID NO: 449767 - protein, 348 aa, unidentified
MTLVGCDLHARDQQVAVLDTATGEIQERRLVHDGDSVEQFYTTLPGPVTVGIESTGYALWFHALLHRLGHEVIVGDAAKIRAMVVRKTKTDRRDAAHLLDLLRHDRFPTVWLPDPAVRDQRTLLAHRMRLVRMRTMVKNGVHAIALNYRLALGPSLFTRAGVAQLQALSLPAHTSCRRSESLELLSWLNTHIKGLDDQIEEAAHAHPEAQRLMTHPGVGPLSALATALVLGAVTRFPTSKHVVSYIGLAPAIESSAGKHRLGRITKQGNALLRYVLGQAGQAAIKRDPDLKRLYYAVLHRRGRSRAKIAVARKLLVRLYVMLRDQIDYPTFLHRAPAAARRKEMPPTS

SEQ ID NO: 449768 - protein, 336 aa, unidentified
MKNYVLFTGIDVSKDKLDICYVDKNGNVLGSKVIDYKPKNIKSIVKDLERLGYNLTQTLICFENTGVYSIKLGEVLSELNAYYSEVSALEINKSKGITRGKDDKTDAKMIALYALRNIDKIVLSKVTDEAIQELKLLFAEREKIQKSITSLKMTQENEGRVNSKAYESVHKINQQTRVALKNSLKAIENEIESVFKEHPELKKNRDLLKSIKGIGTIISAYLVMITHNFTKFKNSRKFACYSGIAPFEHSSGRSVRGKTQVNHFANKKVKALLSMAVQSAKKYNSQIKAYFQKKKEQGKHILLISNNIKFKLVNIAFAVIKRGTPYVDIYKYATVA

SEQ ID NO: 449769 - protein, 374 aa, unidentified
MNYSTVYVGMDVHKESFSLCCYTNEKETAEYHQKVEAHYSKILNYLEAMRFHYGDDALFICGYEAGCLGFTLYHQLTDHKVKCIILAPTTMSKPAGRKKVKTDKRDAALIARCLAHHDYSPVHIPTEKDEQVKEYIRMRQDHKLALKKIKQQILSFCLRHGYRYNETKSHWTQAHLKWLRSLEADGLYREILSEYLTTYDQLTDKLERLDKRIEEFAAEPTYQKDVQHLSCFLGVQTQTALSTIVEVGDFKRFGSASKFASYLGLTPGEDSSGEDEKRLGITKAGNRHVRTLLIEAAQSYTRGRAGSKSKVLKARQYGNPPEVIAYADQANERLRKKYYRMILKEGKKTNVAKTAVARELACFIWGMMTGNIQK

SEQ ID NO: 449770 - protein, 403 aa, unidentified
MNSVGIDISKGRSTVAVMRPFGEVVISPFEVRHTDSELSELARQLKSLDGETRVVMEATGNYHAPVAKLLHDAGLYVSVVNAKLVHGYGNNDLRRVKTDKKDAVKLANYGLDRWLTLPRYVPEEDTRLLLKNCYRQYRQYSKVQTVLKNNLISLLDTVFPNVNRLFSSPIRGDGSEKWVDFVAEFWHCRCVSEKSEKAFTNKYQRWCKTHGYNFSEAKAHTIHAEASGHIGIMPKSETTKLLVEQAVVQLRATSAALIALKREMLTLAAQLPEYPVVMGMFGVGPTLGPQLIAEIGDVRRFYSKKALVAYAGLDAPPNDSGDVTGRHKSMSKIGASSLRRTLFLVMGIYLQNAPLDEPVYQFMDRKRAEGKPYRVYMMASANKFLRIYYATVKAYLESLELTA

SEQ ID NO: 449771 - protein, 352 aa, unidentified
MSKVTVYVGLDYHKDSIQVCVMDQSGQVLANRSCPNDVQALVLLVAFFGDQVRGAIEACTGAAELADELVARHGWDLDLAHPGSVARLKQSPDKSDYSDAKMLADLVRVGYLPRVWLAPHDVRQLRTTVRYRQQLVNQRRAAKLRVTALLREARLVEPKPRRWGGPWLSWLATAEGLGSEARFVVDCHLAELRRLDEQLLRVQLRLATVTAEDPVVARLVAMRGVGLVTAWALRAEIGRFDRFRTGKQRARYCGLSPRNASGGQRPADAGLIKAGSELLRAVLIEAAHRLIRYDPRWSVLAGSMRAAGKPACVVAAAVANRWVRWLFHQVEHGGGARFRGGVERRGLDHSIY

SEQ ID NO: 449772 - protein, 335 aa, unidentified
MKHYAGLDLSMETTQVCIVDESGRKIVSMKVESAPAMIAHALREAGGVERAVIETGRMSPAICHGLRALGIPVVCIDARQAHQSLKTLKANKTDPHDATGLAQLARTGFYKEVYVKSPAAHGVRSVITTRNHLVESRVRLDNMIRGLCATFGFKPGPGQGKAFIDRVMEAANIPGLGQSITALLAVRTGLMKQIKEMDLVLREFSHRSQSCRQLMSIPGVGVQTSAAFAAAIDEVGRFRQSRTAGAYFGLVPRRHQSGEIDWTGRITKQGDSMVRKLLYEAANSILTRSRGSFALKGWAMKIAKRRGLRKARVALARRLAVIMHAMLRDGTLFEA

SEQ ID NO: 449773 - protein, 400 aa, unidentified
MNEFKPDASRIDTVSASLELPGQECYAAYVGLDVHKETIAVALAEPGRQEPRSEGEIANRPKSIEKLVRRLSERFGGGVLQFVYEAGPCGYGLYHQLAGTGHICEVVAPSRIPKAAAERIKTDRRDALKLARLARSGDLTPVWVPGPEQEAMRDLTRARGDMKSQERKARQQLSAFVLRHGHAWPAGKKRWTQAHYTWLESLKFAHDWQQVVLQEYVDAVKAATQRVADLRAQMERALAQWSLAPVVEALVALRGVDTLAAMVLLAELGDISRFDSPRQLMAFLGLVPSEHSSGGRRHQGGITLTGNGHARRVLVESAWSYRFPARQTKHLKRKAAPASEAAKGIAWQAQKRLCGRYRDLIQAGKNSKLVCVAIARELAGFIWAIVREEMPRVRGAANAG

SEQ ID NO: 449774 - protein, 313 aa, unidentified
MAMPAKPFIIGVDVAKVELVSYCEQTGQHQSFRNTQAEIRKWLALQPANTAICVEATNIYHLDLVEMAYEKGFAVYVVDGYQLSNYRKGIGGRVKTDASDACLLARFLDREGSALRPWVPPPPVYRKLQSLLRRRAALVSARTSLVQSWSNEVFLNEAFNSFIKHFESLDLLIQKQLKTVVREAGLTEQVVRCQKVEGIGFLTAVALVTAFIRGEFRSSDAYIAFLGMDLKVADSGQKSGRRRLTKRGCSEVRRLLHNAAMAASKSAAWKELYEYYRSKGKATTQVLVILARKLARVAFALMKTQGEYVSRRA

SEQ ID NO: 449775 - protein, 429 aa, unidentified
MKLNSNLIEETSFAALIGLDWGDSQHAVAILDCSSARTECSTLEHSAEKVHAWLKELEQRFSSKPVAIALETSKGPLIHMFMEVPWLTVFPVHPATSARIRRAFNPSGAKDDIPDAQLLLDLLVHHRPKLRPLFHDDAQTRRLAGLCELRRKSVDQRTYLTNQLSSTLKGYFPQALALVGENLYSPMALEFLKRWPDLISLKACRERSLKAFYYKHNVRSSEAVEKRLELIRQAKALTTDEAIILAATRQVARLIRLLAEIQKHIAEDEKLIREAFKQHPDAELFRDLPGAGPVLAPRLLVAFGTDRSRYESPADLQRSSGVAPVKEKSGGRIWIHWRWNASRFLRQTFVEWACQSARFCPWSKAYYEQQKKRGKNHWAIMRSLAFIWIRILWKCWKTRTPYDESRYLQALRKHQSSLLQPIFKIIKTC

SEQ ID NO: 449776 - protein, 338 aa, unidentified
MEWTVAIGIDTHKEVHVAVALDALGAELDSREIATTPAGYQSLLSWALELGVPAFSVEGTGSYGAGLVRFLEQAGINVYECERPRRQERRRGKSDLIDAALAARRLLGGEHLSIPRGGGRREDLRLLLLERRSAMRARTAALNQLSALLVTAPDHLRSRLGALSGERLACAAARLRSRPDVLNGVLRRLGQRVERLSTEVADAERALAGLLAEVAPDLLEECGVGPVCGAQLLVSSGDPSRMTSEASFAALAGTSPVDASSGKQRRHRLNRGGDRQLNWALHVIALARIRHHGETTAYYQRLLAAGKTTREARRCVKRALARHFYRRLCEIPTLPLTT

SEQ ID NO: 449777 - protein, 385 aa, unidentified
MQALLECCCGIDIHKDMIEACILKGKGNKPKAIRAQFKTTQADLQNFVAWLSENHCFYIAMESTGVYWRPVYEVIEEYAQHYEQLMVVNARHMRNLPGRKNDIKDAEWIATLLRHGLLESSFVPERIIRSLREFSRLHKSFVQERARYLNRLEKFLQVHGFKFSSVLSDITGLSGRNLLNILVTKGCITPDDVIKAVGKRIKRPLAEIESAVCGTLTKSECRLLEHLLKKIDDAQEDIDAILADMQELIRPYQKALEQLDSIPGIDTTAALAILAEISATPQTNFKTAAHICSWAGLAPRNDESAGKVKSRKILHGNPYIKSILCQCAWAAVRSRKSSFALWFWSHQGKLGKKKAIIAVARKILVVAYTLLKNDEFYDSQIAYMA

SEQ ID NO: 449778 - protein, 351 aa, unidentified
MSQKTDTVVASTIGIDTGKNTLHLIGLDDQGTIVLREKLSRSRIVSRLANVPRCLIGIEAGMATHYVARELIALGHDVRQVPPAYARPFRQAHKNDFRDAYAIAEAVQRPSTRCVPVKTDDQLDLQALHRVRSRLVGQRTAVINQIRGFLLERGIAIRQGLRFLRQQLPEILAKRIDVLSPRMIRIIEDLSRDWRHLDERIEHVTEEIEVLALGSESCRQLMTVPGIGPLIASAMVAAIANGAAFAKGRDFAAWLGLVPKQMSTGDRTILGRISKRGNRYLRMLFMQGARVILLRPANWAKHSFGPWLTAAAKRLHHNVLATALANKLARIAWTVLAQRRNYEARVIADAA

SEQ ID NO: 449779 - protein, 342 aa, unidentified
MGQVSTIGLDTAKQVLQAHGADEAGNVVFRKRLARGSVLGFLASQPPCLVALEACGGSHHWAREISKLGHQVKLIAPKYVKPFVKRQKNDMADAEAICEAAQRPSMRFVPVKTEATQASALVFRVRDLLVRQRTQLINALRGQLTEYGRVVAKGKAHVAKLVDHVEDPACTLPDEARSILRVLIASLKDLDEKIAGLDAQIAKRAKTDPIARRLTSIPGVGPITATAIAALAPPPESFGKGRDFAAWVGLTPLQRSTGGKQRLGATSKMGERTIRRLLIIGASAVVRQAVLHGAPQGSWLARMLARKPRMLVSVALANKMARIVWALLVKGEVYKAPVVMAA

SEQ ID NO: 449780 - protein, 400 aa, unidentified
MIELERCRQIEGTVWIGMDVHKKSCTMTAIDDAGREISCWNMPTTPAQLNAFIRGVPTNAKIALEASTTGKAVAHWLRDAKLDAHMASPRELAAIRASGVVTDERASYHIAHLFRNNYFPESYIPTVETDRIRDLTRFRIRLGRDVASIKNQIHAIVSKNLLDSEIPQSDMFGRAGLQKLVSLPFPDQDRSILKSHLEHLELLIRQEEQYSEELARIGKGRPDVELAMSIPGIDFYGAIGILGEIGDVHRFATRRKLYSYGGLVPGADNSGEKVSTHRRCKRGNSVLKYFLCNAVQGAIKASKPNSIARFYHKKAKQIGNAKAQVAAARKLAGILWTILMTGTPYVEENPALTQRKMARMELKARAPEHPVTNEELNELASNISAKEQVLKRLLPEDEEE

SEQ ID NO: 449781 - protein, 346 aa, unidentified
MQHYVGLDVSLKQTAVCVVDQTGKIKRESMVASDPDEIARFIVAHAPQVALVGLETRATSTWLWTELNKRGLPVVCIDARHAKAALKMQINKSDRNDAAGIARIMQCGWYREVRVKDLDSYAVRALLSSRALLVALKRDLENQIGGLLKNFGLVIGRAKMTTFTTRAEELLDGQPALSAAVEPLLKAREALGKQIADLDRKVLRLARSAPQIRRFMTVPGVGPITALCYLATIDDPARFKKSRAVGAYVGLTTRRYASGETDRTGRISKCGDAMLRSYLYEAANVLLTRIAKWSALKAWGMRIAKCRNLNKARVAVARKLAVILHRMWMDGTEFSWSSQGAAMQAD

SEQ ID NO: 449782 - protein, 340 aa, unidentified
MQITTVGLDLAKSVFQAHGVDEAGGTVLVKRLHRKQMLPFFSKLPPCLIGMEACGTAHHWARTLAAMGHEVRLIPPSYVKAYVKRGKSDALDAEAICEAVQRPTMRFVPVKTVAQQSILMTHRARSLLVRQRTMVANALRAHLAELGFVANPGIANLAKLAQQALSGESSLPSYARTTLDILIRQILVFADEIAALDQQLLAWHADSEASRRLSAIPGLGIVTATAVAATVTDPEQFRSGRQFAAWLGLTPQQCSTGGKTQLGGISKQGDRYLRRLLVVGATAVIRHTKDKATPMANWIRKLLEKKPFRLVSVALANKLARIAWVVLTRKEAYRAHEMIA

SEQ ID NO: 449783 - protein, 400 aa, unidentified
MLSIGIDVSKGKSTVCGMKPGGEIVYAPFEVQHTREGMSELVSLLRSSCEEVRAVLESTGSYHCPVVAALLENGIFVSVVNSLRMKRFCSQSIRKVKTDRIDAMQIALYGLAYWQELQPTKLPEDTYRELQLLARQYYQMTSLLIKAKVDFNAICDQVLPGMQELMSDHAGRHKLSDFVLRYRHTTHILEMGETRFRKDYCKWAEKKGYRNCERMAALIFATAQNGIPVLPNAPSTQIVITEAIRVLHTVEASRDAILTQMQALAKTLPEYSLVREMPCIGDTLAPRLIAEIGDVRRFHSKRALIAYAGIDAPPYQSGKFCANNRHISKRGNRYLRKTGYEVMQSYVMHKPANDPIFTFIEKKRGEGKSGKLAMVAGLNKFLRVYYGKVTELYRSLPAIE

SEQ ID NO: 449784 - protein, 366 aa, unidentified
MEAIYIGVDFHSRQQTICYLKTETGELVITELKHQDKEQVRAFYQQFPGPVIIGLEASGYSPWFETLLEGLGAEVWLGDATEIRRRARWRQKNDRRDAELIWDLMVHNEFPRLHQPLAESREVLRMLRYRQKLIKMRTMSKNSLQAIAMQAGLAKGKQLFSSTGLQELQTAPLSPVLQWQRDHWLELLKPLNQQLLAAMGWCMAQSKDEVGIQRLRTHPGLGLLTALCLWHTLQPVSRFRNQRKVVAYAGLDPLLRSSAEHTICLGISKGGSRLLRYLLVEAVHTAIRYDEDLKRFYQRLAQRRGRPKAKVATARKLLIRAYIMMRDEIDYAEFRRRAVAARLARTGQGPSNVPVVLIERPASSGA

SEQ ID NO: 449785 - protein, 451 aa, unidentified
MPKKRNKVGSLPVIEPNAAGIDVGATEIFVAVPGDRDAEPVRCFPTFTVDLERLADWLQQCQIRTVAMESTGVYWIPLFQILEKRKIDVRLVNAHHVKNVPGRKTDVQDCQWIQHLHSVGLLRGSFRPDEEICAIRSLWRHRDSLIQLATLHLQHMQKALDQMNLQIHHVISDLDGTTGLAIMDAILAGERDPRKLAQLRHPRVRASKETIMKSLVGDYREEHLFTLRQSLKAYRYYQQLIQEVDLQVKQMMQRLPSKVADGEKPPKGDKPRPRKIPWRNEPPQLRDDLYRAFGVDLTEVPGINTLTAQMLFTEIGPNLARFPTAAAFCSWLRLCPDPKISGGQVLSSRTRPTKNRAALALRMATQGLHRSDTFLGDYFRRMKARMGVPKAMTATAHKLARIVYHMITTRQEYDATIFQQQEQRRRQQRTARLHAQARMLGFHLVPVDFVP

SEQ ID NO: 449786 - protein, 461 aa, unidentified
MYVRASLAMGKLWHKRVSYDMGMEIRIEWEIRERKRKEVPISVGNGTLQGREKQAIINIMDICGPQKTPYNKKGEGKSKVHLQRGRGESLNLSAWGTDEEALLPREQHLEWAFCPARVCETAGRATLDSLPLNFTKNPGRSPMRIIAIDVSKRQLELYDASQTLTIERDEDAFRQYLRGAKKRWGEVKVLWEATGTYTSLLWKVCEAEQVEAAEVCGSKIRSMARALGLRLKNDRVDAKVIYRYAEITGEALWHSHGRAKACIVDLRTALTYYHGLEKMLSQLRGLKESLSQVGEHTTWMVERIETQMGQVKKLKKEAVGRMLKRISEDKALKEDYRRLCSIKGIGPITAIHLLVMFHAHEGANRREITALFGLDPVEHSSGEKRRKSRISKKGWWAARSALYMAAVSAVRFNRRIRAFYERLIQRGKVKKVALVAAARKLLLIAFACWKKGEFYRPALDT

SEQ ID NO: 449787 - protein, 377 aa, unidentified
MHKDGSAFVGLDTSKLKISVALAEEGRLGEIRFFGDIENTPEAVRRLVTKLAGKYHKLHFCYEAGPTGYGLYRQLTDLGQECVVIAPSLIPKRPGERVKTNRRDAVSLARLHRAGELTAIWVPDAEHEAVRDLVRAREAAMLELRQKRQHLQSFLLRHGRIYAGRRPWTKVHARWLSNLTFSHPAQYLVLREYRQSIEDTEARLERLTDQVTEVVSSWSMSPVVDAYQAMRGVAFLTAVIFVAEIGDVRRFETPRQLMAFLGLVPSERSTGEAVRRSGITKSGNPRARRVLIEGAWTYRYAARLSRPLEVRQQRLPKNVRAIAWKAQLRLCARYRRLAAAGKRQTVVTTAIAREMSAFLWAIGHEVEPLQPKQVTAR

SEQ ID NO: 449788 - protein, 315 aa, unidentified
MYHNFIGIDISKNDFVVAIHAKKKTFKYLNNLTGFDELLSDHPILKDNSFVVLETTGGYEKALLEYLIAKNIVVHRANTRVVKHFIRSTGQLGKSDNIDAIGLAKYGYERHRDLECYQPNDDKMQKLIKYILRKQDIKKQLVAEKNRYQAPDQKCTKDSHQRMIGFYKQEIMIIESYINKLVDDCQYLVKARDLLVKEVTGLGNATATSLLALMPELGNLNRKQIASLAGVAPYPYESGKKVGYRKTYGGRADLKPILFMSALTAARSNGKLGIFYRDLVEKGKKKMVALVAVMRKIIVIANAKIRDLKRDLKVL

SEQ ID NO: 449789 - protein, 319 aa, unidentified
MYQSIGVDLSKTYFDADLPGVGVKRFKNTDSGIRQFLRRLPDDARCVMESTGNYGYRLATALVKADIATAMVNPLSVKRFSQMKLRRAKTDRADARLLTEYGKIVELSPFVPSTDAQSELEQLEGVYNQLMKQRTALLNQLEALRQLPYQSKDALAALVKAIQEIEKALEGLRKKMHKRAITAYPAVLMKATSVPGIGERIAIALINVTHGFERFHTHKELVAYLGVCPRVTQSGTSVTAAGHICKAGFARVRSLLYMGALSAIKFNQPCRELYLRLTQKGKPKMVALLAVVNKLIRQVFAVVTHNVLFDQKYHRSLAF

SEQ ID NO: 449790 - protein, 354 aa, unidentified
MNRENNKIEVVLGVDTHLDVHVGAVISRSGKLLGTQSISTNTSGYLDLLSWASSFGELNEAGVEGTGTYGAGLCRLLIDNGITVYEVNRPDRAKRRLQGKSDPTDAESAARSVLSGVATAIPKQQSGACEAMRIASVARRSAVKARTQAINQLRALLVSAPQDIRDKLWKVKAIECVQACSRARSFGKTPLLETLLITLKSLAKRWQMLTVELNQLDKLLEKLTQTHAKKLRSRFGVGPNTAAILLSVAGDNPERLKSEAALASLCGVNPLPASSGKTVRHRLNRGGSRAANNALWTIAMVRMRSDPRTRVYVERRTQEGLSSKEIHRCLKRYIVRELFPIILSDLGNDTQVLT

SEQ ID NO: 449791 - protein, 341 aa, unidentified
MKEEVVYCGIDVGKSHLDIALLQQRWQVANTQAAINGLVQQLKSESLNLQVICEASGGYEQALVRALHRASVPVTLVQAKRVRQFARAAGILAKTDCIDALVLARFGQAIRPVPTPSQPLHMARLRELDRERCHLSRLLVAEQNRLEQLSSPELRRLARSLIKKVEKQILLIDQAIAQLIGQDQILRTKAKTLTSFCGVGERTAALLLAQMPELGRLNRRQVAALAGVAPFNRDSGSMHGKRCVFGGRRVVRNALYMAALSAARRNHILAPFYQRLLAAGKPPKLALTAVMRKLLIALNSALTHSRLENNTVTTRASSICRSEGHTVMSSEAETSLNIIRA

SEQ ID NO: 449792 - protein, 333 aa, unidentified
MNKKWFIGIDISKLSLDVAIHSDEGDQLENHIKVTNDIPGFKKLLEWLKGKRVDYKQSLFCMEHTGLYGLEIQFFFTKKEITYCMESPLQIKRSLGLVRGKNDKVDAQRIAWYAYTFRDRIKASHLPPEALRILQRLLTERKHYVKQIVSFRQQKSDVIKYETKQASKRKAKMLEYLDDMLSQVESQMMEIITADGTINNNYNLLLSIPGIGIINAITTIVNTQNFTAFANARQYACYIGIAPFEHTSGTSVNGRTSVSKLGNKQAKVELTQAARSAIIHDPGIKSYFQRKYNEKGATRDAYGIVLNAVKFKLLLRIFAVVKRGSKYVKLAYA

SEQ ID NO: 449793 - protein, 352 aa, unidentified
MVSAELEGAAVKVIGIDSHKATLAGCAVDELGTPVDERTLGNDRAGHVALADWARSLGVDRIGIEGSGRYGAAAARRLAAAGFDVRDVPPHLSYRERLRTRRPGKSDPTDALAIARVAAREQTLPPVRLADRSEDLGLLVTARDELVAEATQLRNRIHADLVVLLPGYGERVPNLVARRHRRGVALELATLSGVRAELTRSRLGRLEETDAATKLLERRLAALLVGHPLLALPGVRVLLAARILAETGDVRRFRSADAFAMFSGTAPIPASSGQTERMRLNRGGDRQLNRALHAMALIQGRYHDRAKAYLARKRAEGKTQREAIRCLARKLARVVFEVLRRSTLATADAFAA

SEQ ID NO: 449794 - protein, 412 aa, unidentified
MPMFVGLDWGGLRHAVCVVDGSGAVVDRFEVAHDRAGLDALLVRLHRHGTTTELPVAIERPSGLVVDRLLAAGHRLVPVHPNLLKACRPRYRAAGAKSDPGDAFMLADILRTDGHRLRPLEPQSDGILALRALVRGRDDLVAQKVALTNQLRSLLESFWPGAAAIFADLASPIALAFVQRYPTPDAAGRLGPKRLAKFLATHGYSGRRTPSELLARLRAAPDGLAGGGEADAKGELVRAFAAQLDGLVAAITRLSSRIAHEVRGLPEGSIVQSFPRAGQVCAAQITAELGPTPSLARWGPRGDVRARFPTEAQLAAEAGVAPVTKASGKSRGVVCRFACNKRLRAAVTTFADNSRHASPWAAHIYQSARKRGCSHPHAIRILARAWIRVLWRAWHDRQPYDPAKHQAALKVA

SEQ ID NO: 449795 - protein, 407 aa, unidentified
MASMTSPIPTTQAARMLFGGIDTHKNIHVAALLDSDGGLVGSASFPTTVAGYRQLLGWMHSFGTVARVGVEGTGSYGAGICRQLSSVGVEVVEVNRPDRSQRRRRGKSDVLDAAAAAEAARTGNRISIPKSRDGQVEALRMLRLTRASAVQGRTKAFQQLDQLIVTGPEQLRDQLRDLPKMGLIRCCAAWRSNSHNVADPMVAARIGLKKLARRYLALDEEITDLDKLLAPLVAELAPQLVAVRGAGTETAGQILVTIGGNPDRVHSEAAFAMLCGVAPLPASSGKTQRYRLNRGGDRQANRALHVIAITRKRCEPRTQAYLNKKIAEGHSDREAIRSLKRLIVREVYYLLRPDLTAAPVPPSRPHSPRAGAVKVEAPHARNDLDRAEHRHTIKDGGTGTLTNREAS

SEQ ID NO: 449796 - protein, 348 aa, unidentified
MGSWKNSLQRPVGKEDLVYYVGIDLHKQDLVVAVEDEQGPVGKPRRLLCESESAIIELFDKLRPFAAVIEASASYRWLYELLEPMGQVVLAHPLRLRAIVTSRAKTDKLDAAMLARLLRVGEIPMAYIPPKRYQELRELTRARARLSQAATAAKCQLHALLCRANVHAPFRVPFGKRGRRWLASLDLGVAGNLTRDELLLRLEHYEREAGKLDAGLAELATQFPEVEALTDLYGVGLYSGLLIVAELGEVQRFASDRQVGAYAGLTARVHQSGGHDYHGHITRQGSAWLRWVLVQAAMKVIRADDKLRNFYTRVRKRSSKHIARVAVARKLAGICWVRLRRWHREHAA

SEQ ID NO: 449797 - protein, 367 aa, unidentified
MFQLLTRQEESEMNATTVAVDLAKNVFELALADGNGRVIERHRLTRTQFERWFDNRKVDLVVMEACGSAHHWGRWLEARGIAVKLLPAQYVRAYVKRNKTDAADAAALLEAARAADIKPVAVKSIEQQALQGLHRLRSGWMATRTRRINTLRGFCREFGLEIRVGAVQGLAAIARLIADDRSAIPALLRTPMRLALEEIRLMEARIEHLERELAQLARQSPACEALTSVPGIGLLTSTAMVAAVRDPRSFDSGRRYASFFGLTPREYSSGQHRYLGRISKRGDRYIRMLLTHGARSVLRAATAAQRQGRKLDRLRTWALQVQERTNHNKATCALANKLARIAWAVWVKHEKFQSTPAHPSMAAEVAT

SEQ ID NO: 449798 - protein, 335 aa, unidentified
MSRYVGIDLHRRRSVVVILDPDGTKVSSRRIENSPMNLAAAVGEAGPEPEVVLEATWGWYWAADVIAETGGRVHLAHPLGVKGFENRRVKNDDKDATLLADLLRMGSLPESWIAPRSLRELRELVRYRHKLSQLRTGLKSQVHSVLGKEGVVPSLTTLWGPHGARFLDETPLGEAYEYRIDSLRDLIGRYDREVTELDTRIHLVLRDDVGYRAIQQLSGVGRVFAGVFVAEIGDISRFPNPKRLCSWVGLTPRHRESDDKVFRGSITKQGSALIRWAAVEAVARWRGGAPIRDSYLRIAERRGTNIARVAAARKLVTLVFDGMRDGEIRCLKEAA

SEQ ID NO: 449799 - protein, 342 aa, unidentified
MKIIGCDFHPSFQQIAMVDTESGEQTEKKLTPAEAVEFYRQLPGPVLVGMEACGNTLWFERLLAQFGHQLWLGDAGKIRALEVRKQKTDRRDAELLLQLLLEKRFPRIWVPSPEQRDQRQLLLHRHKLVGMRRQVKNQLQHLALNQGVQQKHKLWTAAGRKQLEELALTGWTAQRREELLSLLDDLDPRIGKLDQAVKAAAEKDRVAQRLQTHPGVGPITALAYSLTLGEVGRFQHSRQVVSYLGLNPAEHSSGGRQRLGSISKQGNPMLRSLLVEAGQSAARLVPELKRAYQRLKHRKHSSVAKVMVARKLAVRLYWMWRNQQPNSATRMQGSPSHPVAEG

SEQ ID NO: 449800 - protein, 347 aa, unidentified
MTTIQYIGLDLHKKTIQACAKRADGTLVERLKIPARRDELTRWAQRQPKPWMGIMEATLFTGWVYDTLQPHASELKVVHPAMAKAISAGKHSNDRVDSEQLADMGRCNWVPECYMMPAAERHLRRILRYRTKLLSESVRFQNILAGLLMAEGVEYRASQLSGQRRASAFLDSLSELPESTRKLLRLSRSFVNLFNQTQRQLLQELRKHPRVKERVERLQSIDGVGAIMALTWALEVGDPKRLPSVAKACSYCGLTVADRRSANHVYSGPLSKQRNRHLQRVLVEVAQLAPRFNPALKALYDKERQRHSHNEVTILVARKLVAYLLAVDKSGRRFAAIEEAKSNCTTV

SEQ ID NO: 449801 - protein, 325 aa, unidentified
MRQPQSQVKPQTQVGLDVSSQTLDAHIRVDGKAFSVPNTDAGFDQLCEILSAYSVSMILMEATGGYEDNVACYLQLQGFDVVVINPRFARRFAQSMGRLAKTDRIDAAILAQMAFMIDSGPDRERYIKPVTDEQRKQLSRLSSRRRQVVDLITIEKQRLTHADDYARESINSIISLLNVELKRIESDILRYVKKNFSELANRLLSIPGVGEQAMIVLIADLAELGHVNRRRISALLGVAPFNHDSGKFKGQRRIRDGRQAVRNVLYMGVISATRFNPVIKAFYDSLLLRGKPRKVAIIACMHKLIRIINAMMRTGKPFDMSLHGV

SEQ ID NO: 449802 - protein, 411 aa, unidentified
MENIFPCCAGLDVHRDSVEACVRRIEPNGRWHQQTHHWGTMTRDLLAMADWMAAQGVTQVAMESTGVFWKPIYNILESRFTMLLVNARHLKQVPGRKSDVRDCQWIAQLLQYGLLKGSFIPPRSQRELRDLTRHRTQLVEEKTRTANRIHKVLQDTNIKLSSVATDVLGVSGRAMLEALITGEEDPVKLAHLAQRKLRSKIPELEKALEGHLTEHHRFMLQLLWKQLAQQEELIAELDRKIEEQTRPFAAEIDRLDAVPGVDRRVAEVVLAEVGADMKPFPAHENLASWAGMCPGNEESAGKRRRRRITPGNPWLKPTLAQAAWAASHTKNSYLASQYRRLAGHRGRKRALIAVGHSILVIFYHMLKTGTSYTDLGGDFFDRLQPERLTRYYVKRLERLGHKVTLESRAAA

SEQ ID NO: 449803 - protein, 335 aa, unidentified
MRYIGLDVHYSTSTYCVLDANGQELQCETVRGHWPALLERLRTVAGPWTICFEATCGYGYLYRELSRLARRVVVAHPGQLRLIFRAKRKNDRIDARKLAKLLYLDEVPAAYVPSQEVQSWRELIEHRRHMMDRQTTCKNAIRSLLRSHGKVAPKGLWTKKGLAWLRQEEMPTAAARLKRDLLLDELTEAKRRVRTVTKALDEIGERHPAVLLLRTIPGVGIRTAETMVAYMDKAQRFLRSSQVGAYFGLVPCQDASAGVNRLGHITRQGPATARKYLVEAAWQGMYRSPTIRAYFERVRHGRPERRKIALVATAHYLLRCMHAMLVQNQPWHEAA

SEQ ID NO: 449804 - protein, 356 aa, unidentified
MSRDIKYIGMDVHKEATVVAVLNGSGKLVMESIVETKASSILQFIHGLRGELHVTWEEGTWAAWLYDLLQPQATQVLVCDPRRNALLKEGNKSDKIDAHKLADLLRTGMLRPVYHGEHGLRTLRELGRSYQTISQDLNRVMNRIKALYRGWSIPCAGTQVYAPRYREEWLQKIEHAGVRRRAELLYQQLDGLQALRRTLRPELLAESRKHKAAKLLRQIPCIGPIRAARLIALMQTPHRFRSKRQLWTYSGLGIETRDSAQYRFVRGQLQRTKKPQQIRGLNRNHNHEMKEIFKGAATRASCGVGPLRDFYVALLDKGMKAEMARLTLARKIAAIALTLWKKEERFDAEQLKLQAA

SEQ ID NO: 449805 - protein, 353 aa, unidentified
MPCLEGEVILGVDTHRDTHAAALVDLLGRLISIETFPATRRGARALTKWAQQHGTIRCAGVEGTGSYGASLARRLQLEGVEVVEVTRAARVGRRHVGKNDTRDAEAAARSVLSGQATARPKGRDGIVESIRVLRNARASAIKARVQAILHLKNLVVTAPDELRERLNDLTSRQLVERCARMHRPSQLDTHGATRAALRTLARRYQVLNAEIAELDAMLTSLTAQAAPRLLKQPGIGPEIAARMLLVAGDNPTRLRNDSALAALCGASPIEASSGKTTRHRLNRGGDRQANSALWLIANNRMIHHPQTRAYVTRRTAEGKTTKEIRRCLMRHIARGIYPLLLADLNAAQQSALT

SEQ ID NO: 449806 - protein, 427 aa, unidentified
MQVIYQYCAGLDVHKKTVVACRRNGRKQQEIKSFGTTTPELLELVDWLLEWGCSHVAMESTGDYWKPIYNLLEGSFQVLLVNAKHVKNVPGRKTDVKDAQWLADLLQHGLLRASFIPPAPQRDLRDLTRYRTKLVQERARVVNRVQKVLESANIKLSSVAKDILGVSARAMLEALVTGESDPKIMAQLARTRLRKKIPELEKALTGLVRDHHRFLLIRQLAHIDFLDEQITSMSMEIEHRIREMDQSQQKPSSDTNPDAPPPLKAQEAVELLETIPGVDKLTAELIVSELGTDMSRFRTSKHAASWAGLAPGSNESAGKHYSGRTKKGNRPLRSGLLQTAWAASRTKNTYLSAQYHRLAGRRGKKRAIVAVAHSIVVMAYHILKYHQPYQELGANYFDERKKESVAHRLTKRLEILGYKVNLEPNAA

SEQ ID NO: 449807 - protein, 355 aa, unidentified
MDSKKYIGMDVHKESISIAVMNGAGKIVMECVIETKASMILQFIDGLRGDLQVTFEEGTSAAWLYDLLKPRVTKLVVCDPRKNASMREGSQSDKIDARRLAELLRLNHLSPVYHGEHGLRSLKELVRSYLTITKDLGRVMTRVKAIYRSWAIPCTGKQVYAPRHRAEWLRKIGEPGVRRRAEFYYQQLDALRTVRQEVRRELLAEAKKHQAWKRLCQIPSIGPIRAAVLLGILQTPHRFRTKRQLWSFSGFGIETHSSADHRRVDGRLQRTKKQSSIRGLNRNCNHDLKNLFKGAAIVASSKPGPFQEFYTALLTKGIRPEMARLTLARKIATIVLIVWKRGACFDAQHLKPQTA

SEQ ID NO: 449808 - protein, 331 aa, unidentified
MADAKRFVGIDVAKMQLDVALGPNGERLAVANDERGIGALLKRLEPADLVIIEATGGLEVPVASALATAGIGVAVVNPRQVRDFARATGQLAKTDALDAQVLARFGEAIKPQVRALPDAQAQALEALVNRRRQLVEMLTAEKNRRANSPKVIHKSIDEHIRWLEKRLSGLDDELAGLVRETPIWRERDELLRSVPGVGKVLSTTLLAHLPELGALNRKQIAALAGLAPFNRDSGSLRGSRCIWGGRAQVRRVLYMAAVAAVRSNPVIKNFYAQLRARGKYPKSALTACMRKLLVILNAMLRSKISWQTPALTASTATLSPLPGAVPEHGCC

SEQ ID NO: 449809 - protein, 402 aa, unidentified
MNCVGIDVSKGKSVIAVMRPFGEVIVSPFEVRHTANELSELAGLLKSLDGETRVVMESTGNYHAPVAWLLHDAGLYVSVVNAMLVHDYGNNSLRRAKTDKKDAVKLANYGLDHWFTLPRYAPEEDTRLMLKTCYRQYQQYSKVQTILKNNLISLLDTTFPDVNRLFTSPPRNDGSEKWVDFVAAFWHCECVCGLSEKAFTAKYQKWCKKHGYNFSEDKALDIYASACGHFGVMPKTDTAKLLIEQAISQLRATSSALAALKQEMLSLAASLPEYPVVMGMFGVGPTLGPQLMAEIGDVRRFHSKKALVAFAGINTPPYQSGQMDVRSRSISKRGSASLRRTLFLAMSVILQCAPMDEPVYQFMNKKRSEGKPYRVYMMASSNKFLRIYYASVKAYLDSLEHG

SEQ ID NO: 449810 - protein, 414 aa, unidentified
MTHYKQNHIYVGLDLHKAHHTAVIVNCWNEKLGEIQIDNKPTAFDELMKFVKKQCTKGLTPVYGLEDTGGNGRALAVHLVENKQVVKEVNSALSYNERMSNATTQKSDSWDAYCIAKVLLARLDELPDANPQDVYWTIGQLVARRNSIVKHASGLKNQMHQQLSYHYPSYKKFFCDIDGKAALAFWEKYPAPHLALTVGVAELAEYLRKSSNNTCSTRKAEEILELVRQDGETKRNFQEYRDFLVVNMVHDMRRSRELIKQTEEQIRLVLAQTDYKLESMDGINIVTASELVAEIGDIHRFSNADKLARFSGIAPIHFSSGGKGKDQASGQGNRVLNSIFHNLAVQQIQVAKGKNKRQRNPLFYEFYQRKLAEGKTKKQALICVMRRLVNIIYSMMKNKTEYRAASPLTELKAG

SEQ ID NO: 449811 - protein, 462 aa, unidentified
MKRKRTYQAERVEQIDIEVLFPLVAAGCIVALDVAKQKFVVALATFAGEVIKLFRFNHPTETRRFMSVVEALRSRVEPGKLKAAMEPTGTYGDAVRHQLVRAGVPVVMVSPKRTHDSQELFDNVRSLHDPKSAVLIAKLCAMGLSTEWKPPPTTRVRLRALVDLRRHEYGREEACFGRLEAVLARHWPEYGQWMDVRKQKTALLLLAQTPSAAGVAAAPDETKAFVRRTSRGRLGPALVEGLIADSTGTMGVDMVPEEEQLVRTLAVEALAARQRGEELEDEMRKLTTDDDVFERLSRWMGVHTAAVIITSCDPRQYANARQLEKACGLNLREKSSGEHRGRLSITKRGPGAARQMLYMFALRMIESSSVVRAWYMRRRGYTEESKQRAVVAVMRKLVRALFHVAKGAEFDPCKLFDVRRLDIDVATIKDKGGREQRLTPRTTKRAAVRTRRAKAASTHAST

SEQ ID NO: 449812 - protein, 345 aa, unidentified
MNHIGIDLHKTSSQVCILTEDGELVERRIKTDRESFDSLLGTQQPAKILVEASTESEWVARHLEAFGHEVIVADPNFAPMYATRDKRIKTDKRDARALCEASRLGAYRPAHRTSDAQRDIRAHLAVRESLVRTRAKYISLISALARQEGCRIGRGTSANFAARVAQAQLPAHVLAQVEPLLVMLEALNEQITKADERLAEVVRGDEVVRRLCSVPGVGPVIATTFAATLDGASRFHGAKHVRCYLGLVPREYSSGERQRRGRISKAGNRRARALLVEAAWSLLRWKTERTRALHEWWARIAQRRGKAVAALALARKLAGILFAIWRDGTEFDVRLLRNPDAAAAP

SEQ ID NO: 449813 - protein, 350 aa, unidentified
MVVVGADVHKHSHTFVAVDEVGRKIGEKTVRAITAGHAEAVMWARERFGNEVVWAIEDCRHLSARLERDLLGFGQKVVRVPPKLMAQTRASARTRGKSDPIDALAVARGFLREPDLPVASHDEVSRELKLLVDRREVLVAQRTATINRLRWRVHELDPERAPVPASLDRAKHRQLLGAWLTTVPGLVAELARDELADITRLTEAINALAKRIGECVREIAPILLAMPGCGELTAAKLLGETAGVTRFKSEPAFARHAGVAPVPVWSGNTAGRVRMTRSGNRQLNAALHRIAVTQIRLDGLGQAYYRHRLAQGDSTPEALRCLKRRLARTVFGRLHTDHRNRTKPCQLAAA

SEQ ID NO: 449814 - protein, 323 aa, unidentified
MKQFILGIDIAKNKFDVVLLDNEKQRHRIFSNCSEGFEQLSAWLVKQQVEKVHACLEVTGTYGEALGSYLYQTGHQVSMVNPLCIQAFGQSQLTRNKTDKVDAKIIALYCQSQNPEPWSPLPTEIRELQALVRRLDDLMEMRHQEMNRIKASCHLKSVQDSLENVVEYLEQQIKTIKNLIGQHIQQHPLLLEQQELLISIPGIAETTAAKLLAEIPNLKDYKTARQAAAYAGLTPQQRVSGTSVRGKSCLSKKGNSRVRKALYMPAVVAQRHNPIIQQFRDRLRQKGKHPMAILGALMRKLLHIVYGVLKTGKPFDPDYGLIS

SEQ ID NO: 449815 - protein, 410 aa, unidentified
MNYEPITAVGIDVSKGKSTVAVRRPGGEVVLTPFQVEHDAAGLSSLVRTLRSIGGDIRVVMEHTGMYWRPVALALKEAGFFVSVVNAMLIHDFSDNSLRKVKTDKADSMKIANYALAFWSELRDYSPEDETRQMLKMQNRLYLRTKKSSVVLRNGLISLLDQTFPGVNTLFDIQPKRSNGHFKWVDFVKRFWHKDCMAGVSLAVFSDTYRKWCARSGYRFSQSDAEKLHTAARNAVATFPKNDSTKLLIAQAVDSLNAVYDALFILRGEMLRLASLLPEFDIVMAMQGAGEVTGPQLMAEIGDVRRFTHKGALVAFAGMDAPPFQSGTFDSKSRRISKRGSPHLRKTLFMVASTILQHSDPANPIFQFMDKKRAEGKHFYVYMVAGAAKFLRVYYARVKAHLEADANTAA

SEQ ID NO: 449816 - protein, 404 aa, unidentified
MEVICPRCCGLDIHKKTVVACIITPEGQETRTFRTMTRDLLVLADWLAQCEVTHVAMESTGVYWKPVYNLLEGTGLSLLVVNAQHIKAVPGRKTDVKDAEWIASLLRHGLVRASYIPDRPQRELRELVRYRRTLIQGRAQVVNRIQKLLEGANIKLSSVASDVVGVSGRAILEAMVQGMEDPQALADLAKGRLREKRTALEEALRGLMGPHQRLLLQSHLRHLDFLDAEITALDEEVATRMAPFEDALVRADSIPGIGRRTAEAILAETGVEMSRFPTAAQLSSWARVCPGNSESGGKRRSTSTGRGNPWLRCALVESAWAASRTRETYLSAQYHRLAARRGAKRAVVALAHTILVILYHLLRTGKTYQDLGSNYFDERQRQHVLHRAVHRIERLGYKVSLEAA

SEQ ID NO: 449817 - protein, 422 aa, unidentified
MFKIIRNNCCGLDVHKTWIYACIGITDSHSRTDYHEARFSSFPKDLRRLADWLHKHNCTEVCMESSGKYWIPVFNALEQTCQVTLAHPKYTKPQKGNKTDRKDARWICDLFMCGMVKPSFIPPPAIRHLRDLVRYRHKLTNMLAGEKNRAQNCLTVSGLKIDDAFSDVFGKSARSITEHILAFPGEKFDVTPFVDRRCKTPIEVIQDAVDGAISPEQAVKLRECLNHIDELTSHKNRIEVEILEITRPFSSCLDLIRTVPGFGKDPMTAVTILSEIGSDMSVFPSAKHLVSWAGCCPRNDRSAKHVKSTRIATAGTYLKPLLVQVANALIKSKDHPEFVERYRRIKSHRGHKKAMIAICKMLLTAIWNILTSGEAYNPAGYLLQTPRPTDEKKTLTQKQALELLRLRGFIITDDSSPQAVTA

SEQ ID NO: 449818 - protein, 319 aa, unidentified
MFNLGIDVAKAKLDCALRLPNGKHRNKVVENNHQGFTALHAWLLKHAVGSPRVCMEATGTYWEGVAEYLAGLGMVVSVINPAQIKAFSASRLVRTKTDKVDAQLIADFAHERQPEPWQAPSPAEQSLRALVLRLDALQAMRQQESNRLEVARAAVRQGIEDHIAWLDAEIKALILAIRRHIDDDPDLRGKRELLDSIPGLGERTIPVLLSYYANPERFDSAKQAVAFAGLDPRQHESGSSVRGKPRMSKVGHSFLRKALYMPAMVAVHKTPWGKRFGQRLRDAGKAPKLIIGAMMRKLVHVAFGVLRSGKIFDPALHAA

SEQ ID NO: 449819 - protein, 346 aa, unidentified
MMLIGCDYHPSWQQISWLDTATGETGEKKLEHASGEAEKFYRGLPGPALIGMESTGNCQWFVEMATTAGHDVWIGDAAKIRASDVRQQKHDRRDAALILKLLMEGRFPRIWTPSGEQKDLRQLLIHRYKLVRIRAQVKNELQHLAMNQGVTKKRKLWSKAGEKVLRELPLKPWASRRREDLFKVREMLNGQVDLLDQAVVEAAEKNEKARLLMTQPGVGPITSMAFVLTMGDVNRFQRGKQVASYLGLIPREYSSGGHRRYGPISKQGSRFMRMLLVEAAQNAVRYDSGFRNEYLHRCHTKAKGVAKVAAARKLAIRLYWMLRTKTGYPEVVRVESSSRVPLVSAS

SEQ ID NO: 449820 - protein, 343 aa, unidentified
MSEISMIGLDLAKNVFQVHGVDASGSVVLRRQLRRGAVEKFFAQLSPCTVGIEACGSAHHWARVIGRYGHQVRLMPPAYVKPYVKRNKNDGRDAEGICEAVGRPTMRFVPVKSVEQQATMAVHTTRALLVRQRTMIANSLRAALSEIGIVAAQGIEGLRQLMSRLEAPGEEVPEIMRGALLLLAKHWQALDTDERVLERQIAKAAHADREARRLMEVPCVGPIIASTVLAKVPDARVFRSGRDFAAWIGLTGRDRGTGGKHRPGRISKQGDRMLRALLINGASAYLRHQSARGVSDPWLRDLLARRPCKVVMVALAAKTARILWAMLVKGESYRDRASAPAAA

SEQ ID NO: 449821 - protein, 412 aa, unidentified
MEVMFERVAGLDVGKASVTVCMRTPSTRAGRRRSETRTFATMSRSLGVMRDWLVAEGVRIAAIESTSTYWKPPFYCLEEVMDVWLLNAQHMKAVPGRKTDVRDAEWIAQLLEHGLLRPSFVPPPPIRRLRLLTRYRDQLLADRTREMIRLELMLEDASIKLSAVVSSLKTVSARAILAAMIDGEDDSRVLADLAKSKLRRKIPQLTEALIGHFDDNHARLARSILHRLDLVEAALTELDEVIEQACAPWAHQIELLCTIPGVGVKVAQVFIAETGADMSRFPTAAHLAAWAGLAPAIYESAGKRTPAGARHGNKWLNHMLVESAGSVGRMHGKNYLAVQHARLTKRRGMGRAQVAVAHSILVAAYWMLTRDEPYHDLGPDWHVRRDTEAHTRRLVAQLERLGHTVALDTPAA

SEQ ID NO: 449822 - protein, 384 aa, unidentified
MQKPNDLNQSRSVLKQDSTLIAVIEMSLSSWLVAGIVPGVERQPLKKLAVDESALLKLLNRWREEAEKAGRRIERITVAFEAGRDGFWLARWLRARGIEAHVIHASSVAVSREHRRAKTDRLDTELLKRAFLGWLRAERDHCKMVAIPTTKDEDAKRPNRERQSLVGEQTRIVNRMKAALIRLGIRGFNPKLKKAAGRLEDLRTPEGEPIPPNTLAELHRDMERRRLVSDQIRQIEKARLERMEQAPGDGPHAMVRLIARVIGVGIETADMLVHEVLSRKLRDRRAVARYAGLTGAPDESGSKRREKGLAKAGNARVRVGMIQLAWRFLLFQKDSALAQWYRTRTEGGRNRKTMIVALARKLLIALWRLVTTGEVPAGVVLRAA

SEQ ID NO: 449823 - protein, 367 aa, unidentified
MKKVSTAAAKQSKNFSEQKLTIGLDLGDRSSWYCVLEEAGSIVLEQKLSTTPKALKEAFGAMPRCRIALETGMHSPWVSRLLSELGHEVIVAHARNVRLIGESRKKDDRLDAQMLARLARIDPQLLSPVKHRSAKAQADLTVIRARAGLVRARTALVNTARGLAKSYGERLRGCNVRNMNPEKAQGLSPELQAALDPLLAAIESLSERICECNERIEELAQRSYPQVALLKQIKGVGTLIALTFLLTLEDAHRFRKSRDVGCYLGLQPGRRNSGQSEPQMHISKEGDPYLRTLLVQGAQHILGPFGVDCDLRRWGLKLAERGGKSGKKRAIIATARKLAVLLHRLWVSGEAYEPLHNSKQSSLAVAA

SEQ ID NO: 449824 - protein, 430 aa, unidentified
MDEINRNRLEEFRQLRKEIRQSEEYLIVGIDVAKDRHHAFFGTATGKTLLKRFVFDNTYQGFRKLLDQTEALRVRHGLKKVVYGMEPTANYHKPLGEGLIELGRSVVLVSGVTVKRNRESLDGRWDKHDGKDSANVADLISQGKCLYYEHPSAELRGLRGLLSLKRRLKKQEHGYRVRIRNQLIAQYFPEMDRDYERLGAEGLSIVKWCLAASEIAQLDVDPFIERVTSRRIRMEKRRRLEEIWEKAAESIGCDGVPGLDHEAKVMVEGLRQIREMIKETEQKIEELCKEFPEYQPLLTMPGFGPDVSARVLGAIGDPDRFENGKQVLKLAGYDLSADRSGKSSDKAIPEISKRGKADLRYALYQAALIASLKNRDVMIYYTNKIRGREKEKGIHVKMRVKLAAKLLVIAWTLMKKKEAFNPAYLKAELS

SEQ ID NO: 449825 - protein, 386 aa, unidentified
MKTRTPPIPARDAENAAVIFVSIELSKKAWLAAIHTPLADKVGLHKLEAGDSASLLALIHRITKKVEQNMGGPMTVLSCYEAGYDGFWLHRVLAEAGIINHVIDPASLQVNRRARRAKTDRIDAMGMLRALMAFHRGEDQVFSVVQVPSIEKEDARRVHRERQRLIKERIQHVNRIKGLLATQGSYDYEPLRRHRLERFEALTTAMGRPIPHHLRVEIIRHLQRLELVLEMIRAVEAQRDAVVEAGPAANESGRKIQQLVRLRAIGPQFATVLVGEVFHKHFANRRQVASYAGLSPSPFNSGSLIREQGISKAGNPRARTTMIEMAWLWLRYQPHSALSCWFHERVGTGTGRIRRITIVALARKLLIALWRFLETGLVPDGAELKA

SEQ ID NO: 449826 - protein, 365 aa, unidentified
MVSLTETAHRLTLTGPFPFFKGAIMADAKLIGIDLGKYSFFVHAQDARGQQLWRRKFTRHQLIMMLAQHPPCTVAMEACAGAHWLARKLQSFGHQPRLITPQFVKPFVKGNKTDFGDAQAICETASRPSMRFVAIKTPEQQTLLALHRVREALVSERTATSNQIHAFLLEFGISLPTGARAIARLPALLDEPAHELPPRLIATLLRLHRRYGQLGNEIAEIETDLKAQLAEDEAAQRLLTIPGIGPITASSLIAVIGDAHAFRHARDFAASLGLVPRQHSTGGRATLLGISKRGNAQLRSLLVQGARAVMRYIERRHDALGTWVQSLLRRRHSNVVACALANKMARIVWAILARGGEYRAQPSPA

SEQ ID NO: 449827 - protein, 418 aa, unidentified
MEIVYERVAGIDVGKKIIAVAVRTPGECPGKRRQQVRKYNTFHQTLTEMVAWLVAEGVSHVTMEATGIYWKPIFHALCAAERPLEVLLVNARHVKNVPGRKSDALDAVWLAELTECGLLRGSFIPPREIAAIRELTRYRKKLIEQRTSELQRLAKVLEDSGIKIDSVASALTTLSARDMIEALIAGERDPAVLANLARGRMRSKIPDLRSACAGRFGVQHALMCTLHLEHIDHLTDMIVRLDTRIDEASLPFVQQTDLLATVPGISERAAQVIISEIGVEMSRFPTAAHLASWAGLCPGNNESAGKHRSGRTHKGNTELCTVLTECAWAAGRTSTYVGAQFRRFHRRFGKKGGQKAATATAHTLIVIIWHVLAETTGYRDLGSDYFTRRTDSPEARKRRLIRELEALGHKITIEPAAA

SEQ ID NO: 449828 - protein, 414 aa, unidentified
MGTRGRVIAGIDTHKDSHVLCLLDGLGRKILSDSFPANETGYQRLADTIGNPENCIVVGMEGTASFGAGLNAYLAAMDYKVVEVLRPKRDKRIKGKGKSDAIDAEIAARNAASGYGTSVPKSHNNWVEGIRVLMVARNLNVQTATKITNTVKSLIITAPEDMRAKYGKLNAKALMSRLSRSHSRAEDTASDCLMSALQTLARTWLELEKRSCELLERIESILGKNAPALLELPGCGAVNAADLIIAAGGNPERLHSESAFASFCGVSPIEASSGQVTRHRLNRGGNRAANRALHMIVVSRMRSDPRTAAYIERRTSEGKAKREIMRCLKRYVAREVYSALLHPQDTKYPKGAELACARILLGISQKEIAGRLGVSNARISEIERGKRLHSELRQRYQQFLSECRFSKELGVDTI

SEQ ID NO: 449829 - protein, 408 aa, unidentified
MPVVYPVCCGIEVHQAQLTACLRRVSPEGQITTERRDFRTTYAELLALRDGLMASHCPVVAMESTGVSWRPVYHVLAGTVEVLVGHAREMRPRPGKKPDPADATWIAELLAHGLIRPSFVPPPMISAWRDLTRTRGALVQTRTQAKNRVHKVLEDTKVKLSSVVSDLFGVSGRRMLAAFIAGERDANPLAALALGKLRRKLPQLELALAGQCTAHHARLIQGALDLIDLLDRQIAELDQQIGALVHPLRPQITQLDRIPGVDETAARDIVAEIGTDRSRCGAASRLASWASLCPGNNESAGKRRHGRTRKGNRYVRRVLVQCAWAARKPPTFLGRTFRRLEARLGGKKAAIAVAHKIVVLAYHRLAEGTVYDEQRYAHVQPRQEEQWRRRAVKALERLGYQVVLEKVA

SEQ ID NO: 449830 - protein, 426 aa, unidentified
MKEHIDYLSTLFVGIDIASRIHVISALDFNQDFYIKMKPFENTKDGAGIVEKLIADVLADNHQFKYVVIGMESTGFYGVHLANYLSTSELLAPFSVRVYCLNPKEVKNYKKSFNDIGKNDGIDSFVIADFARVGRIAIKPWRGSQYLALQRLTRHRMHITECITREKTYMLNNIYLKFSQYALLRNGEHPFSNKYGATAEAILTEFTTNEDIVNSSIEELVEFINSKSKERIADPEETAKIVQAAARNSYRLDKCLYEPLTISIASSFNCISSFEKELKAIDKAILQTVQGLNPEEYTVLNSIPGIGKVYSAGILAEIGSIKAFQNANQLAKYCGIVWNDNDSGDFESEDSRMSKAGNRYLRYYIIEATGSVINHCPEYKAFYQKKYAETRNHQHKRALALTSRKFIRLLFGLLDKGQLYSPEKSR

SEQ ID NO: 449831 - protein, 441 aa, unidentified
MYMKKRRDRVCGADVHKDLIVATITGDDVLPIQENFGTTKAELKRFRNWLVANKCEQVAFEATGVYWIPIYDALSQTIDTIVANPLQIKTIPNDKSDSKDSKRIATLCLNGQIKRSRVFTEEDRDLRMMTRARSGYVKTRTQFRNRVHKYLSSSGVKLSSCMDDIFCKSGRYILNGLAEEKPIEEILKGIPSGKIRKKRDLIKAALDGDLDATSRMLLRDNLDLLDYLEAKIEATSHEILKKINRRSKDLAIVMSIPGIGFISGAVILAEIGDYHDFKTPEQLAKWCGLNPGENESAGKKKKCGITKRGSKHIRLVLVQAAQTIANMGKTRLSRFFQRLIKKKERNVAIIAVARKLICLIYHLLINQELYQEDECRTRRPSKDKSCQAPSFQEEHLTDKVAAIVDAFYHLNAHGRKNALMREIGDISEIKVGQKRSSKGGG

SEQ ID NO: 449832 - protein, 368 aa, unidentified
MSKSITFVGLDVHKNSIAVALADAGRNAEVRNYGIIGGSLDDLDRLVKKLVSTDRELHFVYEAGPCGYDVFRSLTAKGLDCAVCSPAHVPKSPADRIKTDPRDAMMLARLHRAGELTYVFVPRSDDEAMRDLTRCREDAKKAQRVTQQQLGGMLLRLGFRYPKDNWTKAHFNWLANQKMPTDSQQVVFQEYIHAIKETTDRVGRLTKQIATLVPAWRMAPVVMALQSLRGVSIIVATTMIAELGDLTRFETPKKLMAFLGLVPSEHSSGEKKQRGKITKTGNGHARRVLVEGAQTYSHPARITRPLLKRQEGQSQDVRDIAWKCQVRLCARFRRLVAKGKSRNAVVTAIARELAAYMWAIANKTPIAA

SEQ ID NO: 449833 - protein, 388 aa, unidentified
MTIQAQVSFQSQVFTPRDYEIFAGLDVDKHSIAVTFCNHEGLLRSLRLPYSAPQLLNYVRRHFPEQRLAFVYEAGPTGFGLYDELVAEGHPCMVVAPSMVPTAPGQRVKTNRLDSQKLSEGLRGGQLRSIHVPASKYRELRHLVQLRDTQVQQLTATKCRIKALLLYEGIQFPDKGDHWSARVLDELLALPSSESVRFKLDQLIGTLHFHFNSAAAAQKQIRYHCQNDAELRQLINLLTTIPGIGVIVATHLVARLGDPTLITNVRQIAGFLGLVSSEHSTGDKQNRGEITRAGDSRLRNKLIQSAWVTIRKDPELREFYQRVYQRHPKKVAARKAIVAVARKLTTRIYAILKEQRPFVLREVSPAPLTVEETAGPRERLDGQQNEQP

SEQ ID NO: 449834 - protein, 323 aa, unidentified
MPVYLGIDIASKKFDVAELCDGKYRCKAFENSSAGFLALYKWLGQSTMPDIHACLEATGDYGTSLATFLYENKIKVSVVNPARIKGFGASELSRTKTDKADSKLIARFCKAAVPDGWKPTPAPVRKLQVLVRRISALNGMLRMECNRRENADAHIQASIDRIISLLKTEIEVVRQEIKDHVSSDEELKKQDALIQSVPGIGAVSSNLILSFMSGKGFRKAKEVTAYLGLNPRHHQPGSSVRGKTRMSKMGDARLRSALYMPALVALRYNPDIKAFGQRLLLAGKPRMLVVGAVMRKLIHIVFGVLKSGTAFSSRIAAHSVVTS

SEQ ID NO: 449835 - protein, 326 aa, unidentified
MDVLGIDLAKLTFDVTLLTSAGCSHHHQFPNTATGFTQLQHWLGKLGVSQLHACMEATNVYWEALAQFLYDQGYTVSVVNPARIKGYAISQMQRNKTDKQDSATIAAFCATHTLQAWTPPTAAQRKLRALVRHRDDLIATRIQQTNRLQDTTDPDVRASLEAVLVTIKAQLKTTQRQITAHLKANAELRDVHCLIDSVPGIGAVTAQKLLAEFYDLAAYPSAKAAGADAGLTPANYESGSSVRKRPDLSKMGKASIRAALYWPAISVMTHSMEFKQFAQRLAARGKSYGVILGAVMRKLIHIIYGVVKHKTAYDPAKVLGPAAPLT

SEQ ID NO: 449836 - protein, 331 aa, unidentified
MNTNTKSILGIDISKDKFDASLRVGTRTCRQVFPNHAAGFRALQRWLEQAGVGQVHAALESTGRYGLALARFLHAQGWTVSILNPLALHHYARSRLQRNKHDRLDADLIVEYVAKESPPAWAPPKAAQSQLQELSRLLESRKRQLVQERNRLESLPQSRAARAAMSRFARVLEKEINKLQTQLLSTLQLDPQLLSDWKLLLSIPGIGELTAAIILAELPAYLPTARAAAAYAGLTPTRYQSGRCDSAEGLSPIGNRTLRRALYFPAVAAVRFNGPIAAKAQRLRAKDKPEMCIVGAAMHQLLRQAWGVLKHKKPFDPCWRSAALASESAMA

SEQ ID NO: 449837 - protein, 433 aa, unidentified
MQDVQDEPLFAERVAGLDIAKAEVEVTIRVPSDTTAGRRQQETRTFGATRRELESLGDWLACWGVTKLGMEATGDYWKPVFFLLESRGFDCQLYNAAQVKALPGRPKTDRADSIWLARITERGTVRSSFVPPEPIRRLRTHTRYRRHLTQARTAEKQRVEKLLEDGHLKLSSVISDIHGVSGRDMLDAIAAGERDPKALARLARGTMRGKIRRLEEALDCSFFTGEHAAVLAMMLVTIDHYTAQIQTLTARIEVLAEPYRHQIAQLDEIDGVGQVCAQDIIAETGADMTVFPTAAHLVSWAKWSPQVRQSAGKRKGSNATGRGNPYLGAALGEVSISAGRTQSFLGARYRRLARRMPKKKALVATGNSALTIIHALLSDPAARYTDLGADYYEQRMHTRRQARNHLKSLERLGYKVTIQAVNPDTGELQAATA

SEQ ID NO: 449838 - protein, 345 aa, unidentified
MAEAYDGRQVVGMDLHRRRSVLVRMTMDGRKLETVRITNSPQALRAEIAKAGEHPLVVLEATYGWYWAADVLAAAGAEVRLAHPLGVKAFSYRRVKNDERDAADLADLLRMGRLPEAWIAPAETRALREVVRYRHKLVQQRTSCKDQVHAVLAKCGVAVRHSDIFGRWGSAWLDGLVLPQPYAAKVASLRALAGVLDGEIARLGQQAAGMLAGDPGYAAIRQLPGIGPVLGAVIVAEIGDVSRFRKPGQLCSWAGLTPRHHESDTRVIRGHVSKQGSRILRWALVEAIQHQPAGTRPRDVKDAIIARRGKEARDIAKTAAARQLLTLVFYGLRDGHIRRAISQAA

SEQ ID NO: 449839 - protein, 312 aa, unidentified
MNNCNVGIDISKYTLDFAVSSENQVTTYPYDNEAIKKIIQRCRRLHPERIVIEYTGKLEYELFVALAGAKLPVAVVNPKCVRDFAKSCGILAKTDRVDAQILARFGERMTPEITPLPTESQRLIKELTVRRNQLIEMRQAEKNRLQPMHPSLQPSIKRHIQQLDGEIEECEQKRNNEIDHNDQWRLLKEQLEQVPGVGENTANALLAERPELGERTHKHIVSLVGLAPIPNDSGKRRGYRAIRGGRTAIRKALYMAALVAAKHNPKLKEFYQRLINAGKKPKVALVAVMRKLLIILNAIARDFKEQKVLKIA

SEQ ID NO: 449840 - protein, 386 aa, unidentified
MSEFDDLSRSQTTLEQDCTLIAVIEMSLSSWLIAGIVPGVERQPLKKLGPDADALLKLLHRWRGEAVHTGRSIKRIVVAYEAGRDGFWLARWLRSHGIDAYVIHASSVAVSREHRRAKTDRLDTELLMRAFLGWLRGERRHCSMAVIPTLEQEDAKRPNRERENLVGERTRIINRVKACLVRFGIRNFKPTLRKASERLNSLRTPENVPLPPNTLAELRRDIARLRFVIDQVKDIEVARQEKLQQAPEEGPHAMVLLLARVIGVGIETADMLVNEILSRNFRDRRAIARYAGLTGSPDESGKKRREKGLARAGNARVRRGMIQLAWRFLMFQGDSALAKWYRAATQQVRGAIRKTMIVALARKLLIALWRMVTTGEIPEGVALRAA

SEQ ID NO: 449841 - protein, 390 aa, unidentified
MYIVGIDIGKRNHEASIMNAAGKQYGKPIRFANSHTGFNKLMDWVKNISGADDVVFGMEATGHYWLALYTHLCHEGYAVHVINAVQSDALRGMYIRQAKNDSRDSFIIAEVIRFGRFCETAVSAPELHALRELCRHRFWIVDSVSDLKRKVIALLDQVFPEYENLFTNTFGNTSLQLLSEYTTPEELLAVDTDKLAETIYTASRGHHGIEKAQEIQNTARNSFGILLASDSIALLIRQYIEQIRFVEKQVDRIDTEIARLLSAFDNQLTTITGIGPTLAATILSEIGDIRKFASPGKLAAFAGIDPTMKQSGNFVGSHVHMSKRGSPYLRRAIWLAATIAAFKDPSISVYYQRKRSEGKSHLTALGHVSRKMVNIIFAVLRDNTPYSPAI

SEQ ID NO: 449842 - protein, 356 aa, unidentified
MSHEVKYIGMDVHKEAIVIAVLDEGGKQVMESIIETKASSILQFVHGLRGELHVTWEEGTWAAWLYDLLQPQVQHIVVCNPRRNALLKEGSKSDKVDAHKLADLLRTGMLRPVYHGENGLRTLRELGRSYQTISKDLTRVMNRLKALYRGWGIPCAGTQVYAARSREEWLSKIPQAGVRRRAELLYQQLEGLQALRRDLRPEFLAESRKHKAAKLLRQIPCIGPIRAARLIALMQTPHRFRSKRQLWTYSGLGIETHDSAQFRFVRGQLQHSKKPQQLRGLNRNHNHEMKEIFKSAATRASCGKGPFYDFYAGLLAKGMKPEMARLTLARKIAAITLTLWKKEERFDAEQLKTQAA

SEQ ID NO: 449843 - protein, 464 aa, unidentified
MTRKRTGTKKRSAQSKLDLKTVEIVHADAAGIDVGGSEHWVAISPDRDAEPVRRFGSFTADLRDMARWLVEKGVKSVAMQSTGVYWMPVFEVLEQHGLEVFLVNARHTKNVPGRKSDVQECQWLLKLHAFGLLNNSFQPTDEIRIARTLWRQRGNLVADASGTIQRMQKALIEMNVQLSSVLSDLSGVSGMSIIGAILKGERDPWKLAALVQPEVKAAPQAIAKSLEGNWRKELLFVLRQEVELYRTYQEKIHDCDLQLREHLKSFGSVVNLAAQPIGPKPKGKSGSKNAPQFDLRTELYRITGIDWSQVNGIDVLTAQTVIAECGANLSAFPSEKQFTSWLGLVPTNEQSGGKILNRRTRKVVNRAATAFRNAATTLLRSQSYLGAQYRRLRTRLGAPKAITAAARKLACLFYRLIKNGQQYVDKGTEYYETKYREQQVRILAKKAQRLGFQLVTPTPLEPAL

SEQ ID NO: 449844 - protein, 397 aa, unidentified
MRFYTQEHRFYAGVDLHTRTLHLCILDHTGAVVYDRNLPCRPDAFLQAVAPFRDGLVVGAECMFAWYWLADLCAQEGIAFVLGHALYMKAIHGGKAKNDKIDAGKIARLLRGGTFPLAYAYPKGMRETRDLLRRRTYLVRKRAELLTHLQILNSQYNLAPFSKKLSYAANRAEMDIAERFTDPSVRKSAAVDLALVDRLDELIAEVESYLTRTAQVDDVQTYHRLRTIPGVGKVLALVLLYELHDVHRFDTAGQFLSYARLVRCAHESAGKRLGSGGHKIGNAHLRWAFAEAACLFLRGSERARHWKQKQEKKHGSAKVLGILAARLARAVYHMLRKEEAFDEERFWSGHSTPSPTPTRPTRQAAAKGQAQQGAAPTDSTKPAAARGSRQRERATVR

SEQ ID NO: 449845 - protein, 408 aa, unidentified
MDIIHAQCAGLDVHKQTVVACVRVAATGRARHEVRTFATTATGLRALQEWLVAAGCTHAVLESTGVYWKPVWHRLEDSLTLVLANATAVRNLPGRKSDVSDAQWLADLLAHGLVRGSFVPPAPIQALRELTRTRKQLGREITAHSQRIEKVLESADVKLATVLHPLLGVSGRAIVAALAAGETDPDRLVALAHPRLRAKRDALRAALPGHVRPHHRVLLRQHLRVLETLEATIAELDAAIGAALVPCRATVAHLVTIPGVSTTAAQILVAEIGTDMTRFPSVGHLISWAGLCPRQDASAGKHRSTRLRKGAPWLKPVLIQGAWAAVRGREGYLRAQFLRLKHRRGPMKAIVAVAASMLTAAYYMLRDDQDYHDLGAAHFQRGDHDRLVAGLTRRLHHLGYEVTLRPAA

SEQ ID NO: 449846 - protein, 342 aa, unidentified
MDTHGEVHVAAVVSPLGKILGTEPFPATAAGYRRLLVWARKRGTVCRAGVEGTGTFGAGLSRYLLAQQVEVYEVNRPDRSARRLLGKSDPLDAQAAARAVLSGRARARAKTSDGRVHSARIYKLAKDSAVKARTQAINQLKAVLVIADPALRERLSSLGNAELFRTCARLGPHDGGGDEDTVTQATHLTLRLLAERIERLTAQIDELNQRLTRLVERYAPQLLETVGIGPDGAVTLLITMGDNAERMNTEASFAALRGVSPIEYSSGRRSTRRLNYGGDRQANAALHRIVFTRPRHDPRTQAYYERRTQEGKARREIIRCLKRYAAREVFELVRTVSADPPL

SEQ ID NO: 449847 - protein, 419 aa, unidentified
MQEKPGVFAGIDWASVEHQVCLMGGGPPVQRTFAHDALGIGALVDWLVGQADHPQDIAVAIETPHGPVVEALMDRGIAVFAINPKQLDRFRDRFSPAGAKDDRRDALVLASALRTDRHCFRRLVPLDPLVVELREWSRMAEELKEERTRLANRIRQQLWRYYPQALEITDDAAADWFLDLWALAPTPADVARLTEKKIARVLTTRRIRRIAAADALALLQQPALTVAPGTTTAAKAHIATAAERARLVNRQLKEVIRRLDALVDQLAGPDVPETDPGQPSEQRDAAILRSLPGVGRIVAATLLAEAHQALQSRDYRALRTLTGVAPVTKRSGKSRRVEMRQACSQRLRTAVYHWARVATQHDPRSRARYATLRARGCSHGRALRGVADRLLAVACAMLKTKTTFDPLRAGAVAAAPESP

SEQ ID NO: 449848 - protein, 343 aa, unidentified
MHVSTIGVDLAKNVFQVHGVDSAGKVVITRQLRRKQVLGFFSKLPGCLVGMEACGTGHHWAREISKLGHTVRLMPPSYVKGYVKRSKSDAADAAAICEAVTRPSMRFVPIKSTDQQALLMLHRTRDLLIRQRTQLINALRAHLAEFGLVAEKGREGLAELSAIIADEMNREALPSAMKQALQTIVDQLAALELQIGTLDRVIHAHHRANEMSCRLETVPGIGVIGATALASTVTDPSGFKTGRDFAAWIGLVPRQHSTGGKERLGGISKQGDRYLRRLLVIGATAVVRQARKHPQKHPWIMKLLAKKPAKLVAVAVANKMARIAWAIMARGGYYRAPALAAAA

SEQ ID NO: 449849 - protein, 348 aa, unidentified
MSAYAEAQFVGMDLHRRRSVLVRTTDTGEELEQVRISNDVESLTRVIERAGESPEVVLEATYGWYWAADALAAAGARVHLAHPLGVKAFEYRRVKNDVRDAADLADLLRMGRLPEAWIAPPATRELRELVRHRAKLVAVRSGWKAQIHAVLAKCGIQVTLADLFGVQGNQVLDRLTKNGSLPKPFAARVASQRRLLEALDFEIDLFTNLTQGRLARDPGFTAVQQIPGIGPILGAVFVAEVGDVTRFGTAAQLACWAGLTPKHHESDTTVRRGRITKQGSQLVRWAAVESVQRVPDTTKVGRLRDRVAERRGRNIGVVAAARLQTEYVYYALRDHHVRALHPPAAAAA

SEQ ID NO: 449850 - protein, 342 aa, unidentified
MQITTIGIDIAKNVFQVHGIDAKEKVVARKQLRRSRVITFFKALPPCLIGMEACATAHYWARELTKLGHEVRLMPAKDVKAYVKRNKNDAADAEAICEAVRRPTMRFVRIKSAEQQGQLMQHRTRDVLIRQRTQIINALRAHLAELGIVAAQGNAGVNELRAIVTDEQDTRLPIDARASVIVLAAQLEALESVIGAIEKRIKMQHRSNEASQRVETIPGIGVIGATAIVATVADPTIFRSGRDFAAWIGLVPRQDSTGGKQKLGPISKQGDRYLRRILIVGAISVLRRAQENPGKYPWLTQLLARRPFKVVAVALANKMARMAWALLAHGGTYRAPELAETA

SEQ ID NO: 449851 - protein, 417 aa, unidentified
MNKNSKSPLQKEQRAKRVKVRRPVQRETKEVLAELVEKLRGKLELKATSASQGEAHPRGELSPNLERLTVGVDLGDQSSHYCILGLQGETLSEGQLPTRQAEIAEFFQALTPARVVIEVGTHSPWIQEVIAGEGHEVLVANPRLMEGSKRRKRKNDRIDAHKLARLGRVDPESLHPITHRSREVRQDLVLLRARDAVVAARTELINATRGLVKSMGTRLPKCSSPSFGQKVKDVIPEEVREALLPLVQLADALSACIKSYDQKIAELGSEKYGQTKLLRQVKGVGPITALAYVLTLENPERFPKSRDVGPYLGLVPKQEDSGESQPQLGISKTGDTMLRKLLVGSAQYILGPFGPDTDLRRYGLRLCERGGKNAKKRAAVAVARKLAVLLHRLWVSGEVYEPLGYASSRAIVQTAAA

SEQ ID NO: 449852 - protein, 446 aa, unidentified
MKTSRCPGRSTAQVPAATPVAGCTPPQGVHAAFVGIDWGSQKHAFSLRRSGASLGEVRKGTFTMKQIPDWVCELRQQFAPGRVIVAMENHRGALLYALAQHADFMDLVLVPTRSAAQYRQAFCSSGAKADGPDADSLLDMLYHHQEKLSIWQPDDEDTRLLAALCQMRRDAVDERTRLGNHLAARLRLAYPVALEICSSITSNLGLELLHRWPTMAQLQAARPQTLRQFFHLHHIHQPQLVEQRLQLIAQTQALVCAPSVLIPAHLDIKRMAAELRAVLSAVDDYDKRIAVLYAKHPDAGIFKSLPGAGPAMGPRLLCALGSQRERWPSALELQTFSGLSPVRIASGNTSCIQMRRACPRYFRQTFHEFASSSIRYCHWAKAYYEKQRARGKQHHTALRSLAWRWVRVIWRMWQDHTPYQESVLMAERQRYQGVAHPATPTDCPTE

SEQ ID NO: 449853 - protein, 367 aa, unidentified
MLNSTSPEMNTLMTSTKYIGMDVHKESVSIAVRNDAGKIVMECVIETKASMILQFFDGLRGDVHVTFEEGTWAAWLYDLLKPHVTKVLVCDPRRNALLQEGNQNDRVDARKLAELLHNNQLRSVYHGDHGLRTLKELVRSYLTITQDLSRVMTRVKAIYRSWAIPCTGKQVYGPNHRAEWLAKINEPGVHRRAEFYYQQLDALRCLRQQVRRDLLAESKKHPTWKQLCGIPSIGPIRAAELLGILQTPHRFRTKRQLWTYGGVGIETSSSADHHVVKGQLERKKKPVEIRGLNSNYNHDLKNIFKGAAIVAATKPGPFAEFYAELLAKGMRPEMARLTLARKIATIVLIVWKRGVSFDARHLKPQTA

SEQ ID NO: 449854 - protein, 343 aa, unidentified
MTISVLGIDIAKNSFQLHGTDEAGKAVLKKRLSRKQLAAYVANLSQCSIVMESCGGANYWARVFQRSGHTVKLISPQFVKPFVKTNKNDANDAQAIVEAASRPSMHFVPIKQVEQQDVQSIHRVRSRIVKNRTALINEIRGLNSEYGIAVAPGAARVKRSLCAIIADRTNELTPLSRGCMLDLYDELIEVEARLKKLDKTIRQLCQQNETCRRILKIPGVGELTATAMVAAVPDAKEFNNGRHMSAWLGLVPRQSSSGDKQILLGISKRGDRYLRTLLIHGARAALSHYKNTDNAYGHWLTGKKATLSFNKAAVALANKNARIIWSLLNTGEEFNCNVQMVAT

SEQ ID NO: 449855 - protein, 377 aa, unidentified
MSDVTASIAPTDVRLWVSLDVHKFSIVAATLPPAGGKPEVSRIETTEKAIRRFIDRLGGPGGLAVCYEAGPGGFALWRLLSGIGVACDVVAPSLIPVRAGDRVKTDRRDAKKLVELQRAGLLRYVMAPSTETEGLRDLLRCRDDLRCARTAARHRVLKALLRHGRIFRDGKTTFTLKHRRWINAQRLDDPLAQLALEQMLTHLDSIERQLNALDSQLEQIAASERWQRQTQTLTRFRGISTLTALGLIAEIGDFARFSHPRELASWLGITPSEYSSGDQQHRGHITKAGNRHARRLLVEVAWHYRHAPRRPTTGPQPDERAWQAQIRLHHRYRHLTENGKRPTVVNIAIARELTGFLWAAMTDQPLTIHNQPQENAA

SEQ ID NO: 449856 - protein, 437 aa, unidentified
MSQELPMLDPLAAFVDVGSEHMHVSVGGNTPEVFGTVTSQLHALRDWLLAQGVRSVAMEATGVYWLPLYGVLESAGLEVRMVNGRQTRNLPGRKTDMADSQWGATLHMHGLLHAGFVPPADIRRLQDYLRLRADHVAAAATCVQLMQKAFERMNIKLHDVISSLAGVSGLAVARAIVAGERSPEALVALCDVQIRRKKEQAVIEALRGTWADEHIFALAQALQSWDHYQKLIADCDARIATVLPPHDDTQPPLPRSTRRTGVNAPEIARLREILAQMCGGRDLTKLPALSSYGVLQLIGEVGTDLSAWPTEKHFTAWAGLAPATHDSGKRKKGVKRGRNRTGRLFCMMAQSLIRSRDIALGGFYRRLAARRGGLVATKALARKLAAWFWRVMVKGDDYVEKGLARYEEQVRKTREHALRRLARELGRELVPLPGVSD

SEQ ID NO: 449857 - protein, 313 aa, unidentified
MPTVAGIDVSKAFLDVALFPSRERWRTANTPEAAAQLVQELQRRGVAYAVVEASGGYEATFILAAHAHDLRVARANPRRVRHFAHAIGRLAKTDAIDALVLAQYGATQELVFLPKPDPARERLRALLLRRVELQKLLQAERNRAQQAPAWLAESFQRVVATLEAELAWVKGEVERLLAESAHLRERAALLETVPGVGPVVARTLVALLPELGELTAKQAAALVGVAPFNRESGSQRWRQVTYGGRSEVRRVLYLAVRVAIRHNPVVRAFWLRLEERGKPGKVAMVACIRKLVGMLNAMMRKGRPWSPPLPAAA

SEQ ID NO: 449858 - protein, 341 aa, unidentified
MSESALIGIDLGKHTFHLHGQNKLGREVFRKKCSRAQMMQFFGNSPSCVVVMEACAGSHYIARQLAAMGHTAKLISPQFVKPFVKGNKNDFVDAEAICEAASRPSMRFVTPKTESQQTLSVLHRMRESLVHDRTKTANQMHGFLLEFGISLPKGLAIMKRLANVLTEHELPVRLTVLLQRLHDHFAYLDEQIKVLDKELAGQLADDDLGSRLLSLPCVGPITASLLAVEMGDGKQYRCSRDFAASVGLVPRQYSTGGKANLLGISKRGDKHLRQLLVQCSRVYMQNLEHQKGALADWVRSLLSRRHSNVVACALANKLARIAWAIAAHHTQYEAGPDALNA

SEQ ID NO: 449859 - protein, 408 aa, unidentified
MKTLHKRCAGLDVHKVEVVACLRLISKRKVEREVRRFPTTTQGLLALAEWLESAGCTHVAMEATGVYWKPVWHILEGRFALILANAAHVKNVPGRKSDVNDATWLADLLAHGLIRSSFVPPPAIQELRDLTRTRKQLTREIVQHVQRIQAVLEEANIKLCSVITDIMGASGRRMLKALIAGETDAEKLAALGHERLGCTRAELVQVLTGRVREHHRFLLGQHLWMIEQLEDSVAAFDARIEAALSPFHDLVERLNEVPGLGATAVETVIAEIGVDMSQFPSAGHLLSWAGFVPGLDESAGKRRSTRIKKGAPWLKPVLLQSAWGAARKKNSYLQAQFLRLKTRRGAKKAAIAVAASILTIVYHMLRDGTYYQDLGPEYFARRNPAKTAARLANRIRNLGYQVEIRAAA

SEQ ID NO: 449860 - protein, 412 aa, unidentified
MDVYCGIDWAEDHHDIALADRDGNLLARRRISDDAAGLAMLLALLAEHGDTPDDPIPVAIETPRGLLVACLRATGRQVYPINPMPVARYRDRHSAAGRKSDHGDSFVLASVLRTDMHAHRPLPAGSELAQAVAVLARAQQDAVWDRTTAHNKLRSHLREYYPGFLAAFADARGGILRPEARAILAAAPTPADAATLTLTQLRALLKKAGRSRGIDTEATRLREAFRAPQMRQLPLVEAAMGRQALALLGKLNAACAAASDLEHAAAESFNLHPDAGIITSFPGLGPLTGARVLAEIGDDRSRFQDAKGLKAYAGAAPITRASGKTKSVTRRRIKNNRLNAAGYTWAFSALTASPGARAHYDRRRDDGDRHAAAQRNLFGRLLGCLHRCLTTGQHYDENIAFPASTKQSRRAA

SEQ ID NO: 449861 - protein, 314 aa, unidentified
MAETAGIFVGIDISKTWLDIAVHEADVTWRVGNDDKGIADLVKRLKHMKTTLIVLEATGGYEMQLVAQMAQAKLPVVVTNPRKVRAFARSTGKLAKTDKLDAKLLAHFAAAIKPAVRTLPSEEEEQLTGLLVRRRQLVDMLTVEKNRLHTVRPALRDDIREHIDWLQEKLSKMDEEIDHFVRKTSLWKEKDTILRSVPGVGRVTSSTLIAMLPELGTINRQEIAALVGVAPVNKDSGRKQGKRRVYGGRATVRSVLYMAALSAKRCNPRIKKFYDDLIRHGKEKKVALTACMRKLIVILNAMLKTNQPWRIESV

SEQ ID NO: 449862 - protein, 342 aa, unidentified
MEITTVGIDLAKSIFQVHAVDAAGHVVVRKALRRAQVVPFFAKLPRCLIGMEACGTAHHWARELIKLGHDVRLMPPAYVKPYVKRGKTDANDAAAICEAVTRPSMRFVPVKATEQQAALALHRTRDLLVKQRTQLVNMIRGLLAEFGIEMARGLRHALELAARLSAGDAAEVPPLAQRVVTGLADQIGALQIQLTRLEKELLTWHRDSDLSQRLATIPGVGIVSATALAASVSEPERFRSGRQFAASLGLTPLQNCSGGKERLGRISRMGDRYLRRLLVVGMTSLIRRAKTTPTSVDPRLPALLQRKPVRVVTVAAANRTARVAWAIMTRGGTYRAPAARAA

SEQ ID NO: 449863 - protein, 342 aa, unidentified
MGEISIIGLDLAKQVFQVHGARVDGSVVLRKKLTRGQLLVFFSKLPPCIVAMEACATAHYWAREIGEFGHEIRLVPPAYVKPFVKRQKNDVADAEAIAEAATRPTMRFVEPKTPEQQARAMVFRTRELFVRQRTQTINALRAHLAEHGLIAPKGLWNLSSIRQLIDQAEDTVDGLLVETARIYLEQIETFSTRILSLEAVLKKEAARSDASSRMMTMPGLGPITAMAIEAFAPTLTVFRRSRDFAAWLGLVPRQHSSGGKQILGRTSKMGQRDIRRLLIIGAMSIIRWASKKAPVPGTWLHAMLLRKPRMIVAIALANKMARSLWAMQTKKEDYRDPLLTVA

SEQ ID NO: 449864 - protein, 463 aa, unidentified
MDDAEQILERVAAIDVAKASGKVCVRVPHDTHEGRRVTRVFDVGATVPAVEELADHLVCQGIQRVVVESTSDYWRVFYYLLEERGLQVWLVNARDVKNVPGRPKTDKIDAVWLAKLNERGMLRRSFVPPVQIRRMRDLTRMRVDLVADRTRAKQRSEKLLEGALIKLSSVVSDIFGVAGRRILDALVAGERDPRRLAALGTGLKASPETLAAALTGRFSDHDAFTLEIYLAQIDALDEHLAALSARIDQITATMPLPARHTDTPGAAEVTAVPGVGRVSPVTGEIIPPAGGRPQPRTAADLVDLLDQVPGIGRDAAQLILAEIGTDMAPFATSGHLASWAKLTARTIQTGASLRMGRTGRGNRYVRRTLGTAAASVARTNTFLGARHRRLRARRGALKALVATSRSILEIIWRMVRDQVPFRELGADYHTRHQDPDKRKRALARQMKSLGLSPEEAAAMLAAA

SEQ ID NO: 449865 - protein, 341 aa, unidentified
MKKNLFFIGLDISEADFAASIYKTPDKPIVTKEAIPNDRKGFSMLLLWLNDYHINKKNCRICMEATGVYSQAIAYYLLFAGFPVSVEPPLKVKRAFDPVGHKTDPVDSKQIAEYAYRFQDELTSWKPRDEILEKIRQLLSVREQFTKQKVALDNSIQAYSRQRVQVALIKKAHQETLNQLKKQIARIDKELANLIKQDPVIFQRANKLDSIPGCGMLLAAHLLVITENFTKIQNYKRLAAFIGIVPYQHQSGTSVSKRAKIRHFGPGPSRKLLRLAAQSVATHNVTFRRYYLRKLDQGKAKPLVLNNISNKLLKIACTIIRNNTRYIKDYRSIHPMYLKSA

SEQ ID NO: 449866 - protein, 413 aa, unidentified
MEVLYPRCAGLDVHKATVVAAVRLVAGGKVAREVQTFATTTAGLLALAAWLGENGCTHVAMEATGVYWKPVWHVLAEGGFDLVLANAAQVKNVPGRKTDVNDATWLAELLAHGLVRASFVPDAPTQELRSLLRTRKQLVRERASHVLRLQKTLEDANVKLDAVLSDLLGRSGRAMLEALVAGETDPEKLAAFAHPRLTATPERLREALRGRVTAHHRFLLRLHLDQVDALEAAIGRIDREVEERLAPFSTAVDLLASIPGVGALAARVIVAEIGLDMGRFPTAGHLVSWAGLCPRNDESAGKRLSARLRKGAPWLKTILVQCAWAASRKKASYLQAQYHRLRARRGARKAVCAVAASILTAAYHMLKDGTVYRDLGPGHLDRRSRETQARRLVRRLANLGYAVELAPLEPAPA

SEQ ID NO: 449867 - protein, 395 aa, unidentified
MEDPIIACDVSKGKSHIQGFIGLSNPVGNPFVVRHLKSDLKLIKELAKSLEKQARKKPKFVFEFTGIYHECIAKYIRTLGLDLYAISPLESAKVRKSQIRVTKTDSKDCLNIATVYYTRCIRKFESDNNDIKSLSRRKRDIREERIRQRGVYHRYLDLVWPCFDEYFDADSKVCDIIVSTYKHPYVIKRRSVNMVTEILLNNGHFSKNRAFDIAYKIKDYASNCVSGVDEKSDYVNALISSYSKINSLKKEIEEINLELDNLLRKSPVYQLLKTVPGIGANLLIQISAEIGDYTRFKTAKQFVAYIGLDPSILQSGTNDGEHYSITRKGNGILRSCLYLVINQMLTQKLDNQITRFYFKKKSSGLSHKVAAVASCRKLACCVFGMLKNGTCFETI

SEQ ID NO: 449868 - protein, 343 aa, unidentified
MDNDIRILGIDLGKNWFHLSGLDKQGKCVYRKKLNRKQMAELAQTIPVCLVAMESCPGSQFWGRRFAEAGHDVRIIPGQFVKPFLKGGKNDFNDSLAIAEASGRPNMHCVGLKNQEQLELQAIHRVRSRLITERTAIINQMRALLLEHGIVCAVGRKLFERKLPEILEDAENGLSFRLRALIDHLRRRWRALDVEVDEMTGLLTEHSRESETCQRICDVPGVGPIVASAIIAAVGNASAFKTGRDMAAWLGLVPRQHTTGGKPKLGSITKRGNVQLRTLVVQGAKSLMIHMDRESTAIGKWLGQLEKRVHRHVAVIALANKITRICWKLLSTGETYAARQVAS

SEQ ID NO: 449869 - protein, 377 aa, unidentified
MGFHRELAVKVAVSHRDGGTRSERVGLKHQRKTAMEWFIGIDVSLEQSSVCVLDAGGKIMREAKIASEPEALVAFCRELELPVTRIGLEAGPLSQWLHAGLTSAGFETVLLETRQVKAALSAMVVKTDRKDARGIAHLLRMGWYRPVHCKSVPAQEVRALLAGRKLLLGKLRDVELSIRGLLRGFGLKVGEVSKGRLEARIRELIAGHPMLEQVIQPLLRAREVLNQQYHVLHRAMLNLVRHDAVCRRLMTVPGVGALVAITFTSAVDDPTRFSRARAVGAHFGLTPKRYQSGETDVVGTISKAGDEAARTALYQAAHTMLTCPGRYSSLKRWGMEVARRRGLKRATVALARKLSVVLLRIWTSESEFRFDRPVAAV

SEQ ID NO: 449870 - protein, 413 aa, unidentified
MSMNPGAATVRVTAGVDWAKEDHAVCVVGDQGEVLERFTVRHDAAGLRQMAARLLRAGASQVGIERGDGPVVDALLQAGLTVFVIPPGQVKNLRSRYGSAGNKDDRFDAYVLADVVRTDARRLRPMARDSEQTAALRSTVRARRDLVGHRVAAANQLRAHLEIVFPAAAALFADIDSAITLAFVSRFTTQEQADWLSPLRLAAWLKSVSYSGRADPAVLHARLLAAPRGQAGQHARVHAGTTLALVAVLRVLNAQIQALAASIDAQMEAHPDAVIFTSLPRSGTIRAARLLAEIGDARGRFPTRDSLTCLAGVAPSTRQSGKVKSVTFRWGADKQLRDALCDFAGDSRRASPWAADLYDKAIARGCDHPHAVRILARAWAHVIWRCWQDHVPYDPAAHNSLQALLKQHQPIAA

SEQ ID NO: 449871 - protein, 320 aa, unidentified
MNSIIVGIDVSKETFDAAVLINNKVQTRKFNNNSEGFNKLVTWLKSRGTGHVCMEATGIYWKNLAKYLYDYGYKVSVVNPARIKGFAMSKLSRTKTDKADSVLIADFCKAMKPEAWYPQPLYIQELQQLVNRLNVLIKHKTQETNRLEGASKAIANNIQMHIEFLETQIKEIEQLINDHIKNNKDLHNKAMLLESIPGIGAKTQAVVLAFLADIEKFSSAKQVVAFVGLNPKHRQSGSSVRGASRISRTGNSDLRKSFYMPAMSALRHNCIIKQFSQRLSDTGKPKMLILIAAMRKLLHIIYGVLKHNSPFNHNVLINQK

SEQ ID NO: 449872 - protein, 297 aa, unidentified
MNYNTVYVGMDVHKETFSLCCYTNEKEQAEYPQKVDAHYSKVLNYLEAMRFHYGDDVMFICGYEAGCLGFMLYHQLTSHNVKCIILAPTTMSKPTGKKKVKTDKRDAALIARCLAHHDYSPVHILTEQDEQVKEYIRMRQDHKLALKKIKQQILAFCLRHNYRYDTTKSHWAQAHLTWLRSLAPEGLYQEILTEYLVTYDQLTDKLERLDQRIEELASKEDYQENVSHLSCFLGVKTQTALSTLVEVSDFKRFASAQQFASYLGLTPGEDSSSGDQNRLGITKAGNSHIRTLLVEAA

SEQ ID NO: 449873 - protein, 346 aa, unidentified
MEIIGLDLHKRESQLCRRHPNGQVRHERIPTSRAQFTATLGGMAAAHILLEASTESEWVATHLEALGHVVTVADPNFAPMYATLSRRIKTDRRDAQALMEACALGAYRAAHRLSPARQQLRTLLGVRDALVRTRTRWMALCRTRIRAHGLRLPSGASERFGARVAALELSTVAPALGVELTPLLTLLPGLTAELATLEGRLTALAAADPVMVRLATAPSVGVVTAAGVVATLDDITRFRSAHAVAAYLGLVPREYSSAEHQHRGAITKAGNSQARWLLVEAGWRLLRATAPAAAPLRSWGQAIAARRGKRVAAVALARRLAGVLYAMWRDETDYDPMRVPRGGRRA

SEQ ID NO: 449874 - protein, 347 aa, unidentified
MDHIGIDVHKTESQLCILGEDGQLSEPRIRTTPERFAAVLGHRPRTRILLEASTESEWVARCLEQLGHEVIVADPNFAPMYATRTRKIKTDRRDARALAEACRLGAYRPAHRLSDAQRHVRGRLTVRDALVRTRTQYISVIRALLRQHGWRMPTGSAEGFIRRVLALRVPGRLLSELAPLLAVMRQVNQQLAYSDARIAAVARADERVARLQTVPGVGPVTAAAFVAALDDAGRFARAHQVEAYLGLVPREWSSGEGQRRGRITKAGPRRVRSLLVQAAVSIRRLRHPTTTALREWTERLAARRGRFIAVVALARRLAGILYALLRDGTRYQPARAKLTPHTDPVAA

SEQ ID NO: 449875 - protein, 341 aa, unidentified
MENVMLIGIDLGKHSFHVHGQDRQGKTLLRKKFSRPQLIAFLATFHPCTIVMEACAGAHFIARQLAGFGHEAKLISPQFVRPFVKSNKNDFIDAEAICEAASRPAMRFVTPKNEAQQTLSALHRVRESLVRERVRASNQIHGFLLEFGISLPVGHAAIKRLPSVLAEQRLPARLVQVLERLHAHFKYLDQQIAEIEKDLARQVTEDDLGQRLMTVPGIGPITASVLAAEVGDGKHYRCGRDFAAAVGLVPRQYSTGGKNKLLGISKRGDKNLRRLLVQCARAYMQRLERQRGQLAQWVRSMLMRRHSNVVACALANKLARMAWAIAAHHTEFEIKEAPMTT

SEQ ID NO: 449876 - protein, 429 aa, unidentified
MNYNTQNAKIASITEKTLIIGIDVGSETHYARAFSWRNYEYSKKPFAFSNDEAGFAAFKEWVNDIAEKHGMEVIIPGMEPTGHYWLNLGAYLQEQGMKPVHVNPHHVKKSKELDDNNPSKNDRKDPKTIASLVNEGRFSYPYIPTGIYAEIRNLSNLRIQTQEEITRIKNRMARWFSIYFPEIKDVYRNPDAVSGLMVIKQAPLPCDIRELGVEGVNKIWRDARLKGAGIKRATTLVTAAEHSIGNTEAPRSARKEIRNLLNDYETYKNRMDELMEEIEETLSEIPYIDKLMEINGIGIKTVSCFIAEVGDIGRFDNPKQVQKLAGYAIVADSSGKHNGESRISHRGRKRLRYALYEAAISVIGKNKEFKEIHSYYRTREKNPLKKMQSVIAVACKLIRIFYTILTKGVDYDSQKMLNDIVRPEIQLAA

SEQ ID NO: 449877 - protein, 362 aa, unidentified
MAQVRSWVGLDVHRASVVAAVMDRETGEMRVRRLPGETSEVVAFCVSLPGLTRVAYEAGPTGFALSRALTAAGVQCVIAAPGKIERPSSDRVKTDQRDAERLLRLLMIDGLHAVRVPSTGEEALRDLVRAREDIRGDLMRARHRMSKLLLRHDMRFDGTAAAWTTHHRAWLAKVDLGERGAQVTLHDYQGAIDALLVRRDTLESAIDELIPGSPWVDTIGRLRCLRGIDTLSAVGLCAEIGDWQRFARAGQIMSYLGLVPSEDSTGSARRQGAITKTGSGHGRRLLVEAAWHYRRPPRNSTVLKRRQAGQPAHVIAISWQAQRRLHRTWQRLDTERGKRRTIVAVAVARELAGFCWAAANAD

SEQ ID NO: 449878 - protein, 456 aa, unidentified
MNMRIIGIDLAVSAKHKAMILDPASNEFIGGQIAFRAWPADLERLLQRARKEAPVDVELRAILEATGMAWYPVAVYLERHGVPVFRVNGQKTKDFRRALWKHTGSDQIDSRVLARLYQIAPNRLSRCPLPTGDLLALQRACRAYAHWREQDVATQNRMQAIDQWAWGGLAKLIPPAAQAWMRQHWYNPWSVQTAGTALLATAWEAAAATDEVKTVWIGRWLERAQQMTALYGSERQVGYDDLQETMRHSLALRQQYAQEQARLTTEKILPLYHQLYPDCPLTSIKGIGLQSAAIYRAFIQDIDRFPTVEKFRLWCGIVPRSKQSGDGEAKGMSLTKAGPNLVKATLFLNAEVARQWDVQIAAIYHKQLVAYGKHHLQAVCACASHLASRIYAVLKQQRPYELRDLQGQPISATVSRQLCLQYRVPDEVRQRNNKRFRRNKAEQQTEARTLKRQKQG

SEQ ID NO: 449879 - protein, 365 aa, unidentified
MKELIIGCDVSAYFSNFKFYDGETQVEYAKVKVKHTTEGFRELEATLNKIKRRRRFNQISIVIEQTGIYSLPIIQFAWDRGIKIIIVEGKDLYDYRRLKKNGVKNDWIDAELLAKYYMEGNKHYVLEVEPKDLYELKGLVRYRERLIKDKNRKMNYIRQLITILYPDMTKYKNSQFWSKVKALHLEPSPYGFNSSRLQEILRYEINELREVEERISKIDKEIERIIRECKEFRRQAEIIKQIGMGILSTAYLISIFWDINRFKNLKAFRRYLGYGFKNYQSGKRQYEKHEHITRFSKKVLFMFVLQSVRSRSNYTHIKERYEYYKSKGDGGRKAIYKVSSKIVNWIYKALKEGRLDHEAIRAGIN

SEQ ID NO: 449880 - protein, 428 aa, unidentified
MQDVLIGVDPHKASNTLAVLDPMTKTPVDGGRFANTAKGFEELMAFAQRWDDRRWAVEGCHGAGRSLAQRLVASGESVLDVPAKLAARVRVFSTGHGRKTDRDDAISVGLAALDGDGVAPAVVDGATTSLRLLSDRRQELVGLRTQAACRLHRLLVELTPGGMSSELSAKKAASVLVRLRPEGEVAQVRFQLATEHLADIEAIDAKIKATTAQITALVKISGTGLIDLYGIGPVIAGRILAEVDGIARFPTKDHFASYNGTAPIDASSGDQVRHRLSRAGNRRLNHALHMMAVTQLRQPETTGRAYYERKRQDGKTPKEALRCLKRRLSDIVFRQLVADSRGRIEGCGSPTIAKPMRSTSTSPKASSRPAGRPPSKPSRPQGSKRPSCSTGKTTASSASKSSTPASGSPRTSSTVRKTSAERRSSLVS

SEQ ID NO: 449881 - protein, 402 aa, unidentified
MNCVGIDVSKGKSMIAVMRPFGEVVVSPFEVRHTTNELSKLAGLLKSLDGETRVVMESTGNYHAPVARLLHGAGLYVSVVNAMLVHDYGNNSLRRGKTDKKDAVKLANYGLDHWLTLPRYVPEEDARLMLKTCYRQYQQYSKVQTMLKNNLISLLDTAFPDANRLFTSPPRADGSEKWVDFVAAFWHCECVCGLSEKAFTAKYQKWCRKHGYNFSENKALDIYASACGHFGVMPKTDTSKLLVEQAISQLQATSAALAALKQEMQSLAASLPEYPVVMGMFGVGPTLGPQLIAEIGDVRRFHSKKALVAFAGIDAPPYQSGQIDVRSRSISKRGSASLRRTLFLVMGVLLQCAPMDEPVYQFMNKKRSEGKPYRVYMMASANKFLRIYYASVKAYLDSLEHD

SEQ ID NO: 449882 - protein, 349 aa, unidentified
MEQNEVILGVDTHLDTHVGAVISDTGRLLGTLSVATDTAGYLDLLTWANSFGLLRRAGVEGTGTYGAGLARMLRDHEIEVLEVNRPDRAMRRSRGKSDPTDAENAARAVLSGRATAIPKEQSGAAEAMRAASVARRSAVKAKTQAINQLRALLVSAPQEIRDRHLKAKTAECVESCARLRSLGKTPMLQTLTATLRLLAKRWLMLAEELKALDTMLDSLTSQHAARVRERFGVGPQTAAVLVAVAGDNPERLKSEAALAALCGTSPLQASSGKTVRHRLNRGGDRAANNALWTIAMVRMRSDPRTRLYVDRRTKEGMSSKEIHRCLKRYIVRELYPLILADLADSTGIG

SEQ ID NO: 449883 - protein, 397 aa, unidentified
MTNRYDKVVCAGMDVHKNFSSVTFRGIRGNIVARERLEHPNRGRLYERLRQWPPKIPVILEASFGWGWISDILTEVGLDPHLANCFKVDKMREARGWPKTNGKDADLLSTLSQEATNWWEVWLAPPEVRDRREWMRYRMGLVALGTETQNRIHAVLHRHGIFHGFSDLFGKAGREFLVNLCRDGKTKDAQLPDGAWAALSGHVRLLNRLRMELAQIAKRLRKELERSELARRLDSIPGFGLILSHVLMAEIGQIERFHSNGALAQYSLLAPKVSDTGEADPTEAPKGRKLGKRGNHALKWAFIEAARGAVRRGGKWRAMFNRHTDGGKKNRNRGYIKVARELVKVAYVVWRKKVEYTDRPPQRPGRQIDESGSTRSGTGQFNKAMTVAQQLGPQVSS

SEQ ID NO: 449884 - protein, 349 aa, unidentified
MRFYNQQHRFYCGIDLHARALAVCVLDAAGAIAFRGNVAASPQAVRDALAPFRDDVAVACECMFAWYWLADLCQEEKVPFVLGHALYMKAIHGGKAKNDPIDAEKIARLLRGGNLPVAYVYPKAMRATRDLLRRRTFLVRKRAELLAHLVNTNSQYNLPPLAKKLAYAANREELDLASRFTDPSVRRSAEADLALIDAYDEQIRSLELYLSRAAKVDDPQAFQRLRSVPGVGKVLALVLLYEIHDIRRFPSAGQFLSYARLVRCAHESAGKKKGSGGNKIGNAHLKWAFSEATCLLLRESEQAKQWLARREKKRGKARALGALAARLGRAVYHLLRRKEAFDGERFFAS

SEQ ID NO: 449885 - protein, 328 aa, unidentified
MSNTSLGVDVSKLELSIALLQDNKVTKTKFSNDTSGFKKLVQWLKKKKKVDNIKICMEATGPYSVGIANFLHGKGYSVYVVNPLCIKSFADSKLSRNKTDEGDAELIAKYILTNEARAYKPHSEIISKLRAFDASLESFKSARAQAKNHLSYVDHLPKELVKFWEDTVEHYDKQIDEMEKAMAKLIASDKDLQTDYDNLQTIPGIGKTSAMTILASIPDIAGFDDARQFAAYAGLTPRQTSSGTSVRGKTRLSKIGSSRLRKAMYFPGMAAKKFNPIVKAFCDNLIKKSKSPMVVLGAAMRKLMHIIFAILKHKCVFNPYSNAIKTAV

SEQ ID NO: 449886 - protein, 356 aa, unidentified
MNKVNANFENQKVFVGLDVHKRSWNAAIFLGDYFVRNIHQPPSPQALQHFLTRNYPGAHYTCAYERGKFGFWIQRHFKQMGIDCLVVNPADIPSTQKDNVYKTDARDARGIGQALSSGQLKSIFVPHQEQEADRQLVRQRKKLWADLVRCKNRIKAFLDYMGIVVPDRFDNPNWSLNFIRWLRELEFEHVTSRVTLNYQLDEMELLRKQMLSICNAIRKLMRSKKYNQLYYLLRTVPGIGPLTAASLITEIGDINRFKDFYNLNSFIGLLPMEHSSGEKEIRSRITIRKHRQLRSDLIECAWTAKRTDPALALYYTEQVKKGKNGKAAIVKVARKLVSRIRYVWRTNQPYQCAVVK

SEQ ID NO: 449887 - protein, 349 aa, unidentified
MLADEVDYVLGVDTHRDEHVMAVVTAPTGAVVAGAATAANAYGYRELLRVAEQHAPGRRAWAIEGTGSYGAGLSRYLHARGETVLEVSRIPRGERRLRGKDDALDAARTARAALASDTLALPRRGERREALRLLLVARRSAVDVRREALTQLRAVIVTAPERLRQELCRLPEGKLLDRCSRFRRTNSAGADELATRIVLRSLARRVRTATVEADELEREILAHVRALAATLLDEPGVGPIVAAQLIVAWSHHGRLRSEACFARLAGVAPVPASSGQTTRHRLSRGGDRQLNRALHTIVLHRRHHDPTTRDYIARRIAEGKSRRDATRLLKRYLARHLYRLLQQQEPMMT

SEQ ID NO: 449888 - protein, 341 aa, unidentified
MESQVLMVGVDTHKEGHSAAAVDGLGGVVAAIDVAADRRGYARLLRWARCRSSERQWVVEGTGSYGAGLTSFLTENGEVVFEGDRPQRRKHDAAGKSDQLDAIKVAREALARAHHAIPRQRGKREAIRVLLTSRQSAINAYRQGLNQLYALVVTAPTPLHERLIRLKGERLVVACSRLRPGGDLEARVTGMTMRQIARRLQNLQAEAHGYELQLAELVAEVAPVLLAESGVGPITAAQMLVSWSHAGRIRDENAFAAMAGVAPIQASSGRVVRHRLNRFGDRQLNRALHTVALCRSASHPETRAYIARRTAEGKSTREIRRCLKRYLARRFFRMLQRLDRP

SEQ ID NO: 449889 - protein, 390 aa, unidentified
MKKNTTAKKNQRAHVNAGRKRLRQMAAEQRLTIGLDLGDLYSRYCIMGEAGEIVREGQLPTSKAGLDSLFGKMPSSRVALEVGTHSPWVSRHIAGLGHEVIVANPHKVKLISQSVRKNDRIDAQTLARLARADPQLLFPIRHRGEQAQADLAVIRARAELVETRTSLINCARGMAKPMGERLKKCDAEQVKESLADGLSEALQKVLRPLLKSVEAIRQQIAVYDRQIEEISKRYPEIQLLKPVYGVGPVIALAFVLTLEDAQRFGHSRDVGPFLGLQPRQRESGKSQPELGISKAGDGLLRSLLVQGAHCILRKGAPESDLRDWGLEHLGRGGKNAKRRTVVAVARKLAVLLHVLWANGVVYDPLYNRKAAEAAKAKAEAQARAKGKAVA

SEQ ID NO: 449890 - protein, 366 aa, unidentified
MTTQEKQQVLFVGVDVHKDTHTAVGLTSFGEKVFEMTIGNEEEDFISLIEKTKIEANQRGLIPSFGLEDVHSCGERLSSFLVEEQFPVRAIAPILVDYRRRKATHPEKNDSLDAQGVAEVMIQRIDTLPSYRLTEEAQKAKQIRELSLEREWLVKERARIKNQLHVLLHRIHNTGYRTKYKDPFSQKALHYWMKGVPKNTDAILEQRMKRSVRRLLDLQKEIKEIEEGLTTLMKANGQTVTTAAGCGVVVAAEIIGEIGDINRFHSPGALAKYSGCAPRECSSGKKIRWRKTKSGNRRLNRAFHRMALSQISRTGNDAAKTYFKRKVSEGKSKAQALVCLRRQLVNIIWMIMKHKTEYRLPAEASA

SEQ ID NO: 449891 - protein, 315 aa, unidentified
MSKDTLDANCARGQRKQARTFENNPDGWKRLLSWLKAMGGKQAHVCMEATGRHSLGVALALHDAGHVVSVVNPAQIRDFARTKLGRNKTDKVDAALIREYAALFKPGRWTPPSPAMRRLCELQTMRAGIVKNRTEWKNRIGSGLGDSTATKLAAATIEHFTQQLEAVDQAIGETMDQDGALRGRRDLLLTVIGVGETLAASLLVEMPEPEVLRRSGEMVAYAGLNPSHHRSGSSIDRPTRISKIGNATLRSSLYMPALSAMRYNPAVAALVARLKQAGRLTPKQIVIAAMRKLLVICFGVLKTSTPFDPAIAMPA

SEQ ID NO: 449892 - protein, 335 aa, unidentified
MSAYEFFLGCDSSKDKLNFALADAQGQILYECEVPNQLARIRAKLKELLRIQQVPVEKVLLCVESTGVYNNWLLRAVSELEVATWVVHPHKITKTLEPLRGKSDDLDARRIAQFARRYADQARLYQQPKPEIRSLKRLLRLRQKLVKDRTRYKNRLKAAKNFDGLELEVQVYQSIIETLDEKIKEVEKQMRLIIRSNQRLKKRIKLLRTIPGVGFVSACTLLLFTNDFEDFDDPRKFACHAGAAPFPYASGKYARAHTTSNRAQKFIKGILSAAAKAASKSNSRLGAYFRRKMEEGKPESLVLNNLRNKIIHIAFAIIRTEKPYDDNHIPEAFAA

SEQ ID NO: 449893 - protein, 351 aa, unidentified
MSAGYDGQQIVGMDLHRRRSVLVRMTPEGERLGKTRISNSPAALRAEIAKAGVRPKVVLEATYGWYWAADTLALAGAEVHLAHPLGVKAFTYRRVKNDERDAADLADLLRMGRLPEAWIAPAGVRDLRELTRYRAKLVGMRTSCKDQVHAVLAKLGVAVTHSDLFGAGGSAWLDQLAVAQPYRGKIASLRSLIEACTGEIALLEEVIAELLRGHAGYAAIQLLPGIGPVLAAVIVAETGDITRFDRPEKLACWAGLTPRHRESDLKVARGHITKQGSPILRWALIEAVQRQPAGTPIHQVKDRILARRGTGARNIAKVAAARKLAVLVFYGMRDGHIRALDHPTACVQDAA

SEQ ID NO: 449894 - protein, 354 aa, unidentified
MSSLNSGIAAIGIDIGKNSFHLVGQDERGAIVLRQKWSRGQVEARLANLPACLIGMEACVGSHHLSRKLQALGHDARLMPAKYVRPYSKGQKNDFRDAEAIAEAVQRPTMKFVATKTAEQLDLQSLHRVRERLVGQRTGVINQTRAFLLERGVAVRQGLRFLRAELPTILATRSDALSPRMLRLIEELAGDWRRLDARIEAISGEIEELARKDQACARLMTVPGIGPIISSAIVAAIGTGDAFSKGRDFGAWLGLVPKQISTGDRTILGGISKRGNRYLRALFVQAAWVVLVKLGKKWERYGLGSWIEAAKKRLHHNVLAIALANKLARIAWAVLHKGRTFECANINALSVRPI

SEQ ID NO: 449895 - protein, 392 aa, unidentified
MVVSVGIDVSKDKHDCFIVNSEGEVLADVFIIPNNMDGFHYLLQRIQDCTNTQDKIKVGLEATGHYSYNLLGFLLDNGLPTYVLNPLRTNIYRKSLSLRKTKTDRVDARTIASMLLSDAGLKPYTDTAYHNEELKSLTRYRFDKVKARSKLKNSISRLVCILFPELEKLVPSLHLASVYALLEEFPGAKQVAGAHLTRLKTLLETVSNGRYKRDMALEIRNAARNSIGSRMPAKSLELQHTIRLIRELNAEITEIEEQIQSIMAELHSPITTIPGLGFRMAAMILAEVGDFTRFESPDKLLAYAGMSPSIYQSGQLKNCYPHMEKRGSRYLRYALYNATKYVCQWDPTFSDYLAKKRAEGKHYNVALSHAAKKLVRLIFAMEKSRTTYRLAA

SEQ ID NO: 449896 - protein, 346 aa, unidentified
MLHAGLDLSRKRLDVCVLDADGAVVETGTVSPGAAGLARLAHRLARYGQPVQGAIESMTGARFVHDQLELAGWTVAIADALKAKGLAPLACKTDRIDARVLAELSRRDLVPAIWLPDPAVRAERERARFRLHLVRQRSRLKHRIHAGLLAHGVPCPVSDLFGVRGRTLLAGDVVPEPWRGHITTALALIDDLTRCITQLECELRRWGAAHRYVPLLMTTPGIAWVLGYTIAAEIGDIARFPTPLKLTGYTGLCPRVYQSGGRDRRGALSKLGPRYLRWALLEAAMHAGRHPAYRARYQRTKRRLGRQRGAKVAQIDIARKLAEAIWYMLTRTQPFAPAGATRALAA

SEQ ID NO: 449897 - protein, 355 aa, unidentified
MRILSLDLSKYKTVACDYEAETGKHQFVTVLTTHKGLHDLIVDREPDRVVIEICSIAGWVCDLVRSLGIEMQVASTNDERWQWRKVKTKNDRHDGLKLAQLSARNELDLVHVPRSEMRQWRALIAYRQHLVQRRTKIKNHIRELLLREGQLLPRHRSAWTQVGIEALAELAKPLGEVSPDELWRGELEVELAQFKAVQAQLTEVVAKLDALGAANHNVRLLQTASGVGPRLAEAVVTMFDDPRRFRRGAAVSAYIGMVPKQWDSGETERLGHITRHGNRLVRSLLVEVAWCALRHNPWARETYQRISGGKKSRKKIAIVAVGRKLLVRCWAMLRDQTPWHWEGQSTVVTPPAPTA

SEQ ID NO: 449898 - protein, 414 aa, unidentified
MSNPLLVGVDVHRKTNAVCVMDGQGQELIPRFTMDNNQPGTEAFVQQMAQLMLDGDFDVLRVAGEATGWYWFHFFQTLSQDPFLNQWPLQLYPLNPRLTANFKKTYVDLDHTDHIDSFVVADRLRLGRDLPVPFCYEETYLPLRFLTRYRHHVVHNLAREKAYCLTILYLKFSEYTRKGKKPFSNVFGAASRAVLQEFASIEEIAAIPFHELVEFIDLKGKRRFPDPTDNARKLQQVACDSYHLPQALQQPVNLTLGLSLKHITFLERQEKRLNTAIGEHMEAIPHTLDTIPGFGPVFSGGIIAELGGIERFDYNQAKVAKYAGFKWRRHQSADFEADETRLTRTGNRFLRYYFCEAAHTVRLRDAEYAAYYDRKYHEVRKHQHKRAIVLTARKLVRLVTRLLTTNQPYRPRRR

SEQ ID NO: 449899 - protein, 409 aa, unidentified
MSVGHDSSMRRPTAGIDWASSEHALAVVGPDGVEVQRMLVEHTAAGLRKLLRCLQQAAVLEVGIERPDGPIVEALLDAGLTVFVIAPNQIKHLRRRYGAAGNKDDRFDAYVLADTVRTDRHRLRPLTVDSPATLTLRMTVRARKDLIAARVAMANQLRAHLEHVLPAVIGLFRDIDSAITLSFLTRFATQDKVDWLSPRRLQNWLRSVSYPNPARAGLLHAHLRAATRGTTGPEATARAHVTAALVAGLTALREQINALEEQIELQLLQHPDAAVFTSLPRAGIVRAARLLAEIGDARGRFPTPEALTCLAGAAPSTRQSGKVKVVSFRWAVDKQLRGAVIDFAGDSHHANPWAADLYRRARARGHDHPHATRILARAWLHVIWRCWQDRVAYDPTRHRALQAVLAPPA

SEQ ID NO: 449900 - protein, 376 aa, unidentified
MSALCHVWTSGNRGRVIIIPVTAIRAECARFAGWEIIMTKYVGLDVSQKTTVLCIVDGEGHRLWRGECSSSPDQIVHTVLQHAGAGASIGVETGPMTPWLVHELRSRGLDVICLDARHARAALRMQLNKTDRNDAEGLAQIMRTGWFRAVHVKSFDAHRARALLGARQQLVGMVTKLSNHIRGVLKTFGMLPGSVRGRSFAERVELLVAERLDVAPIVRPMLTAWSKLREQIAAFDKAIRAEVKQSRECRLLMSVPGIGPVTVLAYVSAIERPDRFRRSRLVGAHLGLTPRQYQSGDVDRSGHISKCGDTLARLCLYEAATVIMTRVKRPLGLKIWAMKIAKRSGTNKARVALARKLAVILHSIWRTGEAFCWGTH

SEQ ID NO: 449901 - protein, 475 aa, unidentified
MPKQITKKCPGKSKKSNKNYAMKLPKHLEHINRLAAGIDIGAESHFVAVPPGCDEVCVREFAAFTPDLHKLADWLEQCRIQTVAMESTGVYWIPLYELLESRGFKVNLVDARHVKNVSGRKTDVLDCQWIQQLHTYGLLNAAFRPAEEINKLKIYSRHRSMLIEQASGHIQRMQKALSQMNLKLQHVLSDISGVTGLKIIRAIVAGEYDPRKLASYRDKGCKKSEEVIEKSLTGHYREEHIFCLKQALELYDTYKEKIAACDVEIERQLIKIKNARIEKVEQVSEQKPLHMVKQKKSHCKNAPAFDLKSHLWRITGVDLTAVPGIEASSAFRLVAEIGLDMSRWKSSKHFASWLGLCPGNKVSGGKRLDGKSKRTSNYAASILRMVASTLHQSKSALGAFFRRLKARLGAPKATTAAAHKLATIIFTMLSKKIAYKETGQTYYEEHYRQRMLKNLKKRAKDLGVELVEKPLISMS

SEQ ID NO: 449902 - protein, 431 aa, unidentified
MNNTEIKKGTDEYAALIGLDWASEKHDVWVWDTATGEGRHRVVEHTPEALAEWLGELQARFPNQRLALCLEQSRGALIYALMGHAFLTLYPINPVTLARYREAFSPSRAKDDPGDAKLLAEILRIHRDKLTIWKPDDEQTRTLSLLNEERRKAVDLRTKLVLRLQAALKLYFPQAIEWVGSCLHNPLACDWILKWPTLEAVQKARPETIRAFYYAHNSRRPDHVEGHLKAIAAASPLTRDTAVITANQLTVQMLAKQLRTLHGSIDEYDRQIATLFSKHPDAFIFESLPGAGAALAPRLLSAFGTDRDRHPSAKDMQAYAGIAPVIERSGKQCWTHWRWNCPKFLRQTFHEFAKTSIPYSAWAKAYYELQKSRGKGHHAAIRSLAFKWIRVVHRCWKDRKPYNEDLYLQVLKQRGSGLYTMIAQQPSNACE

SEQ ID NO: 449903 - protein, 438 aa, unidentified
MSNKVVFNLDELFISVGIDVGADFSWMSIALPNQQFVGKPYKILHNSMDSLTAAVSKIKEAEELYSLESRIFLESTGIYHYPLFCYLRDKGFNVSVINPIITKNSTNINIRKVHNDRFDSKKAALVGLKPDLKVSLMPSDLALNCRNLCREYYDLMDNRSAYVNKLQGELRMAFPQYLGIFSKVTTNTALTLLETYTSPSAFIKADKQEIIDTIKSTARFGLTYAQNKHHAIIQAANEANEFGYIIDSNIKRIRLYISFIRKYDEEIANILNSMHELVDTNEDTGFVKQIHLIETFKGAGFLSAVSLMGEIGDFSAFSKPKQLFAYFGLDPAVKQSGKFEGSKVQMSKRGSAIARRVIHTLALQSISTSRTGEAKNPVLRDYYLGKCKSKPKLVAMGAVSHKVCNIIFAILRDNKPFEIITPQEHIKQYNATKCDIAA

SEQ ID NO: 449904 - protein, 343 aa, unidentified
MTRFVGLDVSQKITAICIVDNAGRRLWRGQCPTVPEQISVLVRRHGGDDARIGIETGAMTPWLVHELRNLGLEVVCLDARHARAALEMQINKTDQNDAEGLAQIVRTGWYRSVHVKSFDSHRARALLGARTQLIGMTTRLSNHIRGVLKTFGLLPGAMRGLPFDRKVEALLLDRSDVALIVRPMLVAWRQLREQIAVFDKAIRVLVRLNSSCRLLMSVPGIGVLSALAYVSTVEDPGRFSRSRSVGAHLGLTPRQYQSGEVDRSGGISRCGDTLARTLLYEAAVVILTRLKKASSLKDWGHAIARRSGNGKARVAVARKRSVILHSVWRSGQPFRWSEHAGAA

SEQ ID NO: 449905 - protein, 455 aa, unidentified
MPAPRKIKAKSNRQLPTLHPHAAGIDLGATQMQVAVPCDADPKPVRTFATFTDDLLKLRDWLKTCRIQTVAMESTSVYWIPVFQILEAAGLEVCLVNARHCKNLPGRKTDVSDCQWLQYLHSVGLLRASFRPPEQVCAVRSLLRHRANLVRYAGSHVQHLQKALTQMNLQIHNVISDLTGVTGLAILDAILAGQRDPQKLAALKDHRIKASQDTIARSLQGDWRPEQLFVIQQALATWRYYQTLIAQCDQQIQQLLAGFDSRVDVRQHPLAAARLQHKKPQRNEPAFNARTELYRLAGVDLTQVPGLQVNTALVLFTELGPDFVCRFPTAKTFASWLGLCPDNRITGGRVISVKTRDVKSRAALALRLAAQSLWRSNDYLGDCFRRWKARLGTPKAITAMAHKLARILWHLIRFQVPYDPAVWAAAQQKLRQKKIKRLHQSAAALGFKLSSLPTT

SEQ ID NO: 449906 - protein, 367 aa, unidentified
MKKVSTVAAKQSKKISQQKLTVGLDLGDRNSWYCVLDESGQIQLEERVRTNATALREVFGEMPHSRIGLEIGTHSPWISRLLSELGHEVIVANARKVRLIGESRKKDDRMDAQTLARLARIDPQLLSPVKHRSAKAQADLMMIRARAGLVRARTALVNTVRGLAKSYGERLRGCNVRNMNPEKAEGLSPELQRALEPLLAGIETLSERIAEYNERIETLAQQSYPQVALLKQIKGVGTLIGLTFLLTLEDPHRFRKSRDVGCYLGLQPGRRNSGQSEPQLHISKEGDPYLRTLLVQGAQHILGPFGVDCDLRRWGLKLAERGGRNGKKRAIVATARKLAVLLHHLWVSGEVYEPLHNSSRTTVRAAA

SEQ ID NO: 449907 - protein, 462 aa, unidentified
MKGKAVKPKRTRRPRSPLALVNPDAAGIDCGLAEHYVAVPHDRDPEHVRRFRTFTEDLHRLADWLVSCGIKTVAMEATGVFWIPVYEILEACGLQVLLVNARHVKNVPGRKSDVADCEWLRQLHSVGLLRGSFRPTADIAALRSYLRHRESLVQTASTAVQRMQKALVQMNLQLQVVITDISGTTGLRIIRDIIAGQTDPRQLAKHRNARCNSSEGEIAAALTGNYRPEHVFVLQQNLEIFDALQRQIESCDKRVEAHLQELTAKAPHASKPMPAARPRRQSRGEPPFDLRTPLHQLTGADLSQIDGIGPYNAVRLVSEIGTEMSRWPTERHFTSWLTLAPNNKISGGRLLSSRTQPSANRAAAILRVAAMSLSRTDTALGAFYRRLAGRIGKAKAITATARKLATLVYRCLKGEIVYKDPGAAAYDRHHRESVLRRLRHRAASLGFTLVNQQTGEILEGVS

SEQ ID NO: 449908 - protein, 385 aa, unidentified
MTKPYDLSKPLVALDHDSTLVCVIEMSGSSWLVAATVPGVDRRPLQKLPVDPARLLAQVERWRQEAARAGRTITRTVVAYESGRDGFWLARLLRGHGIEVYVIHASSVAVSREQRRAKTDRLDTEMLMRALLGWLRSEPGHCRMVAIPTVAQEDARRPGREREGLVAERTRLTNTIKAELALWGIQGFKPGLKKAAEHLEALRTVEGEPLPPNTLARLHRLLKRRTLISDQIKAIELAAAQAIERDPTGPNAMVLLLAQIKGIGLETAQMLVQEVLSRNLRDRRAVARYAGLTGTPDESGSKRREKGISKAGNPRVRRGMIQLAWRLLMFQPDAALVRWYRERTAGGKGAIKKTMIVALARKLLIALWSYATAGVMPEGVVLKAV

SEQ ID NO: 449909 - protein, 374 aa, unidentified
MSSNDSTTHIAIELSTSLWLVATRLPGVAKSRLHRIDAGDTAALLALVNDLRARPSNGPGQVAELACCFEAGRDGFWLHRLLTQHGVPTYVVEPTSILVNRRARRAKTDRLDAEGLLRVLAAYVGGDRQICSMVRVPTPEEEDAKRPHREREHLVQERTRFENRILALLATQGIRERPSLRTWERDLAVLQTGDGRAMPRHLLAELRRLRRRLVLTMELIREADAERAKALEAAPHEAASEKVTALRRIRGIGDNFAAVLVREVLYRPFGSRKQLASYVGLTPMPYQSGTMDRDRRIGRAGNPRARTTMVQLAWLWLRYQPESALAAWFRARVGTLQGRTRRIGIVAMARKLLIALWRYTETGQIPDGVTVSAT

SEQ ID NO: 449910 - protein, 304 aa, unidentified
MTILTSPTVIGIDVAKAEIVAYREDLKITQAINNDRETLGRWLKKLPAQSSIALEATSIYHLDTVELAHEMGHRVYVVDAYRLSHYRESIGQRAKTDFCDARLLARYLTSEQDRLRIWSPPPQAYKVLKSLLHRRAELINVRVGITLSWSSEPLLKEALAQQLKSFKQAEQVIQKLLHKVSKEAGIIENIKRCKAIEGIGDLTAIGLATAFMRGHFASGDAFIAFLGMDLRAKDSGKKNGPRHLSKKGDTEIRRLAHNAAMAACRSTTWKPYYESYLARGLAKTQALVILARKLCRVAFNINID

SEQ ID NO: 449911 - protein, 452 aa, unidentified
MKKEEVKKSISKFATGMPVFNHYAAGIDIGDTIQCVAVSNGNGGHEVKTTTGFTCDLEEIVNYLVEKKITTAAMESTGIYWLALYLMLEEAGIEVFLVNAKHVKNVTGRKKDDTDAIWIQKLHTCGLLQKSFQPDNEMRTLRDYVRQRRNLITMNSDAVRRIQKALELMNIKIHTVIADILGKTGMRMVKAILAGETEPEKLVELCDIRIKAPKEEIIKSLQGIWKEEYLFMLQQAVDHYEFHMLQINACDEKIKQQLLNQVAIAKDGHISEIENPTKKKSKAKPRKNELNFDVLPYLSILTTVDLSQIPGFGDTTVLELISEIGIDMSKWKNHKHFAAWLNLAPNTKISGGKILSSKRMKKKNKAGQILKQAASTISNSKEPLGDYYRKMRSKLGGKGAVTATAHKLARIIYTMLLNKTQYDSKIIEGNQKKYIADKILRLEKQIAKLKAA

SEQ ID NO: 449912 - protein, 484 aa, unidentified
MSQRKLSTFERLRKGKMSRKQRKELVRRLYSDDPGLEVVHRDVAGIDVGNESHFVAVAPGRDPQPVREFGSWTADLVRLAEWLKSCGVKMVVMQSTGVYWIAVYEVLEKAGFEVWLTNARDTKNLPGRKSDVQESQWLLKLQTYGLLRNSFRPPEEIRRLRTVWRLRERHVQEAGRAIQHMQKALTTMNVQLANTLSDISGTSGQAIIRAILKGERDPSALARLRDYRVRASEEEIARSLEGNWQEDVLFELQQAVDGYDFCQKQIGECDQRLQQYLVAVHARPPVQAQAVETDSSAATQQKPKKKRSLKKPRKNQPQFDFDAELSRICGVDLRTIDGVDVMTILTWVSEVGTDMKPWPSEDHLVSWLKLSPRRQVSGGKLIKHEHSPVKNRVAEALRMAASTLAHSDSYLGARFRSLRSRLGPGKAIKAMAAYLARLIYRMLTRGQAWVDRGAQQYETKRQARETYSLQRRAAALGFRLVPAA

SEQ ID NO: 449913 - protein, 419 aa, unidentified
MSFKILKNNCCGLDVHKTWIYACIGITDSFKRTEYKQARFSSFTKGLQELCLWLAKYNCIDVCMESTGKYWIPVFNVLEKNNIFVTLSHPKYTKPQKGNKTDRKDAKWICDLYMCGMVKPSFIPPADIRQLRDLVRYRFKLTCMITGEKNRAHNCLTVSNLKLDDVFSDIFGKSSRSITEQILQHPGEFFDVAPFVDSRCKTPIEEIQAAVDGAISHEQAVKLRQCLKHIDELEMHKAEIEREIFRLSQKYESVLDLIRTIPGFDKNPLTAIQVLSEIGADMSVFPTAKNLVSWAGCCPRNDQSSRKIKSTRISRAGSYFKPVLVQIANALIKSKKHPEFTTRYRRIKARRGHKKAIIAICRMILTAIWHILTDLKPYTPEGFLESRPVNKEKVLTISQALNLIKQRGYIIKDDVGPVT

SEQ ID NO: 449914 - protein, 325 aa, unidentified
MEKLYAGLDIHKENLAGCIMNKEGTITREHTFPSSKKAIERFFTGIPSPGIIIAIEACGMWRGTHKILTNLGYEVKLANPKKTHDIACKKKTDTIDAKILADLLRTQYLPEVWIPDKQTLQFRDLTRHKTNLTRLRTQVLGKIRGYLLRKGMKYTKLSTEKTLQSLAEEDPDINNLVQVYQCLKQEEKEVLKRIKKIAQNMKTTTMLMSMPGIAELSSLMILAEIGDIHRFPSSKQLVSYAGLCCGIYQTGNTQRTVRNTAVNKWLKWIIYECSGRAIMIEPRFKTYYYKIKEKKGFKTARRATARKMLTIIWYMLTNEEPYRAS

SEQ ID NO: 449915 - protein, 344 aa, unidentified
MDYFAGLDVSVKETSICIVDDTGKIVREAKVASEPEALLAALKKPAYHSKRIGLEAGALSQWLFSALAEAGLPVICVETRHMKAVLKAQINKTDRNDARGIAQMMRAGLYRPVPVKTLRRQKLRMLLTHRKLLQSKAIAIENDLRGTLRNFGLKVGMVGTVKFEARIKERVENLPDLAALVDPWLVVRRVLRQQLGILHRRLLAVVRDDEVCRRLMTVPGVGPVVALTYRATVDVPARFRTSTAVGAVFGLTPAKYQSGEINRTGAISKCGDDMMRVMLYEAAQIMLVRSAKWSWLKAWAMKIARHRGMKKAIVALARRLAVIMHRIWVDGTEFRWTREGAATA

SEQ ID NO: 449916 - protein, 346 aa, unidentified
MSQILSTVAVIGIDIGKNSFHVVGLDGDGAIVLRQKWSRGQVEARLANAPLCLIGMEACVGAHHLSRKLKALGHDARLMPAKYVRPYSKGQKNDFRDAEAIAEAVQRPTMKFVATKTADQLDLQALHRVRERLVSQRTGIINQIRAFLLERGVAVRQGLRFLRAELPRILAAPPEVLSPRMVHLIEGLAEDWRRLDERIDCLSGEITAVARLDAGCERLVSVPGIGPIISSAIVAAIGTGDAFSKGRDFAAWLGLVPKQISTGDRTILGKISKRGNRYLRVLFVQAAWVVLIKPQSWERHGLKRWIEAAKKRLHRNVLAIANKLARIAWAVLARGRAFEVRPAVSA

SEQ ID NO: 449917 - protein, 392 aa, unidentified
MFYLGIDIAKVNHVASLINEDGSVLVKAIKFTNSNEGLQKLIDSISDYDQSQIYCAMEATGTYWLSLFSALTDKGFNVSVFNPYQIKSFRGAYTNRKQKNDVIDSILIANFLNFNGTKQTSLPNDDLLALKNLTRYRSNLVSNISKVKTQVTGILDKVFPEYSDLFSDTFGEASKQILLNCPTPNEVINFNTKKLANLLKKASHGRHSTDKVREVKALAKNSFGIKFTGDACSFEIKQLVNQIIFLENQAHELEVKIKDIYSKLDNHLQSIPGIGEVTAPIILAEIGDINNFSTPSKLTAFAGIDPSENQSGNKKSTDEKTSKRGSPYLRHAIYLSAMVASNNDPIMHDYYIKKRAEGKHHYVALAGVERKLLGIIFHVLKENRDYRPSKSS

SEQ ID NO: 449918 - protein, 370 aa, unidentified
MKKLIMYVGLDVHKNSIEVAFADAGRDGEVRSYGKIDGNLTALDKVIRKLEAKGSELHFAYEAGPCGYEIYRHLSSNGYDCIVVAPSMIPRQSGNRIKTDRRDAQMLARLHRAGELTSIYVPALEDEAMRDLTRAREDAKSVEKKAKQRILAFLLRHGHRYSGKTPWSKAHFRWIAILKMPHPAQQIVLQESLDALSECTERVNRLTDQIQRLLPQWRMLPVAQALQTLRGVSLIVASTTIAELGDLTRFASPVELMSYLGLVPSEHSSGEQTKRGSITKTGNGHVRRVLVEAAWAYRLPARVSRALLLRQEGMSQNVCAISWKAQLRLCNRYKRLLERGKAKQLIITAIARELCGFMWAIAHEVETPSS

SEQ ID NO: 449919 - protein, 413 aa, unidentified
MSKTLLVGIDVHSEKNSCAFTDDRGSRLTKSAFFILNNLPGAEELEKKIEATMEESSFDKLMIATEASSFLDLHLVDYLSNSKSLSRYSPLIYQFNPKLTAGLKKVYADIDKTDDIDPFVIADRLRFGRLPEPYEDNKAYFPLKRLTRYRCHLVNTIAREKNYFLTHLFLKFSSFSTLKPFSNTFGKTSLAVITDFLSVDEIAHMSMEDLVDFVIKEGKNRFKEPEKIAEAVKQAARESYRLRPSLVSSINLILGSTLQNIRALYASLKEVDQAIAQEFKSFPNTLESVKGLGPVYSAGIFVELGNIERFSSQAKVAKFAGLTWRKRQSGKHESEITRMTKTGNRYLRYYLVEAANSLRVHNEEYKAYYQKKYNEVTMHRHKRAVALTARKLVRLVFALLTKRHLWQPLNGSF

SEQ ID NO: 449920 - protein, 321 aa, unidentified
MCPFNLGIDVAKAKLDCALRLPDGKFKSKVVENNASGFQRLTEWLEKQGVATAHVCMEATGVYWEAVAEYLVAKGMVVSVVNPAQIKAHGTSKLVRTKTDPVDARLIAEFCAERHLEPWQAPTPTEQALRAMVLRLESLQIMRTQESNRLEVARDAVKPGITRHIEWLDQEIKTLAKTIRQHLDSDPDLRDKHALLDSIPGLGDRTIATLLAFYADLERFGNARQAAAFAGLDPRHHESGTSVKMKPRMSKVGHAFLRKSLYMPAMVALYKTAWGIRFRERLAAAGKPPKLIIGAMMRKLVHVAFGVLKSGKNFDPALHGC

SEQ ID NO: 449921 - protein, 321 aa, unidentified
MPNKKPSRSWIGIDVSKRLLEVAVHKSDYHFRFPNELAKFPDLISELIALRPARIVLEATGGLEKPLLQTLRAVGLPVVLVNPRQVRDFAKALGQLAKTDRLDARVLAHFAAAIEPPLRPLKTTDDTELDALMGRRNQLSDILGAEKNRRRSAATDAARADIDAHIEWLEQRLKALDEQLKDHLKRSVAWQQKDKILQSVKGIGFVTSVALLADCPELGQLNRHQIAKLAGVAPLNRDSGKQRGTRHIFAGRAPLRAKLYMATLTAIRCNPVIKAFYQRLIARNKLKKVALVACMRKLLTIVNVMIRDNQLWNAKVQPLSP

SEQ ID NO: 449922 - protein, 426 aa, unidentified
MRAIGIDVHRDFCEVAISEGGQLRSAGRVPSTPAELELLAASLCADDEVALETTGNALVIARILEPHVSRVVVASAKELHAISGAKAKTDRRDARTLAKLLAGGLLEGTWLPGEETRALRRRLARRGQLVRQRSRLKNEVHAALYRNLAGAGPASDLFGVAGRRWLAELELPADERETVEGCLRVLDFLGAEVDRLERSIARYALHSSEIRRLVTIPGVSLITAATLVAVIGDVGRFASARRLVGYLGLDPRVRQSGSSPARMGHISKEGAAAARHVLCEAAQAAMRTPGPLRAFGQRVAARRGAQVAVVAVARKLASLAWRLLSSGEDYAYASPSRVALKLRRIELRAGEPPRRRGGATVTLADQRERERETALAAERAYRRLVADRQAGSGSRKGAGATGGRASVKAHVGPGSAADASAPASAL

SEQ ID NO: 449923 - protein, 422 aa, unidentified
MKPEPLSDFSAFVGIDWADKKHDVCLRADVAGKSEFSVLPNKVEDIDTWALKLHKKYPGSIAVAIELLRRPYGLRAAEIRFFCHFSNQSIYTCQIQNSVQTQPRKDDPTDAELAIELLCKHPDRFEPLNPQSKELRALSALTEHRRKLVDDKVRITSRIRSTLKQYYPQVLDWFDRIDTLVFCHFFERWPTLGQVKKARTATLTTFFGNHNMRRQDVLNRRLLSIKISRPLTEDQGVIIPNRLQVLVLVDLLRITLASIKLYDEQINELAINHADYKLFEALPGAGPSLAPRLLVAFGEQRNRFASAQDIQKHSGVAPVSERSGKKCWVHWRWQCPTFLRQTFVEWAAQTINTSFRAGMFYRQQRDKGCTHQAAVRALAYKWIRILFRCWKTNTPYNESIYLKALKRRGSPLMNQVADAISA

SEQ ID NO: 449924 - protein, 341 aa, unidentified
MKRYFVGLDVSKDETAVCLRDDRGDIVTSFKKPTDPDVLLRALSKDLAQIVCVVLETGRMSNWLYDELSRRGLPMVCIDARQAHAVLSQMHNKTDENDAAMLSELARTGFYKKVEVKSRLAQERRALLRAREVSIKMRMNTENTIRGLLASFGIRLPKYLKTYEQRVHKVLEGQTVLSGIIEPLLTLRTEALRQTAILTKDMTRHSRNDEACRRLMTIPGVGAVSAVTFVATIDTPERFKRSRSVGAYIGLTSRRYQSGDIDFGGRISKRGDRMLRTVLYEAANSLLCRVKSGPGQSLKDWAMALKRRSSHKKAVVALARKLSVIMHAIWKDGTEFEAKEA

SEQ ID NO: 449925 - protein, 422 aa, unidentified
MRIIHQRCCGLDVHKKSVTACVLVWDGQTAVEERKKEFGTTRKELGRLRFWLIACKVTIVAMESAGVYWKPVWHVLERQKRFKLKLVNAQHYHGVDGRKTDQIDSSWLAELLQCGLLKSSFIPPQWQRELRDLVRLRVSLLEEKNRIQNRIEKLLEDANLKLGSVASDTLGVSGRRILKAVVAGDKDPGWMADYAKGKLRSKRKQLEEALHGFVTDHHRTLLAMLLRQVETLEADVEFLEADIRHRLAPHQDVIERLMEIPGFGEVTAWTVIAELGLDMSVFGTPRRAASWCGLCPGNRKSAGKRRHGRTRKGNRWMRRGLTQAALGASNTKDSYLRSFYWRIASKRGAKKARIATAHKQLKIAFLIIRDGVRYHDLGSDYFDRRNLDRTKRYLTKRLEGLGFEVSLVAAPNNEPKADSLSC

SEQ ID NO: 449926 - protein, 403 aa, unidentified
MNSVGIDISKGRSTVAVMRPFGEVVISPFEVRHTDSELSKLARRLKSLNGETRVVMEATGNYHAPVAKLLHDAGLYVSVVNAKLVHGYGNNDLRRVKTDRKDAVKLANYGLDRWLTLPRYIPEEDTRLLLKNCYRQYRQYSKVQTILKNNLISLLDTVFPNVNRLFSSPARADGSEKWVDFVAEFWHCRCVSEKSERAFTSKYLRWCRKHGYNFREAKAHTIYAEASGHIGVMPKSETTKLLVEQAVAQLRATSTALAALKHEMQSLASQLPEYPVVMDLFGVGPTLGPQLIAEIGDVRRFYSKKALVAYAGLDAPPNDSGDVTGRHKSMSKVGASSLRRTLFLVMSVYLQNAPLDEPVYQFMDKKRAEGKPYRVYMMASANKFLRIYYATVKAYLESLEHTA

SEQ ID NO: 449927 - protein, 524 aa, unidentified
MPYHVRRIRRDSPKSKPRSIKTLQKPNGVISPRVQKVGGEHFAIVCVDPAKHRSAWMMADYFGNVLIEPQVLQHVGAGFKLAVEQIHQVQQKHDIQDLIVVVERTGNYYLPAKRAFAGAGFETRVVNPFATKQYRMPANPGNKTDETDLFAQHRAAVAGFGLCEFELESPYRELQLRARHRRNLVQQAAALACQIREHLHLGMPGYANLFDRLFESPTPLAIAAACDSPAKLVELGALGLSRHLRKKKIPHRSPSIEKVLAWAAQAINDPIKDGPMHHAIWTDLHELYQHFHQQIAALERRLAGDLVQTPYIRLLAIPGINVVSAAELAAEMGPITRYANANSITGRSGLYPSRHQSDQTDNDRGPLIRHANRRLRCVLMRIADNLACHCNYYRAQADLDDRRGVDKRASRVKIAKRFSRLALACVANDEPMRHSCFQQPDSILEKLRRFHQDHETPVDRLLTDLNAAVGQLPYNTRRHEAKIVAGVLQERAQRRRGASAIGDLLPAVLARLNATEENKCGDRS

SEQ ID NO: 449928 - protein, 322 aa, unidentified
MRYIGIDVSKATFVVAYSSDKGGEIRTFNNTTTGIKQFIGALPKDSSIHCVMEATGNYSAMLLYLLNVAGIAVSMENPLKVKNFAKAMLSTVKTDKSDARLITLYGEKMNPRPFKVQGEAILRLRQKRTVIRQLTKQITAMSNLRGSLACLPVPDKGATHTVDETIKFLEKRRDRLQSELTDLVEVEFSRQLALLTTIKGIGITLATALIITTGGFTYFQNAKQVSRYLGICPTYEQSGTSVNIRGHINRNGDAYTRGLIYVAAWNASRFNAKCGETYTRLRQNGKPGKLAMIAVANKLVRQAFAVVAHDKEYVDGFVSNRH

SEQ ID NO: 449929 - protein, 511 aa, unidentified
MTKKKYILGIKTHGSVTLIRLMFEYLSASLVSKEGRTDIGDTFLRKDNSRLVAYRHLLPIPPLSHEFSKNNFMAKVVKFEEVHSNGAGIDIGSREIFVSIDGEQVVKFKTFTSDYHQCCKYLKENSICCVAMEATGVYWMSLYAVLEEHGIKVCLVHPREVQQVKGRKTDVKDSQWIQKLYSAGILRESIVGEGQLKELRILIRERLDLIEMGSAYVNKMQKYLELMNIKLRNVISQIHGASGLRVIKSILSGERDPKVLANLCHDRILEKKREEVIKSLEGNYHQSYLFLLKENLRLWEEHQQSIKDIEHEIGNLLEKLNRNNQHIEVRSPGKPSRHHHPAIKNLHKIMVQMYGGIDLTSIAGINDSTMLRLLGEIGNDMSRFPSKKHFVSWVGLSPKNKQSGRMKKGLKSKSNNAGLIFRQSAQSLLTSKHNAIGVFMRRLRGRKGVKVTIKAGARKIAEAFYDALTKGINYVEQGCQKYIEQVQQNEIRLMNKLAKKHSFTLIENMQN

SEQ ID NO: 449930 - protein, 359 aa, unidentified
MIVIGADTHKRSHTLAAVREATGRVLGHRTVRARRASFQEMLVWARALEGERIWAIEDCRHVSGALERFLLAHGERVVRVPPKLMSGARSSARERGKSDVIDATAIARAAIREGLETLPIAQLAGPELEVRLLVDHRERLVAQRTRLINDLRWGLHDLWPELEIPPRVLTSPGWQERIGGRLARSSQTTQVRIARDELRRIRELSRTIDALARELGALVRELAPRLLAEPGCGTLTAAKLVGEIAGISRFPSDAKLARLAGAAPIPASSGRSDRHRLDHGGNRQLNCALHRLAVNKGRLDPNAAAYLARKQAEGKTRREALRCLKRYLARRVWQLLQPAPERIVPAVTIHCNTPYSRFS

SEQ ID NO: 449931 - protein, 389 aa, unidentified
MSFSSNALKKKGKSLTFGYNFVAHKIFTERRLAMSNPSKLDFTGQPIYVGLDVHKKSWSVSIFTGHGEYKTFSQPPQVEALVQHLQHHFPGALYYAVYEAGYCGFWIHDQLVMQGVHCTVVNPADVPTKNKEQRRKGDRVDCRKLARGLRNDELEGIYVPSRARLEDRSLIRTRLSMGRKQTRCKNQIKSMLLFYGVEIPEEREMGHWTRRFIRWIEGIRMERASGDMALQIHLEELSHLRQIIAKLNRAILALSRTEEHREWVRFLRTIPGISTLTAMILLMELAEITRFRSIDQLCSYVGLIPDTQGSGDKEHVEGVTQRRHSHLRWLLIEGSWTAVRKDPALMEAFDQYCKRMRKSKAIIKIARKLLNRVRYVLKNQAEYVPCVIE

SEQ ID NO: 449932 - protein, 356 aa, unidentified
MQTQVTKKIDFTGKELFIGLDVHKKSWSVTIVVDGMEHRTFTQPPDPEALQKYLQRSFPGGNYQSAYEAGYCGYGIHRRLNDLGIKNMVINAADIPTTQKDKLHKRDPVDSRKLARGLEKNSLHGIHVLDRDLEELRSLNRTRFYLMRDLRRSKNRIKSFLLYYDIPLPGEFDNNQWTLKFIDWLKEVKMQTSGGQDAFSHLITSYEHHRQQLLILSRIVRLRISQHDKELYDLLRTTSGIGPLTSSALITEIGDINRFPNIDDLASYVGLVPRVRESGETTHTGGITFRCNNFLRVLLVEASWQAIRHDPALMQYYHHHLVNSKGHKVIIKVARKLLNRIRYVMKNRKPYVTGVA

SEQ ID NO: 449933 - protein, 332 aa, unidentified
MNESYLGIDVHKRKCVFVEIDSTGKVLRRNRFDNSKEGVIGFLGSIGRNVHVVVEPTLNYLWLCDYLEPVVGSLHPANPLRVRVIAEAKCKTDKQDAWVLAELLRTNFLPESYYVPREIRGLREAIRQRDHLIKQRVMLKNRVRVLLFRHGYELRARDVGSKRAVAEIATFDLAESVTGMIAQNQRLIGNLNTEIMALEKIIEENCHEVSEVKLLMSIPGIGRLRAATVYAEVVDIKRFRSAKAFASYCGLVPTVHQSGDHFRTGSISREGSALLRRTLVEAALTAHETPSLRGLYYRILFKQNRLKARVAIAHKLALVIYAMWTRQEPFRI

SEQ ID NO: 449934 - protein, 338 aa, unidentified
MEQVTTIGLDIAKRVFQVHGVDASGAVVLRRQLKRGQVVRFFAKLPGCLIGLEACGTAHHWARTLQALGHDVRLIPPAYAKAYVRRNKTDPADAAAICEAVSRPSMRFVPIKSEADQAIAAVHRVRDRLIAQRTMLINMLRSQMAEFGSVVAKGPQHIKELVAALVEPASMPEPLRQALLGLVRLLAALKEQIAELEKQIIGWHKGNERSRRLAQIDGYGPILSSAMAVRVQHPERFACGRDLAAWIGLAPRQNSSGGKIRLGAISKKGDVYLRRLLINGAQAVLNSKRAKEDPWIRNLLEKKPRLVVAVALANKMARIAWAVMVRTTDFRRAPAAAA

SEQ ID NO: 449935 - protein, 407 aa, unidentified
MERPAPDLQTVDYAASRERPWRRATYKWEPAVKNVRFVGLDVHAETIAVAVAELNGEVRSLGVIPNRAESVGRLMRKLGKPEQLRVCYEAGPTGYVLYWQLAQLGVHCEVVAPTLVPVKSGDRVKTDRRDAEKLARCYRAGDLTRVWVPDAAHEALRDLVRARLAAKRDQLRARHRLGKFLLRQGRRAPEGTTSWTGKYLGWVKQQHFEQAAQEATLLDYLHEVEHVAERIMRLERGIDAAVNSMPESLRTVIAGLQCLRGVAKISAVTLVSELGQISRFAHARQLMGYAGMVSREHSSGERIRRGSISKAGNAHLRRIVTEAAWSYRHRPSIGKTLATRQCGSSETVKAIAWRAQHRLHARYRALLARSKTKQKVITALGRELLGFIWAIGVELERAQHQEVRRAA

SEQ ID NO: 449936 - protein, 355 aa, unidentified
MREVRKISFKEKSIFIGIDVHKKSWKVCILCEEIEHKVYTLETSASVLGKYLRRTFPGAKYFSVYEAGFCGFWVHEALKSEGINNIVVNPADVPTTDKEKKRKTDGIDCRKLARSLRNGDLSSIHIPERDKQEDRSLVRLRTLMVKDQTRSKNRIKSVLSTFGIIIPEEKVGSHWSKKYIEYLRQEIKKSATLSHTIEFLLTDLEKNRNMVAEVTRKIRQLSLEPRYLKKVDILRSVVGISILTAMTLLTEFGDFRKYKRLDKLVSYVGITPDERSSGDKENKLSITKRGNKFLKHVIIEAAWTAVRKDPALMLAYKNYSKRMLRTKAIVKIARKLINRIRFVLLNEVEYKLSTL

SEQ ID NO: 449937 - protein, 359 aa, unidentified
MSESMALVGLDVHQAQSVAAVLDPVSGELGVERLRGAPGDVVPVFLERLGRPVRAVYEAGPTGFALAREAVARGLDLRVIAPGSIPRASGDRVKTDRRDAQRLVRLFAAGELSFSFVPGVEEERFRDLVRCIDDARKDLMRCRHRLSKFLLRRGLRFPGRAWTQPHQRWLGKLNFEDALSRAVFVDYCCAIDALVHRRRELIAVLEDQVAGSPHAETVTRLRCFRGINTLSAAGLCAEVGNFERFRKPSLLSGFLGIVPSEYSSSEKRVQGSITKAGATHARRLLVEAAHHYRRRPRVGLELAARQAGQDPRVVQVAWRAQRRLHRRWAHLTGERGKPTGTAAVACARELAASAGRPRP

SEQ ID NO: 449938 - protein, 372 aa, unidentified
MTSIIYVGMDVHTTNYTLCCYSMEDDHFFAEVQVEPDAKNILKYLARIEKQQSRDCRIVCGYEAGCLGYSLYHQLHAHGIDCVILAPTTMMTKPGKRIKTDRRDARLISKCLAFHTYSPVYIPTEVDDAVKEYIRMRDDANSALARVKQQIIAFCIRHGKIHDGKSYWTNKHLEWLSSLDLGNKILSEVLQEYLIRYYQLREQVDMYDMRINELAQAEPYRQKVEKLGCFRGIAAHTALSFCVEVGDFRRFATAQQFASYLGLVPGECSSGDKQQYTGITKAGNSHLRKLLVETAQVFGRSATKSGKSVALKERQAKCDSLTVAYADKANARLKKKYFKIAMRSKVNIAKTAVAREMACFIWGMMTDNISCA

SEQ ID NO: 449939 - protein, 385 aa, unidentified
MKYALGPRPGVPSAGLAAGIDWASADHAVCVVDAAGVAVCRFSVEHTAAGLRDLVQRLARAGVAEVAIERGNGPVVDALLVAGLTVVVISPRQVKNLRSRYGSAGNKDDRFDAYVLADVLRTDRARLRPLIPDTPATVALRQACRARKDLVVHRVAVGNQLRAHLLVSFPAAAGLFCKLESAISLAFLARFDCQERADWLSEKRLAGWLKAAGYSGRTNPAELYQRLTSAPRGATGGQGTISTQVTRALAAVLASLNTQIKALEASIAAQLASHADGHIFTSLPRSGTIRAARLLTEIGDCRARFPDPQALICLAGAAPSTRQSGKHKAVTFRWAVSKQLRDAVCDFADGSRHANAWATKIYNDAIARGKDHPTRSASSPEPGSM

SEQ ID NO: 449940 - protein, 344 aa, unidentified
MKWTGRNEMDPPLCGSTAMSHNEFKKIREPIEPQEVSPMKQEMTVLGIDLAKHVFHAVGMDNTGKIVFRKRLSRHDLMPFIAKLPMVLIGLEACGGAHYWARRFRASGHEVKLMAPQFVKPYVKSNKNDSRDAEAIAEAVTRPTMRFVPAKDVDQQDIQALHRVRERLISERTALVNEVHGLLHEYGIVMPKGVSKFRQAVVGKLESEKDKLTPLSQEMFWKLVEEFAALEEQLAYYQKKLEALATTHPECQRLMTIPGIGPLSATALVAAVSDASAFKNGRQFAAWLGLVPRHKTDRRSQWIRQLVERRGKNRTAVAVANKNARIVWALLTSHQDYQLATGEG

SEQ ID NO: 449941 - protein, 347 aa, unidentified
MKRYVGIDVAQKECALCIVDDTGTILFEGSCATDPDEIVRLIASEVDDVEKIVHESGPLSIWLTRQLVKRGAPVVCIDARAAHKVLSARMNKSDKSDAVGLAQLARTGWYGAVHIKSEASDQLRLMLSARERLIRIRMDIEGQVRGLLKAYGIRLGPVNAGYSRKSFRDQLGTAIKGDQSLQMIFASLITVHETVCLEGTAIDAKVQQLAKDNPLARRLTSIPGVGPIVSLSFIATIDDVARFGKATDVGAYLGLTPRRYQSGETDWSGRISKRGDGTMRKLLYEAANILIQRVSRFSPLKAWAMRLVARRGMKKAIVATARKLAVIMSRIWRDGTTFAWTKEELPA

SEQ ID NO: 449942 - protein, 371 aa, unidentified
MNSIVYVGMDVHKEQYTLCCYSYDTDKVEYKQTIPSDYKLVLKYMEQIRSRYEGEVSFVCGYEAGCLGYSLYHQLKDHAVDCKILAPSTMAITNTHRVKTDKRDAANIARCLAFHTYSEVYVPNNDDNDVKEYIRMRDDQKLYLKKVKQQILAFVLRQGKRFEGGKTYWTIAHLKWLKTLELSDLQREALDEYLLTYEYLTEKISRFDERIEELASVERYEEKVKHMSCLLGIKTHTALSMIVEVGDFERFEKAPKFASFLGLVPSEDSSDTRVNRYSITKAGNSHLRRLLVEAAQSYTRGNVGHKSVALKQRQKGNPPEVIAYADKANERLRRRFYKMTLNKGVNRNVAATAIARELACFIWGMMTEHVS

SEQ ID NO: 449943 - protein, 386 aa, unidentified
MPETEVDTFAGIDVSARELSVALRRGKGEDKPAMAKFSNHPSGHKALIAHLFRGGRRVRVCLEASGNYSLDLALTLQAHRQVEISVINPRRARRFAESLGQRSKTDPVDARVLCEYAARMPWVAWQPPSSVALHLRAVARAIADLAVIHTQQNNRAHASAASQALPVLVVKEMQRHQKYLEQRMTRLRREALRLIAGDSELDRRFRLMLTTTGIAETSALQILGELAVLPDILDARQWVAFSGLDPRLFKSGKSVEKRPRISRAGSRHLRRALYMPALVALRRSLSTMLLSKLTSSRQSSAASRRSGYAKAAACSVCHVPHQSTVRRIEAVLRSRDGWPCHCCLCLTDPKKREVLLHLSREKKIEFQERIYNQHIGSFLPSLVGLA

SEQ ID NO: 449944 - protein, 464 aa, unidentified
MKKKQNKPSPHGSEKEIEGFPVLRPNVAGIDLGSTTHWVCAPRPDGSGREVETFGATTPDLERLAEWLKQRHVESVAMESTGVYWIAPHEVFEQHGFEVLLVQTRELANVPGRKKSDRIDCRWIQRLHSCGLLHGSFRPAEEICMLRTLVRDKGTLIAERADWIRRMQKSLDQMNVRVHRAVTDIDGATGMAIIRAIVKGERDPARLAQLRDPRCKNSVEEITKQLSGHWREDHLFSLEQGLKMFDAISERIQVYEQEIFRKLSELERTECHGQTAPPLQNQNKANLVRKHGEEPMRQSLFRMNGVDLTAIDGIGVETVQVVVSEYGPDLSRFPTEKHFVSHALLAPRTAVTGGKPVKTKKKRGSASTRVSAALRMAALCLSHSQTALGAYYRQVARRSGGDVAVFATARKLATWIYRLLRWGHAYVDEGAAAYELRYQKAHLARLGTIAAQLGFELTPKANPV

SEQ ID NO: 449945 - protein, 392 aa, unidentified
MFFVGIDIGKNNHVASMMDESGKVVFKAFSFPNTSDGGEALFSKLSLYSSDTASFEVGMEATGHYWLAVYSFLYEKGFIQHVINPIQTDGWRKGKEIRRRKNDTIDSVIIADLIRYGQFVETHLAGEDLFSLRNLTRFRSYLTGSIGDLKRKVVCVLDQVFPEYQSVFSDIFGKTSKEILMQFSSPMDFEEISSGTLAGLLAKLSRQKIGGEKAEQLKNAARHSFGVTFAQDSFTFQLKALLSQISFIEDQIKDTDAEISSIMEKLDSPVTTITGIGKVTGAAIISEIGDISKFDSPKKLVAYAGLDASVSQSGEFEATHNVMSKRGSPYLRKAIFQAALVASFKDPVLSVFYQKKRAEGKHHLTCVGAVSRKMCNIIYAVLKNRQPYVPKA

SEQ ID NO: 449946 - protein, 346 aa, unidentified
MSEIIRIGMDTSKYIFQLHGVDASEQVVLRKRLGRNGMFSFFAKLPPTVVVIEACGAAHCLARELGKLGHTVKLIAPQLVKPYVARNKNDGRDAEGLCEASSRPRMRYVPVKTAEQQAALMLLGVRDQLVMRRTQLSNTIRGHAAEFGLIEAKGLDKLASLLAAIEQGDSVPVLARELFAMLARQYAQVQVELKAIEAKLLAWHRANALSRRLAEIPGVGPITAAALVMKAPDPHAFRSGRLFAAWLGLTPKDHSTAGKTRLGKITRAGDERLRQLLVVGATSVVKQANGKHRRGSLWLLELVKRKTPKQAAVALANKIARIAWKLMTTGESYDGARMPKASAAAA

SEQ ID NO: 449947 - protein, 437 aa, unidentified
MAVSLRTWAQRSPIHLEDEMEPIVERCCGLDVHQATVVACLLIGQAHQKPKKEVRSFGTKTRELMELRDWLRENSCTHVGMESTGIYWKPVHSILEDDFEVIIGNAHHIKNVPGRKTDVKDSEWIADLLRHGLIAKSFVPPKPIRELRDLLRYRRKLVESRTAERNRLQKLLETANIKLGSVASDVFGVSGMAMLNALVRGDSTPQQMAQLAKKRLRQKLAELELALEGKFEEHHRFLLKMQLSRLEQVDEHLAQLDTRIDAKIAPYQEHRTRLLKIPGVDRVLATVIIAEVGTDMSVFKSAGHLAAWAGVCPGNNESAGKRKRSDTRRGNVHLMTALVEAAHGASATKNTYLKDKFHRLKARRGYLRAAVAIGHKILTAVYVMFSKGVEYRDLGTGYLDAIDSRRISGNLVRRLQRLGYDVTLSPRAQTAGAPVEA

SEQ ID NO: 449948 - protein, 330 aa, unidentified
MKNWEFTLGVDVSKNTLDISCAELNKHLRIENGTAGFKIFLKWCKELKMELSKCFLVMEFTGGYEYKLLQFCESKAIQHTRISGLEIKRSLGITRGKNDKVDSARIAQYGEEKHRSLKAAKPLNLVIISLRQLLGFRKRLVRENAGYQASIKERQHMYKVSDQDFIVKTLRQKHKTNTKAIAEAEIKLMEIVASDVNLSRNYKLITSIKGIGKVNALMTIAYTENFISFSNPRSYAVYVGVVPFDYSSGTSIRGRKKISHIANKELKQELNQAAKSAMLYDKEMRAYGENKMKTKSYKIVLNNIKFKLILRMFAVVKKGEKYVENYRQAA

SEQ ID NO: 449949 - protein, 380 aa, unidentified
MIYIGIDVAKDKHDCFITNSEGEVLFNAFTIPNNADGFHDLFQKISSLTNDFSNVKVGLEATGHYNYNLLGFLIDKGLPTFVINPLHTNLFRKSLSLRQTKTDKVDAHTIALMMMSGVNLQSYSNTSYHNEELKSLTRYRFDKVQERAKLKTSISRLVNILFPELEKLVPSLHMVSIYALLAEFPSSAQIASCHLTRLTNLLANASKGHYNKEKAIEIRNAAKHSIGSNMPAKSLELKHTIRLIQELTSEIDEIECSIKSIMDEIRSPILSIPGINYRMGAMIIAEIGDFNRFSSPDKILAYAGLSPSTYQSGQLDGCYSHMEKRGSRYLRYALFNATKFVCIWDNQFSAYLAKKRSEGKHYNVAISHACLLYTSPSPRD

SEQ ID NO: 449950 - protein, 343 aa, unidentified
MAIVILGIDLGKNICSLVGVNEDGAVVLRRRMRRQTVLTFAAKLPSCVVAMEACCGAHHLGRLLTAQGHTVKLMSPEYVRPYVKAQKNDDRDAEGIAEAASRPTMRFVDLKSQEQLDLQSLHRVRSRLVGVRRTLLNQLRASLLERGHIFPQGRRRFEAAIDTLVADPAYEISSRIRQLVIDIRSEWQALDSRIEALNGEFVAIARHDETARRLVTIPGVGVLNATALVAAVGNGAAFRRGRDLGAWLGLVPKQHTTGGKPKLLGISKRGNKYLRMLFIHGARAAMPSLSASQSPLGEWLRGLLARTHRNIAIVALANKLARIAWATLRRKTSFDLRHLAVAG

SEQ ID NO: 449951 - protein, 356 aa, unidentified
MDKVIREGAVRVGVDLAKRVIQVHALDAGGRVVTSRALARDKFIEWCVMLPAGCIVAMEASSSAHHWARKLIALGLDAKIISAQLVSPYRSQGATGKNDANDAAAICEAASRPTMRFIPVKSIEQQSMLCVHRLREGIKEDRTACINRVRGLLAEFGLVFPQGPRELQGVLGEVLEDASNELGTLARLTLQRAQSQWSELDAHLAWCDERIAAHGQHNAAVKTAASLLGIGPVTASAVVATVGDFKQFKNGAQFGAWVGLTPRQHSSGGKSKLGGITKRGDTYLRTLLIQGAKSAVMTAHRRTDKISQWAVALRERSGWQKAAVALANKNARILWAVMTKGEAFDANHLSVKPAGA

SEQ ID NO: 449952 - protein, 349 aa, unidentified
MEYVQINKKYYCGIDLHADVMYVCVLDKNGVLQFHHEMPTDFARLLKHLKPYLPNIAICAESTFNWYWLADGCAKHEIPFFLGHALYMKLIHGGKAKNDRIDSKSLADLLRTGFFPPAYPYPEKMRATRDLLRRRHRFSMLRAGFLRHIKILLYQQGHVALPSLNNEKAEQLREVFKPFKVSAEVQLSIDYDFGMIEHLDTILPKMEWTILKSAKHHDSHALALLRTLRGLGPILSLTILYEIHTVKRFLTVQKFSSYARVVKVERSSHGKNLGAKNSKIGNPYLRWAFGQLATNGQRFYPETKDYTQQLIKKLGKRKAYSLLAHKFAVAVYYMLKNKTAFDVKRFVAA

SEQ ID NO: 449953 - protein, 354 aa, unidentified
MKKIFIGIDFSKEKFDATLIKADGLKESAPSVHEVFDNKVSGYRRLVRWVKAHAETLMAEAWLFCGENTGGYSIGLSNYLYASGYDMWLESAYKIKHSSGIQRVKNDKADSRAIAEYAMRNYDKMIIHKPQSASLTCLREVFLYRHSLVRQKVSLQVRRDEKRLTQEKSDVRAFMSFTSKHLITEVNKAIAKCDQKIKEIIASDDELREIFDIITSMPGIGVQNATCLMVYTDNFQKFDLDSRKIACYYGIAPFGRQSGTSVNSRPQVSPFANRRIKSLLSQAALAAIKFDINVHSYYLRLIERGKHPLLIHNNIKNKMLHILVAMVRDRVKYNPDNVYRTSNEVSLAPQVLNI

SEQ ID NO: 449954 - protein, 398 aa, unidentified
MKHNILLYIGIDVSKDKHDICIKSNDGNVLKRFQIKNTNKDLNKLYTTVDKLKSNAGENTDVFFGMEATGVYCFPLYSALKRDGYPVKLYNPIQTNAYRKMEIRKTKTDSIDSAIIADMLRYQEPPVATAIDNLVLYQLRELCRVRQRNVEKRTKCKIQFVRNLDMVWPGYTSVIKSVYGKTSMALLNQYSVPSNVVAEPFEEIYELIKQVSLSQMTRERAEEIYNHAGNTLTTPEIDSIVSIEIKTLISEIEMYDVQIQALEKMIKQLMEQVESKITTIPGIGNILGAMILGEIGDIDKFSNAKKLVAFAGLDPVIHQSGNFKNSTGPISKRGSPLLRSALFIAANVARQNDENLGAYYNGKIENGKHYKSAVNATAAKLLRIVYWVLKNDKEYKVQ

SEQ ID NO: 449955 - protein, 419 aa, unidentified
MGKIIENCAGIDIGKRFLLCCVLTGGAAEEPRSETLRFEVTVAALQRLREWLTNKKVSHVVMESTGSYWIPVFNILEDHFVIVLANPEEVKNRKGHKTDRKDAEHLADLLRHDHVRSSYIPPKPVRDLRDLTRRRLQLTEDATRERNRVQKLLEHVNVKIGNVLSDIFGVSGLDMLLALLSGQATPEEIAQLARGQAKRKIPQVIEALEGHRMSEHERLLIRSCLRHLACLEEEVEELDGEILRRMQMPPFEAAYRLMQTLPGVGQLAAASILAETGTDMAPFPTADQMASWAGLCPGNRESAGIQKGGQTTHGNSYLRTALVQCAWAATRKQGSVFQARFQQLSPRRGQKRAIVAVAHQMLIIAYCMLKQGVPFRDAESVPRQRRRKRRAHHHLCCLRRLGLSVRVVADSNGVLGEKA

SEQ ID NO: 449956 - protein, 380 aa, unidentified
MEYCTTIGADVSDRTTKICVMTKAEGGERRIVVETTCATTKAGFEEAFAKFDRSWPVVFETGTHCRWMDRLFRKMGFKTIVGNPGKIPSITKSNTKNDRNDARELARLALADPTMLHPVFLRDEVYQQMLRFHHARNMLISQRTQTINQIRGFAKSMGHRIECSSTEKFHELSKADWPREIEECAWPLMGSLKTINLKIKAYDKLIARLAERPEFKPMVERVRVVYGVGIIGSTVFVAAIGGRPDRFDHTRDIGAYLGMIPKQDQSGDDDKQLHITHAGADIVRTALVECAGVAMMSNAKDTDLKLKGLRIAMRGGRIARKKAKVAVARGLAVTMLALLQHPEREYVPLSEEGKKGFERYRAELEYLTMQKASRKEKKVA

SEQ ID NO: 449957 - protein, 372 aa, unidentified
MQVLYPRCCGLDIHKKTVVACMLLTDPDGTNRRIVRTFGTMTVDLLALGDWLSLHEVTHVAMESTGVLWRPIFTVLEEGRSLLLVNAQHIKAVPGRKTDVKDSEWLADLLRHGLLRPSFIPPPSIRVLRDLTRYRKNLVELRTQEINRVHKVLETANIKLGAVASNVVGVSGRRMLEAIKQGESDPEVLAELAKGRLREKLPALRLALDGRVQAHHQRLIGELLDHLDYLDRAIHRVEVDIAALVAKEEKAVELLLTLPATGPVTAAAIIAEIGTDMSRFPSAAHLASWAGVCPGNKRSAGKQLSGASTKGNKPRKHDPVRNRGHDCSHTGDVSACALSAHRTSTGQAARYDGGGPQPPGEHLLHVARSETL

SEQ ID NO: 449958 - protein, 464 aa, unidentified
MTTGKMLWRNRKERKEWGRRLQSEDPGLEVVHPHAAGIDVGNSAHYVAVRPDRDPKPVRRFECFTADLHRLADWLQSCGVKTVAMQSTGVYWIPLYEILEERGLEVYLVNARHTKNLPGRKSDVQESQWLLKLHTYGLLNNSFQPVSEIRVLRTYWRQRAEHVREAATCIQRMQKALTQMNVQLANVISDISGLTGQAIVRAIVAGQHDPRELAALSDPRVHASQEEIAKSLEGNWRPELLFVLQQEVDMYDTYHKRITECDQRLQKHLGSFKNARSLQTPKEKSKTKKPAAKNAPCFDLSSELQRVTGVDLTRIDGIDVMVAQTLLSEVGLDMSRWKTESHFASWLGLCPDNRITGDKVRSRGTRRVVNRAATALRQAANTLMRSRSYLGAQYRRLRTKLGAPKAITAMAHRLARLVYRMLKYGQAYVDKGTEYYEERFRQQQIQLLRKRAAKLGFQIAAIHA

SEQ ID NO: 449959 - protein, 355 aa, unidentified
MQSYKISFKGQNIYVGIDVHLKTWHVTTLTESGCKYSFAQHADAKELFDRLNKKFPGAHFKSAYEAGFCGFSAHYALTELGFENIVVHAADIPTTGKEKALKTDAVDSEKIARSLKRDELAGIYIKDKDYMDDTNLMRLRQRLIKDLSRQKNRTKHLLYTQGVTYPERFSKNGTHWSRNFMKWLRKEVVLLSGEKRTLMLLCDQVEHVRRDILAVTREIRRLSTSDKYQENFSLLSSVPGFGLITSMSMLTEFDNNPMRFPNERKFVAMLGLIPTCHDSGQKKVNGEKINRGNKQLGPLIVEASWVAIHRDYQLGGYYTNCCQGMKPQKAIIKVARKLACKAYAVMKTKKPYVLS

SEQ ID NO: 449960 - protein, 408 aa, unidentified
MAQIIAGVDTHKDTHYAAVISLHGEHLSAVQFPATKAGYQALTAFITCQGELLRVGIEGTNSYGAGLTRHLQARNIEVVEVIRPAKVVRRMKGKSDAIDAYTAAHTALTHQDVVTPKTSIGTVEAIRVIHAGRRSALKAHAEVITQIKSLLVTAPEKVRAQYQSLSTKKLVGQLAASHTHVRADCVETATRSTLKRLAKRYIYLDEEITIFEGELQALVEQVNTALTAVRGVSTIIASQLLITAGDNPERLHSEAAFAALCGVSPLPASSGQTNRFRLNRGGDRAANSALYQIALVRMASDPVTKIYVAKRTADGKTKKEILRCLKRAIAREVFHLLTNPQPVIHGKDLRAFRLGIGLTLTAAAQFLDCDLNRLSRLERGITKDQKRALEYQKWLTDYQQLQTLKTVA

SEQ ID NO: 449961 - protein, 431 aa, unidentified
MTRYVGLDVHKRSITACTLNYEGQPVKRTTFACTRTAIARFAKEQMERGDVVALEATTNSWAVAEIFEPFVARVVVSNPLKTKAIAESTVKTDKVDAQTLAQLLRAGFLPEVWHPSGRFQLVRQLTVFYASLINDRTRVKNRLQSLFHRRLIHCPISGLFSQAGLLWMDSLELSEHDRLILELAKQQVFDLNAKIQKVEQQIAKLAQNDHAIKLLMTLPGVSLMTAACLAGAIGEVTRFRDGDHLAAYFGLVPRVKQSADHCYYGSITKVGNNQVRKMLVLAARNLRSHPGPMGAFFRRMCRRKHVNVAATATARKLVTVAYMILKSGEPYRYAQPATTSQKFGQLHMLATGNKRAPVRSKAQPDELVPPAGYRIQRRPSLDQVLIRDGLQPIQWRAVPQGEQSVIRKFADYIEGTRKPAATLRKDSKTDS

SEQ ID NO: 449962 - protein, 377 aa, unidentified
MMRVKFVGLDVHAETIAVAIAEQEGEVRSLGVIGNREESVRKLVKKLGPVEDLRFCYEAGPTGYALYWQLSALGAKCEVVAPTLVPMKSGDRVKTDRRDALKLARNHRAGELTAVWVPDAAHEALRDLVRAREAAKKDQLRARHRLSKYLLRQGRRPPMGVKPWTATYLEWVKREVHFEQRAQEATLVDYLHEVEHVAARIARLDGEIGEAVKLAPSKMRAVIEALQALRGIAQISAVTIVAELGEVSRFGRARQLMGYGGIVASEHSSGEYTRRGGITKTGNAHLRRIVVESAWAYRHRPSVGASLRHRQEIVSEEVKEIAWKAQHRLHGRYRKLMARGKNKTVVVTAVGRELLGFIWAIGVKVEAAHEQSLQQAA

SEQ ID NO: 449963 - protein, 371 aa, unidentified
MNSILYVGMDVHKENYTLCCYSFDRDKVEYRQTVPSDYRLILKYLEQVRRKYPEEVEFICGYEAGCLGYSLYHQLTDHGVKCIILAPTTMGITNTNRVKTDRKDAANIARCLAFHTYSAVYVPGCEDNAVKKYLRMRDDQKLALKKIKQQITAFVLRLGKQYTGGKSLWTENHLKWLRGLDLTLLEKETLQEYLITYDYLTDKLERLDARIEELARNERYGERVRRLGCFIGIKPHTALSLLVEVGDFRRFEKAPNFAGFLGLVPGEDSSGGGRNRLAITKAGNSHLRRLLVESSQSYSRGTIGFKSKELKKRQEGNPPEVVAYADRANERLRRRYYRMTLKNGAKRNGAIVAVARELACFIWGIMTDEIA

SEQ ID NO: 449964 - protein, 458 aa, unidentified
MVQTKRPRSRREMPAVHPDAAAIDVGATMHVVAVPPDRDPEPVRTFGTFTADLHRLADWLRACRIKSVVMESTGVYWIPIFEILEQKGFDVQLVNARDAKHVPGRKTDVSDAEWLQRLHEHGLLRGSFQPKGEVKALRSYLRQRERLLDSAATYIQHMQKALMQMNVQLHHVVSDITGVTGMRIVRAIVAGERDAATLAAFRDSRCKEPVETIREALIGNYREEHVFALTQALELYDIHQKKVAECDKRIETVLEQLKATRPTPAKPLPAPRHKTKQSNAPNFAARDALYAVLGIDLTQIHGLGPYLALKLVGECGTDLSAWPSAKHFTSWLSLAPRNKISGGKILSSATRRSNNRAASLLRLAAVTVGRTETALGAFFRRLSARIGKAKAITATARKIAVLFYNALRHGMKYTDPGAAYYEERYRQRVLSNLQRRAKAFGYVLQAAAPQAPQAVGVS

SEQ ID NO: 449965 - protein, 344 aa, unidentified
MQHYVGLDVSVKETSVCIIDKAGKVIREAKVATEPVAILAVLTEEALAIERIGLEAGPLSQWLYSALAEAGLPVICVETRHMKAALSAQINKSDRNDARGIAQMMRVGLYRPVHVKTLASQKRRMLLTSRQLLQAKALDIENDLRGTLRNFGLKVGMVGTVKFEARIRELVADHPDLAAIVEPLLIARRVLREQLDVLHRQLLEIVRHDEVCRRLMTTPGVGPVVALTFRATVDVPSRFTSSKSVGAAFGLTPRRQQSGEIDRMGGISKCGDAMMREMLFEAALVLMTHSGKWSWLKAWGMKIARHRGMKRAIVAVARRLAVIMHRMWMDGTEFRWSSKEVAAA

SEQ ID NO: 449966 - protein, 381 aa, unidentified
MYLSGKNLNPILMKQYCGLDIHKDSVFACIINESGVLKEKKFSTLTSDLYALRSMLELYDVSEVAMESTGIYWIPIWRMLVDSFELKLVNPLFIKQLPGRKTDVRDAHWIALVLMKGLAYGSYVPAQKIQTLRQYERRYSALNKRIVHTEQCIDMQLQRCNIRFSNYISDIGSQAMRKVVKSLIQGIDSPDELVKCVHTRTKNRHGIPIIQESLNGVVSQVDRDMLTLYMEELELYERQQEECQMHMVQICQESYSLELSLLITIPGIKIASAMTILSELGNDLAAFRTSSNLVGWAGLRPRNDESAGKIKSRKTMHGNKFLRVILVQCAWASTRNKTSRLGHKYALLVKRMAPQKALVAVARKLLVIIWNVLAHKEPYRA

SEQ ID NO: 449967 - protein, 351 aa, unidentified
MDIIGLDLHQRESQLCLCDQDGAITECRIVTSRERFTAVLGTRARAKILLEASTESEWVARHLESLGHEVLVADPNYAPMYATRSRRTKTDRRDARTLMDACQTGAYRLAHRLSDPRRHVRAELAVRDALVRTRTRYVALAKTLVRRDGLRVASSESHVVAQRISALSLSPALAAELQPLFTVLVPLNEQIAAADGRIATLAATDPLVARLATAPAIGPVTASAVVATIDDITRFRSAHQFEAYLGLVPGERSSGEKRHVGPITKARNSRVRWLLVEAAWRLLRTKSVEAAALRAWAHRVAGRRGKKIAVVALARRLAGILYAMWRDGVPFDASRIRGPRIAAVEGTACAG

SEQ ID NO: 449968 - protein, 404 aa, unidentified
MSVHAAPVTLSTIVVAVDVGKTSAMLSATDSARKRLLGPVEFAMSRSGLAAAVHRVVAIVPPSAQVKVGVEAAGHYHRPVLDYRWPVGWEVLEFNPAHVAEQRRVAGRRRIKTDAIDLEAITELALAGRGQLITDRAVGIGELAAWATHRSRRVATRSATKNQLLGQLDRAFPGLTLALPDVLGTKIGRLVAAEFADPARLSALGVSRLIRFAVARDVAVRRPVAERVVSAARDALPTRDAVVARRVLAADLGLLADLDTQIQSAECELAALLPLSPYATLTSVPGWGVVRVSNYAAALGDPDRWPGPRQIYRASGLSPMQYESAGKRRDGKISREGSVALRRALIDLGIGLWLTEPAAKAYAGELKSRGKHGGIITCALAHRATRIAYALVRDHASYDPARWT

SEQ ID NO: 449969 - protein, 409 aa, unidentified
MEVIVERVAALDVHKASVTACVRVPDGAGGREPHLAEFATTVRGLLTLRDWLAAYGVSQVVMEATGVYWKPVWHLLEDDFELMLVNARHVKQVPGRKTDMSDAAWLCQLAEAGLLKANFVPPKPIRDLRQLTRYRKTQIAERQREAQRLHKALEDSNVKLDCVASDLLGVSGRAMLDALVAGTTDPEVLAELAKGRLRQKLPQLKEALEGRFNDLHALLIGAILAHLDFLDEQIDRLSEAIEERVAPFAQAVELLCTIPGVQRRSAEVIIAEIGPDMTVFPSARHLASWAGQCPGNDRSAGKQRSGRTRKGSRWLNAALKDAAMAAIRTRDSYLRALYERQRTRIGHGKAIGAVKHSLLVAAWHMLSTGELYNDLGGDYYRRRDPARTTKRLVAQLERLGHTVTLQEAA

SEQ ID NO: 449970 - protein, 340 aa, unidentified
MDYFAGLDVSVKETSVCIVDDAGKIVREARVASEPEALLQVLTLYRFKRVGLEAGPLSQWLYSVLAEAGLPVICVETRHMRAVLRAQINKTDRNDARGIAQMMRAGLYRPVHVKTLRSQKLRMLLTHRKLLQSKAIAIENDLRATLRNFGLKVGMVGTVKFEARIKELVENLPDLAILVEPLLTVRRVLREQITVLHRRLLAIVRDDDVCRRLMTVPGVGPVVALTFRVTVDVPARFRNSKAVGAVFGLTPSKYQSGESDRTGGISRCGDEMMRAMLYEAAQILLVRSAKWSWLKAWAMKIARHRGMKKAIVALARRLAVIMHRMWVDGTEFRWTREAAA

SEQ ID NO: 449971 - protein, 348 aa, unidentified
MTTMTERKRRVTGGVDTHRDVNVVAALDERGSELGVQSFATTPAGYRAALRWLRRFGTLEKVGVEGTGSYGAGLTRYLHSEGIEVIEISCPNRQRRRSHGKSDPVDAIAAAKAVLSGEAVIEPKTRTGKVEAIRALRTSDRSARHARVKALNQMRALLLTGPEELREQFRGTTPWRMVRIAARLRPGDPTTAVGATKYSLRLLARRVLELEAEMAELKSILRPLVASTAPELVSRHGVGTDTAGALLVAAGDNPERLSDERSFAHYCGVSPVDASSGTIVRKRLNRGGNRFANEALWRIVMVRMVSDPATRLYMERRVKEGKSKREAMRCLKRYVARELYPLVASIGP

SEQ ID NO: 449972 - protein, 357 aa, unidentified
MNFIGIDLHKKTISVCVVNQERKVLKRRTLCCAEPERIVAFFREWGEFRAVVEATASYEWLWQLLEPLAQGLVLAHPGKLRVIAESKNKSDKLDAQVLAEFLALDMIPPAYRPTPRQRQHRTLVRQRVFVKKNLTRVRNKIRRVLSNYNADRPDLFTKAGLTYLQEAKKKVSAADQFVLDQLLEEWHYHRRQFQAVGRQLQAFARQAPLKEKEIRAVLRSMPSVGPTTVEVVLSEIGDIARFRSNKRVVAYAGLAPGQRESAGRKKELGITKQGSGLLRWVLVQTAWRTLRCSLRWRSVYENLKKRRGSKKAIVAVARRLLTVMAALWRTGQRYRHAAQDGAPTVPKARRARRAAQA

SEQ ID NO: 449973 - protein, 504 aa, unidentified
MDWFGFGWRASEVGHRGKRRLAPVDKSAPEVIPDAEHELVIERVAAVDVAKAAGKVCVRLPAKTGRRFSRVWDVPARTGAITELGEQLVELGVEKITVESTSDYWRIWYYLLEAAGLSVQLVNARDVKNVPGRPKTDKLDAVWLAKLTEKGLLRPSFVPPAEIRRLRDYTRLREDLTHERTRYWQRLEKLLEDALIKVSVVASRLDTMSTRDMIEALIAGERDPRRLAELARGRMKAKRSELITALDGRFDDHHAELARMLLAQIDALSAQINTLTGRIEDLIAELPEAAAVDHGGGDDTDTAAPDAGDGPDAGPPPARGGAGLTGGTPRRVDPAIEAECARLSAIERLDEITGVGEHNAQVIIAETGLDMTRFPTPAHLVAWAKLCPRTIQSGPVTRSGRAGKGNPYLKGALGQAAAAAAKTDTFLGQRYRRIVKRRGKLKALVAVARSILVIVWHLLADPLARFHDLGPDYHARRIDIERRMRNHIAQLTALGYRVTVEPAA

SEQ ID NO: 449974 - protein, 431 aa, unidentified
MNSSLNNDNTQNNYAAFIAIDWADQKHAFCLKVAGETKKETGTLEQKPEVIGPWIAKLRERFGGRAVAVALEQSRGALIHALLAYDFIVLYPIHPTTVARFREAFKFSGAKSDPLDTDQILEILTKHLELLKPLHPDTEQTRLLGRLVQDRRKAVNLRTSHIQALLACLKEYFPQAIELCNGNLSSRLAADLLAKWPTLEAFQQAKPSTLKRFYYGHNIRSPEVIEKVLSLATTAKALTTDPAILESGRRLAQMHAQLIQTLNPVIDGYDQRIEKVFHDHPEFPLFSKLPGAGAVMAPRLLSFFGTDRSRYPNPQNAQTFCGISPVSKSSGKTRVVYFRRACPKFQRQSFHEFARLSVTSCQWARNYVDHYTAKGKRYNTVIRALAFKWIRILFRCWKDRTPYDDNKYMEILKKRGSIFATLHLEQKNENC

SEQ ID NO: 449975 - protein, 348 aa, unidentified
MLADQLDYVVGVDPHRDLHALAVVDVVSGAVVFEATVAASSNGYAHALKLADQHAAGRRAFAVEGTGSFGAGLTRFLTGQGERVLEVGRLRRERRSGGKTDALDAIRAARAVLAQGRPATPRASGEREAVRALMAAREGAVNARRAGLCQLQDLLVTTPEPLRSELRPLTRARLLRRLAATRPQQRGHDPELRGALLALRSVARRVLQLTAEERELAREIETLTRKLAPQLLDQPGVGPLAAAQLLLSWSHPGRITSEAAFARLAGAAPIPASSGQTIRYRLDRSGDRRLNRALHMILVTRRRTHRPTIAYITRRTEEGKSRREANRCLKRYLARNLYRLLENPPMPT

SEQ ID NO: 449976 - protein, 458 aa, unidentified
MRPKERRDSGQSDLFKARLDQIVDLGHPLARLAATIDWRFLEERFGAVYTDKPGQPPLPTRLMAGLSILKHAHDLSDEELCARWIENPYFQLFCDGMDGPGASVRCISRPSEGLDMSAIAIIGLDIAKNVFQVHGADADGAPMLRRKLRRGQILAFFGSLPPCLVALEACFTAHYWAREIAKHGHEVRMIPPQYVKPFVKRNKTDSADAEAICEAAGRPTMRFVAVKNIHQQSVLALHRARDLLVRQRTKLIQALRGYLGEFGLVAPKGAWNVTRLEGLLSDAEGALVPDLLKEVATVMIAQIRDFDDRINHLHDRLIAWHRANEVSRRLATVPGIGPVTASLISASVNDAAQFRSGRHFAAWIGLVPREHSTGGRQQLGGISKRGNPQMRRLLIVGAHAVLRWTRRGHGMPSAWLTALMGRRHPNVVAVAIANKLARIAWAIMTYGTSFSPQIARAN

SEQ ID NO: 449977 - protein, 415 aa, unidentified
MLKIVYRVCCGIDVHKTFVVACIASTNSEGVTTYKNHRFSTFTKGLRELAEWLKVNSCSDVCMESTGKYWLPVYNILEPACKIVLAHPKYVKAIRGKKTDKKDAKWIADIFKHDLVSGSFIPPLVIRQLRDLMRYRYKLICLMSSEKARTQNCLTVSNIQIANVVSDTFGKSAQAIIAKILENPLDTGFDIAPLIHGSMMEKIPQLELAVDGLITPEQAEKMKIIKQHFDSLMLCKLNLESVILGIAKPYLEQIQLVLSVPGINNPFTAIAIIAEIGVDMSVFMTSKHLCSWAGLTPQNNESAGKKKTTRVSRAGAYIKPLLVQCANAVVTSDKHPEIRNRYLALKKRRGHKKAIIAIARLMLTAIYQMLKKNEPYNAELYRKADVLPNNREVSVEQAIFILQRQGFMITKADAG

SEQ ID NO: 449978 - protein, 480 aa, unidentified
MENNTSAAGKTPRLTRKQRKGLGRRMWSENPGLEVVHRDAAGIDIGSREHYVAVGPDRDPEPVQTFGCFTAELQRLAEFLKKCGIKTVVMQSTGVYWIPVYDVLEQAGLEVCLVNARDTKNLPGRKSDVQECQWLLKLHTYGLLRKSFRPAPEIRALRTCWRERAGYVQQAGSCIQRMHKALTEMNVQLGTVLSDLSGTTGMSILRSIVAGERDGRKLAELRDPHVKASAETIAQSLEGTWRPEQLAILKRQLADWDHVQQQMAACDRDLQEMMKRMPDGIVAPLAPTATGNPPQKRRRKKNGKSSRNAPQFDMESELKRMTGVDLTRIDGVKANTIQTVITEAGLDMSKWPTEQHFVSWIGLSPRNDLSGGKVLNRKTRKVVSRLATALRMAATTLRESDSYLGAQFRRFRARLGAPKAITAMGAKLARLIYRMLRYGQEYVDRGTAHYEEKHRKQQLQFLAKKAAQHGFTLVEAGTSA

SEQ ID NO: 449979 - protein, 441 aa, unidentified
MAMRKREEDEVFPNAAGIDVGGSSHWVAVPRQGDAEPVREFGAMTDDLNAMADWLLSCGVDTVALESTGVYWIPVYEVLERRGLAVWLVDARQMKYVPGRKSDVQDCQWLQKLMSLGLLRAAWRPGDEVCVVRAVVRQREVLLAEQASWVQRMQKALVQMNLQLTEVLTDVMGMTGQAIVRAIVAGERDPKVLARHRHGRLKASAAEIERALTGNWREEHLFVLGQALAMVDSLAQRILECDAKTEALLLPLGCHEVELDGPGKRRGTNTPGFDARTALARWAGVDLTRINGLAVTTVMTILSEIGPDLSRFANVKHFCSWLGLCPGTKVSGGKVLSARTRRSTNRVRQALKLAAMSLSRNDSALGAFYRRLCSRMDKPRANTAVAHKLARMVYFMLTRGEAFVDQGQQHYEEQQRQRSIDALRRRATVLGFQITPAAQTP

SEQ ID NO: 449980 - protein, 342 aa, unidentified
MSEELYIGVDVSKKWLDLAYYDGVDVDWKQGHIRVDNNQTGFNQIGKWLKKLGMTVNRVLFCMEYTGLYCQELREWLEREGIVYGMVNPRKMHRFEPDLGSDERALDRIKTDEMDSFRIAMYCEKHSRKIKSQPSHLPAPAYFKLKRLLVERRQYVTCSALYKGQLHDCCAYDSDGSVMRKKETLKSLKEHIRYTEEEMLHVIAEDGAIKRNFDLLRSITGIGIVVATETIILTENFTAITNPRRYACYVGIAPAKRESGDSVRGGNHVSRKGFTQAKADLSVVSLHCINRDPNIKAYWQRKKAEGKHSGVVLNAIKFKIVLRMFAVIKRQKPFVEIDAFRK

SEQ ID NO: 449981 - protein, 420 aa, unidentified
MKVVYQICCGVDVHKSFLVATIIKTTSGVQPSYQKKRFSTFNNSILEFKKWLLDNSCRDICMESTGKYWIPVFNLLEDEINITIANPKWVKAVKGNKDDTKDSKWIGDLFRLGLVPGSYIPCKPIRILREFTRYRYKLTSCRSSEKNRFQNALTVCNVALDSVVSDIFGKSATSIIDYLLEQSDNSINHEEISSRLLRSLKKKSESVIESIEGYQMTDPQKYRKHIIRAHMDYITSAIADIDSIIDSLVEPYDNAVNLLCTVPGISRNSAITIISEIGTDMSHFSSSKRLCCWAGLTPGNNESAGKKKSVRTTRAGVYLKPALVQVAHAAVKSDKSPYYKLKYERIMKRRGKKRAIIAIARMILTAVFNMLSTGEMWNPCDLYKVDMPVELKEIQKSKAIKQAIKLLKKEGIISEELLVS

SEQ ID NO: 449982 - protein, 310 aa, unidentified
MDIIIDKGCGLDVHKETVVACVMGNGIKKEIRTFSAMTGDLLRMKGWLTDLGITHVAMESTGPYWKPVFNILEDSFEVILANARHIKNVPGRKTDVKDSEWICKLLRSGLLTASFVPPQAIRDLRDLTRYRQKLIQAASAEKNRIQKVLEDANVKLSSVVSDTFGVSASRMIKAIMSGNFDTDSLAELAVGRLKGKKEKLKEALQGHFRDHHGFMIQASLDHIASLEKIIADLDRQINEKLKDYHRERELLASIPGVKEQGSSSILAEIGAAMNVFPSEGHLSAWAGMSPGNNESAGKKKVARQPMAIKT

SEQ ID NO: 449983 - protein, 352 aa, unidentified
MGVGRGAPEKLEYATAKSGRQAMIRELRTRAQSLGGAKVYFAYEASALGFGLYDELTEAKMTCYVLAPSRIGRSPHQRRRKTDEKDAERLLDIVRGHVLAGNPIPAVWVPDAQTRDDREVVRARIDAVEKRTAVKVQIRTLLKRQGTPSSFKGARGRTKGYWAWLRSLAGSDQGLPAGARVHLKSLLRQAEALDQEIAQLDQEVAALAETERYAEPVREMMAIRGAGVLTAMAFLTEMGDLSRFSNRKQIGAYLGLVPSSHESGEQDDRKGHITGQGSPRVRMILNQATWIWIRYDPEAKALYERIAAKNPKHKKIALVAMMRHLAIRLWHAGREAQRRAGLFQRRPTEAAA

SEQ ID NO: 449984 - protein, 354 aa, unidentified
MKRTTKYVALDVHQATTVASVREESGRVIARTILPTEAAALLEFVGGMRGAIHVAFEEGTQAQWLHELLAPRVDRVVVCDRRGEPRQGNKGDVVDADQLSERLRQGGLRAVYHGGAHRATLKELTRTYQNLVEDSTRVMLRLKALFRARGIRAAGRGVYHPRHRARWLAELRDAGARFRAEALYAELDVLRALRPKAKAAMLAEARRDPAWELLQTIPFFGPVRVALLLATMQTPWRFRTKRNLWAYAGLAVVTRTSAEFALVAGRPVRRRRAPLTRGLNPNHNRVLKDVFKGAATAATGRPGPLQDWYQGVLARGVREGLARVTLARKLAAITLRLWKKGEPYDPTQLTIQAR

SEQ ID NO: 449985 - protein, 375 aa, unidentified
MNQFIKYVGLDTHKDTIAVAIADIAGGKPRYYGEIANTPTALTKLMKNVSPNGEVVSYCYEAGPCGYGIYRQISGSGHDCSVVAPSLIPTKPGDRVKTDRRDSENLARLHRAGELTPVWVPDQEQEAIRDLTRAREDMKHLERQTRQRLCAFLLRHGQRYESGKSKWTQTYWRWLERVKFSHRVQQTVFQEYIDSVKQQQQRVADLEEVMQEAMADWTLAPVATGLMALRGCRLITAMTVVAELGDITRFDSPRQLMSYLGLVPSESSSGPKTRRGGITKTGNGHVRRVLVEAAWCYRFPARKTAPLQRRAEQTSEEVQAIAWKAQKRLCGRYQALGRRGLLPQKISIAIARELAGFIWAIACEVMPKNATEASA

SEQ ID NO: 449986 - protein, 341 aa, unidentified
MGRAIAVDLHKTSFTACFYSSEEDHEFKTYGVNQRGIEFFKTSLKKTDEIAVESTGNTAYFIREVEKAVKRVRIVNPIQFKIIASSTKKTDDIDALTIARFLKKDLIPEVRMRTKEESQLASLIGTRDKFVKLRTALKNKVHNILMANGIMTKREAFTSEKALDRILSLDLEDSYKFELGLIIQEIKNLNQSIDKINNELKDRGQKLEGHKNLTSIKGISDTGATIFLNTIGNIDDFKSEKHLAGYFGIVPRVYISNKTVQYGRITKQGNKIARTALVQSTLIAIRYSPYLRSFYDKIKAKKGSGKAIIATSRKMLGIIYNTLKNNWVFEDFTKFKLAECA

SEQ ID NO: 449987 - protein, 339 aa, unidentified
MKQITFFVGTDVSKEWLDMSIVKEGRIVHHAQIDNKATAIRSWLRQTGKEFGYGMEDTLFSMEFTGIYNHHLLEVLHAKEAMVWLIPGLQISEGSSCGIRRGKSDKQDAGRIALYASKNPEQVRLWRKPRQVIQELQMLLMLREKLQRTKHQYETTLKEYQGFSDTALCKRVKETARAVLKTTRQELVDVEKEMSRLIQGDQRLSELHGYITSVESVGLITAVNMLVTTNEFLSISEAKQYACYAGVAPFKDESGKVRKKQKVSHKANKKMKKLFHLLAMSAIRMKGEMKAYYDRKLAEGKAKMSVLNAIRNKIILRIFSCVKNKKLYEKNYVYSLAKP

SEQ ID NO: 449988 - protein, 311 aa, unidentified
MENVVGCDISKGWIDVECVGPAQQRRLRLDNKVQPIDRFARELPAGSLVGMEATGEMHELLARRLIKHGHTVFVVNPRWIHQYAKGIGIRGKTDRSDAALIARFIAAESASLRPYQSPGREQQELRKLLLRRCTVVKLKTATRQSLGAQGRGLVEQFNRLLLRIERRIVAIIKRVPEWQALGQRLRSEPGVGPIVAAHLVQVLTRFRFHSADAFVAHTGLDPRPNDSGQKQGRRWLTHHGDATLRTMLFMAAMSACKRPEWRAIYEANLRKGLPSTAALVVVARKLARVAFSLFRSGESYDPGRIGSALNA

SEQ ID NO: 449989 - protein, 417 aa, unidentified
MISFPKRERAQRAAACVGVDAGKFSHTLVIRPQHQPDSKPFSFPTTRAGFDSAVTFIRQQVPGAAAATILVGIEFAGNYGFTFAHYLAQLGFPIVSVLPAHTKRWKDVAHNQPLKTDAKDAGTITDLLTQGHFVTFPFLAPAYGDLRYLVTARERLSLLRRGAITQLRTLIQVVFSEFEALFPLVTKKTPFTLLRTFPTPQDLLEAPRTQVLRVLRSASRGHLGTDTYHQLVTAAQATLGLPGAQARLRQEILLTLERIALFERQIKALEAELVAALQAVPETPYLLSIPKVAPVTAAIFLGSIGDPRAYESGQQILRVAGLSLVARSSGVLRGTKRISKRGRPLLRQAAYMFAVRSITKGSLFRAEYEALCQRNGGAKMKAVVAVMRSGLRLLYSIARDRRMFTIEPPARRRAAAA

SEQ ID NO: 449990 - protein, 355 aa, unidentified
MSSEKYIGMDVHQATISVAVMDSTGKVIMESILETKSSTILEFLGGLRGTLSVTFEEGTWAGWLYDLLKPHVAHVLACNPRKNAALQQGNRSDKIDARELANRLRLNDLKPVYHGENGIRMLRELARSYLTIVKDLSRVMNRLKALYRSWAIPCAGRDVYYTRHRSQWLEKIREAGPRRRAEHLDQQLDLLQHLRQQARRELLAEGRRHSITAKLRKIPALGPIRSALAVALIQTPHRFRSKRQLWKYCGLALETRITGEYVYVHGERRRSKKQLSIRGLNKDHNHDLKGLFKGAATQASVKPGPFQEFYQRSLAKGIKPTMVRLTLARKIAAITLTLWKKGEDFDIHKLNSQAA

SEQ ID NO: 449991 - protein, 361 aa, unidentified
MNATTAAIDLAKNVFQVALADTNARVLEQHRLTRAQFERFFDNRKVARVIMEACGSAHYWARVFAARGIEVMLLPAHYVRAYVRRSKTDAADALALLEAARCADIVAVKIKSVEQQSLQALHRTRSLWMGTRTSRINALRGFCGELGLHVRAGARTGLEAMARALADDQSAIPGLLHPLMQQLFDEIRVLETRIAQLERQLVQVTRESPACKLLMSIPGVGLLTATAMVAATSGSVAHFKSARHFASWFGLTPKESSSGGSRRLGRISKMGDTYLRMLLTHGARSVIRAATVAKLKGHELLGVRHWVLQLQARSNHNKAACALANKMARFCYAVLRDHTPFGQPATRLGKKMQRQSFELAH

SEQ ID NO: 449992 - protein, 385 aa, unidentified
MQKDDLSRSLVAFDQNSTLVVVVELSLKTWLVGGLVPGLTRQPLKKQGADPDALAVLLHRWRDEAIKAGCKITRIVVAFEAGRDGFWLARWLLARGIEAYVIHPTSIPVSREHRRAKTDRLDTQLLMRAVLGWLRGESKHCSMAAIPTLAEEDARRPNRAHEMLVGESTRVVNRMKAILIRLGIRNFNVKLRKAAQRIQTLRGPEGELPPNTLAELRREMARLAFIKEQIKEIEKARLAELKQAPREGTHPMLLMLARVMGIGLETADMLVHEVLSRNLRDQRAVARYGGITGAPDESGSKRREKGLARAGNARVRRGMIQLAWRWLMFQKASALTQWFKARTEGAKSGVRKTMIVALARKLLIALWRFVTTGEVPAGAVLRPAT

SEQ ID NO: 449993 - protein, 329 aa, unidentified
MAASRRVVIGADTHLETNHLAVITDAGQPLADAEFPTCPAGYDAAVKWARSFGSIAIAGVEGTSSYGAGLTRVLQAAGIEVAEVSRPDRAARRRKGKSDPLDAYAAARAALAGDGLAVPKGEHTTALGALLTARRGAVKARSAATNQIHALLVTAPAELRERYRRHSITALVKAWARCRPATHSDPTTVAVLMAAKALAQRIEFLERQKHDLTAQLDVLVQQINPALRATYGVGPDTAAQLLVTAGTNPHRLRSQASFAALCGAAPVPASSGKITRHRLSRGGDRSANNALYRIALVRMSAHPRPRWRWSYAALGPRHDACAVVFFSSR

SEQ ID NO: 449994 - protein, 331 aa, unidentified
MEEVKRFVGIDVAKVALDVFIGSAGGAFSVANNEVGIQELLRQMKPADFVIVEATGGLETPVASALAAAGIPVAIVNPRQVRDFARATGKLAKTDRLDAEVLARFGEAVRPEARPLADAQAQALEALVTRRRQLIEMLTAEKNRRARAPKVLHHSIDEHIRWLEKRLSGLDAELAELIRETPLWRERDELLRSVPGVGKVLSSTLLAQLPELGMLNRKQIAALAGLAPFNRDSGNMRGSRCIWGGRAQVRRVLYMATVAGVRSNPTIRTFYLRLRTNGKHAKPALIACMRKFLVILNAMLHNKTHWQTPALISPTAPPFPLLGAVSEHGCC

SEQ ID NO: 449995 - protein, 351 aa, unidentified
MTEEQSITKTYVGLDISLADTHICVLNEESKRIYQGSVLSQPDAIAEALSKHAPNCERIAVETGATTPWLWRELRHRGLPVICIDARHANKALSMRRNKTDKNDAQGLAELMRIGWYKEANVRTQEAQYIWSMLTGRYQLRLSRRDVMNQMRGIVKTFGLYTQSTATRKFPEIVREMIQDHPSVAPMLQPLLTAHDALMEQITVYESQLLSIAKNDSTARRLMTIPGVGYLVALGFMAAIDDPARFSSSNKVGPYLGLAPRVRQSGESNWSAGIGHAPNRMIRSYLYQAATVILTKTGSWSRLKAWGMRIVKRAGFKRAAIAVARKLAIIMHLIWVDGTEFEYGEVKPQSP

SEQ ID NO: 449996 - protein, 418 aa, unidentified
MRSSKAEKIRQVKTNSLIVTFDIGKTVHYAYFRSPGGSDIKPFRVFNTRRSYNQFWSKMIQFKNQHGLDEVIIGFESTGPYAEPLFHYLKDKPVKTVQVNPLHTKRIKELTGNSPNKTDRKDPRVIADVIYLGHALTLVVPQGPAAQLRRLAHARERSIKKRTADLNQLQDLIYVIFPEFLQIFKDISTKTARYLITNYPSPEAIVQVGIEPLATMMKKVSRGRINTARAEALYRAACTSIGLIEGKEAILIEINHLISRIESEDEFVKNIEDQMCEQLEHIPYTDSILSIKGIGAVTAAGLIGEVGDFRKFKTISEIMKLAGLDLYEISSGRHRGRRRISKRGRSLMRKLLFFAAINSVKRGGVMHESYQRILDNGTIKMKALTAVSRKLLRIIFAVIRDNTEYMDNYQAHRYKLAA

SEQ ID NO: 449997 - protein, 439 aa, unidentified
MDRVIIGVDPHKLSVTIEARDTREILRATGQFGTDNRSYHQLLEVVRQWPQRIWAVEGANGIGRPLAQRLLASGERVLDVPAKLAARARVFDTGQGRKTDAADAHAIVMVALRDKGLRELRMEPELTVLRMLCDRRDELSRARAQALNRLHRLFLGLLAGGAPVKKSASQYQALLATVRPRDLAGKTCRRMAAEELEDLQRLDIKLKAMKAELKAAVLATGSHLMDIHGIGPAGAARILADVGDVTRFPDRGHFASWNGTAPIDASSGQHTRHRLSRAGNRRINHVLYIAGIVQLRNDTEGRAYYRRKLQQSKTSMEAMRALRRRLSDAVYRQLAADAAARQAALQQTGPGGHSGAALSSSAAGLPPGTGTSDQPLPGPAHQTLPPPQTALKTPAAPIAATSRRRARGVNVERPTGRTTLTPTSADAHSTAPGTRQPCT

SEQ ID NO: 449998 - protein, 427 aa, unidentified
MSRNKLLAEALHILQKKEGMLMISVGIDVSKGKSTVSIMKPGGEILAKPFDVLHNIESLNALTHQLQSYDEEVRVVLEATGHYHFPVMTMLSEKGIFVTCVNSLRMKKYCAQSLRRAKTDDIDAVQIASYGLTYWSELNPIMPTGDAYAELKLFSRQYYQVVSLVVKSKVNLSNLLDQAMPDIQTLLRDSQCNHKLTDFVKRYWHFGNIQKMGETRFVSDYCKWATKQGYRLNERKANEIFTLSQNGIPVLPNTPLTKMVVLETVRILQELVKSRNTILTQMQELAKTLPEYSVVLDMGGVGPTLAPKLIAEIGDVRRFHSRRALIAYAGIDAPPYQSGSFSATERHISKRGNKYLRKTGYEVMQSLIQHKPSEDAVYWFIQKKRAEGKACKEAMIAGFNKFLRIYYARVSEVYRQIDEDLIFASNT

SEQ ID NO: 449999 - protein, 315 aa, unidentified
MQKLLNIGVDVAKDAVVVGCDEQGSAVRSIPNQRTALTAWLASLPGPSRIGMEATGCYHELLADLAHQRGHTVFVLNPKDTRHYAQAVGLRAKTDRVDALLIARLIAHEHTRLHPYLPATPEQRQLGRLLRRRAQLVKLKGALKQSMKGVIGLARDTSALVARMDALIAKLEQRMDGLIASMPGTQEDRRRLETINGVGAVVSIALIEPLTRLPFRSADAFVAFTGLDPRPRDSGHKIGKRRLSKRGPAELRRLLFNAAMAAARTGVWKPIYEHYRAGGLPTTAALVVIARKIARIAWSIHRYHTSFDPQRLKTP

SEQ ID NO: 450000 - protein, 308 aa, unidentified
MGCIGAGIDVSKDTLDVKVDEHRPQLHTSNDSAGWQQVIAWLTPFAPQQVVLEATGGYELQVLKALHAAGLPMVRVNPRQARDFARSTGQLAKTDRLDACVLAHMASVLKLNRYQPPNEETQFLHACHRRRQQVVQMLAAEKQRRRLTEQPAMRLMLERNIQRLEADRDELDMHISEQLKGSVQAQVASTIKGVGPVVLSTLVCDMPELGHLNRKAIAKLYGVAPLAKESGRSHGRRITWGGRANPRAMIYMAALSAVRYDPMLKAFYEGLVGRGKPKKLALVAAMRKLITILNARMREAFQASAQVA

SEQ ID NO: 450001 - protein, 347 aa, unidentified
MTTIEDARVITGGVDTRADMHVAAALDSIGGLLGVQEFPATAAGYASLLGWLRGFGTLAVAGVEGTGSYGAGLARHLAAAGVRVVEVDRPDRQDRARQGKSDPLDAVSAARAALSGRASGAPRGRDGAVEAIRALMVAKRSARQERIQAINQARALIMTGPEELRARFVRRSPAQLIEAIAALRPRPGDVPGYATRVALRELGRRAQFLDAQLDRLDELIGPLVTARAPGLLALHGVGPDTAAMLLVAAGDHPERLRSESSWAHLCGVAPIPASSGKTAGRYRLNRGGDRQANSALWRIVIVRMNSHPATRAYAGRRSEEGLSKKEIIRCLKRYVAREVYRQLRNGA

SEQ ID NO: 450002 - protein, 360 aa, unidentified
MKRHRTSVGLDAHARSVVGCALDGDTGEVFERRLTPNYEEILDWLRSLPGRVAVTYEAGPTGFGLARFLVAAGVLCLVAAPSKLQRPSGDRVKTDARDAAHLARLLHLGQIVEVAIPSAGQEAARDLVRAREDCRGDLMSSRHRVSKLLLRQGIIYSGGRTWTGKHQAWLRGQHFGAAPLQLAYDTALDTMLATVDRRNRLDDAIAELAADSVYTPVVTRLGCLRGVSTLTAFGLAVEIGDWDRLTGRSIGAYLGLVPTEYSSGTSRLQGPITKTGNGHARRLLIEAAWHHRQPYRPGVDLRRRWDAASPAARARGQQANRRLHTRWCRFDARKKRPVVANTAIARELAGWCWSLAVLDT

SEQ ID NO: 450003 - protein, 401 aa, unidentified
MAAQRDRAWAGIDVGKRHHWLCAVDAGGTRLLSMKIANDEAEIRTLVASVGELAAQVTWAVDIISAPSALLLALLTAAGQQVRYASGRVVAAMSSAYTGEGKTDSKDAYVIAETARIRRDLPVIDRDTDLVRNLAVLTGHRADLIADRVRMINRLRDLMTSVFPSLEREFDFSSHKGALVLLTGYASPGRIRRTGQTRLASWLRTRRVRDYAGVAARALAAAQAQSVVLPGQDLSASIIAELAGNILTLDARLKELDAQIEDAFEQHPQAAIIQSMPGFGPFLGACLLAGAGDLRAFPSAGHLAAAAGLVPVPDDSGRRTGNLHRPDRYSRPLRHVFYLSAQTSIMRAGPNRDYYQKKRRHGTTHSQAVIALARRRIDVLWALLRDGRTWSPAPPTPAHAA

SEQ ID NO: 450004 - protein, 348 aa, unidentified
MTQYKRIAIDTSKSVFTIHCIDAQDRPVLRTNLRRGQLLPFFRKLAATEIAIESCSGSHHWGRELTALGHTPRLVPPQYVKPYVKRGKNDRNDAEAICEAAGRPGMHFVPVKSRTQQAQGMVLKVRDTLISQRTVLGNTIRGHAAEFGIVAGKGISTIAPLLSAIEQEATVPPEAKEMFVLLGQQIAEIGARIKEIDAKLNAAHKASEVSTRLATIPGVGRVIALTLSTEIDPSAFESGRHLAAWVGLTPKEHSTGGKQRMGKISRAGNERLRALFVSGATSIINAAMKPGSRQMTEWLRALLLRKPRKLAAVALANKNARTAWAMMTSGETYRRPTPPPGATGALAA

SEQ ID NO: 450005 - protein, 388 aa, unidentified
MMIYYIGIDISKYKHDFCIISNTGEVIVENLFFENNKKGFQELLEKLKPYNKSDVHIAFEATGHYSKNLELFLIDQGYSFMKMNPLVIHQFLKARSLRRTKTDKADSLAIANYLMSVPYKPNSDLLYNIFTLKSLCRAREQLIKERSKYQVLLTNQLDLTFPELKQFLNNRISATLLFILEKYTNTNHISLMRDYDSIKNISHGKFSYAKFAKLKELAKNSIGHHDENNDLLISTYVSIIKTLNDKIDPIEKQISTIIKELNPRMLTIPGLGEISAATILAEYGDINNFSSPNKMLAFAGLEPSIIQSGTIENNGKMVKHGSGHLRYSIMNAAMIILRYSPTFYDYYLKKRSEGKCHRVALSHVCKKLLRVIYALEKNNIDFDSSLLK

SEQ ID NO: 450006 - protein, 405 aa, unidentified
MYYVGIDIGKGFHVASILSETNVFSKHVRFDNLRPGYKKLLSFLKENKATPENSIIGLEATGHYWLTLFQKLKEDSWQVFVLNPLQVQSFRNEKIRGSKTDDLDCELIAKVLKFGVGKKTALPNEALFTLKQLNRFRWKLVQKTSSIKLEVLTVLDTLFPEYQTVFKEIFGKTSVMVLSEYTTPEEIASLDVELLTARLEKTSRKQFHKDTAEKLQQSARETFGLRFGIDALSLQLKLLASQITHLDNQRDQVEEKIEGIVKKQETQLLTIPGISYTTAGCILGETVWFNKRYEKDPRSLLAYAGLDPVLKNSGKFIGKVKMSKRGSPYLRYSLMQAAFVACRLDDGFKKIYEDYVKVGKPHRVALSHAAAKMTFVVHSVLRTNKPYVPLLDNRKGNQITASHGE

SEQ ID NO: 450007 - protein, 426 aa, unidentified
MIQTIPASTFAATIGLDWADQKHDLWIQANSDQPEHLILEQTPEAIHEWVAKMCVRFPNQRIAIAVETSRGAIISALQAYAFIVLFPINPKMLCSYREAFCVSGAKDDRTDAMLLEEYVRFHFAKLRPLNPDTELTRKLSGLVENRRDLVDERTRLVNQLHSLLKTYYPLMEVLFDDLTTLLATQFLLKWPELASAKRAGAVALRKFFYGHNCRSAQTLERRLQALEKAQPLTTDPALIEPAVLKVKALAGMLKVLHEAIAEIEDHTNQAMDAHPDAPLFRSFPGAGSVMAPRLLVAFGTNRDRFENAQETQQFFGIAPVKKQSGQSKVIHMRYRCPKFGRQTFHENAGHALRKEGWTKVFYDQQRERKKGHHAAVRSLSFKLIRIYFRCWKDSKPYDRALYEKALDTHGSPLSTALKKKGTGPTK

SEQ ID NO: 450008 - protein, 408 aa, unidentified
MRIIGLDIHRAFAEAVAWKDGKLSRLGRVIMRREPLEEFAKQLSNSDVVVIEATGNAASVAAVIGPHVSRVVIANPKQVRLIAHAKIKTDTIDAGVLAQLYASGFLPEVWIADETTQALRRQVTRRNQIVRQRSRLKNIIQSILHAHLIPSCPHQDLCGPKGRAWLSEQILPGDERLAVERHLREFDRLTDDLKAIERDLAQSALADERVKRLMTIPGIDMVVALALIAAIGDVERFAKPGQLVGYLGLNPSVRQSGPGPAYHGRITKQGRGHARGMLVEAGWAAARSPGPLRSFFLRVQSRRGQHVAAVATARKLAILIWHLLTKNENYLWARPALHARKLRDLELKAGYKPARGQKGTAHAYNLQSQRDQERRWVEQAETAYTRFVAGWNTRGPKARTGAAKEERQ

SEQ ID NO: 450009 - protein, 433 aa, unidentified
MLKLNYMSTLFVGIDVSSKTNAVYAMDFEENKYISSSFGNNQPGADKLVNMIAECMHKHKNLNTILIVLESTSVYSVHISNFLSTSEVLMPYRPYVFCVNPKAASNYRKSYIGMEKTDPTDAYLIADFGRVGRTKKLEPWRGGQFISLKRLTRHRMHLSECITREKTYMVSNLYLKFSELQLLEGDDKPFGSLYGATSSAVLTEFLSPQEIIDMPEEELLTFLAGKSRNRISDLSKTSELLRKAARDSYRLDKCMYEPLNVSLASSFNCIHAYQKEIKLIEQAIEKCINGMNPNALLILQSIPGIGPIWASGILSEIGDITVFHSSDALAKYAGLYWPKGDSGDFTSEDNKMSKAGNPYLRCYLGEAANSVRKHIPEYADFYARKYAEVTKHQHKRALALTSRKLVRLVFGLLVKNQLYTGEKLDAEYNIESN

SEQ ID NO: 450010 - protein, 348 aa, unidentified
MSEAYDGREVVGMDLHRRRSVLVRMSPDGRKLETTRITNSPAELRRVIARAGKRPRVVLEATYGWYWAADTLAAAGAEVHLAHPLGVRGFAYRRVKNDEKDAADLADLLRMGRLPEAWIAPAEIRELRELTRYRIKLVRLRTSCKDQVHAVLAKLGIPVTCTDIFGVQGSRWLDGLALAQPYAGKVASLRVLTDELTAEITVLEEVIAGLLAHHDGYHAIRALPGIGPVLAAVIVAEIGDITRFPHPARLCSWAGLTPRHRESDVKVRRGHITKQGSPIVRWALIEAIQHVPADHLLRRRKEEILARRGDQAKNIAKVATARQLLTWVYYAMRDGQVRALASAERQAA

SEQ ID NO: 450011 - protein, 395 aa, unidentified
MFIVGIDIAKRSHEAIIIAEDGQVVRKAFSFRNNCTGYNLLLEQVRKLTLVKSQIVFAMESTAHYWLALYARLLKDGYTVMVLNPIQSHSLRELYIRKTKTDARDSLIIADFVRFGRCKASNVPQDKILALRELCRSRAYLVDMAADLKRKLIALLDRIFPEYESLFDSVFSKASIAVLSKYSTPQKVKNANLRKLTDILMESSNGHFGEWKAHQLKEAACSSFGIDDSGGVYSTLLGMFLEQILSLTAQADSLEKQISVFFQEFNNPLTSIPGVGTVLAATILSEIGDITRFSSADKLLAYAGLDPSVKQSGEFKSNQNRMSKRGSPYLRRAIWLASTVAAHRDPMFQTYYEKKISEGLHYMNVIGHVSRKMTAVIFAVLRDGQPYQPILQSAG

SEQ ID NO: 450012 - protein, 480 aa, unidentified
MNVKARKAKKQVNVENQAINLLSKEELSKKIEVVEKELRSYTWRELETNGKFAKNDKLSFITDDMLIVGCDIGSETHYIRAIDVRGRELSRGAFEFSNTSEGFENAKAWVLALAAENDKKQIVLGLEPTGHYWFALAAWMISNGISVVQVNPYAVKQSKEIEDNSQLKDDRKDPKLIANLVKDGNYGMPYLPEKVYADMRRLSMFRDQLTEDRIRNINRLHRELKIYFPEYMDAFGKIDGAFTLEVLKVSAIPSDIAALGAEGIKNIWHDAKLRGRGYSRAGEIVSYAKKSVGLKDGTDAGREAVKWYAEQILKLDEQLAAIESDLHKKCREIPYAENILAINGVGENILAGILAEMGDISRFDDVKEIQKLSGMGLVACSSGKHKGQTKISHRGRKRLRYWLFQAAKSAVSHADEFKQLHEYYTTRTNNPLKKMQSLIVIACKILRVIYTILKTGTTYDPQKLLKDIKHPASAQVPLAA

SEQ ID NO: 450013 - protein, 416 aa, unidentified
MKKGQDTRGYERYMALDIHREYVLAGAWNEEKDWVLTPRRVSIEKFPEWAKKNIRTGDIVVLETTTNVWTIYDIVAPLASRVLVANAAEVGEIANARVKTDKEDVKRLLKLLIGGIVPEVWVPPMEVRELRAFISYRSRLVKTSSMIRNRLQSLLHKHNLQLSEAGLLDQAWWEAQENVSTLEKIQIRQELTLLQEVEKLKDTVDEELQRQSTSAMWGKEALQLMQLPGVGFVVAMTVLSAIGDISRFENAKQLVGYAGLGAGVHDSGKTHKEKKITKKGRRELRWAMVEAAWRAVRMSPFWKAEFEKHLKRMRKPNQAIVVIARKLLIAIWHVLSKEETDLHASEEELAYKMLLLSWSLSKDVRLGLTYKQFAKYALMKLSVEADITRFVRKNVPRRLAPREEVLARMTELGLSA

SEQ ID NO: 450014 - protein, 343 aa, unidentified
MKLHVVGIDLGKTVFHLVGLDSTGKVVIRKRCSRTQLLTFTANLQVQLIGMEACSGSHFLGRALREQGHEVRLMPAQYVKPYVQTNKSDYLDAEAIAEAVQRPRMRFVPIKTEEQLDLQALHRVRERWVMRRTAVVNQIRSLLLERGLTLPKGRSHLDEQLPRILEDAELNLSDSFRVLLAQLKLELEQLAARIEEMDRVIQKTARENEACQRLTEIPGVGPVTATALIAAVGNASAFAKGRMLSAWMGIVPGEYSTGGKQKLLGISKRGNKYLRRLFVQGARSVLQQRHKQVPGLSEWLAQLLARTHQNVVVVALANKLVRMAWAVLCKNERYRAPVLAVTI

SEQ ID NO: 450015 - protein, 350 aa, unidentified
MPIATVAIDLAKDVFELAAADETGKIIERRRLTRHMLERYFDGLQGIHVIMEACGTAHYWGRRFGATGLRVSLLPPHYVRPYVRRNKTDSADATALLEAARATDIMPVKVKSTEQQGLQGLHRVRSAWRATRTARINMLRGLCREFGISVAAGAKRGLTALRQHLAQESHSIPSCLHSMMLQVSQELSEIDDRLTEVERQLRDIAKQSVDCQRLQTIPGIGLIASTAFIGAIGDISAFRNSRRFASWLGLTPRERSSGSVRHLGSISKRGDGYLRMLLVHGARAVLYSGDAAQRAGRPLDALRDWGLQVRARAGHNKAAVAVANKLARILWATWSRQHDFEFRPPRLAAV

SEQ ID NO: 450016 - protein, 344 aa, unidentified
MAIVYVGIDLAKNVFAVHGVNEAGKPELVRPSVARAKLHELIASLPPCTVAMEACSGAHHWARLFGEHGHTVRLIAPKFVAPYRMSGARGKNDAADAAAVCEAVQRPTMRFVPIKSVEQQARLMVHRVRQGFVQARTATINRIRGLMSELGVVLPRKAAVVRRQAATALEELPGWANLAVGDALSELHRLDERIAQYDRHITLIAREDERAKQLMRLRGIGEVTASAIVAMIGRGHEFKCGRQFAAWLGLVPGQYSSGGKTRLGRITKAGDGYLRSLLILGARAVLAAAKNKTDSLSRWALALQQRRGYWKAAVAIAAKNARMAWAMLARGEAFRLQAQAAQGQ

SEQ ID NO: 450017 - protein, 387 aa, unidentified
MAQVNDLSRSLTAFDPISTLVVVVEMSKASWLVSGVVPGVERQPLKKLEPDATALLRLIERWRNEAMRSGRPISRIALAYEAGRDGFWLARWLIARGIEPHVIHSASVAVSRERKRAKTDRLDAAMLMRVFLGWLRGERGHCGMVVIPTMEEEAARRPSRERENLVNERSRITNRMKSALARLGIRGFKPHLRKAPERLAGLRTAEGTGLPANVIEEFRRDMARLALVREQISSIEKTRAKRLERAPDTGPHAMVRLLARVIGIGIETADMLVREILSRKLRDRRAVARYAGLTGSPDESGLKRREKGLAKAGNARVRRGLIQLAWRFLMFQKDSALARWYRTRTEGPSGARKTTMIVALARKLLIALWRLVTTGEVPDGVELRPAA

SEQ ID NO: 450018 - protein, 383 aa, unidentified
MKAVCGLDVHKDSIFLCILHSDGELFEQVFGVLTFQLEEMRKLLQKHHVFEVCMESTSIYWIPIWRVLSPHFTLRLVNPYFIKQLPGHKSDVKDAQWIAECTMKELVRGSFVPPEIIQQLRQYDRRIFDLNAEIVRKVSKVDGVLQRCNIRLSNYVSNIECKSYRDVVRRLSEGVTEPNELMKLVHGRIVNRHGTETILASLTGVVSQAEIDVLRQLHEEIDIAESHRNECQQRMLEICEKHFPEELERLQKIPGIKERAATSLIAEIGTDMSKFETANHLASWSGLRPRNDESNKKIKSRKITHGNVYLRNTIIQCAWAASRQKDCFFSRFSYHQTIVRRKNKMKVIVAVARKLLVAVWHVLHDKTDYVDFKPDREESANNG

SEQ ID NO: 450019 - protein, 310 aa, unidentified
MDIIIDKGCGLDVHKETVVTCVMGSGIKKEIRTFSAMTGDLLRMKGWLTDLGITHVAMESTGPYWKPVFNILEDSFEVILANARHIKNVPGRKTDVKDSEWICKLLRSGLLTASFVPPQAIRDLRDLTRYRQKLIQAASAEKNRIQKVLEDANVKLSSVVSDTFGVSASRMIKAIMSGNFDTDSLAELAVGSLKGKKEKLKEALQGHFRDHHGFMIQASLDHIASLEKIIADLDRQINEKLKDYHRERELLASIPGVKEQGSSSILAEIGAAMNVFPSEGHLSAWAGMSPGNNESAGKKKVARQPTAIKT

SEQ ID NO: 450020 - protein, 321 aa, unidentified
MNTRTSLGIDVSKAKLDCALALGSKYRTKVFANTQQGFAQLSDWLHHHGADQVHACMEATGIYWEAAALYLADAGQRVSVINPALAKAHGQSLGLRSKTDAMDAKLLADFCREKQPPMWTPPSEAERRLRALVLRHQSLVEMQTQEKNRCESLREEVRSSVETHLTWLASELARIEQAIARLLDDDDHLRGQRALLASIPGLGERTIAVLLAYGVNGERFQSARQFVAFAGLSPRLHESGSSVRGKPRLSKIGHAFLRRALYMPAMVTLYKTAWGQRFRQRLATHGKPPKLIIGAMMRKLAQVAFGVIRSGQPFNPALHGA

SEQ ID NO: 450021 - protein, 341 aa, unidentified
MTVIIGIDPHKSTHMAVAIDGEEHALARLEIRADRAQTERLLAWAAALGDERTWAIESAAGLGKLLSQQLLAAGEHVVDVPPTLSARVRLLGSSKAAKNDGNDALSTAIAGLRHCGLRAVRRDDHTTVLRLLVGRYDDLIALRTQAACRLHALLRELVAGGAGRRIKADRAAALLRGLRSDDPVSAARKRLAGELLDDIRRLDRELSAIKTEIRDAVAASGTSLVELHGVGPVVAALILAHVGDPARFPTPARFASYNGTAPIEASSGPRKRHRLNPRGNRKLNHALHIIAVTQVRHDTPGRVYYDRKLAEGKTKKEALRALKRRISDAVWRQLRVDITNN

SEQ ID NO: 450022 - protein, 400 aa, unidentified
MRTVFGIDVSKASSEVAILVNGERVHGYTMPNDIIGFSHLLKDLKTVSNPEIIFEATGVYSRRLQAFLEENSYDYTRLNPLEAKKQLDSLRVRKTDKIDAGKLASSQFVLNRKPIYVQEKVYQNLHDLSRFYQNLTEDIVRTKNRLHKVLQVAFPEIENLLSTPTGEQYWNLVSIFPTNHWVLELSEVELKETIRQSTSKRISENRVGNLAEKLVGLAKQSYSAISKTSPMIEEVKYNAQELIRLTNRREQVLEQLIELAKPLPEYEILLSIPGIAETTATSVIGELGDIRRFKSANQINAFIGIDLKHYESGDFLGQEHITKRGNPYARKILYKCIHNIASASHTNPCHIADFYEKRKRQSQTTSTKPHTIASIHRLIRTMYYLIMHNKLYDYTLAQSH

SEQ ID NO: 450023 - protein, 327 aa, unidentified
MRQHKSLTGKTKTTVAFDVCKAVLDVHIRVDGKAFQVPNTDEGFDQIAVMLADYDVSLILMESTGGYEDVAACYFQSLGYDVAVVNPRHARNFAIAMGQLAKTDCLDALILADFAAVIDSRPDRARFIKPPTDAERKFLSQMVARRRQVVDLLSTEKQRLSHADDYAMQSINKVIDYIESQLKEINQDISVYVKKNYADLSKMLSKVPGIGELSVGLLIGDVPELGNIGNRQLSAVIGVAPFNHDSGKRRGKRCISGGRQNVRNVLFMGIMAATRFNPVIKAFYERLINKGKPKRVAYIACVHKLLRIINAMVRDGTSFNPDLHTVI

SEQ ID NO: 450024 - protein, 412 aa, unidentified
MTKVLRRVGIDWGSGAHQVCRIDGEEEPKQRVFPHTSEGLNALVAFVVEGEITPEQMLIAIEVNHGAVVEALLAKALPVHSINPKLLDRLRDRFSPAGAKDDRRDAFVLASCVESDAHAFRRIEPGNEENLRLQAASRLRGDLKSEFGADANRLWNELREYRPGLLTLCPGADEPWLWALIEKAPSPSQGAKLTRPSIGAVLKKHRIRRLTIEDVQTVLRGDVLSLRSVYIESHVARVLVLTARLKLAQTQIDKIEREIKTALAARVESETKTKRRDLTILLSLPGFGPLTTATALGESGDAFERRDYNALRSLCGAAPITKQSGGSRYVVMRQFCQPRLRVALHISALQAIRTDPKFHDLYVRARARGQTVGRAIRNIVDRLLCLAVQLLRKNELYDSTLRQLAPEVAAAS

SEQ ID NO: 450025 - protein, 423 aa, unidentified
MKSSGTQTFRAYVGIDWADTKHDFCLQERGSDRREFGCIAHQVECIDEWAKSLQQRFGTPVAIALELAKGPIVYALQKYDFLVLFPINPLTLAKYREAFKPSRAKDDPSDAELALDLLIRHPERFAALRPQSVGMRTLISLTERRRELVNDKIRLTNRLTHTLKEYYPQALDWFDQHDTVLFCDFLTRWPTPLQARRAHQASLKAFFHAHNAHRPQIIAARLKAIKAAVPLTQDPGVIVPCRLHVMVLIEQLRLALQAIEQFDRHIAELAPTLPDYRLFAGLPGAGPHLAPRLLVAFGEDRERFQRAEELQKYAGIAPVTERSGKKTWVHWRWQCPTFLRQTFIEWAGQTINKSFWAGAYYYQQRARGSTYQAAVRALAFKWIRILYSCWKTRTPYDESTSLNALNRRQSPLLNNLVPIPQNA

SEQ ID NO: 450026 - protein, 355 aa, unidentified
MEDYDGRQVVGMDLHRRRSVLVRMTEDGRRLGTAKITNSPAELRREIGRAGKAPKVVLEATYGWYWAADTLAAAGAEVHLAHPLGVKAFSYRRVKNDERDSADLADLLRMGRLPEAWIAPHEVRELRELTRYRIKLVRLRTSCKDQVHGVLAKLGVTVTCTDIFGRAGSAWLDGLSLPQPYAGKVTSLRHLAGELTTEITMLSEVIASLLAGDRGYQVIQQLPGIGPVLAAVITAEIGHVTRFKNAGQLCSWAGLTPRHRESDTKVARGHVTKQGSRLLRWALIEAIQRIPKDCVIGTAKDAIIARRGKEAKNIAKVAAARKLLTLVYYGMRDGQIRCLSRPPAGPAMTQTARAA

SEQ ID NO: 450027 - protein, 333 aa, unidentified
MLPPNCGTATPYILRNTVGLDISKLTFDATAIVGNAEYSAKFDNDSKGLNQFSDRLKSLGCQNLHICMEATGNYYEEVADYFAQYYSVYVVNPLKISKYAESRFKRTKTDKQDAKLIAQYCRSAQESELVKRQKPTDEQYRLSRMTAAYAQIKSECAAMKNRYHAAKDEEAAKAYAEIIKAMNEQLEVLKEKIKEQTEKPNCKEGVKRLETIPAIGRMTAAVLFHHLTSSKFETSNKFAAFAGLSPQQKESGTSVRGKGKLTKFGNRKLRAVLFMPAMVAYRIRAFPDFIKRLEEKKKPKKVIIAALMRKLAVIAYHVHKKGGDYDPSRYKSA

SEQ ID NO: 450028 - protein, 339 aa, unidentified
MKLYTAFDLHSNNSYLGIIDENGKRIFKKKLRNDPTMIRETLKPFKSDIEGVVVESTYNWYWLVDLLKEEEYRVHLANPSKIQQYWGLKYSDDKHDAFWLAEMLRLDILPEGYIYPKEERPIRDLLRKRSHIVRLRTALIVSLQNIIARNIGVKLKANDIRFLTTDRVTPLLQENEDLSLAGKVSKESIDFLGRQIKAIENTISGRVQISNPYDRLLSIPGVGKILAFTITLETGPIDRFPKVGNYVSYCRKVPSGRFSNDKKKGTGNRKNGNKYLAWAFSEASDHARLFDSEARRYYQRKLQKTNGPVAHSALAHKLARAAYYIMRDGVVFMPDKAFV

SEQ ID NO: 450029 - protein, 352 aa, unidentified
MTELIRLRIGIDLAKSVFQVHGVRQEPGEPVAFTKRLKRSQLEHFLSKLAPSLIGMEACSTAHYWARVAVKHGHEVRLMPPAYVKAYVKRNKTDAHDAAAICEAMSRATMRFVAVKSEADQAMISLHRTRASFVARRTALVNQTRAAFAEAGVVAAAGAGGFSDLLRLIETRADAFACLAPALRMVLEELAAQWESVDKAVRRFDAGIAAALKNNVRAKRLMQVPAIGPIGASALDAHLPEPAVFGSGRDFAAWIGLTPREASSGNTVRRGSITKKGDGYLRRLLVLGATAYLARVRRGAVKTASAWERKMAAHPRRKLAAVALANKTARIAWAMLARSEDYRAPDAAVLTA

SEQ ID NO: 450030 - protein, 414 aa, unidentified
MEKQWNIVCGADIHKKFLIATILSRDGTKATRRFGMTLDDLLTFKNWVIENGCEQVAVESTGTYWVPIHTVLEGYVGLMVANAYKIKHTPGNKNDLDDADWIAELCLNGMIEPSRIFPKADRDLRRLTRIREGYVNDMTREKNRVHHALESCGIKLSSVLSDIFGKSGRYVLNGLLEGRNIDDILKGIKLKRIKKKADEIKEAIKGSLDLTQIFLIRGSLEQMEAIQKRIDELGIEIKARSAHRNADLKIAMSIPGIGFTSASTLLAEIGDITDFKKPEQLAAWAGLVPSVYQSADKLLTGSITKHGSRHIRWILVQVAHVIARGSNSKLKRFFLRIKSKKGSNVAVVALARKVLCILHHLLMNREMYHEGGINKKIKIDIEKASSSTEIDLEEMIKYIVKAGYEVRKGPSGGG

SEQ ID NO: 450031 - protein, 465 aa, unidentified
MKNKSNVTKKKKQKITINPDWEPINPDAAGIDIGSREHWACVPPNRHAQTVCKFGTFTADLEALADWFSECGVKTVAMEATGVYWIPVFQILERRGFHVVLANPRQTKNVAGRKSDVQDCQWIQRLHTYGLLSTSFRPGDAYCVLRTCLRYRDELIGARSTQCQHMQKALQAMNVQLHHVLSDITGLSGLAIITAILKGERDVVGLAALVHHRVRASQETIQKALAGDYRPEHLFVLQCAFDLYHTYEEKILACDQRIVAEVAQLPQQVDPACKPLPAGKAGRSASANQLAGQDVRLALYEKIGVDLTAIEGIGITTALVVLTEVGPDVSGFASEKKFASWLGLCPDNRISGGKVLSSRTRRVVNRVSDALRLAATSLERSPSALGAFLRRMKARLGAAEAVTATAHKLARLIYRLLKHGEAYVRKGMEDYERKFQEGKLNRLKKTAAAMGFELTAKQPVTLPVS

SEQ ID NO: 450032 - protein, 371 aa, unidentified
MYVAFELGKAKWKLGIVVPGKTKLSRYVVDGGDVEAAWRLMTKAAAQAQKRLGRPVRMVSCYEAGYDGFWLHRWLVKRGVESRVLDPASLQVDRRARRAKTDRLDLEQLMQALIRHEGGDRRAYSVVRSPSVEHEDDRRPWRERERLVKERTAHTNRISGLLHGQGVRELAPRAKDFMARLTEVHSGDGHALPAKLVAEIRREQMRLELVEEQIAEIEAHCRIARQAAAPGTMAAKAAQLMELKSLGPVSSQTLVNEVFWRDFQNRRQVGSYFGLTGTPYDSGRSVREQGISKAGNARARTSAVELAWLWLRNQPSSALSRWFKERVGTQQGRVKRIAIVALARKLMVALWRFLTQGLMPEGAVLRAPARG

SEQ ID NO: 450033 - protein, 392 aa, unidentified
MVCVGIDVAKDKHDCFILSSEGEVLADVFTIPNNRDGFETLLQRIRSCALPADKIKVGLEATGHYSYNILGFLLDCGLPTYVINPLHTNLYRKSLSLRKTKTDRIDARTIAAMLMSDVDLKSYTDTAYHNEELKSLTRYRFDKVRERAKLKQSVSRLVNILFPELETLVPSLHMASVYAVLSEFPGAKQIADAHLTHFKTVLTDASKGRYGREKAVEIREAARCSIGSIMPSKSLELQHTIRLIRELDREIVDIEAAIKAILDEMAPPILTIPGISYRMGAMILAEIGDFSRFESPDKLLAYAGLSPSTYESGKLKASGAFAHMEKRGSRYLRYALFNAAKFVCNWEPSFAAYLAKKRAEGKHYNVAVSHATKKLVRLIFALQTSGRAFQPA

SEQ ID NO: 450034 - protein, 312 aa, unidentified
MFIGIDVAKAQLAFACQPSAERGTVPNDDVGIRELVARCQALAPTLLVLEATGGYEAAVVAALATAGLPVVVANPRQVRDFAKATGRLAKTDALDAQVLALFAERVRPAPRPLPDDAVQALDALLTRRRQLVEMLTAERNRLLVARPAVRRDLQQHIRYLERRLREADDDLHTAVKTSPLWRVKDDLLQSVPGVGQVVSLTLLAELPELGRLSHKEIAALVGVAPLNRDSGTLRGKRLVYGGRAPVRAALYMAALVASKCNPVIRAFYQRLRAAGKPAKVALTACMRKLLIILNAIARSGTPWRPARTLART

SEQ ID NO: 450035 - protein, 358 aa, unidentified
MQIIGCDLHTRQQTLAMLDTTTGEVMEKTLMHEASNVRNFYSTLPGPVRVGIEATGSMQWFLNLMEELGIECQVGHPATIRAAEPRKQKHDRRDADLILKLLVENRFPSIWLPSKELRDLRALLRHRHQWVRMRTRVQNALQAIALANGLRRGPSLWSQTGQHAIASLPLAPHTAHRRTELQALYVKFEGEIEKLNQRVEEQACERTGAQLLRTHPGVGPVTALATDIFLGDPARFADGKALASYVGIIPSEYSSGGRQKLGGLSKQGNPLLRFLWCEAAMHAVRGDPELQRFYRRKLIQKGLGKARVAVARKLGIRLWIMLRDQIDYHEFCRRGQMRQKNGGACAGMPGQSYGPAMQ

SEQ ID NO: 450036 - protein, 407 aa, unidentified
MQHVIALDISKGKSHFVIYNRYKRCEFEGEIHHTRADFERLQSRIEELSSLDGEQPEIVFEATGVYSKPIEKFLCDYGYTYYRMNPLEANLQMATMRRHKTDINDAHELAKSHFKMEREKTYTQDEYYEQMRAITRYYDETAEEMTYLRSRMHAILQLSFPELERLITPKSALFLNFVQLYPHPALLLAHSKTVIKNNLKRNTQKNLSAERAEKKAIVLLEAAQHSYPAIESSDIRCEQVRDYARRIADLKDKKEQLIRQMAELSMKRKEFKILRSIPGIGDATACRLIGELGDIRRFKNSKQINAYVGIDIMRYQSGNTHYQDRINKRGNKKLRKILFFMMKTMLMRKKVPNHLVDYYYKLKKQPQGKPHKVAIVACMNKFLKVAFHLITHGILYDYESALPAQKS

SEQ ID NO: 450037 - protein, 449 aa, unidentified
MSRPQVIDDQEHERIHERAAAIDVAKDTGMVCTRTPHPARPGARRATVWTVKARMNAVRALGRQLKQDGIEIVTLESTSDYWRIWFFVLEACGLAVQLVSATQAKNLPGRPKTDKLDAMWLARLTEMGLLRASFVPPKAIRDLRDYTRARTRLVQERTRCWQRLEKLLEAALVKVSSVASKLTTISAQDMIKAMIAGQRDPEALAALARTRMKAKHDDLVQALDGMFDDHHGELAGLLLDQIAFLDSRIAVLGARAAELTAAMPAAWGVDPDGTTGPHAGATAGAPVLNAVARLAEIPGVSENLARSIIAEVGLDMTRFPTAAQLVSWAGLCPSARQSGPRSRPGKKGQGDTWLRGSLGQAAVGASRTATFLGERYSRIVRRRGKAKAQVAVARSILVIIWHLLKNPETRFTDLGHDYYQARLNTDRKLKNHIRQIQALGFAVTITKAA

SEQ ID NO: 450038 - protein, 312 aa, unidentified
MTDLICGVDVCSAALDVRLGRDGATRRFTNDGAGIIELIAFCKEHQVGLVALEATGGYERLAFAMLWSAGLATAIVNPRAVRRFAEAMGFLEKTDRIDSGIIAWFAEVKRIAPRPPDGAAQRQLAALVTRLRQLTELRTAQNNQRRLVTEPAALASFAELLSLIARQIKAIGEQIGKLIATDPLWHKLDLAWREIKGVADRTVARLMAELPEIGTLSSKAVSKLAGLAPIARDSGKLSGNRSVRGGRSGIRSILFVVAELVRRHNPDFAAFHRRLTLAGKPKKVIRIALAHKLLVRLNAKARDVRAQFPSSA

SEQ ID NO: 450039 - protein, 357 aa, unidentified
MTHPTVTGTAAHCLGLDVGDRTTHLCGVDQAREVVERLRFPTSPEGVRKVFGDRSRARIVLEAGSQSAWMSELLRSLGHEVVVADARRVAAITRSGRKTDRRDAEVLARLLQGMPELLGSVHHRGRQAQADLAMIRARDVLVRTRTRLVQHVRGTLKAFGLRARACSAKAFHRVARAAVPQDLEPALAPILDQLGELELRIRHLDRELDRVAEARHPDAARLRQVCGVGPLTSLAFVLTVDDPTRFAKSRTVGSWVGLCPKVLASGDRDPELSISKTGSSYLRRLLVQSAQYLLGPFGKDSDLRRFGLRLCERGGKAAKRRAVVAVARKLAVLLHRLWVGGEPYEPLRNSLRAAASA

SEQ ID NO: 450040 - protein, 411 aa, unidentified
MELICERVAGLDVHRDEVAACLRAPGPRGGVRTEKARFNTTTGGLAVLAGWLAERQVALVAMEATGVYWKPVYYALEDRFELWLCNAHHVKNVPGRKTDMSDAEWLADVAAHGMIRPSFVPPPAVRELRVLTRYRKRQADVRASEIARLEKVLQDAGIKLTSVASKVLTQSGRAMIEALIAGERDPRALAGLAKGKLRPKIPQLTAALDGHFGAHHALVAARILAHLDFLDAAIEQLDAQIAGRIATDFQPAARLLREVPGIDRAAAEVIIAETGADMSRFPSPAHLASWAGLCPGNHESAGKRRKVATRPGNPWLRRTLIESARAAARTKGSYFGAQYRQIARRRGPNKAAIAIAHSLLDVTWHLLTTGEVFTDLGEDYFLSRYGKQHQTRRLVSQLERLGYTVDLTPAA

SEQ ID NO: 450041 - protein, 369 aa, unidentified
MQKDITHVALDDSKNSIVAGILRPQATEPELRQIANEPKHLRRFFARLQREGPLASCYEAGPSGYDLYRQLTALGVPCQVMAPALTPRKPGERIKTNRRDAAKLVRLFRAGELTPIRVPDEAQEAVRDLLRCREDLQEDLLRWRHRLLKFLARHGRVYREGRNWTQRHWTWLRSQRLADPVLARTFQEYLFTVEQLLARRAELEREIEAIAQQEPYREPVGWLRCFRGFDTLGALTVLVEIGDFQRFQSPRKLMAYLGLVPSEASTGDRERRGSITKAGNTHARRVLVEASWHYRHPPRIGPALARRSQGQPQAVLAQAWKAQQRLHRRYRHLVGHGKRPPVAVVAIARELVGFLWAALTRLEPSAQAA

SEQ ID NO: 450042 - protein, 384 aa, unidentified
MKKRSTEATRRTRETKGAGGIKGADSAPSGSARSLTIGLDLGDRMSQICVLDSMGEIVEETRVATTKSGLTRVFDVERLGKCRIAMEVGTHSPWVSRLLREMGHEVLVANSRKLRFIYQNRGKTDRVDARSLARVARMDPALLSPVKHRDEEVAQDLAVLRARDLLVRTRVKLIGHARGAVKSAGHRLKVSSTRSFTAETESMLPEELKETLGAVFSAIDAISEQIRALNQRVREMAKTKYPETGLLRQVAGVGYILSLAYVLTLETPDRFEKSRMVGPYLGLVPARRQSGDSDPQLRITKEGDGFMRCLLVQGSQYILGPFGPDCDLRRFGLALEGRGGKYAKKRAVIAVARKLAVVLHKLWRSGEVYEADRRLALQPEPAKA

SEQ ID NO: 450043 - protein, 327 aa, unidentified
MDVHRDFCGVAIAEAGAVRSGGRIETSPEALELFAASLARADVVALEVTGNAGEIARILRPHVGAVVVVSPHDTGISRARAKTDRLDARVLAKLLAAGELDAVWMPDEWTRAMRRRLARRDQLVRARTRAKNEIHAVLIRRLAGRPPVSDVFGVRGRRWLSELELREDERETVAGCLRHVDFLDGEVAALDGAIASEALRKPEVLRLMTVPGVSVVTASTFVAAIGDIRRFSSARKLVGYLGLDPRVRQSGPGPARHGRITKQGSASVRHVLVEAVWTAVRSPGPMRAFYERVRARRGAQVAAVATARKLASLSWCLLTREQDYSFA

SEQ ID NO: 450044 - protein, 354 aa, unidentified
MTQTFNAAVSVVGIDIGKSSFHVVGQDERGAIVVRQKWSRGQVEARFANMPPCLVGMEACVGAHHLSRKLKSLGHNARLMPAKYVRPYSKGQKNDFRDAEAIAEAVQRPTMKFVATKTADQLDLQALHRVRERLVSQRTGIINQIRAFLLERGIAVRQGQRFLRAELPRILTTPPEVLSPRMVRIVEDLTGDWRRLDERVERLSDEIEAIARQDAGCERLMSVPGIGPIISSAMVAAIGAGDVFTRGRDFAAWLGLVPKQKSTGDRTILGKISRRGNRYLRVLFVQAAWVVLIKPKIWERHGLKPWIEAAKKRLHHNVLAIALANKLARIAWSVLARGRAFEARKMDQAANQSA

SEQ ID NO: 450045 - protein, 363 aa, unidentified
MNEITTVGVDLAKEVIAVCAADRSGKTVFTRVFRRDTFAAWAVQLPACVFGMEACGAAHHWARWLASHGHRPRLMAAEFVQPFRKSRAAKNDRNDAEAVLTAVRQPNMRFVAVKSVEQQACLSWHRLRQGWSEERTALINRIRGLLGEFGVWRGRSAALLTRALPELEHDEGLPLMVRRLVGEARQHLARLDEAIASCEVEIQSHVKGNVAAQRLTAITGVGPLTAAAVIATVADARDFKNGRAFAAWQGLVPRQASSGGKARLGRITKRGDSYLRGLLTQGARSALQAALNKPPETLNRLQRWIVQLYLRVGYHKTLLAIANKHARMIWPILAKDQAYDPEAWRRWTRTASASAPAMSGVTP

SEQ ID NO: 450046 - protein, 443 aa, unidentified
MLQNPKYTNEGGFFMNLIPVAGIDVGKRFSEMAVLSPSNEVFARIRINHDSFKNFEKAFELLKKAEKEFAAKPVVVMESTGHYHKILFHALNNVGYEVSVINPIQSDSIKNIGIRKVKNDKVDARKLALLYRFEQLKGTKIPNEDIDCLRSLCRHYYKLSDQLTAYKNKLLGIVDQLFLSFTDVFEDVTSVTALAILDKYPTPEDILNADRDELITLIKKSSRKNLKWATAKYELLCSKARDFKPLSINSIANTAMLKANLSMIKTLSQLLENALDAIHELIEQDSQKDMPLLSLTIDILCSIPGIGILTAVTIIAEIGDFSAFSKPDKLVAYFGIDPSVKQSGQFEGTKNKMSKRGSRLLRRVLFTTALANIRKKRNGKEHNPVLYEYYRKKCVSKPKKVALGAVMHKLVLIIYAVMRDRKPFVLRKPEEHAEMLKTKNSAA

SEQ ID NO: 450047 - protein, 345 aa, unidentified
MDKSVSTQQATVFCGIDVSAQSLAVALIGPEGALGQREFHNSASGHQRLVDWLGKFGILVRVSLEATGIYSLDLALALDAAPGIELAVLNPKLVNRFAETLRRSKTDAADALVLASYSQRMPFVRWQRPQAKHLELRTLSRSIGGLVQEQAALKNRLKTAQSTATTPRLVLADLKRALSGVERRVSRLRAEAQKLILADDQLRQRYQLLLSVPGIAQVGGVSILSELLLLAPEMGARQWVASSGLDPAHRQSGTSVNKPSRISRAGNRHLRAALYRAALSAARCDRHLSGFYQALQRRHKTGMQALMAVARKRLHAIYGIFKTATPYDGKKLFPSMQIEKSALAA

SEQ ID NO: 450048 - protein, 349 aa, unidentified
MRFYTNTHNYYCGIDLHAKTMYLCILDRDGKILLHKNMRSRPEDFLLAVEPYRDDLVVCVECIFTWYWLADLCRNEKIEFVLGHALYMKAIHGGKAKNDKIDAFKIATLLRGGNLPKAYVYPPKMRATRDLLRRRLHLVRRRANLLAHIQNTHHQYNLAPPTAKIAYKANRAGVAEIFEEPDARKSVEIDFALIGHYDDLLRDIQLHLERRAKQHDPLAYHRLRSVPGIGKVLALTILYEIQDIHRFPRVQDFLSYSRLVKCEHSSAGKKLGTGGAKIGNAHLKWAFSEAASLFLRNNPEGQKHVRRLAGKHGKSKALSILAAKLGRAVYLILSKERVFDMERFMSSAA

SEQ ID NO: 450049 - protein, 354 aa, unidentified
MIIIGCDFHTRYQQIAMARAETSELLVERRLDHESGEAHAFYRNLQNSQEPVRVGIEATGPIHWFERLLTELGHELWIGDSGKIRASEVRKQKTDERDARLILDLLLAKRFPKIWVPTPAERDLRQLLWHRHKLVCLRTMLTNQLHFLAMSQGLCRKQKLFTKKGRAELGSLTLGPWASRRREELLKLLGQLDPPIAELDRAVLEEAKRREDAVLLMTHPGIGPVTSLAFVLAIGPITRFHRSKKIASYLGLNPSEASSGGKRRLGAISKQGNTMVRWLLIEAVYPAVRLDPALRQDYQRLKFRRGHAVAKVAIARKLAVRMYWMLRSGADYTQLVRRQGSPGPTLVNASSSLG

SEQ ID NO: 450050 - protein, 416 aa, unidentified
MTDDARWFVGIDWASETHQVCLVDAGGKIVGERGFPHGGAGLAEMCIWLLVTTRAEPTVIAVAIEVPHGPIVETLLERGFLVYAINPKQLDRFRDRFTVAGAKDDRRDAHVLGDSLRTDRHCFRHLAAEDAVTVELREWSRMAEDLQQERNRLANRVREQLWRYYPQALKISDDLGADWFLELWAAVPTPAKAARVHESSIDRVLKTHRIRRIAAAEAAQVLRQQPLTVAGGTVEAASAHIRAVAARLKLVNRQIKEAHRRLDALCGKLAAGEEKTASGQAPEQRDVTILRSLPGVGRIVLTTLLAEAAEPVRRRDYHALRTLSGVAPVTKRSGKRCIVIMRQACHMRLRGAVYHWARVAIQHDPLSRCRYAELRKRGHSHGRALRSVADRLLAVACAMLDQQTMFDPGRANKQAA

SEQ ID NO: 450051 - protein, 348 aa, unidentified
MSQLTRIGVDTSKAVFTLHGVDTADRPVLRINLRRAQMIPFFRKLPPAVVAMEACGSAYYWARELAALGHTVRLVPPQYVKPYVKRGKNDRNDAAAICEAAGRPGMHFVPAKTVEQQAAGMVLKARDTLVGQRTALINTVRGHAAEFGIVAAKGAAKVGVLFSAIEQQSDIPPVAKEMFVLLRQQINDINARIAELDVRLNASHKANPVSQRLATIPGVGPITALTLAIEIDPAQFESGRHLAAWAGLTPKEHSTGGKQRLGRISRAGNERLRRLLVAGATAVIQAASKPDSQQMTEWLRALLARKPRKLAATALANKMARIAWKLMTSGQTYRRDATVGVAKAQLKI

SEQ ID NO: 450052 - protein, 344 aa, unidentified
MAQVTTARVPTVGIDIAKNGVCIHGVDAHGHVVVKKRLARQKVLPFLTQLPPCLIGMEASGGAHYWAREFTQLGHTVKLMSPQFVKPYVQSQKNDPNDAAGICEAVERPRMRGVPVKSITQQDVQALHRIRERQIKARTALINQIRGLLMEYGIVIPQRASQVRHKLPIVLEDAENGLTATAREWLHALAEELQALDQRIAATDQQIERVFEADEACQRLAQLPGIGPLTATALVAAVGDATEFKNGRQFAAWLGLVPRQHSTGGKTTLLGMTKRGNCYLRTLLIHGARAVLRVVDRKTDARSRWLQGVKARRGMNCASVAQANKTARVAWALLAKGDRYRHAA

SEQ ID NO: 450053 - protein, 387 aa, unidentified
MPQQLDDLSRSLTPLEQDSTIVAVIEMSQASWLVAGIVPGIERHPLKKLEPSEVELLRLLMRWRAEATQNGRTITRIAVAFEAGRDGFWLARWLRARGIEAYVIHPASVAVSREHRRAKTDRLDTGLLKRVFLGWLRGEPDHCHMVAIPTLAEEDAKRPNREREGLVRERTRLVNRVKSCLVRFGVRTFKPTLRNAPDRLATLRTPEGVPLPPNTLLELRRDMARLRFVMDQIKEVEEARAQGLNQVPPDKTHVMVRLLARVIGIGLETADMLVQEVLARTWRDRRAVARYAGLTGSPDESGSRRREKGLAKAGNARVRRGMIQLAWRFLLFQKESALAQWYRARTADARGSTRKTLIVALARKLLIALWRMVTTGEVPAGVVLRAA

SEQ ID NO: 450054 - protein, 356 aa, unidentified
MQTQVTKKIDFSGKDLFIGLDVHKKSWSVTVIVDGIEHRTFTQPPDPGALNNYLHRMFPGGSYNSAYEAGFCGYGIHRELKSLGINNIVINAADTPTSQKDKMHKRDPTDSRKIARELEKGSLRGINVFDREPEELRSLNRTRFYLMRDLRRSKNRIKSFLMYYGVPIPSEFDNNQWTLKFISWLKQVRMKTPGGQDAFSHLITSYEHHRQQLLILSRIVRLRISQYDKELYTLLKTISGIGPLTASALITEIGDINRFSHINLLASYVGLIPRIKESGETTRTGGITYRSNNFLRVLLVEASWQAIRQDPALMQYYQRHLINSKGHKVIIKVARKLLNRVRYVMKHRKPYVTGVA

SEQ ID NO: 450055 - protein, 340 aa, unidentified
MHKDVKFYLGIDVSKPWFDISLMPVVNHEKQPMLTERFDNTAEGIKQLHHWLKRMEVLFNENSLLVIENTGVYHRLIWEYCSAHNLPIHIGNATHIKWSFGIARGKNDKIDSKRLCLYAFKQADELKATPALNPALLQLKDLMTSRSRLLSQINSIKVYLNELKLSNSKEIQKLMEHSHKAAIEGLKKSIKLIERQIKQLIQNDPTIAKNYNLLISVPGIGHLTAVYIICCTNNFIDKVTGKKLASYAGVVPFENTSGISIKGRSKVHKMANKDLKKLLHLCALVAINNYPEFKTYYERKKAEGKHSMSIINAVRNKIVLRVAAVINKQQEYVDNYKNAA

SEQ ID NO: 450056 - protein, 316 aa, unidentified
MYLGIDVSKLTIDCCLISDGQNHEKRFSNNPKGFQLLTDWLKFHQMTSELHCCCEATGTYYEPLANYLYQHYTVTVENPRRIKGYAIAELQRSKTDKQDARLIAQYCQDRKHKLKAWIPPSQEQKQLQELSRYLDHLKQQRATEITKLHEAPDYIAPHIKITIENLSGQIRDIKKQLLQFYKSHTDYNKQRKRLKTITGIGEQSAAVLLSAYKRHPFSNQKQFTAYLGLDPRKNQSGSSVNGKSRISKIGNADIRKSLYMPAVVAYRCNVFSSFVNRLKAKGKPIKLILIAIMRKLAVIAFNLLKNGQDFEPERYK

SEQ ID NO: 450057 - protein, 415 aa, unidentified
MTDQSRFYAGIDWASESHLVFLINAEGRKIGEREFKHSGEGLAEMMAWLMGASGAAEPSQIEVAIEVPHGPVVEALMERGFGVHAINPKQMDRFRDRFSLAGAKDDSRDAEVMASALRTDAHCFRRLSPVDPTVIELREWSRIAEDLESEHTRLTNRLREQLWRYFPAILELGGDLGADFMLDLLKLVPTPDRIARLRESAIARLLKQHRIRRFGAAHVMEVLRKPPLRLAEGTIAAASAHVAVLIARLRPLNQQIKQAHRQIDQLIARLVPAEETEPGQKKQHDVVILASSPGVGRIVLATLLAEASDPLRRRDYPALRSLTGVAPVTKRSGKSHVVVRRYACNQRLANAVYHWARTAVQNDPTSRAKYAALRGRGHNHARALRSVADRLLNVACAMLKAGTTFNPELVARKTA

SEQ ID NO: 450058 - protein, 352 aa, unidentified
MPQFVGCDAHKKYSVFVAMDEQGRTGPAVRVAHDRQVYREFLNQLPAHSPIAVEASGSYCWLVDEMERSGHQPRLANPLEAKRRMGKTKKTDKLDATGLAILLRNGTLPEVWIPPGELRDQRELLRMRIFLVRLRTQVKNRIHATLARHNLQIAGTDLFGVAAREQLGQRLPELPSHSRETVIGELAVLDFLDTQIETAEQQLEAVFASCSEADLLRTLPCVGKILGMVLTLEIGKVERFPSAAHLASYSGLVPRVHASGGRTRMGQVCSNVNRHLKWAFVEAGNLVVMNQRRLAGTHVVQLYQRIKRHKNHQKAVVAVARHLAEAAWWVLHKQEVYREPQSSRPDLSSTHG

SEQ ID NO: 450059 - protein, 369 aa, unidentified
MITTVRYVGLDVHKNSITIAVADSQRKAAQYFVTIPNDWQHLLKALRRLSPTLARLRCCYEAGPTGYALYRRMKREGIHCEVIAPSLVPVQVGNRIKTDRRDAVKLAHYYRSGDLTPVYVPEEETEALRDLERARDDAKRAERAARHQLGKLLLRYDLRWDGGTNWTTRHLAWIRKQKFPHESSQRVLEDYLKTVEDATERVARLTADLGELAPKTALAPLIKALQAFRGIRLVNAVTVAAEIGDFRRFATPGQFMAYLGLIPGERSSGETIRRGRITRTGNGHVRRALVEAAHSYRYRPNMSPEIRKRNEGVAPGVQRIAWRAQQRLHKRLNHLVSRGKNTQKAIIAVARELAGFIWAVAQEEQLLAP

SEQ ID NO: 450060 - protein, 321 aa, unidentified
MIYVGIDVSKLTFVVAYSSAKSSKTKTFKNTAKGIREFIKTISVDEHHCVMEATGNYSTLLVYMLSEFGFTVSLENPLKIKNFSKVMLSVIKSDEIDARLIALYGEKMQPSPYRMRSDSILVIKQKRTVLRQLKKQLVATSNLKGSMEVLPIYDSKCKKTIEKTIAFLGKQIKYMEEELASLVNDEFKKQMDLLTSIKGIGVTLAAALIVATGGFTYFDNAKQLTRYLGLSPTYQQSGTSVNFKGHINRNGDPILRSQLYVAAFSSLRCNTECKACFDRLRSKGKPGKVAVVAVANKLVRQAFAVVTQDKPYVDGFISVKP

SEQ ID NO: 450061 - protein, 346 aa, unidentified
MDFDPKEADVKFCGIDLHSNNSVVIVSDEEDRIVFNKRLPNDLGQIRAALEPHREELAGVVIESTYNWYWLVDGLMDAGYWVHLAHPAAIKKYEGLKHSGDFADAAYLAQLLRLGLLAEGYIYPRAERGARDLARKRMQLVRYRTAQILAIEGILMRQTGARMKGEAVKRLTTEQLDAFAFAPDVALAVEANRAVSQALGQQIEALERRLKERVSLRPEYRLLKTVPGIGQTLATTIMLETGAIGRFAQVGNFSSYCRCVDSLRESNGKKKGEGNTRNGNKYLAWAFVEAANFALRYCPQAKCFYERKKSKTNRVLAIKALAHKLARACYHMLRDQKPFDVHLCFG

SEQ ID NO: 450062 - protein, 339 aa, unidentified
MNHYVGIDVSLEASSVCVVDGNGKIVCESKIVSEPDALITWLKGLKLELTRIGLEAGPLSQWLYAAMRQAGLAVELLETRHVRNALKTMPVKTDRNDARGIAQLMRLGWFRPVHCKSVAAQETRALLTARKLVQVKLHDTEMSLRGILRGFGLKVGKTTPARFEGRIRELVAGHPSLEAIAQGLLAVRVALRRQFDRFEKQVRAMARCDTRARLLMSVPGVGPIVSLTFAAAIDDPARFKSSKQVGAYFGLTPTKYQSGETNIDGRISKIGDASVRTVLYEAANIILTKPLKGCTALKSWAMKLARRSGMKKAKVALARKVAVIMHRMLADGMSFRVAA

SEQ ID NO: 450063 - protein, 402 aa, unidentified
MNSVGIDISKGRSTIAVMRPFGEVVISPFEVRHTDSELSELARQLKSLDGETRVVMEATGNYHAPVAKLLHDAGLYVSVVNAKLVHGYGNNDLRRVKTDKKDAVKLANYGLDRWLTLPRYIPEEDTRLLLKNCYRQYRQYSKVQTVLKNNLISLLDTVFPNANRLFSSPIRGDGSEKWVDFVAEFWHCRCVSEKSERAFTSKYLRWCRKHGYNFSEAKAHTIYAEASGHIGVMPKSETTKLLVEQAVSQLRATSTALAALKHEMQSLASMLPEYPVVMDLFGVGPTLGPQLIAEIGDVRRFYSKKALVAYAGLDAPPNDSGDVTGRHKSMSKIGASSLRRTLFLVMSVYLQTAPLDEPVYQFMDRKRAEGKPYRVYMMASANKFLRIYYATVKAYLELLEQV

SEQ ID NO: 450064 - protein, 355 aa, unidentified
MLAELVDAVVGVDTHRDTHQVEIALPNGAPIAVTTISNDTTGYAELLAWIVDHAPGPRLAVSIEGTRSYGVGLARAAAAAGLVVLECEQPNRRARRGKGKSDPIDAHLAVLTALRLDADRLPTPRADGDREALRILLSARQELTTASTAQTNRLRALLLGGDDTDRQLARAALTETRLAGLARRRPPREASRDQAVRHAEIRRLALGLRDAARALKANRAQLQTIVNDVVPGLIERRGIGPVSAAQAIVSFSHPGRCRNDAAFAALGGASPLPASSGRTVRHRLNRGGDRALNRALHTIAATRMRSCPTTQAYVARRTAEGKNPREIRRCLKRYIARQLYRSLTTAMTPAIEVSR

SEQ ID NO: 450065 - protein, 398 aa, unidentified
MNLNIGIDIAKNVHEACLVNENGEQIGKFIQLKNSKKSIEKFTKHIEKVSKELNAEPRIGMEATGIYWYSLFSELSKKYKIHVYNPSQISGFASVNIRESKTDKIDAKTIANMLRFGESPKTNYSDTQRLELREYGRFYFKLTSIKINLKKRLRRNLHLIFPGYDEIFKNLFTATSKEIITNITTPEKVLEMGEKKLLEIMKDKSKNHIDPEKAKILIEKAEDTIPSEIIKESSLFEFQMMLEMIENYEKQIASIENKMMSIWNKVREKHYIQTIGGVTELRAAMIWAEMGNVDDFKHPDQIVAFAGYDPKVRKSGNKEVIGGPNKRGSKILRWVLGWTVQEAKCSNPVIGQYFDKKIEQGKHYNNARCAAAKKLIRIIWSVEKNKKSFQIPDNLQSC

SEQ ID NO: 450066 - protein, 343 aa, unidentified
MNQNIFYVGLDLGSTVCYQVVMNQSGKIVRSRPFATNEPNLRSAFQGFDGELRVHTEAGELADWVSQVIKPLVKQVVVSHPQSLAWIAKDSRKCDKLDAKKLADLLRCGLTHEVFLPVNQARRTFKQLVRHFDEATRAQAKLKAKLKARLRCLGIIRRDAAVFGKAEREQIFGQINDQFLRQMFQGLYSTLDALLEEMKTAKQLMLEAARQFPEVKLLQTAPGVGVIGACRFVARVQNPRRFSNKRKLWRYCRLGVAHRSSDGKLLAHPRLDRNGCGALKDVSRKAFEAAMRCGKDNSFKRSFKKSLAATHDKIHARLSTQRKIVACLRAMWLANKPYRTDLP

SEQ ID NO: 450067 - protein, 342 aa, unidentified
MDEYDGRQFVGIDLHRQRSVIVRQSESGEQLSAVRIVNDPVALGLQLEQAGADPEVVLEATYGWYWAVDVLQAGGARVHLAHPLGVKGFRYRRVKNDVRDAADLADLLRMGRLPEAWIAPPETRELRELVRYRAKLVAIRSGLKAQIHAVLAKAGVLIAVSDLFGVTGRQRLAKVPLRPAYAQRIGSLLELIDILDSHEARFAVMIAERLDTHTGYQAIQQLPGVGPTLAAVFVAEIGDVHRFTDAAHLCSWAGLTPRHRESDTVVHRGHITKQGSKAVRWAAIEAVQRHPTTAKISADKQRIEARRGKNIAKVAAARKLLTLVYYGLRDGHIRALERARAA

SEQ ID NO: 450068 - protein, 420 aa, unidentified
MDQLIERCCGLDVHRDTIAACVRVPGPNGKRQHEVRTFGTTAVELLALRDWLEAHAVTHIAMESTGVYWKPVFYVLEEAFTCVLVNAAHIKQVPGRKTDVKDCMWIAQCLEHGLLRGSLVPPAPIRELRDLTRHRKVLIQERTRAANRVHKLLEDAGIKLASVATNILGVSGRAMLEALVHGTTDAEVLADLARGKLRKKLPALRQALAGRFRPHHAFLVSQLLAHLDYLDEAIATVSEEVEGRLAPFAAQLTQLDTIPGINKRTAEVIIAELGVDMSSFPSDRHLASWAGICPGNNESAGKHKSGKTRKGNRWLRMTLIEAAAAATRTKDSALQARYRSVMRHRGHKKAVVAVAHAMLRAVYHLLAEGTTYREPGAAYYDRRHTHRVTRRAIQLLERPGVPCGFGTGCLTVSLDLREIF

SEQ ID NO: 450069 - protein, 318 aa, unidentified
MDGPCFVGIDVSKRTLDGCLRPGAAFQHPNTPAGIGQVVTLLQARPVTLVVVEATGGLEGPLVQALHQARIPVAVINPRHARAFAEASGELAKTDRIDAALLAFFAETFRPHPQRPADAATQQLEALVRRRVQLIDMRTMERNRLGNCADARVRRDIQAHLDWLQERLDQADRELAEALSQHPSWQARARLLQSIPGIGPVVSQTLVASLPELGTLAARPLAALVGLAPFARDSGQRRGARRIFGGRAEVRAKLYMAAVTASRSRGVLGAFYQRLRAAGKQAKVALVALAHKLLTIANAVVRTGQAFDPAQAPLVVGV

SEQ ID NO: 450070 - protein, 322 aa, unidentified
MAMLSFGGIDVSKDRLDITVLPDEQCSSVSNDAAGWAELIEQLRGSSITAIGVEASGGYERGVVRALLAAGMSVRQINPFKLRQFAKASGILAKNDRLDARMIASFVAIMPTRPAQRQTPMIEQLAAMLTVRRQLSDHKVATENASRLLEGAMLQRLSRRRVAGLTADIDLLDQRLVEIVTADAALAHRFRLLTSMPGVGAVLACTLIALLPELGQMSRKQVAALVGLAPYDFDSGKLKGRRCIWGGRARVRHVLYMAALSASNWNPALKAFHDRLAATGKKPKVVIVAVMRKMITTLNAMLRDGTTWVDRYSGRRSAATAR

SEQ ID NO: 450071 - protein, 344 aa, unidentified
MQITTVGLDLAKNVFQVHGIDATGQVVVRKSLRRSQMLPFFAELPSCLVGIEACGTSHYWARELIKLGHEVRLMPPAYVKPYVKRGKTDAADAEAVCEAVTRPTMRFVPVKSPEQQAALSMHRTRDLLVKQRTQLINMIRGLLAEFGVDIPKGLERALLMARQIVDSKAPEVPMEAAKIVATLSQQALDTHVRLREIDRDLAVWLRGNDVARRLMTIPGIGPIGATALAASVTDPQQFRSGRQFAAWLGLTPLQKSSGGKERLGRISKMGDKYLRKLLIVGMTALVRRAKYNPGKIDPRLADLLARKPTRVATVAMANKTARVIWAIMARGETYRTGHQPALAA

SEQ ID NO: 450072 - protein, 308 aa, unidentified
MIAQNYVGCDISKQWLDFFDETSGRLRRIDNQADAIAAYVAGLDPSRDFVVMEATGVHDRLLRHALAKAGVPFSRHNPAHTHHYSKSTRRRAKTDPLDARMLSDYGRRYHPEAEPAPREEVEQLQSLAGHRDHLVNMRATAKKHLAEAFEEIVIADLEETIAYLDTRIKALESRIAEVIRRNQDVSRDHALMVSVPGVSKVGALSLLALLPELGQRSPKAIAALVGLAPFDNKSGKLNRRSQIQGGRSRVRRALYMAALTAIRTCERFKTFYTALAARSGSKKLAIIAVARKLLVVLNAIMRDKTAFV

SEQ ID NO: 450073 - protein, 367 aa, unidentified
MMGWMAPLRHLSAKLLCDRISSEWEPSMGEVTTIGLDLAKQVFQVHGVDAKGATVLRKQLRRAQVLGFFSRLPPCLVGLEACATAHYWARELAALGHELRVMPAQYVKAYIKRNKHDAADAEAICEAVVRPTMRFVPVKTADQQAAVLLHRGRERLVCQRTGLVNALRGHLAEFGVIAPQGLRNVGKLIAIVRDQTDARVPDLARQVLQVLAAQIEQLEAAVAAIEKQLMAWHKSNPVSQRLASVPGIGPIIATAIAATVVEPSGFRSGREFAAWLGLVPRQNSTGGKHRLGGISKRGNQYLRRLLINGASANLLRSKATNADPWVIGLRRRRPPLVVAVALANKTARIAWAVMNRHENYERVAAAA

SEQ ID NO: 450074 - protein, 394 aa, unidentified
MKLIGIDIGKNKHFFCIMDKDSGEIVSQPASFSNDKEGFDFLLQKIKSYPKDSILIGMEDTGHYHFTLLKYLLDLQYTVALINPKTTDFNRKMQGGITKNDKLDTINICDVLDTPERKKQYRITKVNSFNLYEQKQLTRHHHNLKEEENVYKNRLQKCIDIVFPEFNKLFNSKYGIVYMNILKMFGSAENIANTDIRTIRKCFEIEGRGNRISLTPERLKECARSSIGISSSAEVIQIKHLTAQIELIEEQLTEIDKKIEEFSIQNNSPILSIPGISHFSGTSILAELGDISNYSKLSQIIKFAGVAPLHYESSQFNAQHTAITKKGSKYLRKTLYQIILPVIRHNPVFNKYYQLKISQGKGHRCAQGHCVRKLLRIIYHLLKTNQQFDPQLLR

SEQ ID NO: 450075 - protein, 354 aa, unidentified
MHYVGVDYHKKSSYVTVVDERGRVVKEGQIASTQQALAGMLDGCAEGASAVLEAGRNWPVMYDWLEELVEGVTLAHPAKVRVIAEAKVKTDRIDSRMLAQLLRADLIPTVYVPGRVTQEQRRQLRQRMFLVRLRTMLKNRIHILIDRHPELSAKAQGWSDLFGKAGRQWLAQVEVPGVDAELLAEDLGLLEIMEARVKASDGWVSQLSRRDGRARLLTTLPGIGDFFALLLAVEIDDVRRFSRPQKLCAYAGVVPSTYASGGYVHHGRITKQGNKWIRWACIEAVYPAIRKDPALAAIYERLKAAKGANVAKVAVAKRLLTIAYRLLTEGRRYRPMAEQLSARRRISPAAPVCV

SEQ ID NO: 450076 - protein, 340 aa, unidentified
MSKSSPTSDKVFCGIDVSAETLAIAVLVPDQPWTEREFPNTPTGHPALIGWLARLGACARVALESTGIYSMDLALALAAAKHIEVAVLNPKDVHRFAGTLRRSKTDSADARALAEYSLRMPFTPWRVPSPAQLQLRSLSRYLHSLSEERTRTKNRLHAARSSSITPPAVLDDLSRELKRMTQRLLRLRRQAMLLVRADAALSQRHDLLTTIPGIGSISAVQLLGELTLLTPTMTVRQWVAHSGLDPAHQVSGTSIHRPSRISRHGNRHLRRALFMPALVAARHDPHFAAFYQNLLQRHKAKMQALIAVARKLLHTIYGVLKTSTPFQGAKLFPNIQLITS

SEQ ID NO: 450077 - protein, 377 aa, unidentified
MSKIRFVGLDVHADTIAVAVAEPGGEVRSVGIIPNRLESIRKMLGKLGPAQHLKTCYEAGPTGYVLYWQLTQLGVVCEVVAPTLVPTKAGDRVKTDRRDAEKLARCYRAGELTAVWVPDAAHEALRDLVRAREAAKKDQLRARHRLGKFLLRHGRRPTHAGKAWTKKYLEWIKTQVRFDQPALEATLAHYLQEVDHAADQILKLEKAIDEAVAQASPEIRSVIEALQALRGVAQMTAATIVCELGSLSRFPSPRQLMGYSGLVSREHSSGNRIQRGAITKTGNAHLRRVLVEAAWAYQHRPNVTGFLLRRQKSLALSDEVKQIAWKAQYRLHKRYQALALHGKNKNQIVTALGRELLRFVWAIAVHTEAQCKLVKAA

SEQ ID NO: 450078 - protein, 371 aa, unidentified
MKSILFIGMDVHKNTFSLCCYCKESGEILREVKCAAEAKLIKKFIDGIKKDLNEDLEFKCGYEAGCLGFSLYKELKALNIECDILAPTTMQSSSKNKVVKTDKMDARNIAINLANNTYKAVHIPDDEDLKVKEYIRMMNNFKKELKKIKQQILAYILRLGFNYEGKSKWTLAHMKWLRNLEMEGIEKEILNEYLAQYDLLVDKIERFTNRIDEFYNTERYKENVSKLRCFKGIDTTSAITIQVETSDFNRFPNAKAYASFTGLTCGEQSSGDKRNVTCITKQGNSTLRTTFVECAQAIVKGSIYNPKSKRLKSRQKDQEVNVIAYADKATNRLMKKYNKLKERNVPHNKAIVAVARELACFVWGMETGNIN

SEQ ID NO: 450079 - protein, 384 aa, unidentified
MMLITSDQPQRQSEAAARNDNATVFVALELSASQWLVAANIPGSDKISKRAVPAWGVDTLLSVLKRWRAQAEKRVGGPVKLVVIQEAGRDGFSVHRLLEEAGIESWVVDPASIAVDRRKRRVKTDRIDVEKLLQTLMAWARGERLVCSMVRPPTVVQEDDRRLSRERGRLKKERDQHVIRIKSLLALHGIAGYEPIRRDRRARLEALRTPAGRLLPPRAKAEIVREIERLEIVAAQLAEVEKERDVAITSRDGGVALERLRAIGPEFASVLTLEAFFRNFSNRRQVAAYSGLAPAPWQSGGINRDQGISKAGNPRLRRVMIEAAWMWLRYQPDSALSRWFRARVGDAKGRLRRIMITALARKLLVALWRYATQGVVPEGAVFKA

SEQ ID NO: 450080 - protein, 347 aa, unidentified
MEKASQAEVQVFAGIDVSARELSVAVQCGIKEGIAITTFRNQAAGHKALLAYLLRAKGRARVCLEASGNYSLDLAFTLQAHPQVEISVVNPRRARRFAESLGERSKTDPVDARVLCEYALRMPWVPWVPPSLTALRLRSITRAIEDLVAMQAQEKNRQHALLASDALPALLIRELEQHLRYLKLRITRLRREALRLIARNSELNRRFHLMLTTPGLGETSSLQILGELAVLPETLDARQWVAFSGLDPKQFSSGTSVEKKPRISRGGNRHLRRALYMPALVATRHEPFMRDFYQRLLRRGKAPLQGVVAVMRKLLHALFAMFRRDEAYDGSKLCPAEFARHTAVVCV

SEQ ID NO: 450081 - protein, 450 aa, unidentified
MAPAGGHTCPYPWKIVGEVVVEEDVDQSLYVERIAALDLGKAVLEACVRLPHPSRPGRRMQEVRTYPTRTAHLLQLADWLRCEQVTTVVMESTSDYWKGVYFLLEAEGFDCQVANAREVKNVPGRAKTDKADAVWLAKVAERGMFRPSLVHPEPIRRLRDFTRYRRSLVRDRSREKQRVEKLLEDAQIKLSSVISDIFGVSGRDMLDALATGQRDPKVLADLARTSMRGKTLVLREALTGFFTDHHAVLLRMMLENIDRLTGQITALETSIEELVAPFSHQVEQLAEIPGIGRIGAAELIGEIGVDMTRFPTAAHLVSWAKFAPAVHESAGTKKQKKRPKGNPWLAATLGNAAGALTRSRTFLGARYRRIARRRGKGKAIVAVGNSLLTIAWHLLSDPEARFHDLGADYYQTRINAERRARNLAAALEAVTGQKIIIRGGKAIIINPEAA

SEQ ID NO: 450082 - protein, 340 aa, unidentified
MNNSVIGLDIAKNIFHLFTLLVDGKTLKKKLKRSELLTFFATYPASIIGIEACGSSHHWARELTKLGHEVILLNARFVKNYVVGNKTDFNDAEAIYEAVLRPNKRVVAIKTVAQQDIQLIHNIRKDLVDQRTALVNQTRGLLSERGIVINQGIEQFREQLPLILEDAENGLTDLTRELFAEQYEKIRALDAEIKAQDQRINRLCNANDLSKRFLEVPGVGPLTATIVAADIGDSGKGYKSSRDYAASLGVVPKQHSSADKQHYLGISKRGNRYIRTLLIHGARAVLKNCTKKTDKLSLWLQALVARRGFNKAAVALANKNARILWAMASNGKDYEALAAA

SEQ ID NO: 450083 - protein, 315 aa, unidentified
MTEPQSIKVSVGIDVSKSRLDVAIHETAESWSCSNDASGGAALVPKLRQLKATRIVLEATGGFETLVTAVLSAAGLPVIVVNPRQVRDFAKATGQLAKTDRLDARVLAHFAAVIEPPLRPTQSDQAQHLEALLARRRQIVEMLVAEKNRLANNRDHAVVKDLKTHIAWLERRLKASDDELQRVLKATPAWRERDDLLRSTPGVGPVLSLTLLAQLPELGQLNRRQIAKLVGVAPFNWDSGKWRGSRHIWGGRAAVRAPLFMATLCAIRINPTVKSFYQRLIKAGKAPKVAITACMRKLLTILNLMIKTQTPWRIA

SEQ ID NO: 450084 - protein, 403 aa, unidentified
MDHALLAYDVYVGFDIGKFTHHALAQRAKDQKIILNKTVRQDEAEIRSVLEELLAFGRILVALDQKASIGQLVVAVTKDMAIDIGFLTPNDFFYFSKGYSETKSDIKDAFVISDVAMRFTDRLSAITADDEERESLKALCASRKSLVEENTRDKNRIRSFLVQTHPALESLIKREDLNKTVYLRIFEHYGGFLGIKRAGQKRFEGFIAKQPCYKNKAAGLAERVFEVLEKQTVFLPGSAAKEAAIKQAASFVIARNAKLAPLEDKIAALYQSFPESVILSSIPGVGAIWGPVLLSEIGSIDQYKDAGHLAAFGGVAPSRRQSGATLNQANKKIKCNRRLKEAFCQSAWSSVSWDEWSQWYYNKKLAEGKKHKQAILALARHRTDIIYAMLKNGSLYEPKTMKH

SEQ ID NO: 450085 - protein, 382 aa, unidentified
MSKFIMVGCDLHDKTMLLKVACDRGPAETMSVRNTRSGRTRMIADLKARAKAAGGASILFAYEASGQGFGLHDVLTVAGIDCKVLAPTKISRSTQQQRVKTDEKDAEQLLQLLRAHVLAGNPLPTVWIPDMQTRDDRESVRCRLDAAEKLTGLKAQVKGLLKRNQLVRPESAGKGWTKLYWAWLRGLRQDSANGVGLRTSLDSLLRQLDFLEEEIERLDKALLELSRSARYATAVNELVKLSGVGILTALVFLTEVGNLTRFANRRQISAYLGLVPKCYESGSANDRKGRITRQGPSRVRRVLCQAAWARVRCEGADQVAYERIVAKNPKHKKIAAVAVMRRLAVRMWHIARGATPEASGPLTGRRRSSAREACASPPCQLA

SEQ ID NO: 450086 - protein, 373 aa, unidentified
MAKIQDGFAKCKPVYVGIDVHKRDWVVTVLCQGEELYHATVVPDPAGLVRLLKRFEASEVHTVYEAGPTGYWLHEALAEAGFDSIVTPPSLVPHVGGRVKTDRRDSRKLAAMLAGGFLRRVYVLAPEERAHRQLLRTRNQIEQHRRKAQNQIKSLLLFHGKRAPATLKERWSETHVHWMETTEWEYPLLKISLNAMLTMYRNLTEQYKDLTHEIELLALTEKYRERARLLTQIPGIGMFTAMAILIELQDIERFARADQLASFLGLTPSQHSSGERIRMGHITRCGNYHVRTRLVESSWTLIRYDAGAKATYERIKHQTGSGRKAITAIARRLALRIRRVLLDKAPYRLSDGGRLATGRDKTREAKRFVLRPL

SEQ ID NO: 450087 - protein, 354 aa, unidentified
MSQTPNTAIAVIGIDIGKNSFHVVGHDARGAIVLRQKWSRGQVEARLANRPRCLIGMEACVGAHHLSRKLASLGHDARLMPAKYVRPYSKGQKNDFNDAEAIAEAVQRPTMKFVATKTAEQLDLQALHRVRERLVSQRTGFINQIRAFMLERGIAVRQGIGFLRTELPTILATRTDALSPRMLRVIEELAVDWRRLDQRIDGLSGEIEALARQDQACSRLMTVPGIGPIISSAMVAAIGTGDVFSKGRDFGAWLGLVPRQISTGDRTILGKISRRGNRYLRVLFVQAAWVVLVRIKNWERYGLKSWIEAAKRRLHHNVLAIALANKLARIAWAVLAKGRAFELTRTDDAGVRPA

SEQ ID NO: 450088 - protein, 455 aa, unidentified
MGTERKVAGLSLECIEPNAAGIDVGARSIYVAVGAERVAEPVRCFATFTEDLRAMAAWLKQCGITTIAMESTGVYWIPVYEVLEDAGFKVCLVNSHHVKNVPGRKSDVSDCQWLQYLHSVGLLQASFRPERDICALRALSRHRAGLVEVAAVHVQHMQKALTQMNLQIHHVLSDITGMSGLAVVDGILQGERDPQRLAGLVQSRIHADRETVIKSLVGNYRAEHLFTLRQSVAAYRHYQKMLADCDREMEQYMGRLPDKGQGGSGQPLSGKSGKGKRRKNQFHFDMGKELYRVLGTDLTLVPGLSALTVHTLVAEVGSDLSRFANAAAFTSWLPLCPGIKKSGGKVLSSKTRKTNSRLSLALRLAAQTLHRSHSYLGAFYRRLRARLGAPQAITATAHKLARIIYHLVTTRTAYDESVFRNEEEKHALRSQHRLQRQAEALGFQLVPISHQEVVH

SEQ ID NO: 450089 - protein, 358 aa, unidentified
MTNLAEKLDFSGHTISCGIDVHLKSWTVSLYLGKQYLKSFVQSPPSVEGLRNFLLTSYPKANYECAYESGFCGFWIQRAFAALSISCIAVNAADVPRTDKSTKNKNDRNDSRRIAEALQAGQLEGVYVPDPELEADRQLVRLNERYSNDLTRAKNRIKGLLRLMGIEIPHRFAKANWSNAFVDWLKQISCGESSIRVVLDRQLSIMETIRAQKLDTLREIRKLMHKARYQNISRLLCSIPGIGPVTAAVLIVEIVDITRFEKSDRLNSFVGLCPMQHSSGEDDRKGSITTRHHRRLRYLLVESAWVGIRTDPALTLCYNRWSARVGSRRAIIKVARKLLQRIRYIWTHSVPYVPGLVK

SEQ ID NO: 450090 - protein, 455 aa, unidentified
MNRQGFLGIDVSKGYADFMLMDNSKSVIEQSFRLNDTRKDHKQLGELIEGWLASGLETIFCGVESTGGYENNWYHYLQGLGQSKAVKVTRLNAKGVKGISDAALKRTITDQVSAENIATYLVCFPEKVSYSGNLKEHDSFFKDGRSYYNFIQMLQKQKVQISNQLEKLLYEHFNEMLIYCRHGLPVWLLKMLSKYPSATRVKKAGVANLQKIKGISAGKAASILKKTEDSIRQSSDTISHAIASMAEEILYKEEQLQGHKYKLSKGFADNEDVKLLQSMDGIAIDSAVALMIEIERVDRFVICKKLCSFFGTHPTFKQSGDGTWGSHMSKKGRPAVRKILYMSALTAIRRNPSLKQLYARNRSKGFNHYQAIGVVMHKMLRIIYGILKNKTPYNIETDNLNKQKSQEKEQQKKEIEKQQKKQNKRDLFRFQSPSLDAPISRRSADKIKKQMTSQT

SEQ ID NO: 450091 - protein, 340 aa, unidentified
MEKSVKFYLGIDVSKLWFDLSVMSVMDHQKQAMISERFDNTTEGIKEFGKWLEGRKVSFNEDSLLVIENTGVYHRLIWEYCSVHGLPIYIGNATHIKWSLGITRGKNDKIDSQRLCSYACKNAEELKATPALNPVFIRLKDLMTSRSRLLAQVNSIKVYLGELKLSNSRDIQKIMEQAHKAAINGLAKSIEQIEIQIEKIIKEDKGIKNNYDLLTSVPGIGHLTAVYMICHTNNFAGKITGKQLASYAGVVPFGHTSGSSIKGRDKVHKMANKDLKKMLHLCALSAIKNYPEFRAYYERKMTEGKHGMSVINAIRNKIALRAVAVIKNQTKYVDNYKKAA

SEQ ID NO: 450092 - protein, 331 aa, unidentified
MKFKLFIGIDVSKSTIDVYVRNSGIHSVFPNNYEGFLEMMEWIREKHGGFQADEMLFVFEHTGLYSYNLALFLEQEGCPFSMVAGLELKRSLGISRGKSDKSDARAIAEYAFEKKEKLKLHKLPSKTMEQLKRLLSYRERLVKEKTAYMNRLQEFEEILPEDELVLLSKSHKEVISCLKEQIETVGNELFILIKEDGELLKQYRLINSIKGVGPQTAMLMIVLTNGFTLFESWRKFASYAGIAPFPNESGVFKGRTKVSKLANKRIKTLLSLCAATSIQHNPEMKQYYERRLMEGKNEMSTINIIRNKILSRIFAVINRETPYVDIFKFAA

SEQ ID NO: 450093 - protein, 403 aa, unidentified
MNSVGIDISKGRSTIAVMRPFGEVVISPFEVRHTGSELSKLAKQLKSLDGETRVVMEATGNYHASVAKLLHDAGLYVSIVNAKLVHDYGNNELRRVKTDRKDAVKLANYGLDRWLTLPRYIPEEDTRLLLKNCYRQYRQYSKVQTVLKNNLISLLDTVFPNVNRLFSSPAREDGSEKWVDFVAEFWHCRCVSEKSEKAFANKYQRWCRKYGYNFNEAKAHTIHAEASGHIGVMPMSETTKLLVEQAVAQLRATSTALAALKHEMQSLASQLPEYPVVMDLFGVGPTLGPQLIAEIGDVRRFYSKKALVAYAGLDAPPNDSGDVTGRHKSMSKIGASSLRRTLFLVMSVYLQTAPLDEPVCQFMDRKRAEGKLYRVYMMASANKFLRIYYATVKAYLESLEHTA

SEQ ID NO: 450094 - protein, 370 aa, unidentified
MRIVENHFLLIIESFIEITVCFMKNSNSLSIRKHAVGIDVSKDTLEVCSGKKTSSESMNFSTSRCFKNTREGFESLLSWARNQSGQNRSVWFVMEATGVYYEQLAYFLHMAGENVCVLVASRAAHYAKSLPIKSKTDAIDARILARYGLERRPETWEPTSPQLRKIKALIREREQLQKQHTQLTNRLHAARNAWGHPQTSLKRLTDHAKQIGRYLEQITIELDNLWQSSRQLAEPVSRIAGINGIGRQTVLDIIAETNGFALITNRNQLASYSGLDVVLDESGNRQGATKISKHGNAHIRKALYMPAMSAIQHNPALKLFYERLVEKHPNQKMIAVTAVMRKLLLLVYSLWKSGKEYDPEFHYRQIMVKP

SEQ ID NO: 450095 - protein, 343 aa, unidentified
MEIQTIGIDLGKTLFHLVGVDASGSVVVRKRCSRSQLVAFTANLRVQRIGMEACSGSHFLGRTLRDQGHDVRLMPAQYVKPYVKTNKSDYIDAEAIAEAVQRPTMRFVPIKTEDQLDLQAVHRVRERWVRRRTAVVNQIRGLLLERGLTLPKGRSYVEQALPDILEDATLRLSDSFRVLLAQLKVELDQLTARIEEIGTVLQHTAKENEACQRLTTIPGIGPVIATALIAAIGNGSGFRRGRDLAAWVGMVPREYTTGGKQKLLGISKRGNSYLRRLFVQGARAVMQHRHNQAPGLSAWLAQLLARSHQNVAIVALANKLLRMAWAVLCKNETYRPPALVASS

SEQ ID NO: 450096 - protein, 371 aa, unidentified
MTSLKALQESSVSQSIGVYIAFELGAKKWVVLFGDRSGRVSRHKLTAGDMERFLGLLERVRGRFKVDRAARVASCYEAGRDGFWLHRWLLEQGIENLVVDPSSIEVDRRARRRKTDRLDAQKLLAKLRGHFAGEREWSVVRVPTAQQEDLRRLERERDRLVKEQSGHRTRITSLLVMHNIRTVPRPLGKLRQWLQMLKLGVCLKSELQRELERLQLLERQLKELEKQTESLPGESGKQQLQLQSLRAVGSVSATTLVLEMFGWRKFSNRREVGACAGLTPTPYQSGTSHIEQGISKAGNKRLRPALVELSWAWLRYQPESELSRWYARRFGSGSKRLRRIGIVALARRLLIALWRFVEHGVVPHGARLKAA

SEQ ID NO: 450097 - protein, 395 aa, unidentified
MPTDNRGLSPCGNRAAYNRKESVVEDSITYVGMDTHKKQHKVALIYPGEDAIIEFSIKNTVVEIRKMVRKIKRTAPDEVKFCYEAGVCGFTLQRRIEAQGCKCAVIAPSLVPVKPGQRVKTDRRDARKLLAMFKASLLTEVHPPDEKQESARDLTRLRQAAKENLDRVRHHILKFLTRYGYAYVGTFWTLKHINWLGTLEFAEPLLRDVFDNYYTEMQHCMQRLKNIDKQLDQLAESNDYKEMVGLLRCFRGIDTLTAISIITEIFDFGRFSCAREFMSYLGLTPSEDSSGEKQRKGSITKSGNQRVRRLLVEAAWHSRHSYNVGHKLKKRREGQPPWAINIADQAGIRLRKKYYRLISQGKIPSIATVAIAREFAGFIWFMMTERQARKVRQVA

SEQ ID NO: 450098 - protein, 366 aa, unidentified
MKKNSTVTTKRNEIFKEPNLTIGLDLGDRFSHYCILDEAGKVILEHNLPTTAKGIHQVFSKIPRCRIALETGTHSPWVSRQLNSMGHEVIVAHARNVRLIGESSRKDDRLDARRLARLARIDPGLLGPVRHRSAKAQIHLTVIRARAVLVSTRTALVNAARGLTKSYGERLRKCGTEQMNREIAKGLSQELRDALDPVLGEIESLNERIKEYDRRIEQIAKEVHPEVARLKQVKGVGTLIALTYVLTLDDPHRFRRSRDAGCFLGLRPGRRNSGKSEPQLHISKEGDRYLRTLMVQAAHYILGPFGQDSDLRRWGLKLAERGGKNAKKRAVVAVARKLAVLLHKLWVSGEDYEPLRNNHQVVSAVA

SEQ ID NO: 450099 - protein, 414 aa, unidentified
MLYVGIDWAVESHTVTLLTRPGEVLKSLVIANTLKGFLTLLDAVRQHVGKDKPAPTPGDVLFIIEDRNQRLVDFLLAQDFVGYLMEPSRMPGYRLRYRSSGNKSDPDDAFIMADVLDRDRDQLPTINPMNATVQTLKTLLMDREGFVRDQTRLINRLTACLRQYYPEALELFSDVAGKTALAFLAAYPDFAAAHRLSRKQVEQFLTEHHCPRTKRLERIVELLAQEPIAAPAAVIETKRRLALHIIQQLQGVQATVAEYDAEIQRIGAENEEVQRFRGLPGAGPQIAGGLYTLFGDDRTRFKSAMAVQSLVGTAPRTIQSGKMRAVCFRFGCNGFYRSQAQQMALGALRVSAWAKQYYRGKRAEGKRHQHALRCLANLLMKIAFAIWRDKTAYDENRHLAQIMRHQLRQKSSTA

SEQ ID NO: 450100 - protein, 355 aa, unidentified
MISTKYIGMDVHKESISIAVMNSAGKVVMECVIETKASVILQFLNGLSGDLHVTFEEGTAAAWLYDLLKPHVARVVVCNPRRNALLKVGNKSDRIDARKLAELLRGNQLQPVYHGEHGLRALKELVRSYLTISKDLARVMTRVKALYRSWGIPCSGTQVYSRWYRATWLSKITEPGVRLRAAFYFQQLDALRTLRQEVRQELLAESKKHKVWKRLCEIPSIGPIRAAVALGILQTPHRFRTKRQLWSISGFAIETRSSADHRQVNGRLQKVKKRVSIRGLNQNHNHDLKNLFKGAAVVASTKPGPFQEFYEALLAKGMRPEMARLTLARKIATIVLIVWKRGVNFDAQYLKPQTV

SEQ ID NO: 450101 - protein, 344 aa, unidentified
MEHYAGIDVSLERSSVCVVDALGKIVKEAKISSEPAALVAFFEALGFAVKRIGLEAGPLSQWLHAGLTRAGFEAVLLETRHVKAALSAMMVKTDRKDARGLAQLIRMGWFRPVHAKSIRSQEVRALLVARKQLLGRLIDVELSIRGILRGFGLKVGPVTRKGFDARIRELVTGQATLERIAGAMLSARVALKAEYEKLHKTVLAIVRDDVVCRRLMTVPSVGPVVAITYKSAIDDPNRITKSKAAGALFGLTPRKYQSGEKDVTSGITRAGDEMVRTALYEAANVLLARITRFSKLKRWAMDVAKRRGSKRAKVALARKIAVILHRMWVDGSTYRWTETQPIAA

SEQ ID NO: 450102 - protein, 320 aa, unidentified
MMAQNNLVVVGIDVAKDKVDACIRTVTERKTCLTTAAGQRGLIVWLRKHQVGKAVMEASGGYERVWVKALRQAGIEVRIVDPKRVRSFAESAGRLAKNDKIDAQMIAWFAETFSEAPSQVDDPAYEEMKALVKGRKSLIDLRTRLEMQKEHEMPTIVRKAHVRLLKKLAEEIAAIETAIATKIKTIPAFAKRAEIIQSVPGFAEATAMTLLAGLPELGQMSNEVVAALVGVAPYDDDSGKRHGQRCIKGGRRWVRNALYMPCVGAATLSNPVFKAFYERLIAKGKAPKVALIACMRKLLVILNTMIARGEMWDTKRYQVL

SEQ ID NO: 450103 - protein, 346 aa, unidentified
MKEASVGQVSTIGLDIAKHVFQAHGADASGHVVFRKKITRAKLIEFMAAQPPCLVALEACGGAHYWAREIAQLGHTVRLIPPAYVKPFVKRHKNDAADAEAICEAAQRPNMRYVAVKDEEQQARTVVFRARDLLVQQRTQLINALRGHLTEYGCIVPKGPAHVARLIAWIEDPASQLPESARAVFKVLIDSLKVVDTQIAGLDAEIARRSREDPIARRLMTIPGIGPITATAITALAPPPETFRNGRDFAAWLGLTPLQKSTGGKQRLGAISKMGERTLRRLLIIGSSAVVHQACKRGAPAGSWLAQMLARKPRMLVTVALANKIARVVWALLMKGEVYRAPVAAA

SEQ ID NO: 450104 - protein, 340 aa, unidentified
MWYVGLDVHSRQSTFCVLDGHGRKLRTETIRGPWDKVLLALAAIKEPWVVCFEASTGYGVLWRRLQPMARRVLVAHPGHLRLIFRSKRKNDRVDAEKLAKLLYLDAVPTVHVPSETVLAWRGLIAYRNRLVQERTGLKNALRAVLRGLGIVAPRSLWTRAGVAWIRGLELGPLDALRRDQLLERILLVQGQVKRLEKELNRVGQQNADVMLLQTIPGVGMRTAEALVAYLDDVRRFARVKQVGSYFGLVPSQDASASVNRLGHITKQGPSLVRRLLVEATWQGIRHSAHLRSYFERIGQGNRERKKIALVATAHHLLRVVVAMLRDGEGWRETAAPKTAA

SEQ ID NO: 450105 - protein, 383 aa, unidentified
MAQVNDLSRSLTAFDPISTLVVVVEMSKASWLVSGAVPGVERQPLKKLEPDATALLRLIERWRSAGWPISRIALAYEAGRDGFWLARWLIARGIEAHVIHSASVAVSRDRKRAKTDRLDAAMLMRVFLGWLRGERGHCGMVVIPTMEEEAARRPSRERESLVNERSRITNRMKSALARLGIRGFKPHLRKAPERLADLRTAEGTGLPSNVIEEFRRDMARLALVREQISSIEKTRAERLERAPDTGPHAMVRLLARVIGIGIETADMLVREILSRKLRDRRAVARYAGLTGSPDESGLKRREKGLAKAGNARVRRGLIQLAWRFLMFQKDSALARWYRTRTEGPSGARKTTMIVALARKLLIALWRLVTTGEVPDGVELRPAT

SEQ ID NO: 450106 - protein, 388 aa, unidentified
MNVGADKSEPLTAIHTDLGAIFVSLELSRSSWLITSLSPRGGEKMSKHSVRGGDFAGLMERFAKLQEKARLRTGQSFRIIVVQEAGLDGFWIHRALQNEGIESHVVDAASIATSRRRRRAKTDKIDGETLLRALLAYKRGEPRVCAMVKAPSPDEEDRRHLCRERKALTAERVRHVNRIKGLLFSQGISGYQPLRRDRRQRLEELQTGDGRAFPQHLKALVNRELDRLELLLKQIKTVEAARDALLAVGQTAKPAPAAMLLDIRGIGPEFAAILWSEGLFRHFENRRQIAAYAGLAPTPWQSGAVDREQGVSKAGNPRLRTTLIQLAWLWLRNQPRSALSVWFHERVSRNGGRLRKTTIVALARKLLVALWKYVTAGVVIEGVTMKVA

SEQ ID NO: 450107 - protein, 373 aa, unidentified
MKKRTSSQQNPKPAVKTKRVQQSVTIGMDLGDRNSRYCLLSHEGDILREGEVATTKAGMTGAFGRMGRARIAIEVGTHSPWVARLLQSFGHEVIVANPRQVKLITESSRKDDRLDAQTLARLARIDPQLLRPIHHRSEEAQMALMAIRVRAALISARSSLVNTARGLAKALGERLPKCDADQMGVQQSESLPANIQRVLEPLLKEVESLTEKIKDSDREIDQIARRDYPETALLQQVGGVGPLIALTFVLTVGDKDRFQKSRDIGCYIGLRPRRSDSGQSQPQLRITKEGDPYLRTMLVQGAHYIISRRGPDSDLKRWGLHLAGHGGKRGKKKAVVAVARKLGILLHRLWVTGEVYEPLRNHNVRQEQKKVAA

SEQ ID NO: 450108 - protein, 355 aa, unidentified
MIIIGCDYHPGFQQIAFVDTETGDCGEQRLEHCEGAQKFYRDLATQGKKVRVGMEASGHARWFEQLLGGLNIELWMGDAAVIRAKRGRKSKTDRQDALHILNLLLTGDFPQIWVASWENRDLRQLLWHRHRMVQARTRVMNQLQAVALNEGLRCKKKLWREHGREQLEAFRLAPWASRRREDLLELLDRLNPTIAELTQAIEQEAEKCPQAQRLMTHPGVGALTALAFVLIIGKAERFQCGKQVGCYLGLVPLEDSSGDKRRLGHITKQGNSLLRFLLVEAAQVTSRTIPEWRSKYLHLTMRRGRKIAKVAMARKLAIRLFWMMRQGWNYQQVMNSVRTWDSPEQAMVCSRTSTL

SEQ ID NO: 450109 - protein, 368 aa, unidentified
MKKVSTAVAKQSRNISQQKLTIGLDLGDRNSWYCVLDEAGQVQLEQRVRTHAKALGEVFGAMPRSRIALETGTHSPWISRLLGELGHEVIVANARKVRLIGESRKKDDRLDAQTLARLARIDPQLLCPVKHRNAQAQADLMMIRARAGLVRARTGLVNTARGLAKSYGERLRGCNVRNMNPEKVEGLSPELQRALEPLLSAIAELSEQIREYNERIEKLAQESYPQVALLKQIKGVGTLIAVTFLLTLEDPHRFRKSRDVGCYLGLQPGRRNSGRSEPQMHISKEGDPYLRTLLVQGAQHILGPFGVDCDLRRWGLKLAERGGRNGKKRAIVATARKLAVLLHHLWVSGEVYEPLHNSSSRAIVTAAA

SEQ ID NO: 450110 - protein, 454 aa, unidentified
MRKPRVIPDEDHEVVYERVAAVDVAKASGVVCMRLPDPARPGRYSNQIWDNVPAARARITELGRELLRHQVQMVTLESTSDYWRIWYYVLESIGLAVQLVSASQARNLKGRPKTDKLDAMWLARLTQWGMLRPSFVPPAAIRQVRDFTRARTDLVHERTRVLQRLEKLLEDAMVKITSVVSDGMKAKSAVAMVAALVAGERDPRTIADLAKGSLRGKRDALAEALDGMFDSHHGVIAQALLDQVAFLDQRITQMEAGAIAALAQVEESWGVDADGETGPGRGTGPDSRVLAAVYRLAEIPGVSVWLAIVIIAEIGLNMTLFPTPAHLVSWMGLCRSAAQSGTRRGKGKPKKGNSYARAAAGQAAIGAAGTATFLGERYARIARRRGGAIAQVAVARSTMIIVWHLLADPAARYRDLGPDWHAAHVNRDKKIRNHIRGLQALGLTVTVTGDEHAA

SEQ ID NO: 450111 - protein, 420 aa, unidentified
MKDFSVDDFAAIVGIDWADKKHDICELPVGTRDYQWSVISSKPDQLHAWAMALEKRYPGQSIAVACELKKGPLIYALSQYRNLVLFPINPSSLAKYRKAFFLSGAKDDPGDAFLQTEMLEKHMDRLKPIEPESPEVRALAQILEYRRKLVQDRVDLTNSIGATLKNYYPQVLDWFKEKDTHIFCDFVIKWPSLPQAKRARKQTMIEFFNTHNARYTQVNLVRIDAIKAAVALTDDVAIIEPNLMLIEILMPQLKQLLDGIKRLDDEIKRRYQLLDDRHLFDSLPGAGVQFAPRLLVAFGSNRARYQTASELQKYSGVAPVIERSGQKSWTHWRYSCPTFLRQSFVEWAGLTVRYSFWARAYYQQQEARGKPHNTIIRSLAFKWIRIIFRCWKDHKPYDESKYLEALKKRNSPLLKFAVLS

SEQ ID NO: 450112 - protein, 401 aa, unidentified
MKRLSGGIDVGSESHHIIILDEEDNFLYNQKVSHKLSEFTESIKLFKQIEKQEGGKISFALEGKNGYNAPLDPILLDQGFTLYNVDNFKLKRFREAFAGEWRDDERDALMLSKMLKLKEHINSPREKVFIKIEKPSLLTESLKLLSRHQQTLIDERVRLTNRLGKKLLEVCPRILKLGKLKNKKIIAVLAKYPDFSKYKRITLCSLLKIRGIGKKGAFFLLKRLNNIEYMPGLTDIYQTIILSYAQRILELQKEIEDLDKKLDEIGEESKEVKHLKTIPGVAIKLASRLIGEIEDIDRFPSEKQLAVYCGVACVDNNSGKVTKAHAVYKANKICKQTLIIMAGGSIRFSFQCRDYYLKKRAEGKSHNHTLRCLARQLIRVIYKMLTEDRDYIVRKELRKVA

SEQ ID NO: 450113 - protein, 352 aa, unidentified
MTVTIVETRLQARAITGGVDTHADAHVAAALDPIGGLLGVAEFPATPAGYAQLLGWLGGFGTVCLVGVEGTGSYGAGLARHIAAAGVRVVEVDRSDRQDRRRAGKSDPLDAVSAARAAQSGRAAGAPKGRDGQVEAIRALMVAKRSARSERIQTINQARALIITGPDDLRARFARHAPADLVAELAALRPRPGSMVRYHTLLSLRELGRRAQFLDGQLSRLDEFIVPLVTARAPGLLGLYGVGPDTAAILLVAAGDHPERLRSEAAWAHLCATAPLSASSGKVTRYRLNPGGDRQANHALYRIVITRLSSHPPTRAYAGRRTKEGLSKKEIIRCLKRYVAREVYRHLCAPAG

SEQ ID NO: 450114 - protein, 454 aa, unidentified
MIIIHQRCAGLDVHKRIVVACCLWMLQDGTHRQETRTFGTTTAELLKLLDWLQEWGITCVAMESTAEYWKPIFNILEGNVEILLVNARHVKAVPGRKTDVNDAQWLAELLQHGLLRASFIPPREQRDLRELTRQRSNIVRERASVVNQLQKVLESANIKLASVATDVTGKSAKEMLLALAGGASDPDMLAQMARGRMRQKRAALQEALKGQVREHHRFLLAQELTHLDFLDEQIALFDTEIKRRIHANTSSSETSGQESGTEHPSDVQAVDDTASPAQPLTWAKAVELLDSIPGVNQRIAEVVIAELGTDMSRFPSASHLASWAGLSPGNNQSAGKQRSGQISPGDRPLRKYLVQAANAAAKSKTSYLGALYARLASRRGRKRALIAVAHAILISIYHMLSRQEVYQDLGYGYLDERKRKAVTNQLVRRLERLGYQVHLSHDQTSPTIPVELAG

SEQ ID NO: 450115 - protein, 340 aa, unidentified
MKKNKQFYLGLDMSKPFFDASLLIVTTADKKEIPVVRFDNDTPGIRMFEKWLKEFGVSYDASSLVVIENTGIYHRQIWKFCSNKNLPIHIGNAAHIKWSLGITRGKSDKIDAQRLCSYGYRHRDELQCTAAADPAFLQLKDLMTNRTRLLNQLTGLKSYLNELKKVSDKGFAKLQQQCNKAVLEGFKKSIKAIDEQIKKLVDRNKKIKDNYSLLQTVPGVGHWIALYLICCTKNFSNGISGKQLACYAGVVPFEHSSGISIRGRNRVHKMANKDLKKLLHLGALAAIKYYDEFKNYYNRKKEEGKHSMTVLNAIRNKIILRAASVVNNQQPYVNYTSAAA

SEQ ID NO: 450116 - protein, 351 aa, unidentified
MDARTVAVDVAKTVFEIAIADREWHIVARHRFNRKQFARFLATVSPTHVVMEACGTAHYWGRCAQPYGHTVTLLPPGYVRPYVRRNKTDRTDAAALLEATRSGQIPSVPLKSVAQQTLVGLHRIRDQWMTTRTARINTLRGILREQGLLLPAGAGPAVRAIPALVEDADAPIADSLRRMISLMHEEIRALEQHIAALERELQALADADPVITRLRDIPGIGLLTATALVGTVGNIHAFRRARQFASWLGLTPREHSSGARRWLGGISKRGDVYLRCLLTHGARAVLRAAHRRMTTKQRLTRLHQWALTVETRRGHNKAAIAVANKLGRVVWAVWSRDVEFDPQTAVTEAAA

SEQ ID NO: 450117 - protein, 337 aa, unidentified
MVYGAIDLHLRYSHIRILDADGRVLRERQVLTAPERLVPAFADVGAVRVLLESGTESEWVAQALESAGYTVVVADPNFAPMYGDMRRRVKTDRRDVAALAEANRRGWYRPAHRTSARQRARRQVLRARRHLVQLRTGTISLIRALLRQDGYRVGSGDSDTFPTRLARLRVPPALQATLAPLVRTLTHLIGEIGQLDRQLVDEARQDPVVRRLQTVPGIGPVVALTFRAFVDDVTRFRSAAHVSAALGLVPREDSSAERRHRGHLTKVGPRELRSLLVQAAWVCWRAKRHRVLRSWADQLAARRGKRIAVVGLARRLSRILYAIWRDETEFTPSRVLA

SEQ ID NO: 450118 - protein, 412 aa, unidentified
MRRVIGIDIHRTFGEVVFWEDGRLRHGGRVDMTRTALEGFGKTLTSTDDVVIEATGNCMAVSRVLSPFVRRVVIANPLQVKAIAQAHVKTDKIDAGTLANLYAAGYLPEIWTPDAATERMRRLVARRYQVVRHRTRIKNEVHSILNAHLIPKCPHADLFNGRGREWLKRQPLPDDEQIAVQRHVRELDRLGEDLAVLDRQIAEGTIDDPAAKRLLTITGVDLTVATGLMAAIGNISRFESPQKLVSYFGLNPRVRQSGLGAAHHGRISKIGRSHARAMLVEAAWAAAKAPGPLHAFFVRIRAKRGHQVAAVAVARKLAVLVWHMLTKQADYLWARPSLVTHKIRAMELQAGKPQKKGNKPGPAYAYNVKKLRDQEMRVAEQAQKGYERFVDTWRPRPPDEKARGRLNPARLE

SEQ ID NO: 450119 - protein, 343 aa, unidentified
MRQLYYIGLDIHKKMIAYCIKELDGRLVAQGEIAADRKAVGEWVKSLPGPWIGAMEATIFTGWIYDFLNPHAVAMKVAHPEMLKAITAAKKKNDRADAEMIADLLRVNLLPECHMLSEEIRELRRILRYRNHVVRTAVKMQNKMSGLLMEVGASYSKRRLHGKKYFHGLLERVEEIPPSVKELLLLSRASFEMFRAVQKRLIAALRTNDLIRERVQRLMTIRGVGEVTALTWVLEVGDSFRFSSIRQAISYCGLCSAQRESAGKERRGPISKKRNKHLQTILIEAAKIAPHWNPQLAAVHERELKKGNRNRATLAVARRLVAYMMAVDKNQTDFVLREEAKAA

SEQ ID NO: 450120 - protein, 331 aa, unidentified
MEQIYGIDLSQTKFDVNFKDQNGNLKSFVVKNTLSGIEKFLDRIEPESILCAEHTGVYGELLLFLTNLRNIKISLVSGYQIKHSLGLKRGKSDKLDAMKIREYAERFTDKLHFLAPEIEDLKELREIYSLRAILVQERKMILTRERGKSFLPYNSTLVKQVTNDMLLKMDEQIDKLEKEIIGIISSNEALNNSYALITSIVGIGKVTSCELIIKTGNFNRIPTARTAASYAGVCPFPNSSGKMVKKSRVSPLSDKSLKSLLFLCSRIAVRYNKEYRLYYTKKELNKKQYYLIMNNVANKLLRTVYAIIKAGKPYDPNHICLDPREEIKKVA

SEQ ID NO: 450121 - protein, 368 aa, unidentified
MEKRITFIGLDVHKSSISIALADAGRDEDVRFYGKIGGDMESLLKAVRKLQSSGATLCFAYEAGPCGYEIYRTLTKLGFECIVVAPSLIPKKSGDRIKNDRRDAQSLARLYRSGELKAVYVPSEEDEAMRDLTRTREDAIKALRVARQVLLAFLLRHGHRYSGQSHWSKTHMAWIAGIKMPHTAQQIALQEYVHAIQEAAARTDRLTKQIQELLLTWKHVPMVKALMALRGVSLIVAVTTISEVGDLTRFDSPKQFMAYLGLVPSQHSSGATVKFGSITKTGNGHVREVLTEAAHAYSHPARETRALLDRLEGLPQEVRDIAWKAQVRLCARFRRLQARGKNRNSVVTATARELAGFMWAIACAMLPA

SEQ ID NO: 450122 - protein, 467 aa, unidentified
MKNNDYNLFVGIDVSKGKADAAVLAVPELRSVKPRFLRKKLSFKFIKSDVVEFLNTVRKYSSDQHCLHTYFALEVTGIYSTNVYGFIKENCNSDEEIHQLNTDFVNKWRESHNISKSDPLDAQTISTIIGTDDDVRYVSDSVFENKNGYQDLKALVHRHYQIKKLYSQETNRLIALCDCYFPELQYVFEPKSAAFLAVLSQYPTSHDIINASKNEVFSLVYEASKHRCNMDKIDKLFNYAQDTLVPHVSDHIRCVIFNTVESIVNIRTQLKLIEKDIRKLAATFNVYSLLMTITGCGPLTAAVIIAETGDIFRFKNADHYVSYSGSSPRNKRSGKSVEIMGKISKKGSKYLRHALYMIAEFARRHNPVLKHLFERVKNGNKKRHKLAVIAVANRIARYIYSIMKNESSFVIMHENIMRLPEETRNTFFNSISLDFPKNTRKQIYQYSDVNGEIHRFVYKNETTESIA

SEQ ID NO: 450123 - protein, 338 aa, unidentified
MALYCGIDLHSNSCWISIIDEEKKVVREKRLGNDLATILGFLEPHRAELEGIAVESTFNWYWLVDGLADAGYQMHLANTWAIKQYEGLKYTDDRHDARWLGHLLLLGILPEGFIYPKRERALRDLLRRRAFLVHKRTSFLLAMRGAFECRTGMRTTSNDIKKWTPADVEQHIDDPLAALGITCLLEPMAALNDQIKILEKEALKRAKLRDEFSCLQTVWGIGKVLGLTIMYEVGDIGRFAKVGNFASYCRCVKSDRFSNGKRKGSGNPKNGNPYLSWAFSEAAHFAVRYHEPPRKFVQRKTAKTNGIVAIRALAHKLARASYYVMKDQVDFDPDKAFS

SEQ ID NO: 450124 - protein, 410 aa, unidentified
MELLHRRCCGLDVHKETVVACLRLVADGKVTTEVRTFQTITSDLLRLSEWLAANECTHVAMEATGVYWKPVWHILDDGEFALVLANAAHVKNVPGRKTDVNDATWLAELLAHGLIRASFVPDTQTQEMRNLLRTRKQLVREQSSHVLRVQKILEDANIKLDSVLTDLMGKSGRAMIEALIAGETNPAKLASLADRRAKASPEEFREALRGRVTKHHRFLLRLHLNQIDALDAAMATVDAQVEANLGPFRTAVELLISIPGIKNLGAHVIVSEIGIDMSRFPSHAHLISWAGICPRNDESAGKRRSNRLRKGAPWLKTTLVQCAWAAVKKKDSYLQAQFYRIKARRGPKKAIMAVAASILTAIYHMLKDGTMYKDLGRNHFDRRSTDQQKKRLVKRLADLGYAVEIKPLAA

SEQ ID NO: 450125 - protein, 403 aa, unidentified
MNAVGIDVSKGKSMVSILRPFGEVVAKPFEVRHTASELRQLANYLKSLNGETRAILEHTGRYYEPVAQMLYDAGVFVSAVNPKLIKDYGNNSLRKVKTDKADSRKIARYGLDNWVELRQHTPMDTIRYQLKTMNRQYGLYSKTKVSMKNNLISLLDQTYPGVNAFFSSPAREDGSQKWVDFAASFWHLDCVRGIILAAFTERYRKWCKRHGYNFNSGKAAEIHENAKNQIAMLPKDAMTKLLIHQAIDQLNAASRTVELLRTEMNRLAQQLPEYPVVMAMGGVGKSLGPQLMSEIGDVTRFAHKGSLAAYAGVDPGANQSGTHAAKSTASSKTGSPELRKTLFLVMSVLLQTSLVDDPVYHFLDKKRSEGKPYYVYMTAGANKFLRVYYGRVKEYLASLEPTE

SEQ ID NO: 450126 - protein, 337 aa, unidentified
MELYAGIDLHSNNSVIVVLDANDREVYRKRLPNNLAQITAALQSCGGITAVAVESTFNWYWLVDGLQDAGYQVQLVNTAAVKQYDGLKHAGDFSDAHHLAHLMRLGILPTGHIYPREGRALRDLLRKRGQLVRQRTTQILSMQNLLARNLGAQHSGNDLKRWQTADIDALALLPEQKLALESNLMVMQCLDEQISRLECAILKQARLQPAFHGLLGVSGIGNVLALTIALETGDIARFAGPGNFASYARAVDSRRESNGKKKGEGNAKCGNKHLAWAFVEAAHFAVRYDAQIKRWYQKKAAKTLPVVAIKAVAHKLARACYHILKTGEAFDVTRAFS

SEQ ID NO: 450127 - protein, 375 aa, unidentified
MTNNLRYLGLDVHAETIAAAIAEPDGEVRVLGVIPNRADAVAKLLRKLGPRERLRACYEAGPCGYVLYWQLVRLGIPCDVVAPTLVPTKPGDRVKTDRRDAAKLARCHRAGDLTAVWVPDAAQEALRDLVRAREAAKQDQLRARHRLGKFLLRRGIRPPAGAKPWTQAHRRWLDTLQLELPALSATLSDYLQEVDHGAARVRRLEAALDAAIAAAPQALRAIIAALQCLRGIRQISAATIVSEAGPLSRFTHPRQFMGYSGTVPSEHSSGASVQRGAITKTGNAHVRRILIEAAWAYRFPPKCTGALRTRQRGQPEPVIEIAWKAQHRLSSRYRRLLARGKPTPHVITAVGRELAGFIWAIGVAAERTSTAVAAA

SEQ ID NO: 450128 - protein, 350 aa, unidentified
MLIIGCDYHPSFQQIAFVDTDTGELQERRLEHREEAEKFYRDLVVEGMKVRVGMEASGQARWFERLLGELNIELWIGDASEIARKRERKQKTDRQDAQHILHLLLKDDFPQIWVPSWENRDLRQLLWHRHRMVQARTRMMNQLQAVALNEGLRCQKKLWREAGRKQLEAFRLAPWASRRRKDLLKLLDGLNPTIAELTQAIEQEVEKCPAAQRLRTHPGVGPLTALAFVLMIGKPDRFQCGKQIASYLGLVPLEDSSGNRRRLGHITKQGNSLLRFLLVEAAQVTARSLPEWRSKYVHLTMRRGRKIAKVALARKLAVRLYWMMRKGWDYEQLKKFGSHAGQPGNRDGVK

SEQ ID NO: 450129 - protein, 417 aa, unidentified
MRRVLERCAALDVHKKQVTACARILGEGGELEELTVEFSTMAADLLAMRDWLKQLGVTHVAMEATGVYWKPVYYALEDDFELLLVNAQHVKNVPGRKTDTGDAQWLCQLLECGLLRASFVPPKPIRELRELTRYRKALIRERANEANRLQKTLEDAGIKLSSVASDVLGVSGRLMLDALVSGTRDPEVLAELAKGALRKKIPALKQALAGTFKPHHTLIVSHILAHLDYLDEAIASLSAEVEHRLSPFAHKAELLTTITGVAERNSQVILAELGPDMSRFPSDRHAASWVAICPGNDESAGKRRSGKTRRGNPHLRAALIESANAAARSRNTYLRAQYEQIKRRRGHKKAIVAVGHSILVAAYHILNDEVPYQDLGGDYFTRRADPERLAKRLVAQLQRLGHTVTLETPTTDGAVAA

SEQ ID NO: 450130 - protein, 318 aa, unidentified
MTHTTQTTALYVGIDVSQNTLTVAIYPADEVWTLVNDPHSHTALVQHLAQLPVQRVLLESSGGYEKAVVSALQQAGLPVVVVPAQRARYFAKSMRGDLKTDRADARMLAYFACCYPVQPVAPCSPVQAELKELWARREQLVQELEREKKRLQTGMSEAVRASLERMIAVLKEEIAQLEARVAELIASDADLSQKAALLQTAVGVGRVVAYGLVAELSELGQVSHRAIAALAGLAPVRCESGAWVGRARVRGGRPRVRRLLYQAAVVAATHDGRWRAVYEALVGRGKAKKVALCAVARQLLVVLNAMVRDGRAYERVQE

SEQ ID NO: 450131 - protein, 411 aa, unidentified
MELLVARCAGLDVAKDEVVACVRLPDGRGGRAQEVRTFQTFTSGLEALADWLTAEGVVQVVMEATGQYWKPVWYVLEEAGFELLLVNARHVKILPGRKTDVCDAAWLAELLEHGLLRGSFVPPAPIRELRDLTRYRKRLIQAHASEGQRIQKTLEDAGIKLDSVATDVLGVSGRAMLSALVAGERDPQVLAELARGRLRAKLPQLRQALRGRFGAHHALLIRLGVAHLEQLEASIAELDTQVDRVLAPFAVARDRLDTITGVGKRAAECMIAEIGVDMSVFPTAAHLASWAGRCPGNNRTGGKRRSGKPTKGNRWLGEVLIECAWAAARSRDTYLSAQYWRLARRIGKKKAAVAVGHSILVIAWYLLTDNCDYRDLGGDYFVRRDTDRQRQRAVAQLQALGYRVVLEPLAA

SEQ ID NO: 450132 - protein, 311 aa, unidentified
MKIYAGIDVAKKTFDLNIHGQKEVLHFDYNDAGIQHCIKRLTENKVERVAMEATGGYERDLAVALHTEGWVVTLVNPKRIRDFSKSMGKLAKTDRIDAMMIAAFASTCQWPKSTVIDANAYRLKALVARRNQLIDLRTCENNRREHIADDIIARSIDTTIDMLEKETGVIEKEISDHIDGQPQLKERTKIMESVPGIGTTTASMLVSEVPELGICNKREIAALIGVAPINRDSGQFRGKRMTGGGRVHVRSRLFMPTLVTIRYNPKLKAFYQRLLAKGKSKMTAIVAVMRKLLVILNTMIKKNQLWNEHLA

SEQ ID NO: 450133 - protein, 346 aa, unidentified
MQHVAIDLGSRESQICVRAEDGTILEEKKHATRSLGALMKRWPTSRVIVETSAEAFRVADAALAAGHEVRVVPATLVKTLGVGERGIKTDKRDARALSEASRRIDLPSVHIPTLAARELKSMCGSRDVMVESRTKLINNVRGWMRGQLWRLSKGRDTTAFPRHVRAHAASLAVQLPVHITCVLSCIDALSEQIHDIEIQLQRFVKTDVTCKALTTVPGVGPICAARYRAHIDDVSRFSSAHAVQSYLGLTPGENSSSERQRRTGITKAGPSAPRRMLIQSAWTAWRYRPDDPMVKWAQRIAERKNKFVAIVALARKIAGILFALWRDGTTYQATRGAVSAIERVAM

SEQ ID NO: 450134 - protein, 297 aa, unidentified
MEHYAGIDVSLEESSVCIVDATGTIVREVKIASEPAVLVRYFDELELPVGCIGLEAGPLSQWLHAGLVAAGRDAVLLETRHVKAALSAMTVKTDRKDARGIAQLLRMGWYRPVHAKSVTCKDSRALLVGRKLLQGKLLDVELSIRGILRGYGLKVGEVSRGKFEARIRELTAGHITLETVIGAMLAARTALWCEFTKLHREMLKIARADKVCRRLMSTPGVGALVALTYRSAVDEPMRFGKSSTVGAYFGLTPKKYQSGETDRDGCACRKSNPNILVMQPAQDWKAKNTPCSLNRVR

SEQ ID NO: 450135 - protein, 505 aa, unidentified
MTVPAARRQPASSTPPSGKQAQARAQRKAYNRRKTRAQAKSEALRQQEAAQVQALPVLRPHAAGIDVGSRSHWACVGFTTEAASGLIEEFPAHTAGLQAIVGFLRAHQVTTIALESTGIYWIPLYELLQAEGFEVLLVDPSYTRQLRGRPKTDRRDCQWIYRLHSVGLLAAAFRPDEKTCQLRAYLRQRANVIRQASQHVQHMQKALEQMNLKLTEIVSDITGLTGRSILRAILRGTRAPEKLAKYRDKQCKASEAEIAQALTGSYREEHLFELKLAYEAWQFSLKQVEKVDGQIALQLGRMKCDRALPPLPPKARPKRRVNSPRFDVRTALYYVVGLDLTEIEGISDLTALTLISEIGPGVSQFATVKKFCSWLGLCPNWKKTGGRVKSSRTRRGVNRAAQALRLAAQSLHHSKGALGGFLRRMKGRLGAQAAVTATAHKLARIVYLALKHGMTYVRQSQEEYEAQMKEKQIKALMRKARQLGLEVIEKTSGSAATAAAAAVEG

SEQ ID NO: 450136 - protein, 377 aa, unidentified
MSKVRFLGLDVHAETIAVAVAEPHGEVRSLGIIPNQPESLRKLVKKLGPADELRACYEAGPTGYVVYWQLTALGVRCAVIAPTLVPVKAGDRVKTDRRDAEKLARCYRAGDLTPVWVPDAAHEALRDIVRAREAAKKDQLRARHRLSKFLLRHGRRPPAGTKAWTQKYLAWVKQAVHFEQPAQEATLLDYVHEVDHVADRVVRLDQAITEAVALAPTAMRAVIDALQALRGIALTSAVTIVAEVGTLSRFTRPRQLMGYGGLGPREASSGGRTWRGGITKTGNAHLRRIVVEAGWAYRHRPAVSPLLKKRHAGLSEPVKAIAWKAQHRLHGRYRKLLGRGKCPQQAVTAVGRELLGFIWAIGVAVEAEQRPVRSRAA

SEQ ID NO: 450137 - protein, 326 aa, unidentified
MYASLDLHKEYSQAVVLDFDGTVLREERVENEDPTEMERFSESLPPETEVVIESSSTWYWVYRILSRRHRVILSNPLKTKAIASAKLKTDRVDAMTLANLLRGGYIAESYVPTQKVMELRELVRYRANLVRMRSSIKNRIHAHLLMNNVRVEAGPFTKEFIQQVRAIEDTKVQGYLRLIDSLNQEVRTASAEISREAMSNEEARLLMTIPGISFYSALLIASEIGDVNRFADSNGLVAYAGLVPSTHSSGGTTYHGRITKTGSPYLRWVLNQCVRANIRTEPDGTVASFYNRLVRKKGGAKSAVAASAKLLRIVYWVLKERRPYHS

SEQ ID NO: 450138 - protein, 346 aa, unidentified
MMIVGCDFHPSWEQVAWLDTETGEAGEQKLVHETGEAQEFYRSLPVPSLIGLEATGNCHWLQDLLHEIGHEVWVGDAAQIRASYVRKQKTDKRDAAHILKLLVEGRFPRLWVPDREQRDRRQLLIHRHKLVEIRARVKNGLQHLALNQGVQKKARLWSKAGLETLRGLPLAPWASRRREDLLGLLHALDQQIDPLDRAVAEAAEQDGNARLLMTQPGVGPITALAFVLTIGDVSRFPRGKQVASYLGLIPREHSSAGRQKLGSITKQGNRMMRMLLVEAAHRAVRCDPEFRREYLHRCHSSPKNVAKVAAARKLAVRLYWMLRTQTGYPEVVRTESSPRVPLAGAS

SEQ ID NO: 450139 - protein, 341 aa, unidentified
MYYIGLDIHKKSISFCVKDASGQVYQQGKVAATRRDLDAWMKTLPQPWTAAMEATIFTGWIYDHLKPHAAAVKVAHPLMLRAIAASKKKNDRIDAGKIADCLRCDFLPECDMDSIEIRERRRTLRYRSLLVRQVVQLKTRLASLLMETGVSYDRQQLHRLGFVSELLASEDVTKSIRPLLRVSQDSILRLRRIESALVRSLERDPLLAERVRRLQTVPCVGRITALTWALEMGDISRFRSIRQAISYCGLCGDEQQSADKTVRTPLSKKRNKHIQHVLVEAAKLAPRYDPGLALLYAKEKQKGNANRATLAVARKILTYLLAVDREQRDFVPLQEFHSVAA

SEQ ID NO: 450140 - protein, 425 aa, unidentified
MNCKQNERINQVKESTLVVGIDIGSTTHYARAFDWRGIELGKVFKFSNSREGFDSFKDWMQWLLNKNNKSDVIVGIEPTGHYWFDLGAYLEDGGILLVMVNPYAVKTTKELDDNSQSKNDCKDPKVIAKLVIEGRYSAPYTPDGVYADLRVLTTNRKRIIRELTQIKNRIARWFAIYFPEYKDVFGDYESQSSMLVLRHACTPEAIVNLGPEGINQLWRNEKLRAVGMKRAMTLWETAKRSIGLKKGTTAAEFEMKMMLEDYDYKMTQLNSIMEEIESLCKKIPESEQLLAIKGIGLITVAGFLAEVGDVRRFDSPRQIQKLAGLSLRENSSGKHKGQTTISKRGRSKLRAVLFNAAIPLIATNPEFKALHKYYTTRAQNPLKRKQSVIAISCKLIRVFFAILTKGVTYDPVKMMSDIHRQPVAA

SEQ ID NO: 450141 - protein, 347 aa, unidentified
MKDVTTIGLDLAKHVFQAFGADAEGTPLFNRKLRRAEVLRFFERLPRCLVGMEACASAHYWAREISAFGHDVRLLPPQYVKPFVKRGKTDAADAEAIAEAVTRKTMRFVPVKTAEQQAAVMVLKTRALLVRQRTQAINALRAHLGELGIIAPTGIANVKALAPIIRDEEDTRLPPAARFALTEIINQIEMLATQIDKLEREIVIQAKQDDEMRRLATIPGVGAIIAMAVKAFVPDPAGFKSARHFAAWIGLTPKAHSSGGKERLGRISKMGNPVLRSLLTTGAASVLRHVQYRDRVWPWLKNMLTRRPFKVVAVALANKIARMIWVLLTRGGIYRDPTGIEAGPVAA

SEQ ID NO: 450142 - protein, 441 aa, unidentified
MKLQHLETKRHYVSDKFIIGIDPAKHKHQVMVIDPKGIPIGNSFSFAHTYHGFHFKLWQKLNSLPFEVTPENTAFAVEISINYWQKLCYYLSEKGYTVLMVRPITTKHERPRLNNFSRTDSKDALCIASSARQGYFNFYQKYTDEILGIHRLGITYDKLKKQLVIAKQRLRSEVEMLFPEFPGVLKIDTDTARYLLSKYMTAKDFSEINVFYEAIELVAISRNHHGSETLHELKEAASSSIGLPLDKISYMAHRMTINIWIEQINLIKIQQYNILKEMSKLSQQTPYYAILTSIKGVSEITADRFIAEIPQLKNSLHYKQIETFAGLNLRLSESGQIKGYRKISHLGNHRLRAVLYKMTEETKNHIPEVRIRFLKRQMIHATYTKNITACTTNLLKIIIALIRDNRLYEFDPEKLKEMEDLDQKYQEQKQKRQNKTFKKAS

SEQ ID NO: 450143 - protein, 377 aa, unidentified
MLYLGIDQHARQITISLRDEGGDVVQARQVSTQPEKVQAFFQQLTRERLHDGESFVAVLEVCGFNDWLIGLLHEYRCHKVILIQPEERKLRKTDRRDAAALSELLWVNRDRLLQDKPVRGLRQVDIARSTDQENRRLTTLRKDAGQARTRLVNRVRHILRRHNLQWQMPTKKFPSKSGLAWLKQLALPEIDRLEMNHLLADLEQVQGRRQELEQVIAQRCGVSAEAVLLSSMPGVGYFTAVALACRVGRVERFPRAASLANYWGLTPGCRNSGESNQRLGGITKAGSSMARWLLAEVTIKVLRRDARLREWFKRLKRRRGASIARVAVMRKLATVIWHMLSKRLTYAACRDAGEAGTKARQEQGAEGSRPGGAVGRV

SEQ ID NO: 450144 - protein, 465 aa, unidentified
MKKRTYKATNVNQVNIENLKKKIQGKEIVIGIDIAKKENYATIMTKEKESIITIRYEQPSETMRFIEFIQNLQSSCCEAAMESTGSYGDPLREQLLNAGVSVFRVSAKRSHDMAEVYDGVPSLHDAKSAAIIAYLHIEGMSQSWQSKPHELRDTKAAINEMSIYHAQYYENINRMEALLARFWPEVPDILSLTTVTLISILEIYGSPTVLAKAPRKTVFERMKKIGRGLLVNEKIDDVIASAKTTTGVKMTEGEIRMMKHLATEILRNYRLNKTAEKELLRLSKNIEEIVRMSETVGMTTAAVIFTELGNPNEFKNAKSYKKSAGLNLKEKSSGKHQGKLRISKRGSSKTRQYLYLAALRLIQNDMLVRAWYNKKVKRDGGKKMIAIVAIMSKLTLALWHVGRGAKFDSHKLFNAAKLDKEYKQILKEQENNGRKNMKIKKIVIVKPVRATLLKKQELINKQLNN

SEQ ID NO: 450145 - protein, 354 aa, unidentified
MHIHTIGVDLGKTVFHLVGLSLRGEVVVHRKFSRTQLLQFTANVQVDLIGMEACAGAHFLGRALREQGNEVRIIPAQYVKPYVKTNKSDFIDAEAIAEAVGRPTMRFVPIKTDEQLDMQSLHRVRERWVIRRTAVVNQIRGLLLERGITLRQGRRHLEAALPAILEDATARLSGALRMLIAQLKHELEELANFIGEADGTMERTSRENESCRRLLGVPGIGPVTATALIAAIGNGAAFRKGREFSAWVGMVPRESSTGGKQKLLGISKRGNPYLRKLFIQGARAVMLRGTKQSIGLRTWIENIALRKHPNVAAVALANKMARIAWVVLARGEAYRPSLLTKSEPNLHSLQMKPA

SEQ ID NO: 450146 - protein, 307 aa, unidentified
MSAFVGIDVSKATLDVAVLGDAMSRRFGNAPSGFRRLVDWLRTLSPQVVVLEATGGYEVAALEALHAAGVPVARVNPRQARDFAKATGQLAKTDRLDAQGLARMAAAVPLTPYWPPAAWQKRLAEWQQRRHQLVGMLGSERQRLERLTDPALRRLAEQHLKRLRAEIRTLEEGIARQLDEQPSLAPLRTLKGVGPVLQATLACALPELGRLNGKAIAKLVGVAPLARDSGQWRGQRVVWGGRAQVRQTLYMAALTAMRHEPRLRDFYRALRERGKAGKVAIVAVMRKMLVILNARMRDAMAGAPAMA

SEQ ID NO: 450147 - protein, 424 aa, unidentified
MEEKELEKPIRAWIGIDWADEKHDVSLSDVATGKQEALTIRQSPEALQEWLGQLRSRYEGGYVAVVLEQGRGGLLNALMGCEFLVLYIINPKSLSSFREAFYGSGATSDPVDAELMRDMVRQNPSRFRAWRPDDVMTRSLRLLTEGRRNLVNQSTALTNQLTALLKGYYPQALAWVGTLDTAWACDFLQQWPTLQSLQASSRRQVLRFYEKHPRASLNLNEQLKQIQDARALTQDEAVLESSALMVQALVSQLRPLLASIAEFDRKIAMIFHKHPDRPIFESFPGAGAALAPRLTAAFGTDRDRFQAATEMQELAGIAPVTEKSGKKSFVHWRYACPKFMRQTFQEFADHSRRWCKWAKAHYELLRQRGKSHNAAVRALAYKWIRILFRCWKNRQPYQDEVYTKALLKHGSPLSSLLAQYVENP

SEQ ID NO: 450148 - protein, 382 aa, unidentified
MNTVCGLDVHKDSVFCCIICADGQKIQHKFGVLTEDLITMRDLMVSEGVEECAMESTSIYWIPIWRVLEKSVHLHLVNPYFIKQLPGKKSDVKDAEWIATCLQKDLIASSFVPDDKIQRLRQYDRRIFDLNASISRNLVKLDQCVQRCNIRISNYISTTDSKGYRSIVKLISQGVTDASVLVEHLHGRTINKYGREVLMNALTGVVNDTDIDIIAQLVEETEMQQRHKDEAQRKMTSLCEEWFPNELGNLQTIPGVKERSATSIIAEVGTDMNHFQTPKRLVAWVGLRPRNEESAGKIKSRRITHGNKFLRKTMIECAWGSSRTKGSFFAEFSYRQCVVRRKNRMKVQVAIARKMLVAVWHILHDGVAYIKPSDHYSSAVEF

SEQ ID NO: 450149 - protein, 323 aa, unidentified
MEQKLSTTAKAMRQVFSAMPHSRIALETGVHSPWVSRLLGELGHEVIVAHARNVRLIGESRRKDDRLDAQTLARLARIDPQLLCPVKHRSAKAQADLTVIRARAGLVRARTALVNTARGLAKSYGERLRGCNVRNMNPEKAEGLSPELQAALQPLLTAIESLSERICDYNQRIEALAEQSYPQVALLKQVKGVGTLIALTFLLTLEDAHRFRESRDVGCYLGLQPGRRNSGQSEPQMHISKEGDPYLRTLLVQGAQHILGPFGADCDLRRWGLKLAERGGKNGKKRAIIATARKLAVLLHRLWVSGEVYEPFHNSKPLMATAA

SEQ ID NO: 450150 - protein, 367 aa, unidentified
MKKHTTTTKPMSAVDVSACTTVAVDLAKQVFQVAGEDAQGQLVYEQRIKSREAFQVFLQKLPRGVTVLVETGPGAQAWARLLQMQGNPVRILPAQRVAEHRSGAKNDRNDAHAILRAGRDCSIASVPVKSVAALAMQACHRIRRGYVRRRTATGNQIRGLLLEQGIALAQGEAALSQGVPRVLEDASQPLPDLLRELIDEMLSEWKRLGERIAALTERLEACADADQAAKRLMTVRGIGPITATALLAKQTEPERFANARQFAAYFGIVPDQHSSGQKVRLGKMTKRGDAYVRSLMVVGAHAVLKQLRPDSEHPDDRRLQRWLQRLGRKGAAVRLANRNLRIAWVLLRSEQTYQRKPNACQEIEMSH

SEQ ID NO: 450151 - protein, 409 aa, unidentified
MVTYVGIDWSLQKHDICFVNAAGAAIARQVIAHTPAGLAAFEHQRQQLGVEPAECVIGIETAHTLVIDYLWGHHYTQVYVIPPNQVNRESQARWPSGARSDPSAAYLLAEMLRQDKTRFPVWQPDALLTRQMRSRVSLVMHLTHQIVQMSNRLRAVLWRYYPAAPTVFSELTAQIELAFLLAYPTPQAAAQLTYAEFQAFAAQHHYTQPRKLPAAFARLQQPQPEAEPTTVLTFQDEAVQLAQLLLPLVQAKQTQLHVLAKLFQQHPDAFIFDSLPAAGEVLAPGLLVKFGDDRQRFPSPASVQALAGTCPVTDTSGKRHVVRFRKACDHEFRTIAQQWAKATLDESAWAQAYWQDIRPHCDSNSAAYRRLANRWLAILWKLWQTRQPYDEDHHLQQRAARRKPRATHR

SEQ ID NO: 450152 - protein, 344 aa, unidentified
MKITTIGLDLSKSVFQVHGVDETGAPVLTKRLHRKQVEPFFAKLPSSLIGIEACGTAHHWARVLVRFGHEVKLMPPAYVKAYVKRGKTDAADAEAICEAVRRPTMRFVPIKSPEQQSILMVHRARSLVVRQRTMTANALRAHLAEFGRVANPGVQNLLKLVRSVFDETEENRMLPELARAALAVLVRRLVELEEELQTLDRTLLAWHKENEASRKLAAVPGIGIVTATAIAATIDDPKRFQSGRQFAAWIGLVPKPHSSGNKVRLGGISKQGDRYLRRLLVVGATAVIRHCRDKDTPMAAWLRELLAKKPVRVVSVALANKLARIAWALLARQEIYRPYRLAQT

SEQ ID NO: 450153 - protein, 414 aa, unidentified
MVEEKILWFVGIDWGSEKHQACVLDAQGAVAGEREFAHSGAGLAAQCDWILSIAGDASAVAAAIEVPHGPVVDSLLDRGFAVYSINPKQLDRLRHRFGVAGAKDDRRDARVCADGLRTDRHLFRRLQVADPRIVKLRDWSRLAEELQQERVRLGNRLRHQLWRYYPQMLELTDDVAADWFLQLWILVPAPAKAKLIHATTIAQLLKRHRLRRLDVETVLCTLRQPAIKVAAGVAEAASVHIRSLIARLRLVNRELSSAEHQLDELCTALAEQESLPGHSCQQRDVAILKSLPGIGRINLATLLAEASGPLSRRDYSALRTLSGVAPVTKRSGKSHTVTMRRAAHNRLRNAVYHWGRIAIQHDPKSRSRYAALRERGHSHGRAIRGVADRLLNLVCTLLQRQTMFDPNYAAPAAA

SEQ ID NO: 450154 - protein, 421 aa, unidentified
MNFTNPRAEKSRSLSKNNQETQFRISYTATGQELIYGYVPVGIDLAGRKFQVCFYNEDNELVNTTLDIYELRLFIAGSQQKLLISMEGCTGSSYWANYAIAHGHKAVVLDARAIKNRKAQKDDFNDAFFIREALFTHYQTCRIRTQEEIDLKLFYAQREQYIKSLNAVCSNVRQRLIAAGAYEHVVTGADSALAAIKCYKNQINNKAEVGFSSLTLRALDSFVEDINYLTKKIDHINQNIIDVKARESQVAKLLMTIPGIGPQLAVLLSLDIADIERFKTARALQAYFGLFTAHSGSGGKIEMGKMARNGDPVVKRMLYQAVLTLLHCGNKIQIAPRSEYIQRMYSRNTVAFKRGVISLCAKLIRVVFGVLHHGTAYDPQIDSSLGNKKTRVHAYSNRCLNKVSADALIQEQYCYTEAALD

SEQ ID NO: 450155 - protein, 379 aa, unidentified
MPRGGNRAVAHNRILEEPAMAKAKTLVGLDVHATKVVAAVLDAETGEIAFFAMNAEIEKAAGFCAALPRPVRVAYEAGPTGYGLARELGKRGVECVVAAPSKIPRASGDRVKTDRRDAELLVRLLLAGKLHAVRVPGAEEEALRDLVRAREGVRVDLVRCRHRLSKLLLRHGIRFEDGDAWTDRHRAWLNGIVLQWPAAQATLLDVRGAIDALTHRRDALEREIVSMLPSSPWTAQVGVLRCLRGVDTLTAVGLCAEVGDFTRFGRAEQLMSYVGLVPSENTTGQQRRLGSITKTGSAHARRLLVEAAWHYRPRPNLSKRLTERQAGQPQEAVAVAWTAQKRLHRTWARLEARGKRRTIIAVAAARELAGFVWAIAQIE

SEQ ID NO: 450156 - protein, 347 aa, unidentified
MRFYNRQHRHYCGIDLHVKTMYVCILDSAGQVLVHRNVPSTPGAFLEIVASYREDLVVAAECMFTWYWLADVCAAEGIAFVLGHALAMKAIHGGKAKNDKIDSHKIASLLRGGLLPQAYVYPAGMRSTRDLIRRRLHLVRKRGELLAHIQNTRAQYNLPAFARRLAYPANRDGVSAHFADPSVRKSIDVDLALIDQYDTLIVDLELTIVREAKRHDADAFHRLRTVPGIGKILALTILYEIHDVTRFDRVQEFASYARLVKCVHQSAGKKLGTGGAKMGNVHLKWAFSEAAVLFLRHTKDGKKMLAGIEKKHGKGKALSILAHKIGRAVFYMLSRGTVFSMEKFLAA

SEQ ID NO: 450157 - protein, 358 aa, unidentified
MQSNKISFKGQKIFIGIDVHAKSWKVAIAPEVGAVKGHSQKPSAKELFDFLKKNYPDGEYQAVYESGFSGFSTYYALKEVGIECMVIHAADVPTTQYEEVMKTDRIDAAKLARSLKAGQLKGNYVPEKQYIDDRSVVRIRRTIQKQLSGYKSRVKHLLHCHGVEMPERFSKIQTHWSRAFITWLMKDVKLMSDTRTSLDLLIRQVEVIRGTLLEATRQLRKMSQMERYKHRHDLLRTIPGIGPIVSMCILTEVCDVKRFHNENEFAAYLGLVPTSHSSGEKTVHGEKTFRGNKQLGPMVVEAAWVAISWDAGLGSQYFQYKKRMEPQEAIVRVARKLSNIIFSVLKNEKEYVPYQTGN

SEQ ID NO: 450158 - protein, 448 aa, unidentified
MTKKRKPSNRGQKTPPLVQPDAAGIDIGATEIYVAVPPDRDPEPVRSFETFTPDLIALADWLQACGIRSVAMESTGVFWIPLFQILEERGLEVCLVNARHVKNVPGRKTDVLDCQWLQYLHSVGLLHASFRPKQAVCALRALLRHRDNLVRMSCQHIQHIQKALSQMNLQLHHVISDITGTTGLAILDAVIRGERNPDTLAELRDRRIKASAETIAKSLVGDYRPEHLFTLRQSVASYRYYRQLMADCDGEIQRQLEDFESKAEPPPTQPAQKLSARRQVEENLTQQHWRILGVDLTAVPGIRSPTVQVLLAEIGPDGSKFRSASAFASWLGLCPHNQISGGQVLSSRTRKVNNRAATAFRLAAHSLHHSHSYLGEYYRRMRAKLGAPKAITAAAHKLARIAYHLLTTGQAYEESVFAAQEAKSKQRAQARLEAQARALGFQLAPIPG

SEQ ID NO: 450159 - protein, 426 aa, unidentified
MNSNTQNAKIAAINEKTLVVGIDIGSETHYARAFDWRGIEYSRKPFIFKNNAEGFEAFRVWIRELQEKHGKDQVIPGMEPTGHYWFSLGCFLQENGMRPVHVNPFHVKRSKELDDNNPSKNDRKDPKVIAGLVKEGRYSYPYIPEGIYAEVRNLSNLRLQAQSELTRIKNRIARWFAIYFPNYKDVYGKPDAVSGLMILKQAPLPRDIAKLGVDGVNKIWRDAKLRGAGIKRAQTLVEAAKRSVGCKEASESARYEIKALLGDYEMYALREAQLMELINEKIAEIPYVDKLLDIKGVGLKTVIGFIAEVGDIRRFDNPKQIQKLAGYAIVSNESGKHKGEHHISYRGRKRLRYVLYEAAISVIACNPDFKSIHGYYTTRDKNPLKKMQSLIAVACKLLRVFFMIMSTGKSYDGAKMLGDIRRPAIA

SEQ ID NO: 450160 - protein, 351 aa, unidentified
MLLIGVDYHPSFQQIAFFEEETGEYGERQLHHSGGEAEQFYRDLQRRGIRVRVGMEATGYSRWFERLLAELGFELCIGDPAEIKAKRVKKQKTDRKDAQLLLRLMREDNFPRIWVPSSENRDLRQLLWHRHRLVQMRTRIMNQLQALAMNEGRRWKTKLWSEQGRAELEKLPLAPWASRRRQELLDLLDRLHPTIDELTAAAEQEARKRPEVVRLMTHPGVGPLTALAYVLIIGTPERFHRGKQVGTYVGMIPSEDSSAGKQRLGHISKQGNSLLRFLLVEAAQAAARSRPEWRRRYVHLAMRRHKSIAKVAMGRRLAVRLYWMWRNGCAYSPSLEFGSYVGQLGTGHGVK

SEQ ID NO: 450161 - protein, 321 aa, unidentified
MEAQVSFSQVVSRGCGIDVHKKLVVATIGGEGVKSETREFGTFTRSLTELKDWLLENGITHVAMESTGVYWKPVYHVLEPTSMKVWIVNARHIKYVPGHKTDKQDSGWICKLLLAGLLKPSFVPPREQRELRDLTRYRRKLVQRVASEKNRIIRVLEDCNVKLSSVLSNTQGVVGTKLIDKLCEGKAITMSDIDRVYHRKLEASKEELYEACQGTLTGHHTYLLQTIRQNILSTESAIDSLDDRIKGMLSEYEHIQEKLKAISGLNTKTVEDLVAEIGLDMSAFPSEKHLASWAGMCPGNNESAGKKKAGAPATATNRLKQ

SEQ ID NO: 450162 - protein, 366 aa, unidentified
MKKISTVQVFGNEILKEQKLTIGVDLGDRWSFYCVLDEANKILLEQKVATTPEAMKQTFGKIPRSLIALETGTHSPWVSRLLTELGHQLIVAHAQKVELITKSNRKDDRHDARTLARLARIDPELLGPVRHRSVQAQIHLTVIRARAELVSVRTALVNAARGLVKSYGERLPKCGTQLVSRELAAALSTELREVLEPLLKEIESLNERIKEYDERMEKIAKEVYPQVSLLKQVKGVGTQIALTYVLTIEDPHRFLKSRAVGCFLGLRPGRRNSGESEPQKGISKEGDRYLRTMMVQGAHYILGPFGEDSDLRRWGLKLAERGGKNAKKRAVVAVARKLAVLLHRLWVSGEVYEPLRNSQKALRAVA

SEQ ID NO: 450163 - protein, 438 aa, unidentified
MSNNVIFNLDELFISVGIDVGADFSWMSIALPNQHLVGKPYKILHSSMDSLTTAVSKIKEAEELYSLESRIFLESTGIYHYPLFCYLRDKGFNCSVINPIITKNSTNMNIRKVHNDRFDSKKAALVGLKPDLKVSLMPSDLALNCRNLCREYYDLMDNRSAYVNKLQGELRMAFPQYLGIFSKVTINTSLTLLETYTSPSALIEADKQEIIDIIRSTARFGLTYAQNKYNAIIRAANEADEFGYIIDSNIKRIRLYIRFIRKYDEEISSILESMHELVNANEDTDFVKQIHLIETFKGAGFLSAVSLMAEIGDFSAFSKPKQLFAYFGLDPAVKQSGKFEGTRIQMSKRGSAIARRVIHTLALQSISVSRTGEAKNPVLRDYYLRKCEAKPKLVAMGAVSHKVCNMIFAILRDNKPFEIITPQEHMKQYNATKCDIAA

SEQ ID NO: 450164 - protein, 408 aa, unidentified
MNTLYVGIDVSSKSNVVYLMLPNGDKHSNFSVANSHEGSTLLVKKIYSALTSHSLDTVLIGLEATSVYGDNLVYFLREDATLAPFNRKIHVLNPKQVKKFHDTYNDLPKNDYVDSFVIADCLRFSRINKEVYMGDYRYKALQNLTRARFFAVQNLVKEKQRFMNVLFKKYSTMTQEKVFSDAFSTTALAVYDEFESAEALANMDLHELTDFIIEKGKNRFPDPDAVAKAIQKAARSSYRLPKTVNDSVNQVLSISITSMKALESQIKEFDKAIKALMELLPNVLISIPGIGPVYSAGIMAEIGDINRFDNQASLAKYAGLAWKQHQSGGFEAEVTRLIPSGNRFLKYYLCEAAFSLVRCDKEYSDFYHLKYKEVNRCQHKRALALTARKFLRLVFRLLKDNRLYCSAK

SEQ ID NO: 450165 - protein, 344 aa, unidentified
MNLTRIGVDLAKQVFQVHGVDRYEKVQVKRTLSRRQVRSYFAKQAPCLIGMEACASAHYWARELGQLGHTVKLIPPQFVKPYVKSQKNDANDAEAICEAVGRPNMRFVTIKSAAQQDIQALHRIRSELVRQRTAKANQIRGLLSEYGIVVPTGIGTLRRAIPEIQEDAENGLSSLFRRALEGLRRDLEVFDTRVAELDAEIVQVAVNDETAQRLQSIPGIGPMGATALVAAFGDARQFARGRDLAASLGLTPGQHSSGGKERLLGMTKRGDSYLRTLLIHGARAVLKVAGRKDDPRSRWVMSVAHRRHKNVAAVALANKMVRIAWVLLRRGGTYNSLHGMTATA

SEQ ID NO: 450166 - protein, 369 aa, unidentified
MDKDTTYVALDDSKRKIVAGILRPRDAEPELREIVNDPRQIRRLLERLKREGPVAACYEAGVSGYDLHRQLTALGVECAVIAPALTPRRPGQRIKTDRRDAAKLVRLFRAGELTAIHVLDESEEAVRDLVRCRDDLRRDVLRWRHRVLKLLARHGRAYLSGKNWSQGHWRWIREQRFDLPPLQRAFEATVFALEQALARQAELDKELEAVAGTAPYREPVRWLRCFRGIDTLSAIILLAEIVDFQRFRRPRELMAYLGLVPSEYSSGESQRRGALTKAGNSHARRVLVEDAWHYRHRPTIGRALASRSQGQPDEIVGQAWRAQQRLHRRYRHLVGHGKRPPIAVAAIARELVGFIWAAMTRPENRRQAA

SEQ ID NO: 450167 - protein, 372 aa, unidentified
MESIIYVGIDVHKDTYYLSSYLPEKNLIFAQTEIKADSKNVMKYLDKVSEMNNSAIVICGYEAGPTGFKFCRDLTRRNYNCVVMAPTSIAKTTRDKMVKTDKADSVLLAKSLAFHSYKQVVLPDENIEALREVVRLRHCAQKECKRAKQSFLSFLLSNGFSYPYGGKDSYWTKKFMLWVNSIHFTSEYLNLCKDEYLAEAVRMIQRVKALDKKLEELQESEEIRDKVKSLKCICGINTLTAMTLVTEVGDFNRFKTAGNFASYTGLCPGSHSSGLTDRTTGITKQGNRIIRKLLIESAKAIGRSEAHKSVSLLKRQEGMPSEVINYADKASNRLRKRIRRLENQGMHYNKISAACARELACFVWGMMTNHIA

SEQ ID NO: 450168 - protein, 460 aa, unidentified
MNRKKSKSKVDRTMPVVHPNAAAIDVGATMHMAAVRADRAPEPVRSFGTFTADLHRLVDWFAECGVETVVMESTSVYWIPIFELLDARGFIVFLVNARDAKHVPGRKTDVSDAQWLQRLHSFGLLRASFRPKGQIAELRAYVRQRERLLEYAASHIQHMQKALTEMNLQLHHVVADITGTTGLRIIRAILAGERDPETLARLRHYSCRSSVETIAKALTGSYRAEHLFALEQALALYDAYHEKASACDVRIEAVLKELIIQRGRDHGSAPPASRRRNRADQANALAFDARTALFGLLGKDITTIDGIGPYLSLKLIAECGDDLSSWPSAKHFTSWLGLAPSNKVSGGKMLSSRTRRSGGRTAALLRLAAVTVGRTDTALGAFYRRLSSRIGKAKAVTATARKIAVLFYNAVRHGMDYVDPGASSYETRYRTRVINNLHRRAKSFGFVLQPLEPKAGVAVS

SEQ ID NO: 450169 - protein, 358 aa, unidentified
MEAQVKKIDFSDQNIYVGFDAHLKSWKVTVMTEDIVYKTFTQPPNPEVLYNYLRNNFPGGIYHSAYEAGFCGYWIHDKLVSFGIKSIVVNPADIPTTDKERVQKEDNRDSRKIARSLSSGNLTPIYIPSIKTQRDRSLLRTRAMLVKDLARYKNRIKSFLYFYGISIDESFKNPQSHWSNRFISWIESIDMGEESGKEALHVLILECKNLRVSILNITKQVRRLSQTEPYRERVILLRSIPGIGLLTAMVILTELETINRFRNIDNMCGYIGLVPSTKSSGEKERTGDITPRGHNVLRTAIIESSWTAIRNDPALMKSYLSYIKRMDQNKAIVKIAKKLLSRIRFVLNNNKPYICSMV

SEQ ID NO: 450170 - protein, 339 aa, unidentified
MAKHNLISIDLAKNVFQVCGVTRHQKITFNKALRRRELAEFMANQVPVDVAMEACYSSHYWARCFQEMGHNVSLLPAQHVSPFVRGNKSDHNDAIAIAEAARRPNIIPVPIKSLEQQDIQSLHRLRERNVSSRTGLTNQARGLLSEYGIVAPQGHKSFCQLIHDVIDPSNTDLSAPLKIQLKNVVDDYYNLTDRVTEINEQLAQIAKTNPLCSLLLSIPGIGVINATAIYSAIGDGSQFNSGREFAVWLGLTPRTASSGEKFKSAGITKRGNCYLRKQLVHGARAALSRCKNKTDRLSCWANQLLARRGQQKACVAMAARMARIAWVLLSRQEMYKAIP

SEQ ID NO: 450171 - protein, 368 aa, unidentified
MEKCITYVGLDVHKNSIAVAFADEYGAEIRSYGTIGPDPASLDKVARRLVSQGKEPRFVYEAGPCGYKIYRHLRQQKFECMVAAPSLIPKKSGDRIKNDRRDAMMLARLYRSGELTPVRVPSAEDEAMRDLSRARGDAKKAERKARQQLGAFLLRHGFRYSGLSHWSLAHWRWISDIKMDHEAQQFTLQEYVDTVRCCTERVDRITQQIRLLVGKWRLGPVVEALQALRGVSLVVAATVVAELGDLTRFDNPRQVMAYLGLIPSQHSTGEKIKLGPITKTGNGHARQMLTEAAWAYRLPARVSRRLLDRQQKLPEKVRQVAWKAQVRLCARYSRLLARGKPSQLVITAIARELAAFMWAIARTVEVSA

SEQ ID NO: 450172 - protein, 364 aa, unidentified
MDVHKESFSLCALHGTTGEIVREARCASNVSLVKKFVEKLKTKYGEDINIKAGYEAGCLGYSLHNLLEQNGIDCDILAPTTMYSSSKNKMVKNDKFDAKMIALNLANGTYKEVYVPEEEDVAVKEYIRMLGDFKTSLKKIKQQIKAFLLRHGYVYEGKSSWTIAYMKWVKNLDLQGLFKETLDEYLLQYDVLVDKIERFSLRLEELSHSERYEEPVAKLRCLKGIDTTSAMTVHVEIADFTRFPTAKAFMAYVGLTPSESSSGEKISRNSITKQGNSIVRSTLVECANALVKGTIGLKSKRVKARQKGQRSEVISYADQAVERLQRKYHRMMYQGKPRNVAVTAIARELGCFIWGLETGKIHRK

SEQ ID NO: 450173 - protein, 382 aa, unidentified
MQASRKSTPTADHCGTIFVAIELSQKTWLITLHSPDRDQFSRHRLEGGDHAGLLALIEKVRARATQQLGSTPRVVSCYEAGYDGFWLHRLLEAAGISSLVFDAASIAVEQRSRRAKTDRIDGELLLRTLMAHLRGEPRVVRIVRVPSVEEEDARRASRERDRLITEQTAHTNRIKSLLRLLGMAVGNPRRRDWLAWLKRQRDWQGRPLPPHLLAEAQREHARLMLVREQLAALEQVQAAQASAVPAPMAERRDLLQRLKALGPAFTATLVNELFYKDFRNRREVASYCGLAPSPWQSGGIDREQGISKAGNRRARHKAIELAWLWLRHQPNSALSHWFRTRTANAGRRAKRIAIVALARKLIVALWRYLTAGLVPEGATMKA

SEQ ID NO: 450174 - protein, 355 aa, unidentified
MVSGLVPGVKRQPLKKQAADPERLLALLERLRKEAIKAGHAIERIAVAFEAGRDGFWLARWLRARGIEAHVIHASSIAMPREHRRAKTDRLDTEALMRAFLGWLRGEARHCRMAAIPTLAQEDAKRPTREHESLVTERTRLVNRMKATLVWLGLPNVNIKLRKAAERLGDLRTPEGEPVPPNTLAELRRDLERLVMIRVQIKAIEQARLQRLAAAPAQGTHPMVLMLAKILGLGIETADMLVHEVLSRRLRDHRAVARYGGLTGSPDESGSKRREQGLAKAGNARVRRGMLQLAWRWLMFQKNSALTQWYRARTADGRGGTRKTMIVALARKLLIALWRYVTVGEVPQGVVLKAV

SEQ ID NO: 450175 - protein, 445 aa, unidentified
MKKSSRGTRALSVVNPNAAGIDIGSEIHYAAIPDGRAARPVESFGCVTSELERMAEWLQRAGIETVAMESTGVYWIPVCAVLEDHGLDVVLVDPRQVKNVKGRKTDVQDSAWIQQLHAFGLLSAAFRPTPEIQVLRDYWRRRTHLVRDAAREIQRIQKSLEQMNLQLHKVLSDISGVSGLRILRAMVRGVTDPGELAALATSGIGATSKEMTEALRGHYREQHVFAIDQALKTYDFFHDRIRECDRAIEAVMRRLPAKAGATPVAPPAKRRKNQPHFHLGLEIARVTGVDLTRIPGVSTLTAQTVISECGVDLAAFPTEHHFASWLGLSPNNMKTGGRVFSSKTRLRPSPAATGLRLAAQALQRSKTPLGDRLRSLRARMGAPKAITAMAHLLARLIYRGLTRGQTYLENGLAAFAEQNQKNKVQALQRRAAYLGYQLTPAIERA

SEQ ID NO: 450176 - protein, 402 aa, unidentified
MNAVGIDVSKGKSMIAVMRPFGEIVASPFEVNHTVEELGKLAEMLRKLDGETKIVMECTGVYHLPIAYALNEAELFVSTVNPIITHNYDNNSIRKSRNDSADAIKIANYTLTNWLKLQQFIPEEDVRHMLKVYCRQYNKYKKILTMLKNNLISLLDSTFPGANEIFTSQPRKSDGHEKWVDFVAHFWHCKCISSLSQKAFVARYQKWCKRAGYNYSQAKAEDVYIDALGHCYIIPMTETTKRLITQATSQINTISETINTLAGEMKSLAASLPEYPVVMEFRGVGDILGPQLIAEIGDICRYFKKSSLVRYAGLEPVENQSGKFRGGESISKQGSPHLRRTLFLVMDCLLKHAPADDPIFQFLDRKRAEGKHYRSYMCAGAAKFLRVYYARVRAYLEKHYAD

SEQ ID NO: 450177 - protein, 412 aa, unidentified
MTQETLRWFAGVDWGSERHHACLLDAQGNIVGEREFPHSGAGLAELGDWLLSIAGQASAVAVGIEVPHGPVVDSLVDRGFVVHAINPKQLDRLRDRFSVAGAKDDRRDAYVLGDGVRTDRRLFRRLHVADPRLIELRAWSRLAEELREEQRRLSNRVGQQLWRYYPQMQKLTDDLAAPWFLELWTIAPTPAKARQLRKPTVARLLREHRIRRVDADAVLATLREPAIKVADGVAEAASIHLRSLVARLRVVNRELHEAEGQLDTLCTTIGETEAASGDCLRRQDVLILRSMPGIGRINLAALLCEASGPLGSRDYQALRTLCGVAPVTKRSGKQHIVVMRYAAHVRLRNTVYHWARVASQRDAKCRAKYVALRRRGKSHGRALRGIADRLLALACVLLRRGTVFDPHFAAAG

SEQ ID NO: 450178 - protein, 408 aa, unidentified
MDLTPMHKRVIALDVHQSKITACAVVEHDDGRVEVTQRDFGAFKRDRRALAAWALELRPEVVVMESTGVYWKSPFAALETVGIIAWVVNAHHVKTVPGRKTDIADAQWLATLARAGLLRASFIPPVDFRQLRLVARQRQKLVGMCSAEKNRLHKVLVDAGIRINVVVADVHGTSARAMVKALIAGQPLHEVLDKKGRLRASREELFEALSTEQFSAVHRFVAEEIVQHIEQIEQRIARMDQYLLEGLKAWQPQLNLLQTIPGIDIQGAAMMLVEIGADMNVFGSAERLASWVGICPGNNESAGKRKSGRIRRGNAWVRRLLCEFAQAAARTRCALKAKFEALAIRKGHKKSIVALAHKMLRTIYAMISSGSHYQDKTVDYEALSVARNAPRWMKMLRKHGFIETPAAA

SEQ ID NO: 450179 - protein, 321 aa, unidentified
MSVMIGIDPHKGSHTAVVINPEGVVIDQLRVRASARQVVELQEWAAGFEDRCWAVESARGLGYLLSQQLVAAGERVLDVPAMLASRVRVLGSSKSQKNDPNDARSVAIAALRHPGLTPVVADDHTRVLGLLAKRHRDVARLKNKAACRLHALLGELTAGGLASEMTVNKANSLLEAVVVTDEVTRQRVVIATELVADIARFNTQMRASKKRIHSAVAASGTSLCDIRGIGPIGAAMILGAVGDITRFPTPGHFASYNATAPIDASSGNHSRHRLNPRGNRKLNHALHMAAVSQLRYPCEGRDYFSDVVYRQLRADAKRIIS

SEQ ID NO: 450180 - protein, 316 aa, unidentified
MLKVCGIDVSKATLDICLLINGTPIYSVVSNDTIGFDSILQLLHSNKIDKVGFESTGVYSKKLHLYLSNNGFEAFVINPLTISYFRKSLKIQGKTDKTDAYAIAYYLLKGDSFNVLSYPIRDYFKPFTTSIIQLDKQSRQLKNLIHSLEYGEDTKVLVSEIEKTVAQLKITRTFLFEHSLSLLKEKCPEFDLVKNDIKGVGDTLLLFILPFLYDHFDEFNIRQLTSFFGLNPVSYQSGTSIKKKDKISKRGDSQVLKMLYMASVSAVRTNPIIKEKYLKQRERGKHAKVALVAVMAHLLRAIVSRLSFHTKRPIKK

SEQ ID NO: 450181 - protein, 345 aa, unidentified
MLYVGLDLSRKRLDWQALLPDGERAAIGAVPPDRDGLTKLVRRLGDAEGVLAVIESMSGARFVHDELELHGWDVRIADAVKARGIAPLACKTDRIDCWVLAELARRELVPEVWLPDPAVRAERERARFRLHLVKHRSSLKNRVHAILFQHGVPNPSSDLFGAGGRALLERLRLPEPWASTVAASLELIDLLDERISSCESELRALGAEHRYIPLLMTCPGIGWVLAFTIASEIGEIGRFPSPAKLVGYTGLCPRVEQSGERDRRGALRKNGPNYLRWALVEAAYSAARHPAYQPLRERMRARHGRKRGTKIAAIEIGRRLSEAIWHMLTTNQPFAPAGAPASLAA

SEQ ID NO: 450182 - protein, 412 aa, unidentified
MEVIHARCAGLDISKKDAKVCVRVAGAGRRKAVETVTTWASMTSRILALREHLAAEQVTCVVMEATGDYWKPFYYLLEDLPGAEVVLVNARHVKNLPGRKTDVADATWLAQLGAHGLVRASFVPPEPIRQLRDLTRTRTAITRERSREIQRLEKLLEDAGIKLSSVASDLVGVSGRAMIEALIAGNRDAGQMADLAQRRMRVKIPQLTEALVGRFNDHHAFLARAHLDLIDQHTTVISQLTERIEAMMEPFRGFHDLICTIPGVSTLTADVVVAETGADMSRFPTAKHLASWAGTTPGNNESAGKVKSSRTRPGNPYLQGALGASAMSIARTPGTYFNAKYRRVASRRGPQKANVAIQHALLVTIWHMGITGTVYDDPGADYYSRLRPERARQRAIHQLEAMGYRVTLDQAS

SEQ ID NO: 450183 - protein, 358 aa, unidentified
MVQSKGINFDGQNIYIGIDVHLKTWNVTIITQSGYKKKHSQKSSAKALFEHLKKHYPNGIYQAVYESGFSGFSTYYALEDYGIDCMVIHAADVPTTQYENVMKSDPVDSEKLAKALKAGTLTGIYVRQKENLDNRSVVRIRKTLKQQLAGYKSRVKHLLYNHGVPLPACFDSSNTHWSKRFMSWLREDVVLLSSGRLGLDLLLDQVELFRKSLLKANRLLRQLAKDPVYAERYSLLISIPGIGVNTAMCLLTEIDDISRFNNQREFASYLGLIPTSHSSGEKSCNGEKTFRGNKKIGPMLVESAWVIIRYDRVMSAAYGEYCKRMKPQEAIIRVARRLSNRVLSVLKSGKKYQYDKCC

SEQ ID NO: 450184 - protein, 383 aa, unidentified
MKTPNVCTPTTGNTGTIFVALELSRRTWLVTIHSPDRDRISHYKVDGGDHVGLLKLIARVRARSAKKLGYEPAVVSCYEAGYDGFWLHRLLTAAGIKNHVFDAASIMVEQRARRAKTDRIDGDKLERTLRQYCGGDRHAVRIVRVPSPEQEDLRRDTREEERLKEEQTSHSNRIKGLLRLHGMPVGDPRRSDYLDWLGKQRDWAGKPVPPRLLAEITREHARLRVVVEQLAAMEEQPSPARVNPAAAEMGRRRDLLFRLKSLGPAFSSRLVNEAFYKDFRNRREVGAYFGLDGSPWRSGDTNREQGISKAGNRRARHAAIELAWLWLQHQPESALSKWFRQRAANASKRIRRITIVALARKLMVALWRFLTTGLVPEGAVFKA

SEQ ID NO: 450185 - protein, 350 aa, unidentified
MIRYYGCDAHKRYSMFVAMNERGETGRPVRVEHTRAMYRAFLGGLAPGSPIAIESVGNWYWMIEEMERAGHEPQLANAGKAKLMMGQINKTDKLDATGLATLLRNGTLPSVWIPPRDLRDERELPRMRMSLVSVRTMFKNRIHATLAKYAIEIDEVSDVFGVKGRELLKTRLEELPPYTRQSVETQLELLDEVAAHIDQAEKEIREVVKATSAMTLLMTIPGVGPILAVVIALEIGDIARFPSPEHLASYAGTVPRVRSSGGKTSFGKVRPDVNRYLKWALIEAANIIVLNQGHWPDAHLVQLYLRLRERKGHAKAVVAVARHLAGAVFWMLKRNESYKEPQKPISSTQE

SEQ ID NO: 450186 - protein, 387 aa, unidentified
MPHPNDLSRSLVALEQDATLIAVIEMGQASWLIAGIVPGLERQPLKKLAADPDALLHLLLRWRNEAVEAGRNITRIAVAYEAGRDGFWLARWLRARQIEAHVIHPASVPVSREHRRAKTDRLDAELLKRAFLGWLRGEPKHCTMAAIPTLEDEDARRPSRERESLVGECTRIVNRVKATLARLGIRGFRLTLARASEHLKSLRTPEGAAVPQHTLAELRRDLARLSFVKQQIKEIEASRTERLEATPGEGRNAMVHLLARVVGVGVETADMLVQEVFSRTLRDRKALARYAGLTGAPDESGRKRRERGLAKAGNARVRRGMIQLAWGHLLHQKGSPLAEWYRRRTADARGGTRKTMVVALARKLLIVLWRLATTGEAPAGLRLRPAA

SEQ ID NO: 450187 - protein, 386 aa, unidentified
MKAVVERCAGIDVAKKTLNVCVLTGAADLEPEAELGLFGTFNADLDRLRNWLLEKGCQEVVMESTGSYWKPVYAALEGSGIEVKLANGEDVKARRGHKTDWDDCQFLANLLRHGMIRASFIPPQAIRDLRDLTRRRRQLCGAAVSERNRVQKVLEEANVKLGSVLSDVFGVSGQLMLEKLLDGEPDVGAIAELAQRKARQKIPEIRQALEGHRLRDHHRRMLRLSLEHIAFLEGQIGVIDEEVGKLIEREGYQGSFDLVRSVPGVQEITAAALLAETGVDMNVFPSEGQLSSWIGVAPGNRISAGKNKSGATTRGNRWVRTTLVECAWAAAARKDSVLQERFRRLSVKGRKVALIAVAHQLAIILHRTLSSKLPYQESAEPFPDET

SEQ ID NO: 450188 - protein, 352 aa, unidentified
MNDTRSSKRFIGIDLAKDHCDVACYDWHGKCVQEWARISYPELFEKLAQLPPALVLMEACNGAHDKARRIADLGHDSRLVNAADVKALRHGRHKNDLRDARYIAQLAFLPDVRFVRVKTSDQQDRQLAMNEYKQIQSVRIQIGNQIHSALEQYGIPSRESMDRLVGHLVDYLDERAEKITPTLREFVLRQLERWKRMKQEENEAKARIEENTKQDEVSKRLMTIPGIGCIIANLLIVHFGDPHRFRNSGQAAASIGLVPRQYSTGGRDTLLHISKRGPSLLRRSLAQGANTLYIWAEKLKGNLGIWVRKLKASGKKFGVIICAIAAKLARICWRIMRDGTEYNPNWSIEHRN

SEQ ID NO: 450189 - protein, 389 aa, unidentified
MYIVGIDIAKRFHEAAIIDRNGNVVIKRIKFANSHAGFLKLMDAVKKLDAPAEFGMEATGHYWLPLYAHLRQDGQTVHVINPLQSDALRSMFIRQTKNDTIDALIVAEVIRFGRYCETQVAPENIVALRELCRQRFFVVDMASDFKRKIIALLDQTFPEYEKLFSDTFGKSSVELLANYTTPEEMLSVDTQKLADLLSKTSRGRFGLDKANQIQQTAKNSFGIVLASSSFALIIRQYLEQLKSLESSIAAFDDEIARLMDDFDTKLETITGVGKTLVAVIFSEIGGDIRKFSSLPKLVAYAGLYPKSRQSGESKSDGRMSKRGSPYLRRAVWLAANVAAFKDPSISLFYQKKRSEGKDHLTAIGHVCHKILAIIFAVLRTSVHKRLSKV

SEQ ID NO: 450190 - protein, 493 aa, unidentified
MTNKSHKINRSWRGQRLLPASAIRSCEWKMEWGICNRNRSRKPSGLDDRDAHTPNQIHNMKTTTKLNPINPNLLQITFDVGKDSLYAYTELPLATNALDCVEETIPNRNLPILKALEHFKTLALQHGLAGLCVLCEPTGGYERRLLRLARQAGHFTAYLNAESVRKLRVVQSNDATKSDLKDPKTMFLLAKLGKTLTHRNLSGPWLVLRETHAYYQTQEAHNVALRCQIHRVLTQLFCEFSFKKDFLFGSPALPHLDQEFGLNPYRIVAAGQSAFYRKMKKHGVSLRTLERLWQDAQRSSLQRLEKGYSDLLEQQLRELFEDYWRCQQRLEAASQKMIGLLHELQAQGQVRLQARPGLINEGLLARVLAETGPLEDFASWSQLLRYAGMNLCERQSGTMVGRRRISKKGRSLLRKVLRQAVLPRVRKTDLYGPYYHGKKANGMVGQKAMMAVARKFLKLLWGLDRSAQGFIPRRVFCCASQFPAAVQPLVQAA

SEQ ID NO: 450191 - protein, 394 aa, unidentified
MHFYVGIDAAKDIHWACAINSHAKAVFSHAVRNDPEAIETLIGELTMLEAESITVALDLLGGCATLLCAMLAEAGFRIVHTPGLAVNRARQGTRGGENKSDPRDAATIADLARTRMDLRPVEVETEINVDIRLLVGRRREVVVDQTRRLSRLRDLTSSLFPALERRIDVKTKAGLVFLSLWAAPHDLRSAKPGHVVRKLTKVYPRMRGADALAEEAIALAKAQTVDVPGAQTRARLVKELAVEALAARAQRDRIDADLEPLLDRHPDAALIRSLPGMGAVLTADFIACVSSATRFRSADALAAAAGLTPVLRQSGKSRTVRRSSGGDKTLKRVFFQSAFNALADPESRAFYDRKRAEGKRHNQAVIALARRRVNVVWAILQTRTPFSPNFKNAA

SEQ ID NO: 450192 - protein, 355 aa, unidentified
MKYYTSTTQFNCGIDLHARQMYVCVMDRDGKKLVHTNIKNNDFGFFLKLVAPYRHDLTVCAECMFGWYWLADACQAAGLTFVLAHALYLRAIHGGKNKNDRIDSEKITHLLRTHLIPPAYVYPAGKRPLRALLRQRLFYVWRRAELLARIASHQLAHNRAPIKQTRRVRDDWAEQLLAAEDHPLRQCALTNDLAMIRHFDTQIAALEVQLQRQAKALAARDYALLQTVPGIGENLGMTILCEIGDIARFPTVKDFLSYSRLVKGTVASAGKIKGLRGAKLGNPYLRWAFGEAAVIAKRDPTVIGPLAQRLEARMNGNKFKANTVLAIKLARAVYYMLRSKTVFDPERLVAALSRN

SEQ ID NO: 450193 - protein, 314 aa, unidentified
MTDKTIKYLGIDISKKWIDVCYGDKGKVKRIAMKKSSINSFIKKHFEENEAVLAVLESTGGYEVLPAKCLESFGIKVHIAHPNKVVSFAKAMGCLAKTDAIDAKVLKAYGAFIKDDDIRGLPSDQDLELNALSSRLGQLKETHHQEACRLGLVKDKILKSSSERMLKYLKKEIEKIEQHMMAIINEDKVLANKFDILTSMPGIGANTACCIVCDLPEIGRINNKEIAALVGVAPITNQSGMKSGYSAIKYGRSKVRKTLYMAALVATRFNSRMKDFYNRLLENGKIKKVAIVAVMRKMLVTLNAMVKQNMQFSA

SEQ ID NO: 450194 - protein, 412 aa, unidentified
MKDLLEISCGLDVHKEKIVACILTGPLGKPTRSEIREFSTLIPDMIALRNWIVSKNCHHVAMESTGIYWMPIYEILEDAFSGDITLLVVNARHMKNVPGKKTDMRDSEWISTLLRAGLLNGSFIPEKRIREFRDLNRYRKSVIRDITSQKNRIEKFLQSSGFRLSSFISDIFGASGRNIILHLIEHGQIDKTALDSCLKTKTRNRIDEILMSVNGTLSEHQKAFLRILMTHYDSLKKHLAEIETSLEEDMAPFALQVEQLNSIYGISTTASCAIIAEIGIDMKPFKTAEHICSWAGLCPGNNESAGKRKSTSVTKGNPYIKSMLCEIAWVIAGKRNTYLSAWYWRIKQKKGAKKAIVALARKLLVIIYTMLKQGTVFDKSCFETRRKHCEQKQLSRYIRELEKHGYHVEAQS

SEQ ID NO: 450195 - protein, 362 aa, unidentified
MRIIGCDLHARQQTLAMLDTTTGEVLEVTLQHEGDNVREFYSSLPSPVRVGIEATGSMQWFLNLMEELGIECRVGHPAQIRAAAPRKQKNDRRDADLILKLLAENRFPAIWLPSKELQDLRSLLRHRHQWVRMRTRIQNALQSIALANGLRRGTALWSLDGQSRIASLSLAPHTAYRRSELQAMYEKFEAEIAKLNQRVEEQACKRPGARLLMSHPGVGPITALATEVFLGDPARFADSKALASYVGMIPREYSSGGRQRLGGLSKQGNPLLRFLWGAAGAHAARKDPELQRFYRRKLVQKGLGKASVAVARKLGIRLWIMLRDHIEYHEFCRRGQKQQKSSDAGAGMPETRHGAKSHRPVD

SEQ ID NO: 450196 - protein, 353 aa, unidentified
MPIVAEEYQFVIGVDTHAASHSFAVIAPATTAVGQEVQFPATAAGLSRAVAWAGRHAGSPDAVLVVVEGIGSYGAGVARAFKAAGYRIVEGGAQSVGDRRGKGKSDALDAVRIARSVIGTDTAQLREPRAEGIRNALRILIISREMMTRERTATVNALTALVRTTDLGLDARKALTIGQLRVIAAWRTRTGDAIDVAVARAEATRLARHALELGTQAAANARQLDGLVRQVAPDLLDKRGVGPVTAAVLVVSWSHHGRVRSEAAFAALAGTCPIPASSGNTTRHRLNRGGDRRLNWAIHTIALGRMAHDPDTKAYIAKRVAEGKTKREAMRCLKRYLTRSLHRTLENSPAMAA

SEQ ID NO: 450197 - protein, 350 aa, unidentified
MTVIKQVVGIDIAKDTFSVRFGTISDRQEERFLASAAFPNEKRGFRKLLEWTRKQIISPDAPLWFVMEATGAYYEHVAYFLNEHDQQLAVLLPNKVKHFAKTLEGKSKTDRLDARSICQFGLERPLHAWQAPSPQMKLLKELSREYNAVQEMATQVKNQLHAKDHTYQPSPETTQRLRAQLQLFQKQLRSIEQQLRSLVNDDDDLRRRIANITSVKGIGFMTAVTAVAETNGFALITSEKQITSYAGLDIVIRESGKQQGKPALSKKGNRHLRRAVFMPALAACRFNPALRAFYLRLVRTKASKKVALLAVARKLLCLIYILWKKNVPYDPDYRHQNIRSVPDNFALQTA

SEQ ID NO: 450198 - protein, 348 aa, unidentified
MKHYAGLDVSVKETSVCIVDESGKLCRERKVVSHPEDLVAILSDPAVSLERVGIEAGPLSQWLFEGLAKAGFPVFCIETRHTKAFLDALQQNKSDRNDARGIAHMMRVGLFKDVHVKTLTSQKRRALLGARSLLQEKAIDLENEMRVLLRNFGLKVGHASGGTFERRILELVEHDPELAEIMEPLLAGRRKLREGLAKLEKRVLAEAKQDDVCRRLMTVPGVGPVVSLAYVSTIDIPSRFRHSRSVGAILGLTPVLKQSGEVSRVGHVSLRGDAMMRKLLYEAAQSMMTRVVKWCWLKAWAMNIAKRHGSKKAKVALARRLAVVMHRMWVDGSEFRWTREDTVSTVAA

SEQ ID NO: 450199 - protein, 404 aa, unidentified
MQDAIPHFGSVDWAANRHAACIVDATGHIVDQFMVDHTAAGLATLTRQFQRQHVARVAIERPDGPIVEALLAADLEVVVVSSRAVKALRTRYGLAGNKDDRSDAYILADCLRTDGHRWPSLQTDAPQTVALRASVRSRKDLVATRVATANQLRAHLQLVFPAAVGLFADIDSLIMLRFLERFPSADTAAWLSERRLQGWLQANAYSGRRTASELLDRLRTAPQGVRGATADAQAVVTLSLVRVLRVLVAEIAQLERHIREQLAVHPDGSIFRSLPRSGTVRAAALLVEIGDCRARFPSPESLATLAGAVPSTRASGQHRLVTFRWACDKKLRDVLVDFAQDSVRASPWAEQLYRRHRQTRKTHPHAARILTRAWIGVIWRCWQDHQPYDPARHRALQRVLAPGG

SEQ ID NO: 450200 - protein, 366 aa, unidentified
MKKTSTVRVNGNMIFKGHKLTIGMDLGDRWSNYCVLDEAGEILLEQRLATTPEAMKQTFERMPRSLMAMETGTHSPWVSRLLKELGHEVLVAHAQRVELISKSTRKDDRHDARTLARLARIDPELLRPVRHRSAKAQIHLTVIRARAELVSARTGLVNAARGLVKSYGQRLPKCGTQQVSRELATELSAELREVLEPLLKEVESLNERIKEYDVRMEKIAREGYPQVELLKQVKGVGTQIALTYVLTIDDPHRFPKSREVGCFLGLRPGRRDSGQSQPQMHISKEGDPYLRTMLVQGAHYILGPFGEDSDLRRWGLRLAERGGKNAKKRAVVAVARKLAVLLHRLWVTGEVYEPLRNSHKAMRAVA

SEQ ID NO: 450201 - protein, 346 aa, unidentified
MNKDIILAVDYHDENLEIRRFNTATGEERCENQPTTKAGILKVVDEAAAEAAAAGGQVVWIMESTTGWARVKDLIGTKAQMVLTNVLQMPLPPKAYRRKTDKIDTGRLLREYLNGTLPQAFQPSAWLRRVRRLAGTRESLVRRQTALRNWLTRYLAHETWEDRRGLWSQRGLRRLRRLAETSAGPDRLVLSVKQAELEHLEPLLKTVEQEMIAVYQQWPEAQAVDAIRGIGVISAVSILAHIGPVGRFRKPEALIAFAGLSPGVHQSDGTRRTGRIGGGGTDTFLRHYLIEASVWARQIPRYRKTYERVESKRGKKIARLVVARLILRSIYKMLRDGVAFNQAPAA

SEQ ID NO: 450202 - protein, 322 aa, unidentified
MQSSIVSVGVDIAKDKFDTALLYQDNQSLTKTFKNNAAGIKKFVRILKKQKTASAVPCVLESTGLYHLNMALTVHQAGYKVSVINPLITKKYQRSSIRNAKTDTIDALRLAEIGVKEAKLPLFTGNITYIEARKLVCYMSRLEEIKRQICASLKFVEMTQTVTGLDIDLDHTQKAIDEIDDQIKVLKEKICKLAPLEAKILADNIYGLSHEKVAAVLAMLGDKEFKNRDQLVAFVGLDIMPRESGKWRGKSRLSKRGNPYLRKILYQMAWGLKQNNPVYQAEYERLRAKGKNYTTTLIILSRKFLRFLYAYYWKKTARPEFC

SEQ ID NO: 450203 - protein, 492 aa, unidentified
MHRKQSLDYFNQSFERVPVRSRSTNEFSFADAYFNASTIRLSQNGSNACSPTNADQLNTKKKATPMNQNNQNQSFAAFIGLDKSDKKINVSLQRCGTAKIERSIIKGGAEALHAWVATLCTRFAHRQVAICLEQPAAGLIHGLMGYDFIVLFPINPMTLARYREAFTPSRAKDDPTDADFLCELVALHREQLKAWQPDDVCTRKLRHLTQARRRSVNMRTRLSNQLKALLKGYFPQALELCGDELTTPMACALLQKWSSLQQLKRARAETIRRFYYAQNARRGDVIEKRLALIAQAVPLTNDPALIESSIITVQALALGLRAVHTAISRYDREIARTFAQHPDASLFAALPGSGTAYSARLLAAFGSRRELFESAEAMLNFSGVAPVLKRSGQATLIHRRYARPLFVHQSFIEYANESIRHSLWARAFYQMHKAAQKSHWVIIRALAYKWIRILFRCWQERTPYDEIRYLRSLQKSRSPLLQYLAQPAIQTA

SEQ ID NO: 450204 - protein, 389 aa, unidentified
MGSSLHLNTPAACGEHGTMFVAFELGKTQWKLGIVLPGKARLSRYVIDGGDGEAAWQLIAKARARAEKQLGGPVRVMSCYEAGYDGFWLHRWLLARGMDNQVIDPASLQVNRRKRRAKTDRLDLEQLIGALIRLLWGDRLACKVVHVPSPAQEDDRRAWRERERLVKERTAHTNRIKGLLHGQGVRDALPRAKAFGSWLGSQRTGDGLALPAHLVDELKREHGRLMLVEAQIGEIEAQAEAARKAAAPSPLAVRINQLIELKSLGPVSSQTLVGEVFFRDFKNRRQVGSYFGLTGTPFDSGDKTREQGISKAGNPRARTAAVELAWLWRRHQPASTLSRWFEERVGHQKGRVRRIAIVALARKLMVALWRFLEHGVVPEGANLRAAPHG

SEQ ID NO: 450205 - protein, 423 aa, unidentified
MTSMTVAPSPANLFSSAGGLVAGVDTHKNTHHVAILDHVGRPVADREFRADGRGYAQIIAFLREHGEVDRVGVEGTGSYGAGLTRALTAAGVSVVEVARQDRRARRLRGKSDPLDAHQAAVTVLADTNTAIPKTGDGAVESMRILLGERRSAAKARAQAMNQIHALLITAPELVRQAFRALSGQRLIRALAKTRPGTSASADPEVVARQTLRRLAVRYLTMQAEIDLIEQQLDALIRQVNPALLSLSGVGPVTAATLLVAAGDNPERLATRASFAALAGVAPIPASSGQRTRHRLSRGGNRHANAALHRIVLLRMRHREPRTMAYFERRRAEQLTDRDIMRCLKRHIANEIYAILLSPATDNPVGRELRARRQEIGVPISVLAASLGVPYQRLRRLEIGTRADPELEQRATLALARLRPPRAA

SEQ ID NO: 450206 - protein, 359 aa, unidentified
MHSEGTQVRFLGQDVYVGLDVAIKSWKVCIYVGRVFYKRFAQPPDPVALVQYLRREFPGGTYHSVYEAGYFGFWIHEALVRLGVDSMVINPADVPTSDKERRTKTDRVDATKLARSLANGELRRLYVPDRRALEDRTLVRMRMAFVRKQTRCKNQIKALLRFYGVHVPDDVTDRYWTRGYIRWLEGITFTQESGTLSLKALLKELLALRGTIADLTKRIHVLAHEGHYGSQIELLCTVSGIGILAAITFLTEVISIDRFKDLDRLASYVGLVPGEKSSGELEQDTGLTPRRNSALRYMLIECAWKALRDDPALLKAFTDYCKRMPKTVAIVHVARKVLSRMRFVLKNKERYVTGVLQCA

SEQ ID NO: 450207 - protein, 349 aa, unidentified
MSAKFNSEIAVIGIDIGKNSFHVVGLDQRGAIVLRQKWSRGQVEVRFSNLPPCLIGMEACVGAHHLSRKLTSLGHDARLMPAKYVRPYSRGQKNDFRDAEAIAEAVQRPTMKFVATKTAEQLDLQALHRVRERLVSQRTGIINQIRAFLLERGVAVRQGLRFLRAELPRILARPCDALSPRMLRVIEDLAGDWRRLDERIEGLSSEIEVLARQDAGCERLMSVPGIGPIISSAIVAAIGGGDVFSKGRDFAAWLGLVPKQISTGDRTILGKISKRGNRYLRVLFVQAAWAVLIKPKSWARHGLKPWLEAAKKRLHHNVLAVALANKLARIAWSVLAHGRVFEATKIQAA

SEQ ID NO: 450208 - protein, 341 aa, unidentified
MMTEHSPDLEFFGGIDTHSLTHHAAVVDTLGREFDDREFAATPAGYEALKDWLVGFGELVKVGIEGTGSYGAGLMRVLAGAGIVVVEVDRPDRTARRLLGKSDPLDAYAAARAAASGRATGTPKSRDGIVESIRCLRLAYRSAVKARTQCINQIRALLLNGPADLRERLAPLPTATMIKSIARLRPATDLTDPDVACKLALRSLARRHASLDEEIGELHRGLSELTQKAAPQLLDRPGVGVQVAAQLLFTAGDNPDRLGSEASFAHLTGVAPVPTSSGKRQHRHRLNRGGDRAANNALYTIALVRMRYHPPTRAYVERRTAEGLSKKDIIRCLKRAIAREV

SEQ ID NO: 450209 - protein, 519 aa, unidentified
MRLDSPTTRARATTGPRAPTPANARQTLPTRPITQNAQNEPTNVPTPSPAPQWTTPRHNPARPRETKSAIENRTGMPQKSGQRLAWKPGSRVQEVIPVKRRSPYSLVDVKSVSVESIVQARAGQPCSVGTDVAKNEAVLCLYWPDKTFDRPWRVRLPGEVGVMTQKLLELKAHCPLVLAMESSGTYGDVLRQAAADAGIEVRRVSGIAVKGHAEAFDGVPSQHDGKDAAVIAELSAQGKSAIWAWQPAGGSEQDQAMRYWVRRLDRQQRIKQMYCGQLEALLGRHWPEAQRVLKPSSGTLSRTLARWATPQALAVDPVAAQALANIGGCWLKPEKIAALLEAARHTVGVRMSDWMAREMKEVAQAIVDLRRQIAAARRALRALARDNPSIQAQAAAVGLATACVLHVCLGDVRNYPHPGAYRKAMGLNLKERSSGQYKGKLRISKRGQRLCRKWIYFSALRLIKTSAGVKRWVAGKKQRDGGKAKRAVIGVMRRLAMAAYQVGANGVAFDAERLFGGSR

SEQ ID NO: 450210 - protein, 425 aa, unidentified
MSKVIMVGCDLHDRSLLVRFAVGEGEPQQAAFSNDALGRGLLVQRLRDVAARHRCERIVLAYEASGQGYGLSDLLHDQGIACFVLSPTHLPKTPKSAKQKTDAKDAQMLLEQVRGHVLAGNPLPVVWTPPQRLRDDRELVRARVDTADDTTRIKLQILSLLKRYGIRKPSWYTTWTKRFVKWLRETATTLDAVVTPVLESLLDRYELYHQEQHRLDRAIQALSRTDRYRATCDELRRLPGVGLLSAMTFLTEMGDLQRFHNRREVAAYLGLCPSSFESGQATDRKGRITRQGPARLRKLLCQAAWVAVSRCQETGATYHRIRGGKTHRTKKALVAIMRRLAIRMWHRAAACGTVDELHGRGGPHPRPADAVAGPRVNGHPREAREALRDPEGSSSAGDGGRTRGLDFSRHGGLKKNLLGGEEKWP

SEQ ID NO: 450211 - protein, 400 aa, unidentified
MISVGVDVSKGKSTVCILKPYGEVVSSPFEIHHVEKDMEDLDNLLSKLDGEIRIVMEATGIYHLPVVTFLHDKGYFVSVVNPFAMKKYAKDNSIRGAKTDRLDSIMIANYGIEKWFKLQRYEGTEETYAELKLLGRRYRYYMELHVKALQELTHVLDYMLPGIKKMFNSWNEANGKDKLSDFVERFWHFDLITSMSLEKFTEEYIAWAKEKKYHRSRSKAEAVYELASSGIPTLSSSTPSTKMLVQEAVSVLRAVDSSLSLILTRMQELAKSLPEYSVVREMGGVGNVLAVKLIAEIGDVRKLHNAKALIAWAGIDPPPYESGQFIGSKRRITKRGSSTLRKVGYEVMRVLKSHSAPKDDAVYNYILKKESEGKSKKHAKIAGLNKFLRIYYARVMEVYQ

SEQ ID NO: 450212 - protein, 343 aa, unidentified
MSEIITIGLDIAKQVFHAHGVDASGRQVFSRRIVRRKVLEFFAGQPRCLVALEACGGSHHWARELIRLGHDVRLIPPSYVKPFVKRHKNDAADAEAICEAAQRPNMRFVAIKSEEQQASALVFRTRDLLVRQRTQAINALRGHMAEYGWVAPQGRAHVETLADLLEEEAGASLPHAAASMLKVMLAMVEEFDRRIAELDKEIARRAREDVVARRLMTIPGIGPIAATAIVALAPPLEGFRRGRDFAAWLGLTPLQKSSGGKQRLGKMSKMGERTIRRLLIIGSSAVVRHASRPDAPERPWLAGMLARKPRMLVTVAQANKTARIVWAVLTKEEDYRAPVAKAA

SEQ ID NO: 450213 - protein, 309 aa, unidentified
MKQSIVYIGIDVAKAHLDVAWQEQSRRFANDKCGQAALIKWLKQSAFPVQLICEASGGYEQALVESLEHTDITASVVQANRVRQYARAAGILAKTDKVDARVLAAFGAAMQPKPTPPLCPEQKRLRQYEAQRRHLSAVLVAEQNRLAQLSYAELRVLSRSLISKIKKQIATIDARINGLIAQDKQLCQKAQKLTSITGVGARTAALVLAQMPELGQLNRRQAAALGGLAPFNRESGTLRGKRTIFGGRRALRSGLYMAAMVAARRNPILCSFYQRLRAKGKPHKLALTAVMRKLLLVLNQNLKPITSPA

SEQ ID NO: 450214 - protein, 355 aa, unidentified
MDVHKYAHQAVALNCLGQELSQLSFTNDELAHCRTWLNGLGAQEAIVVGLEDVNGVGTRLSQFLLKEGFTCRYVPAILTERERKHSVQHDKSDYLDAKRVGKVILTKSEETLPVSTILTQENTYIKELDLLLQERQELVREQTAVKNQLHVLLHQYYGNTYRQEFKHIFSQKALTWYKKDLRIIQSDTKGSALLAAAILRRVERLQLILSQVAAIDKTLNGTSKTIREVEVLTKELVGCGNLTACKIIVEVGTIHRFTSKDKLAKYAGIAPVRDQSSSKNRFYTNSGGNRKLNQAIHTVALSQIGAGGYEDAKKYFQKKVNEGKSKLWAIRCLKRQISNRIFLLLKNASNTKRTN

SEQ ID NO: 450215 - protein, 340 aa, unidentified
MEHIAAVDLHSDNGYYGIIEPDGKRVYQKRLPNDLTTVLKELAPYRETIRCIVIESTYNWYWLGDGLREQGYRVKLANPAKFEKYNDLKYTDDKTDTFFLTEMERLNILPTGHIYPREERGIRDLLRRRMLFVQQKTSHILSFQSLISRQTGGSITSNDIKKLETEDVEKLLEDQERHVVFAGQSNIAVIGFLQERIRLLEKMVLASARLRTEYEKLQSIPGIGKILALVIMYETGAIGRFKAAGNYVSYCRCVKSNHLSNGKKKGSGNRKNGNKYLSWAYVEAANYSRRYCEEAKKYYQRKLAKGNSAIATKALAAKLCRAAYFIMRDQVEFDVTRMFG

SEQ ID NO: 450216 - protein, 430 aa, unidentified
MGFIVPTDMHPERDDQPMPYEWFVGIDWGSQQHQVCVLDGERRRVGERAVDHDGASLAQLAAWLWTLSAGQPQRVAVAIEVPRGAIVEGLLERGFHVFAINPKQLDRFRDRHSVAGAKDDRRDAFVLADSVRTDQPSFRRLHLDDPQLLRLRELSRAEETLLEDFRRSANRFRDQLHRFYPQMLELCSAADEPWLWDLIDLAPTPAHVALLSEEQVQRVLQAHRIRRVKAKEVLTCLQALALPVAPGAAEAAQAHCQFLLPCLRVLAEQLQACSQQVSALLHTLAEEPGDGEGPSDVAIVLSLPGVGRKITAWLFAEAAQPLAERDYQVLRTHGGVAPVTKQSGKRRQVVMRHGCNPRLRHALYHMARVAMQRDAHFSGVYAALRAKGQRHGQALRNIGGRLLRILMAMLRHRTCYDASRMRREPVVQMG

SEQ ID NO: 450217 - protein, 428 aa, unidentified
MEVIYPKACGVDVHKSFIVAVICDSTSITPKYSRKRFSTYNNSLVEFRNWLIDNDCNNVCMESTGKYYVPVYNALEGFISNVVVANPKWVKAIKGEKDDNKDAKWIADLFKMGLVRSSYIPSKDFRILREFTRYRYKLTNTKTSEKNRFTNALTVGNCKLDMVFSDIFGKSSQSIIDIVLNKDNFSDNDIISCLRKNCKSSYEDILSSVNGIQLTNEQKLRINIVKDHIDYLNNQIIKLNDIIDTLVAPYESYIDLLCTIPGIDRNSAIGILSEISNDMTQFKSHYRLTSWAGLTPGCNESAGKKKSVKISRAGVYLKPYLVEVAHCAVKDKSNSYYAKKFEKISKRRDKKRAYIAIARKILVAIYHMFQTGEVWNPTDLASVETPIQDRIKYTKNNFNQSFKQLLFLGLTSEELIELINQNANKLLI

SEQ ID NO: 450218 - protein, 456 aa, unidentified
MIHYIGMDCHRKTIRACRRNSAGEIVDEVDIAGTHEAIAAYAKEHLTKEDVVALESSFYSRSIARALIPLVARVVISNPLLTKAIAYSKKKTDKVDARVLSDLLRLDYLPQVWLPDAETEIRRDLCARRASLVSERTRIKNRIHSVLAAALIPVEVSDLFGKSGLAWLAALPLKEEPRSAIESDQRLLEVIDTEIEAVEDRLAKNGWNEPRVRLLMTLPGVSIAVAQTVLAAIGDVDRFTTPDQFASYLGLVPSVHQSGEHCYHGPITRRGNGKARWMLIQAAQHIALHPGPLGQSFRRLLKRKNRNVAVCACARKLAVIAWHMLKKNEPYRYAQPLPTENKLSKLRVAATDDRRKTGPKKGTPAAASRGTGTRTRTTPGLPAVYEREGLPPATPPSKMRAAEIRYVNEMGANQYVEEIQSSKTRKQTHSRPGRPECEKTLTNSIATETPTSMKPT

SEQ ID NO: 450219 - protein, 516 aa, unidentified
MEIVYKQCAGIDVHKKNVVVCRMSRDAQGKLTHQTRTFGTMTQNILELGDWLSEAGVTHVAMESTGEYWKPIYNLLEGSFELLLVNARHIKMVPGRKTDVVDAHWIADLLQHGLLRGSFVPPKDQRAMRDLTRHRSNFVRQRATVCNRIQKLLEGANIKLASVATDILGASGRQMLNAIACGEDDPKTLAAMAKGRLRDKDAALKLALEGRIQPHQRLLLRELLAQVVSLDHSIEVLTHSIEDLCRNDPRNGEGGNGEGGNGEGGNGEGGEDLNAKDLEETPGAVSEASPTSYQAVPSPSHLDSRKELETGAIDKTTAKPIKVSLPPLGFGQAVALLMTMPGVGRSAAEIILGEIGTNMYRFPSDRHLSSWAGVASGNNRSAGKILSGRTTYGNMALKILLIQVALAAVRTKKGYLYAFFRRIASRRGTKKALMAVAHAMLVSIYHMLKNHQSYNDLGADHFDSRNPEAVAKKLVKRIMTLGEEPAKLVVDALQRAGIQCAPPQIPHQALTQPISA

SEQ ID NO: 450220 - protein, 404 aa, unidentified
MSADVLAGLDWATTTHAVCIVDVTGRVLERFEVNHDRDGLAELLRRLARFGTRVRIAIERPSGVVVDALVEAGHQVFPIHPNAVKASRPRYRSHGAKSDASDAYLLADLLRTDGHRWTPLQPQSDSIGALRALVRARDDLVTARIALANQLRTTLEAFWPGAARIFAAVDSPIAMAFLRRYPTPAKATRLSETQLRRFLRAQHDSGRRAAAQLLARLRAAALGRASVLTSAAMADVVLAMVAVLEPLVAQLAALTRRIEAFVQSLPDGQIVMSFPRAGRVCAAQILAEMGDVRERYPNDDRLAAEAGVVPLTYESGKRRCVGFRWACNHRLRRAITTLADNSRHANLWARGIYSAARQRGCDHPHAIRILARAWLRVLWRAWFDHKPYDPQLHLGAIKVANQGG

SEQ ID NO: 450221 - protein, 482 aa, unidentified
MKKRTIYSDQSQELLKLFEDAGSNEKVMCVPIDYAKKDHVVMFCNGHGDILRKPFSVHNSPEGITYLTDQLLRGCKHRHIDQDHIFFGCEDPGSYAENFINELRSKGWLVASVNAKDAKKQRDNMQASTDRLDLMGIAKTVLNRRGNCAPAQSGIYLNLRNLVRHRRKLVSLTTEVRNRIHTAVDRLLPGFLDEKKSGIAPFSKGSLLLMKDRFSARQICRRRRKILIDVLRRSGTPKPVAAVAKLQDYAAQVLNAPDEYIVTLQVSLSQHVKHYYCLQENIEQMQKEIALWLARNQGAFLTTIRGIGIVLAAGVTAELGNPFEQKPLNNLVSYSGIIPRVKQTGGPEGQTYKGRVKKRSNRILKDYVVQSASHIGLHGPTDLMMDYKRRDAAGQHADFGIARRYLRMAMCLMRKSQIYLPNELRKKDTDTKKRADYYMKIWPTLRDKWQKANALNAAFDDENPLGKWRNMVQDLYEIKLKL

SEQ ID NO: 450222 - protein, 347 aa, unidentified
MNTVGIDLHRRRSVLAVIDGQGEVHPPVRIDNDSKTFLDLLGELEGETQVAVEATYGWEWLAELLEDAGYEMHLAHPLGTKAITSARVKTDAVDARTLAQLLRAGMLPESYIAPRELRDLRELLRHRVALTQLRTALKNRVHGTLARQGIPNEHADLFGKAGRKFLAGLDLREPNRRRIDSILALIDDFDREIGEAAREIEALAGEDERVPVLCQIRGIGPYTAMLIIAEIGDITRFPDARRLCSWAGITPRVKNSDRTVRLGHISRQGSTILRWALVEAAQKAAQGGGPLRETFERIAKRRGRGIARVAVARKILTLCFYGLRDGEIRCLAPRARADAELAQESSA

SEQ ID NO: 450223 - protein, 388 aa, unidentified
MHVVAAQSEAAIAIRTDLCATFVSLELSRSTWLLTSLSPGAGEKMSKHSVSAGDTAGLFSRFVELQQKARTRTGRTFPIITIQEAGLDGFWIHRLLQGEGIESWVVDPASVLTSRRRRRAKTDKIDGETLVRTLLAYKRGEPRVCAMVKAPTPEEEDRRRICRERKTLTAERVRHVNRIKGLLFAQGVGDYEPLRRNRRGRLEELATGDGRPLPEHLKAQISRELDRLEVILAQLKAVGSERDAMLEPAKEGPPTPALLLAQLKGIGPEFAAVLWSEGLFRSFNNRRQVAAYAGLAPTPWQSGSVAHEQGVSKAGNPRLRTTMIQLAWLWLRHQPGSALSIWFRERVQRNGGRSKKTAIVAMARKLLVALWKYAVHGILIDGSTAKAA

SEQ ID NO: 450224 - protein, 409 aa, unidentified
MNIRVEKACGIDVHKSFLVATILTCDAAKETKEFNTGLEDLIKLRDWLMEKHCQRVAIESTGIYWIPIYTCLEGKVETIVANARQIKNMPGRKTDYLDSEWLAEICLNGQIKPSFIPSKEIRELRDLTRTRTKTTQTMTAFKNRVHKVLEKANIRISGVLSELFGIAGLQILNALLDKKNIDEVLKKVKRIGKKKAAIKEAVRGELSQTDIWLIRECLETIDFLKRKINLLDSMINQRIENTKKQDQMQILMSIPGISFTSASAILAEIGDINVFPNPKSLVGWSGLAPSLNESAGKSSNGHITKKGSKYLRRMLVQCAHVIAGHKPNRLRFFLQRILMKKGKKIAIVALARKLLSIIHHLLKNNEKYSEDSLKPKQMKRLKFQSISEFSLDEMIEIISRAGYTVDKGS

SEQ ID NO: 450225 - protein, 343 aa, unidentified
MDITTIGLDLAKSVFQVHGIDASGAVAVRKTLRRPQVLPFFAKLQPCLVGMEACGTSHHWAREIMKLGHQVRLMPPAYVKPYVKRGKTDANDAEAICEAVTRPTMRFVAAKSREQQAALALHRTRELLVKERTQLVNMIRGLLAEFGIDIPRGLERALAVARQIAEDGIVDVPDEARAALLELSRQALAAHERLRSIDRAMLASHRASDLAVRLATIPGIGPIGASALAASVADPLQFRSGREFAAWLGLTPLQHSSGGKERQGRISKMGDRYLRKLLIVGMTSLVRRAKYKPQSVDPYLVGLLTRKPARVATVAMANKAARIAWAIMARGGTYRAPVSRLAA

SEQ ID NO: 450226 - protein, 344 aa, unidentified
MEEYVGFDVSKEETAFCVMDKAGKILSQGKALSDPRSLFEALRDHTLCPDRIVLETGTMSAWLARELRGLGLAVDVIDARQAHAVMKLQHNKTDANDAVLLAEIARTGFCRPVSVNSEAAQVQRMLVKARTHLVRQRRDTENAIRGFLRALGIRFAKGSGKLAGRVREALEERPDLKVMIEPLLASVEALKTQIKRLDEDVVLKARGSPACRLLMTVGGVGPITALAFAATIDDAARFAKSRAVGAYLGLTSRRFQSGEMDYSGRISKHGDAMLRSLLYEAANSMLTVVRRAHPLKDWARRIRKRSSHKKACVALARKLAVIMHRMLVTGEPFRWPQMEAAATA

SEQ ID NO: 450227 - protein, 377 aa, unidentified
MGTTRQALINDTSVVLMLYMALELSASKWKVALADGQRAASQHTLEAGDVGGLLKLIEKAKKRCGLQGRLKVKSCYEAGRDGFWLHRWLLEQGIENVVVDSSSIEVNRRARRAKSDGLDAVKLYEMLVRHVGGDKRMWRVVRVPSVQQEDERRVHRELERLKRERTAHVNRMRSLAVLHNVRLQRVGGRGWSERLEQLKGQLPGALWAEIERESVREKLVCEQIVALEQERKEQLQAMLEQGGPLVALLKLRAIGLQTAWVLVRELFGWRHFNNRRELAACVGLNPSPYDSGASQREQGISKAGNRRVRALVVEIGWYWLRYQPHSALSEWFNRRCGAGGKRMRRIGIVALARRLLIALWRYVEHGIVPAGAQLKKA

SEQ ID NO: 450228 - protein, 275 aa, unidentified
MKQTTKYVGLDVHQATTVAVVGDETGRVIARSVVPTEAMALLEFMRGMRGAVHVVLEEGTQAQWLHDLLVGRVARVIVCDRRGEPRRGSKGDWHDAEWLMGRLRTGELRAVYHGSPHLATLRELGRAYRNVIEDATRVMSRLKALFRGRGIRTTGRGVYDPAERAAWLAKLDGAGVRLRAATLYAELEVLQTLRPTAKAALVAEARRDPAWGVLRTIPFLGPVRVALLLATLQTPWRFRTKRQLWTYAGLAVVTHTTSEYALDASGRPCGGGGRR

SEQ ID NO: 450229 - protein, 355 aa, unidentified
MTSTKYIGMDVHKESISIAVRNAAGKVVMECVIETKASMILQFIDGLRGEVQVTFEEGTSAAWLYDLLKPHVSKLVVCDPRKNKSMREGNQSDKIDARQLAELLRLDHLTPVYHGEHGLRTLKELVRSYLTVTKDLGRVMTRVKAIYRSWAIPCTGKQVYGARHRAEWLGKINEPGVRRRAEFYYQQLDALRVLRQQVRRDLLAESKKHKAWKLLCQIPAIGPIRAAVLLGILQTPHRFRTKRQLWNYGGLAIEMLSSADHRSVDGHLQRSRKNVLVRGLNRNCNHDLKNLFKGAAVVASSKPGPFAEFYAALVGKGMRPEMARLTLARKIATIVLIVWKKGVRFDAQHLKPQTA

SEQ ID NO: 450230 - protein, 350 aa, unidentified
MSMLADMVEVVIGVDTHSQTHTAAVVDARTGGVLARATVPADPDGYAELVALAEEHSGLRAWALEGAGGYGAGLARHLADGGELVVELDRPKRPARRAGAKSDPIDAERAARDALARTRLAQPKTGAERAALQMLLTARRAAVEAATTAQRQLLAMVITAPEPVRARFRGQSTRATITTAARLRPGASSGDVEVLTALTVLHSLAARIRFLEAESLDHEKAIRAIVRSWRPDLLELTGVGPIVAATALTAWSHPGRCRNDAAFAMLAGTAPIPASSGKTVRYRLNRSGDRQLNRALHTVVLTRLQRDERTRAYADRRRAQGKTDREIKRCLKRYIARELYRRLESPPAAA

SEQ ID NO: 450231 - protein, 357 aa, unidentified
MSSNMKKYIGLDVHQESIAIAVLNSAGKLVMESIVETKAATLLEFLHGLRGELHVTLEEGTWAAWLYDVLKPHVSEIVVCNPRRNALLKEGSKSDKVDARKLAELLRAGLLRAVYHGENGLRTLQELARSYLTISKDQARVMSRLKALYRSWGIPCSGRQVYAPRHRCQWLSRIAHPGVRRRAELLYQQMDGLSAVRHTVRGELLTESRKHEAVKILRQIPSIGPLRAALLLALMQTPYRFRTKRQLWTYSGLAVVTHDSAQHRYVDGQLQRSKKPQQIRGLNQNHNHEMKSIFKGTALSASQCAGPLQDFYAGLLTKGMKPEMARLTLARKIAAIALTLWKKGGRFDAEHLKSQAA

SEQ ID NO: 450232 - protein, 345 aa, unidentified
MNKLSVVGLDLAKNVFQVHGINTEGKVVVRKQLRRSEMRKYFARLEPCLIGMEACGGAHYWSRELTRLGHTVRMMAPAFVKPYLKSNKNDRNDAEAICEAVQRPSMRFVQPKMPEQQAILHLHHGRQLLVRQRVALSNHMRGVLSEYGIVMPQGVKVISRCLPALLEDADNELPMLARHLLAELKTEHDQLLERIDRCEQQLKAWHANSAVSQRLASIPGIGVLTATALAASIGEGQDFRNGRQLAAYLGLVPRQSSSGGKERLLGISKRGDGYLRCLLIHGARAVIHHIRRRLKAGQPGGNPWVEQLLQRCHINEAAVALANKMARTAWVLLARNETWCPSRSV

SEQ ID NO: 450233 - protein, 504 aa, unidentified
MDWFGFGWRASEVGHRGKRRLAPVDKSAPEVIPDAEHELVIERVAAVDVAKAAGKVCVRLPAKTGRRFSRVWDVPARTGAITELGEQLVELGVEKITVESTSDYWRIWYYLLEAAGLSVQLVNARDVKNVPGRPKTDKLDAVWLAKLTEKGLLRPSFVPPAEIRRLRDYTRLREDLTHERTRYWQRLEKLLEDALIKVSVVASRLDTMSTRDMIEALIAGERDPRRLAELARGRMKAKRSELITALDGRFDDHHAELARMLLAQIDALSAQINTLTGRIEDLIAELPEAAAVDHGGGDDTDTAAPDAGDGPDAGPPPARGAAGLTGGTPRRVDPAIEAECARLSAIERLDEITGVGEHNAQVIIAETGLDMTRFPTPAHLVAWAKLCPRTIQSGPVTRSGRAGKGNPYLKGALGQAAAAAAKTDTFLGQRYRRIVKRRGKLKALVAVARSILVIVWHLLADPLARFHDLGPDYHARRIDIERRMRNHIAQLTALGYRVTVEPAA

SEQ ID NO: 450234 - protein, 439 aa, unidentified
MTHRVPEMVLAIDFSLDRLDVSLRGDDRDWLWAHQAYPNNWPGWQQLKQDLLTELNQVGPVRLTAVGESTGPYWWHAFYQFSHDDDLQPFSPTAALLNPAHVKGYRKALSEQDKADPDDARLVDQYYRAVGVDHPYQFPDRYLRLRTFTRAYARVTHTLASEKAYLLSVLYLWASDYLRREEKPFSNLFGATSQYVLNEFTDIQAIAAIPLADLTALLAKRSGNAFADPQANADKLLRVAQHSYPVPAHLANALHQVIQHTLAHIRFLSDNQKAYRQLIEQELAALPEAKPALGFKGLGPILVAGCLSEIQDTSRFVTGDTFDRRLKLRRPRTYRDGQAAVAKLAGLWWPRHDSGRVQGLQPHLARERNPYLRYWLVQAAHTLQRYQPDYHQFYWKKYREAHSHHHKRAIVLTARKAVRLIFALLHKGRQACLEEGLLT

SEQ ID NO: 450235 - protein, 411 aa, unidentified
MSHEITWLFVYGSPRVIIFTSEVIFMVFVGIDVAKDKHDLYAVDSDGVVLCDNFTFANSAAGFASFLKQVSPWGKIKVGIEATGHYSSNLLSFLKAHDFEVVVFNPLSVSRLRSAASLRRTKADKNDSRYIARLLLTGEANPYQSQSYKISVLKSMTRARFRLFQEIQPLKNRFRRLLHVLFPELQGFFSNLYGNTSLNLLSVLPSAKDIAECNILKLTKILSEFSRGMLKRGRAEQLKSLAQNSIATYNYGDAFELKQTVRRIQFLSSQMSEIESEIDSVMAELNSPITSIPGIGNLLGATILSEIGDIKNFDNPDKLLAFAGCEPSTYQSGKYTATNTPMVKHGSRYLRRALYCAADMAYVNSPSFRSFIDRKRAQGKHYYVAMSHGMKKLVRIIFAVLSRNIAYSDPI

SEQ ID NO: 450236 - protein, 416 aa, unidentified
MSEYAALVAVDWADQQHAVCLLDPSTGEREQSIVKHTPAALQEWALSLRQRFAGQPIAVCLEQSRGPLIYALLQYDFFVLYPINPATLAKYRQAFSTARGKDDPTDADYLLDLLEHHRNRLRPWHPDDEKTRTLRLLVEQRRRLTGDRTRVSNRLTALLKGYFPQVLDWFEDIRTQLVCDFLERWPQLSLLQQARPATIDKFLRSHHSTSKPTNLRRLTEIKTALPLTTDAAVMTSSVINVKALVAQMKTVIAAISEYDRHLEALCQTHDDYHLFAALPGAGPVHAARLTAALGSDRSRWQSADELVTFAGIAPIIERSGKQFRIRWRYFCPKFFRQTFHEFAAQSIQDSFWARAYYSMQRAKGKDHHAAVRALAFKWIRVIWKCWHTRTPYNEVIYLESLRKKGSSLLKFAVDYQ

SEQ ID NO: 450237 - protein, 410 aa, unidentified
MTKEDFIYVGIDLHKETHTAVMIDCYNQKLGEITFPNRPADFPKLVTKVKKCNTDAKEVVYGLENAYGYGRPLAVWLIDKGYFVKDVNTAISHRQAKHRGAMYRKSDSDDAEAIALATLNMLDKLPDACPNDAYWSLGQLVHRRDNIMKQRTRLVNQLHEQLCIAYPSYKQFFNDISRPTALYFWEHYPSRKYLKGKSVEDLRTELVPVSHNRCSTKNCEKILDAVASDKVKNNAYQDARDMVTLSIVSDLQHYDSQLAEVDKMLEQMYKMLGCTLTTIPGVNVITAVKILAEIGDIKRFGNANKLAQFAGIAPLHLSSSGKGKDVATKQGNRRLQATIYFLAIQMVQVSSKGTPRNSVVRAYYEKRKAEGKTSQQALICISRRLISIIYGMLKHGTEYRMPVVESAGEK

SEQ ID NO: 450238 - protein, 351 aa, unidentified
MDIIGLDLHKRESQLCIGDEDGTITERRIVTSRERFTAVLGNRPRAKILLEASTESEWVARHLESLGHEVLVADPNYAPMYATRSRRTKTDRRDARTLMDACQTGAYRLAHRLSDPRRHVRAELAVRDALVRTRTRYVALAKTLVRRDGLRVASSESHLVAQRIGALSLSPALAAELQPLFTVLVPLNEQIVAADGRIATLAATDPLVARLATAPAIGPVTASAVVATVDDITRFRSAHQFEAYLGLVPGERSSGEKRRVGPITKAGNSRVRWLLVEAAWRLLRTKSAEAAALRAWAHGVAGRRGKKIAVVALARRLAGILYAMWRDGVPYDASRIRGPRIVAAEVTARAG

SEQ ID NO: 450239 - protein, 422 aa, unidentified
MNAGDGESFGVFVGIDWADTKHDVCLQARGTTERVWEQFRHRPADIEAWVHSLRTRFSGPFAIAVELSKGPIVYALQRHDDVVIFPINPSTLAKYREAFKPSRAKDDPTDAELALDLLLKHPERFQALNPQSVEMRTLASLVEQRRRLVDDKVRLTNRLRSTLKQYYPQALEWFDRIDTPLFCDFIERWPTLVQVKRARKSSLVNFFREHNMRFVHVLESRIVSIRAATPLTEDEAIITPNRLQVLTLVNLLRVTLSSIKRFDEEIAELAPQHPDFELFSSLPGAGPSLAPRLLVAFGEQRERYKSAAEVQKYSGIAPVTERSGKKSWVHWRWQCPTFLRQTFVEWAAQTINKSYWAGAYYRQQRAKGCTYQAALRSLAFKWIRIVYRCWQSRTPYDEAAYLKALERRGSRLLNQSKDMIST

SEQ ID NO: 450240 - protein, 381 aa, unidentified
MTTLATHNPQDTTTAGPLFVAFELSEKTWKLGFTTGHGQKPRERTVTARHQECVLAEIAQAKHRLGLLDTAPVVSCYEAGREGFWLHRFLQAQGITNQVVDASSIEVNRRRRRAKSDGLDVRKLLSMLMRYHHGERQVWQVVKVPSVEAEDHRHLHRDLETLKQERASTTTRIQGLLRSQGIRLTSLHQLPEQLEALRLWDGSPIPPGLRRRVLRVYAHHTFLSEQIAAVEAERRAQLQTSTEAQIDKVRQLMQLKGMGINGAWLLVMAFFGWRAFTNRREVGGLAGFTPTPYQSGDSARAQGITKAGNRHVRWMTTELAWSWLRLQPDSALSVWFRERFGKGGKRLRRIGIVAVARKLLIALWRFLETGVLPAGAVLKEG

SEQ ID NO: 450241 - protein, 337 aa, unidentified
MEQSTQYVGIDLHRRRSVIVRRNDAGETLETVRIDNDSRALAAELAKAGESPEVILEATYGWYWAADVLQAGGANVHLAHPLGNNWGNRRVKNDERDATDLVDLLRLGCLAEAWIAPPPLRELRELVRYRAKLVHLGTSLKAQVHSVLAKEGVAVPMTDLFGSKGQRLLDGLALGDAYRIRVASLRDLIEVVGREITMVEAEIAPVLAGDLGYQAIQAIPGVGPILAAVFVAEIGDVSRFKSARHLCSWAGLTPTHHESDEKVRRGHITKQGSRLVRRAAIEAVVRQHGWTAVSKHHRAVAERRGNKIGRVAAARKLLILVYYGLRDGEVRCLAEPG

SEQ ID NO: 450242 - protein, 346 aa, unidentified
MEHYAGIDVSLELSSVCIVDTQGKIVKEAKVASEPEALVDFFGSLHFAVKRIGLEAGPLSQWLHAGLRRAGFETVLLETRHVKAALSAMTVKTDRKDARGLAQLIRMGWFRPVHAKSMGSQEVRALLVARKQLLGRLIDVELSIRGILRGFGLKVGAVTRKGFEARIRELATGQATLERIAGAMLSARATLRAEYEKLHKAVLAIVREDAVCRRLMTVPGVGPLVAVTYKSAMDDPSRITKSKAAGALFGLTPKKYQSGEKDVTGGITRTGDEMVRTALYEAANVLLSRITRFSKLKRWGMDVAKRRGSKRAKVALARKIAVILHRMWVDGTTYRWTAAEQIAAQA

SEQ ID NO: 450243 - protein, 338 aa, unidentified
MGIHTVGIDIAKAVFHLVAVDEKGSVVVKKKFSRPQLLVYTANLKAELIGMEACSGAHFLTRALIAQGHNVKLMPAEYVRPYVKSNKSDFIDAEAIAEAVLRPNMRFVPLKTEEQLDLQALHRVRERWIGRRVALTNQLRGFLLERGLPIRVGSEYLRKALPSILEDAENGLTPRARTILSTLREEWTELETKIDTVTNEIGRISRSNEGCKRLMGVPGIGPIISTALVAAVGNATAFKKGRDMASWLGLAPRQHSSGGKTKLLGISKRGNYYIRKLMVEGARAAFARLNRSQHSFGPWMDNLQSGKHSNVAVVALANKMARIAWAVLTTGQQYRAAT

SEQ ID NO: 450244 - protein, 378 aa, unidentified
MQSHIQEERVMANLSNWIGIDDHADKWTIAHYEGQKNAPTREWELQPGDSGYRKLAGWLKELKGPVRVVYEAGPCGYELYRRLRKSGIECAVAAPSLTPRKPGDRVKTNRRDAQKLARLLRAGELTLITVPDARQEAVRDLIRAREAANKDLLRARHQLSKLLLRYGYRYQQGRAWTKRYWEWVNQIELSEEWSRAVVRQQIVVIEQRLEVVAEYDRHIEKIAESAEYAPIVAALGVLRGIDRLTAMTIAAELGDLRRFATAPQMMAALGLVPSEYSTGDKTMRMAITKTGNAHVRRVLVEAAWHYQRFANRTGPTVRRRREGQPRERVAIAERCDARLHRRFIRLTSRGKRSTVAAVAVARELAGFIWAIGQDIHQR

SEQ ID NO: 450245 - protein, 469 aa, unidentified
MARRVSTAAKMAHQRQAFQRRKARGQARASAQRAAEARRVEVLPITHPHAAGIDIGSRSHWVCVGFDQEHAIAEFPAYTDGLRQILAYLREHGVTTVALESTGIYWIPLYELLEANGFTVLLVDPRYTKQLKGRPKTDRLDCQWIYRLHSVGLLAAAFRPDDRTCQLRSYLRQRANLIRYGGQHIQHMEKALEQMNLKLTEILSDITGVTGRTIIQAILRGVRDPHKLAQLRDRRCKANEAAIAQALDGSYRAEHLFALRQAYEAWQFYQKQIGKVEEQIEQQLERMKQDRALPPLKPASRPRRRTPNQPRFDVRRALYYVVGFDLTEIEGIAELTALTVISEIGPEVSRFATMKQFCSWLGLCPQFNKTGGRVKSSRTDRAQAGPHRLLGVKTRAGVRPPKSRGIRGEAASSAGQELEAQSTPTRSRGDRDAAIPVNGYGQRLGAELTGAPASNNHTSGSEAQESPAR

SEQ ID NO: 450246 - protein, 356 aa, unidentified
MQTQVTKKIDFTGKDIFIGLDVHKKSWSVTIIVDGMEHRTFTQPPDPGALNNYLQRMFPGGIYNSAYEAGFCGYGIHRELNSLGIRNIVINAADIPTSQKDKLQKRDPVDSRKIARSLEKGSLHGIHIFDRELEELRSLNRTRFYLMRDLRRSKTRIKSFLQYYGETIPVEYDNNQWTLKFVSWLKQVKMQTKSGQDAFSNLISSYGYHRSQLLILSRQIRERIREYDRELYTLLKSISGIGPLTASALITELGDINRFKNIDQLGSYIGLIPRIRESGEITYTGGITFRCNSFLRTLLIESSWQAIRMDPALMQYYHLHLVNNKGHKVVIKVARKLLNRIRYVMKNRQPYKTGVA

SEQ ID NO: 450247 - protein, 342 aa, unidentified
MEHYAGIDVSLERSSVCVVDATGRIIREAKVPSEPEALVAFFGQLGLRPTRIGLEAGPLSQWLHAGLAQVGFEVVLLETRHVKAALSAMVVKTDRKDARGIAQLLRMGWYRPVHRKSPQAQEIRALLVGRKLLQAKLRDVELSIRGILRGFGLKVGEVSKGRFAARVRELVAGHEMLEAVIAAMLQARDGLQTEFMRLHRRMLAIVRGDAICRRLMTVPGVGALVAVTFKTAVDDPGRFRTAKAVGAHFGLTPKRYQSGETDVTGGISKVGDAMVRTALYEAANVMLTRTTRVSTLKRWALEVTRRRGMKRAKVALARKLAGVLHRMWANATDFRWGKEVIA

SEQ ID NO: 450248 - protein, 355 aa, unidentified
MASSKYIGMDVHKESISIAVRNAAGKIVMESVIETKASMIVQFIDGLRGEVHVTFEEGTWSAWLYDLLKPHVSKLVVCDPRRNALLQEGNQNDRVDARKLAELLQNNQLRPVYHGDHGLRTQKELVRSYLTITKDLSRVMTRVKAIYRSWGIACSGTQVYTARHRAEWLEKIREPGVRRRAEIYYLELDGLRFLRQEVRKDLLAESKKHQAWKRLHQIPSIGPIRAAVLLGIIQTPHRFRTKRQLWTYSGFGVEGHSSADHQVVKGQLQRKKKPIEIRGLNKNCNHHLKNLFKSAAVNASTKPGPFQEFYAALIAKGMRPEMARLTLARKIATIVLIVWKRGVCFDANHLKPQTA

SEQ ID NO: 450249 - protein, 421 aa, unidentified
MEETSDLSELVERVAALDLGKATLTACVRVPHADKPGRRCQEVREYRTTTRALLTLAADLRGHGVTLVAMEATSDYWKPVFYLLEAEGFTCWLLNARHVKNVPGRPKTDKLDAIWLAKVVERGMCSPSLVQPRDIRRLRDLTRYRRTLIRQRTAEKQRVEKLLEDAQIKLSAVVSDIFGMSGRAMLEAMIGGERNPRALAQLAIGRMRAKLVVLEEALTGHFDDHHAFICRMMLDRIDDITRQAAELTARIEEQIAPFADAAARLDEIPGVGRTGAQELIAEIGVDMTRFPDAAHLVSWAKFAPIDKNSAGKKKTASTGKGNPWLGATIGEIVSAAARTDTFLAERYQRIARRRGKRRAIVAVGNSVLTIIWHLLADPEASYRDLGPGYYESRISAQRRQRNLIRQLERLTGQKVALQPAA

SEQ ID NO: 450250 - protein, 376 aa, unidentified
MKNSTPTTQFNSFIGVDLHKCVVTLAAVDPNGETISIFETPTKCINKIHDWIDALPKPTHMAVEAVGFIEWFIDEFRNAVDKIDIADATELANLRGKRRKNDKNDARDVAKRLARGECPLGWIADEPTAQLRKLARHWRQLSHSIATTKRYLRSILLAANIRGPKVLNAPAAQRWLLGHGNLLKDVQRKCFSNFIDTIALIERQRAVLKREIIQANRAEPFLALTDLIKTVPGINDIWACVIAAEIGSFKRFPNADTIEFWAGLTPDNKTSAGRTQSGHITKAGSATLRWALCKAACVMCRSDGFQEATRQRLIGKTGAKAKANVAMGRRLLRILYAMVRDGMPYQNSQPTHHQDAANRARLKQINNKKRKRQASK

SEQ ID NO: 450251 - protein, 411 aa, unidentified
MHNRQNYLYVGVDLHKEHRTAVIINCWQEKLGEIQFDNKPSAFSKFLLEVETYVSAGITVVFGLEDVGGYGRALAKYLVDHEQVVKEGNPALSFLERKSHVTTQKSDSWDAECVARILINKLNQLPDAKPNDLFWSIQQLVSTRNALVKAQSALKNQLHIQLNHHYPSYKKFFSELDGKTALAFWQQYPSPFCLEGANIKQLTAFLLDVSNNTCSVKKASDILKLVKEDGQTMKEYQETRDFLVRSIVRDIEFKKKEMKYIERELKRLVNLLDYQLETMPGIELVTASALIAEIGDVRRFPNANKLARFAGIAPVYFGSGGKGKTHKSKQGNRALHALFYNLAVQQVQVAKGSKLPRNPVFHAYYQKKLKEGKTKGQALVCIMRRLVNIVYGMMKYKTAYELPVVEEKEVV

SEQ ID NO: 450252 - protein, 430 aa, unidentified
MGLIVPNAMHPEHDEQPMPYEWFVGIDWGSQQHQVCMLDRDRRRVGERVVDHDGASLARLADWLLTVAAGQPQRVAVAIEVPRGAIVEGLLERGFHVFAINPKQLDRFRDRHSAAGAKDDRRDAFVLADSVRTDQPSFRRLQLDDPQLLRLRELSRAEETLLEDFRRSANRLRDQLHRFYPQMLELCSAADEPWLWDLIDLAPTPAHAVLLSGEQVQQVLKAYRIRRVEAHEVLTCLQAPALPVAPGAAEAAQAHCELLLPCLRVLAAQLQACHQQVSALLHTLAEAPGEGGRASDVAIVLSLPGVGRKITAWLFAEAAQPLAERDYQVLRTHGGVAPVTKQSGKRRQVMMRRGCNARLRHALYHMARVAMQRDAHFSSVYAALRAKGQRHGQALRTLGDRLLRILMAMLRNGTCYDASRIRREPVVQRG

SEQ ID NO: 450253 - protein, 431 aa, unidentified
MNYNQNKKIAQITSQTLIIGVDIAKFKHVARAQDFRGIEFGSPCQFENTKEGIEQFLKWISEIKKEKRMEKVMVGMEPTGHYWFNLAHILKENGIKFVAVNPLHVKKSKELDDNSPTKNDVKDAKVIAQLVKDGRYAEPTIPQGVYAELRVAKKIRDLLIEDLQTVQGQVHNWIDRYFPEFLKVFKKWEGKAALQFLKLYALPHEIAEFTEQELLVHLRKSVSRSVGLNKIRELKQAATKSIGLRQGAKMARLELKTILAKYELIQLQFEELDSKIDGLLDEIPGVPQMLAIKGVGRDTIAGFFAEIGDLGEYNHPRQIIKLGGLNLKENTSGKHKGKTTITKRGRKKLRALLFRVCMILVAKNSAFKALHVYYTQRPDNPLKKMQSLIALCNKLIRILFKIGKKQFEFNEDKMLKDIPHLALAAKTEMAA

SEQ ID NO: 450254 - protein, 479 aa, unidentified
MKKIGFLAADVSKGYADFTLWDHEGKCLEPAFKLMDNKEGHLQIRQLVKDFMKRYSINELYAGMESTGGYENNWFLLFKSMSNQGVSRVMRINPKAVKAMGTARMVRTVTDAVSADNIAQYMLSFANASKVVYNQDNGFKTVRHVGAWIRNINKQITQTSNHLEKLVYQTFPELLVYCRHGFPVWLLNLLQKYPLPSEVIRAGKSRLAKLDFITEEKAAAIISKAKNTVAMQEADELLSATIKGMVTLLNCNRQQIVLQKKTLVNQFKEAHEVQLLDSIPGIAEETAILLMMDIEGIDNYSSAKQLCAQFGMHPTFKQSGDGTWAARLSKMGRSSVRGLLYMPALAAIRSNDYFKNLYAQQRAKGKKHRQAICVVMHKMLCIIFGVLKSKTPFSIETHSKNQQHGEQKQKEAEIKQQQHNKEKKTKRERYLSVDQLEAPISRKQSKRIKKELPVPIDKNQDVRDPEALNKGKQIPCLLS

SEQ ID NO: 450255 - protein, 349 aa, unidentified
MGEVSTIGVDIAKSVFQIHGVDADGMVVIRRRVGRAKVLEFFAGLPPCLVGMEACATAHQWARELKKFGHDTRLMPPTYVKAYVKRGKNDAADAAAICEAVTRPSMRFVPIKSVEQQSALMLHRTRDLLIRQRTQLINALRAHLAELGLVAAKGHEGLHQLVTAVAESGDERLPSNARFACQSIVAQLHAVQTQINGVDTRITQAHRANADSKRLDAIPGFGVILSTAVVATMTDPKAFKTGREFAAWIGLVPRQNSTGGKERLGSISKQGDRYLRRLLVLGAISIVGTARTRPDKYPWVTELLGRRPAKVVAVALANKMARTAWAVLARGETYRAPTRSSSAAIAAAA

SEQ ID NO: 450256 - protein, 403 aa, unidentified
MYSSFVGIDIGKWNHQAAFLELSGKETARSLAFQNTSEGFQSLSESLAPFDKGQTVIGLEATGHYWLALISFLVDNGWTVKVINPMQSDALRNMNIRKAKTDRKDCVVIADVLRFGRYTETVLPDEDLLQLRELSRCRVAHVELLGDLKRRVLGILDRIFPEFASCFSTVFGAAPTELLQECSDPEELADYDVDKLIKLLEKESRGRHSREKAEELKDKASRSVGTRFGRDALKFELKMLLEQLDFIKGQVKEFDKFLKNLMKNHELIYTIPGISVTLGSAILGEIGDVKRFGTPQQLQAFAGMDPSVTQSGNFQGTQGKMSKRGSPYLRRAVYLAANAARRFDPVFKEFYDRMIARGKHPKQALAAVGTKLLRVIHAVMTSQKPYNPQKLLPPAARISQVTP

SEQ ID NO: 450257 - protein, 370 aa, unidentified
MSVRRILAKTINTDLEYEAIGIDLAKNCVSVALLTTDGEVVCIDRLDYSELEKSAQVLCPTTFAMEPCTEMNYLVQKLEAWGHRCLVIGGKNVQNYVENHYSGQKTDLNDAQALAFLAQDTQLRTIKAKDVEQQKYASLTTLREQYIKQYRQTIVSLKGICQAWGLNISKGISGKARLKDLIENHAAFPEELKESLVDMVTHAQTAQKALNKITKTLELLAKNDKVCQLIQTIPGLGPICSCRLRATIGDIRRFKNPKDFPAYYGLVPRSIATGHNEKKGRITHRGDKTMRSLMVQAAGSLVNMATKGKLKSKQLTKWILKKQKEKMPWGKLVCAVAAKLLRIVRAVLISNKPYNSKIAGVAKCSLPKGS

SEQ ID NO: 450258 - protein, 419 aa, unidentified
MARLQDNTIVSVVHPICCGLDVHKESISACLLVTGADGRESSELKQFGTFTADLRRLLDWLLEHDCPVAALESTGIYWRPVFNVLEGQVKVVLVNARHIKNVPGRKTDLADCQWLAGLLRHGLLRGSFIPPAEVRDWRDWTRLRRSHLQTLGDYKRRSHKLLESANIKLDSVVSDLFGQTGRSLLQLLATGPGPITRGDIERCAQGKLKGKKEALFQAIQGFFREHHRALLNSLLRTIELLETEIGLIEQRLQELLQGHQPVVARLQELPGVGQVSASAILAEIGPTLEDFPRSAALTSWAGLCPGNHESAGKRKNARHPVRVHFLKTILIEVAWAAVKKKGSYYKDKFHRLKARRGPKKAIVAIAHRLLKAIYHIIKEGRHFKDLGEDYLTLRNQAAKLNYLKKQAQVLGFHLVPMET

SEQ ID NO: 450259 - protein, 341 aa, unidentified
MKEVTTIGLDIAKSVFQAHGADADGRQLFSRRITRGKLLEFFAEQPRCLVAMEACGGAHHWARALMDMGHQVRLIPPAYVKPFVKRQKNDMADAEAICEAAQRPTMRFVTPKSAEAQGAAVVFRTRDLLVRQRTQLINALRGHLAEFGFIVRQGPGHVSKLIDLVGDPSSELPAEARPVLALIADSLKAIQARIAVLDREIAARAKADPVVRRLMTVPGVGPVVATALVALAPDARTFRRGRDFAAWLGLTPRQHSSGGKERLGRTTKMGERSLRRLLILGASSAAKNAGRDGSRASPWLVGMLARKPRMLVTVALANKMARIVWALMAHGGTYRAPVAAV

SEQ ID NO: 450260 - protein, 430 aa, unidentified
MKSNTQNAKIEAITEKTLVLGIDVGSETHYARAFDYRGIEYSKKPFKFSNTEAGFVTFKEWILDLKERHEKDKVVPGMEPTGHYWFNLGKFLQDNEMKPVLVNPHHVKKSKELDDNNPTKNDRKDPKVIAGLVREGRYMIPYLPEGVYADLRTASNMRFQIQSELTRIQNRISRWVNIYFPEYKTVYGRPDAVSGMMILKQAHLPEDILTLGVEGVNQIWRDAKMRAVGKKRAQILIEAARHSIGAKEGSMAARMEIRMLLEDYESRNNHLQEVMTLIEELVKQIPMAEKLMDIKGVGIKTVSGFLAEVGDVSRFSNPKELQKLTGLALVENSSAKHEGQTTISRRGRKRLRYLLFEVAMSLVAKNPEFRELHNYYTTRRLNPLKKMQSLMAISAKLIRVFYAMLTKGVDYDPKKMVSDIKRPAVYLQVA

SEQ ID NO: 450261 - protein, 459 aa, unidentified
MLVNSVIGIDPDAKGFICCLVKNRESKVFKKAYSVNKSGLDTFIKWVKDEKDVIVAIEGTNGQSYPIEKTLKAKNIDFYSLKPAEVDHFRKAVMGQNKNNKNDAEATARYALALENQGKLDKHKRLWEPDIELRMLTRGHTEKTKEITREKSRLWKYLKLASADLYLTLSGNNPDSEVSDNLLTNKGILTLLAQKSDIYSWKSSSKDDIRKAMGDHNYQGYSKLIDEIIKISRNFTPVPSGVILTIKHSASTILLFQQQKKDIIKSLKQLTSDNKEITSLCKHKGIATLTAAKITAEIIDIRRFSNNNKLASYAGLGRKEHSTGENKNMVPSYLFNHRLKNAFMTAAKNFVIFNPDSHLSGYYRNLIKHRGMSFTEAIKRVARALVRIFFRELSVLIEVEKETGESNMASGSDRSDKFHISNIKLSPDYNHNTENIEIINMRNKEKKKLLNISSWKEIL

SEQ ID NO: 450262 - protein, 339 aa, unidentified
MCNQVLGPDPIKMMEVGMNCKGLRVIGVDVGKGMLDVAREGVRAGERCSNDVVEIARFVRGLDPQRDIVVFERSGGYERLLEGQLAEANVRWAVVHSKRVKAFRIVKGIKAKTDAIDCRLLRDFGRDQLDSGELRLGRLGDVTMAALAARRRQLNEMLHAERCRQETAAIELVRSSIGCTIATLEAELTATEAAIAAHIHTDPELYLKEEVMCRHIGVAETTARGLLAVLPQLGRASAREIAALAGAAPRVHQSGTTQKRRGLEPGRAVVKVILFYPAQTAMRFDPEIKAFAQRLRNRGKPGKVIMVAVMRKMLVQLNAAVRDALMSRLALAPAGSPAD

SEQ ID NO: 450263 - protein, 360 aa, unidentified
MFSERTSVGLDVHARSVAAAAIDSVTGELFQTRLTPAHDHVREWVLSLPGPVAVAYEAGPTGFGLYRSLIESGIRCEVVAPSKLQRPAGDRVKTDAKDAVHLARLLRIDEITPVSVPTLEQEAARDLVRAREDVRRDLMGARHRLSKLLLRHGIVYSGGKAWTGKHDAWLRTQRFAMPSTQMTFDSGYDTVLTTSARRNRLDQAIKAIATDSDFTPVVRRLACLRGISMLTAFALAVEIGGWHRFTGNTIGSFVGLVPSEHSSGASRVQGPITKTGNQHLRRLLIEAAWHHRPRYAPGAVMRARWDLAPAAARARGDLGNRRLHGRWVGFDARSKRSVIANTAIARELAGWCWSLAILED

SEQ ID NO: 450264 - protein, 348 aa, unidentified
MRTYNTPHAYYCGVDLHARTLFVHVLDHTGTTRLEQELPASPAPLLDALGPYREGLVVGCECMFAWYWLADLCERESIPFVLGHALAMKAIHGGKAKNDRLDAQKIAGLLKGGFFPLAHVYPKDKRETRDLLRRRSFFVRQRAQLLAHIQNTNSQYNLPPFPKKLTYKGNRSADIAERFEHPSTRLSITADLELIESYDVRIAALEAHLVKSARVDDPATFAFLRTVPGIGPILGLVMLYEIDSIRRFAAVGNFLSYARLVACTHESAGKVKGVGGRKIGNAHLKWAFSEAASLMLRSFPAAKSWMQRQSKKRGAKKAHAILEAKIGRTVYHLWNKQVAFDGRKFLAS

SEQ ID NO: 450265 - protein, 419 aa, unidentified
MGFKIFRKNCCGLDVHKTWIYACIGITDTNGRTEYKQARFSSFSKGLRELADWLAKYSCTEACMESSGKYWIPVFNILEKSCWVTLAHPKYTKPQKGNKTDKKDAKWICDLFMCDMIKPSFIPPPDIHQLRDLMRYRQKLTNMLTGEKNRASNCLTVSNLKLDDVFSDVFGKSSRSIISYILEHPGETFDVAPFVDARCKHPIEEIQAAVDGAVSREQAAKLKECLQHIDEISAHKKSIESEILRLAESYPHQLELMRTAPGFASDHLTAIAILSEIGAEMSVFPTAKHQVSWAGCCPRNDQSGGKVKSTRISRAGVYLKPLLVQVANAVIKSDKYPECKERYRRIKARRGHKKAIIAVCRMLLTAIWNILSKLEPYSARGYLDDKLTEHSVVISKSQGLELLRKRGYIFKDEASPVST

SEQ ID NO: 450266 - protein, 486 aa, unidentified
MRAIGLDVHLEFCEVAIAEGGRVRSAGQITTKPEQLQLFAASLGPQDRVALEVTGNAWQIARILEAHVEQVIVVSPSDTGIRQARAKTDRLDARAVAKLLAAGELDWVWVPDHQTWVMRRRLARRSQLVSARTRAKNEIHAVLMRQLIGRPPMSDLFGVKGRRWLADLMLPDEARETVDGAMRQIRFLDGEIAAVDRLIAKAALQSPQIRRLMTVPGVNVICAATFLAAVGDIGRFDSARKLVGYLGLDPRVRQSGSGPATHGHISKQGSVHARHALVEASWSTVRQPGPIHAFYQRVRGRRGHQIAIVAAARKLACLFWVLLTREEDYAFGQPSLTKKKPRRLELTAGAGSKRATKSGLWTTNVAMRQAERELAHQAESAYQHTVREWQTANAVKAGASVTPGRASSGPSKGQVTRQTTSLTSALRYVLAHAHAHAHQQRCHQRPRSTTALDFHPSSGAADLTKRFLGSPWVFGGEFMRSARAGG

SEQ ID NO: 450267 - protein, 361 aa, unidentified
MYYVGIDLAKFKHSAAVVGDDGKRLVRGFDFPNRRDGFEALLRRLESVGATGAEARVCLEATGHYGRNLVAFLEGHGYEVFEVNPLLTANWRRATSVRKVKNDAVDAEALALWLLAGNPTARRRAKDESDDLRTLARSRTSLSHIIGDCKRRAAAILDVTFPELRGFFSDDFCAAATAILGRWQSAEALSHARLDSIRKEVREAGGRLPDARAAELRELARASVGTASAPLAFQLRQLLAQIAFTRGQMAELDAELARMVEGSPVLTIPGVGTVLGAGILGEVGDASRFASAKKLLAFAGCDPRSSSPASSWAPGPTCPSAARPTSGGTCGWQPTWPGGTTPRSARTTPRSAPRASATRWR

SEQ ID NO: 450268 - protein, 407 aa, unidentified
MEVIYPQCAGLDVHKQTVVACARIVGKGSPLQQVRTFDTTTSGSLALADSPESCGVQHVAMEATGVYWKPVWHVLEGHFELVLANAAHVKNVPGRKTDVNDAMWLADLLAHGLIRASFVPPAAVQELRALTRTRKQFVRERSAHVLRIDKVLEDANLKLSVVLTDLMGKSGRAVLQAIVDGHDDPEYLAGCVSMRVKASRAAVLEALRGHLNAHHRFMLKLHLTQIDALDQAIAAIEKEVGRGLEPFRDAARLLSTMPGLSDVSAHVVVAEIGIDMSRFATPGHLLSWACMCPRNDESAGKRRSTRLRRGGQWLKTTLVQAAWAAIKVKGGYLQAQFHRLRARRGAKKAIIAVAASMLTAAWHMLRNGTEWHDLGAAHFDRADAAKTANRLIRRLQQIGYTVHAVPT

SEQ ID NO: 450269 - protein, 354 aa, unidentified
MSQKLDTSPAVIGIDIGKNSFHIVGQNHRGAIVLRQKWSRGQVETRLANLPPCLIGMEACVGAHHLSRKLQMFGHDARLMPAKYVRPYSKGQKNDFRDAEAIAEAVQRPTMKFVATKTADQLDLQALHRVRERLVGQRTGVINQIRAFMLERGIAVRQGLRSLRSELPGILATRTDVLSPRMLRIIEDLAGDWRRLDERIEGLSNEVETLARQDKACERLMTVPGIGPIISSAMVAAIGTGDVFSKGRDFGAWLGLVPKQISTGDRTILGKISRRGNRYLRVLFVQAAWVVLVKVKCWERYGLKSWIEAAKKRLHHNVLAIALANKLARIAWAVLNKGRAFECVKTEETASRPA

SEQ ID NO: 450270 - protein, 381 aa, unidentified
MSNKVIFNLDELFISVGIDVGADFSWMSIALPNQQFVGKPYKILHNSIDSLTTAVSKIKEAEELYSLESRIFLESTGIYHYPLFCYLRDKGFNCSVINPIITKNSTNINIRKVHNDRFDSKKAALVGLKPDLKVSLMPSDLALNCRNLCREYYDLMDNRSAYVNKLQGELRMAFPQYLGIFSKVTINTSLTLLETYTSPSAFLEADKQEIIDIIKSTARFGLTYAQNKYNAIIQAATDANQFGYIIDSNIKRIRLYISFIRKYDEEINSILESLHELVDANEDTDFVKQIHLIKTFKGAGFLSAVSIMGEIGDFSAFSKPKQLFAYFGLDPAVKQSGKFEGTKVQMSKRGSAIARRVIHTLTLQSISISRNGEAKNPVLRE

SEQ ID NO: 450271 - protein, 412 aa, unidentified
METAFRLFAGIDWASEEHRISILDANRNELENKAYKHSGTGLSQLADRLTTLSGSDVSTVAVGIETPHGAVVETLVERGFAVFSLNPKQMDRFRDRHSVSGAKDDKRDAYVIAEALATDRKKFHRVQLSGPQIIRLRQLCRSDEDVKQNQVQIGNQLRDLLNRYFPQMLALCPAVDEPWFWDLLEKAPLPEQAARLSASKIQRILSAHRIHRIDGKQVGETLQVPALHLAPGGADAASEHMLLLLPQLRLYHQLRKQIESRIDSVLDEMGSNEQIAGHRDVNLLRSLPGVGRCVAATVLAEASQALAERDYHALRSYAGVAPITRRSGKRKSIIMRHACNERLRNAFYHWSRVSTQHDSRSKLHYANLRAKGHTHGRALRGIADRLLSVLIAMLRTGTAYDPARRGQAVTAA

SEQ ID NO: 450272 - protein, 351 aa, unidentified
MREYISFDSHKHYTWMEREEAESGRQVHGRVEHTRGAIKACLAPCEPGTAVAVEATGNWYWIVEEIEQAGMRPLLVHPRKAKLMMGMINKTDQLDAHGLNRLQRNGTLPTVWIPPGELRDLRELTRTRLVLTRQRTRLKNRMGATLSKYGVPASEASDAYAPGARAELQQRIALLPAQAQWVTRQLLLQLDFVRGQIDQLEERLEQLVRITPAMQLLKSLPGIGIILAATIALEIGEIGRFPSALHFASYAGTTPRVHASGGKVRYGRLRSDVNQYLKWAFVEAGNSVAVHHPRYAERHVSQLYQRLRQRKGHSKAMGAVARHLAEAAFHVLSRQQPYRDPALKAGYTTEV

SEQ ID NO: 450273 - protein, 376 aa, unidentified
MRRVIGIDVHRTFGEVVFWENGRLRHAGRIDMTRTALEGFGKTLLASDEVVVEATANSMAVSRVLAPFAARVIIANPLQVKAIAQAHVKTDKIDAGTLASLHAAGYLPQIWTPDAETERKRRLVARRYQVVRHRTRLKNEVHSILHTHLIPKCPHADLFNVRGRAWLAAQALLNDERAAIDRHVRELDRLAEDLALLDREIAQDAIDDPAVNRLMTITGVNLAVAAGIVAAIGDISRFNSPQKLVSYFGLNPRVRQSGLGPAHHGRISKIGRSHARAMLVEAAWTAAKTPGPLHAFFVRIRARRGHQIAAVAVARKLTVLCWHLLTKGEDYQWARPALVANKTRAMQLQAGHPQQKGSRRGPAYAYNIKALRNREM

SEQ ID NO: 450274 - protein, 313 aa, unidentified
MNQIKTYLGIDISKERLDVAALAGEGIKEWSLPNGAAGYVRLIAEVAAWPEAMVVCEASGGYERSLIAALQKADVPVALLNARQVRDYARACGLLAKTDRIDARVIARYGAHFEPEPLTRQSAGQSRLRELVQRHRQLTLARVSEANQAAHLQCADLRRLSRAYVRLLERQLATIDALMEKELLLRHSGAVSALTAVCGIGKQSAALLLAELPELGKVSKGRIAALAGVAPFNHDSGPWRGHRHIRGGRGQVRRGLWMATLVAVRHHPDLRSFYQRLRTNGKPPKVALIAAMRKLLIILNAILRPLYLTPSHA

SEQ ID NO: 450275 - protein, 391 aa, unidentified
MAMYFVGIDISKYKHDCCIISAVDQKIVSKLTVKNDKAGFEQLLTVFNSLSNPDNIKIGFESTAHYALNLELFLENAHHSFMEINPLLIKEYKKSTSLRRTKADSVDCESIARWLMTVEYKPHSKGFYHSYSLKSLTRLRDRLIRQRSFYLVKITNVLDHTFPEFKPFFHERLSKTALYLLENYGSAEKMVKMNSAAYEKLRSLSRGKFSPQQFIRLKELAANTVGVNNSIFDVELNSLLALYKSLIKEIDTLEKEINRLIEEVHPHYMSVPGIGPISAAVIYSEYGDISNFSTPAQMLAFAGIEPGINDSGTESHGGRMVKHGSSQLRYVLINCCLPLIRFDMTFAAYYAKKRGEGKPHRVAVTHVAKKLVRVIYALERQGVDFNALKLR

SEQ ID NO: 450276 - protein, 419 aa, unidentified
MKRPAGVEVLFARVGGLDVHKKLILACRRLVQADGRITREVRRFGTMTADLSKLREWLLEAGVTHVAMESTGVLWRPVFNMLEGHLEVWLINAQHIKRVPGRKTDVRDAEWIAQLLQCGLVRPSFVPARAQRELRDLTRHRTKLVQQRTAVANRLQDVLEDANLKLGVVASDVLGASGRAMLEAIIAGDDDPQRLAELAQRQLRAKIPQLQQALHGRVTAHHRFMLRELLEQYDALEQAIARVSARLEEVLPRPFHEAAEQLDAIPGVARRAALAIASELGTDMRRFPTHKHLASWAGRCPGNHESAGKHQSGKTRPGNRWLDGVLTEVAHAAVRTQGTYFQAQYHHLAPRRGKKRAIGAVKHSLLTTIYFMLRDGRPYQDLGAEHFNRLNPAQRIRYHLRKLRELGQNVQIAPLENAA

SEQ ID NO: 450277 - protein, 353 aa, unidentified
MVKRLLKQVVGIDVAQKELVVSLGNMDEDATTAIYAYKVFANNEKGFMALILWVKKQTIETAPLRYVMEATGVYHESLAYCLCNKTYSVSIVMPNKITNFFRTLEIKTITDKSMSEAIAMFGLEKRLDDWIPPKKVFRELRQITRERDQLVAERTMQKNQLHSEQVEAYPSEQTIRRIKDRIKMVNGQLKEIMAEIVVTIKSGTELSQTIKLITTVPGIGVLTAAIILAETNGFELIRSQKQLASYAGFDVKEKESGTSIKGKPRISKKGNKHLRKAMHMPALSAIRHAERYKTIFARIVARSGIKMKATVAVQRKLLEMVYTIYKTQKPFDIDYFGNQAKKKQEIEMVEVCL

SEQ ID NO: 450278 - protein, 418 aa, unidentified
MARIGVGVDWGAQEHEVCAIDEQYRVLKRWRVRHDGESLLRLCNELAALVGNDHEALIAIERPDGAVVETLMERGFTVHAINPLQLDRFRERYRPSGAKDDCVDAWVLARTVLSDTDCFRRVEVGDARYVALREWSRIRDNWVNERTRLLNRTTDVLRRYFPQILDVGNVNDAWVHTLLRRAPTPAEAQRLQTRTVAKILSDHNVRRVSAEKVVSALRTMSLTISPALVEVLAAHLLQLVTEIESNRAQLAQCDQAISTILDSLEQAQPSESGPTDAAILRSLPGVGDVVLATLLGEASTAIVARDLSRMRAITGCAPVSVLSGKRQNRFHKRSAPVVQMRYSRSERLSHAMYHCARSASVFSEAHKQRYAAMRARGHTHGRACRQLADQMLTTAFAMLRNGTAYDSKKMGSKPLVKS

SEQ ID NO: 450279 - protein, 387 aa, unidentified
MPQPNDLSRSLVALDQNSTIIAVVELSHSSWLVAGMLPGIERQPRKKLEPNPERLLALLHRWRDEAVRAGRTITRIALAFEAGRDGFWLARWLAARGVEAHVIHASSLAVSREHRRAKTDRLDTELLKRGFLGWLRGERGHCSMARVPTIAEEDAKRPNRERDGLVGERTRIVNRIKSTLARLGIRNFKPTLRKAAERLATVHTPEGMPLAPNTLAELQRDMARLSLVVSQIRQIEEARQNRLEQQPETGSHAMVRLLARIVGIGVETADMLVHEVLSRPMRDRRAVARYAGLTGSPDESGAQRREQGLARAGNARVRRGMIQLAWRFLMFQKQSALALWYHARTVDSRSGTRKTMIVALARKLIIALWRFVTTGEPLEGVVLRPAS

SEQ ID NO: 450280 - protein, 483 aa, unidentified
MKRKSIFRNNSQKLDAAFIEAGLPEKVLLVPLDFAKLTHYACFCDGRGQYIRNAFTVKNNRIGIDYLIEQIEKTRKARSIRSKRHVIIGGEDSASYTCNFMDQLFEEGYLTVRLNAKEVHKQAESLDSSTDKTALRAIAKTMLNRDAHQTSGSDLYKELRGLTRQRRRIVHLSTAVKNRIHTHVDRLFPGFLSKDSAVAPFSKASLQLMEKAFSAAAISRKSERVLTRLLSGQGVREPALAAQRLKEQADGAICADDSNTRLSSQLIGGELSLYQSLQSTLVDLDKECARILAQLPEAFVLSMKGIGITLCAGMFAETGSLAQIQHCDQINGYAGIVPKVKQTGGPESAARVGGKRRSFNRVLKDYTLQVGNHLYLHGPVDLMEDAARRKLQGKAVDTAMARRFLRIARALTKGHCIYLPLSLRTDQNEADSQERAQYILQTWPDLLIKWKRLGLQHEAFAPETPLGQWREIVQEIYDIKLPL

SEQ ID NO: 450281 - protein, 422 aa, unidentified
MFKIIKFNCCGLDVHKTWIYACIGITDAAFRTEYFEDRFSSFPKDLRRLAAWLQEHKCEEVCMESSGKYWIPVFNALEQTCKVTLAHPKYTKPQKGNKTDRKDARWICDLFMCGMIKPSFIPPPAIRHLRELIRYRVKLTNMLTGEKNRAHNCLTVSSLKLDDVFSDIFGKSARSITEYILAHPGEHFDVTPFIDKRCKTPVDVIQNAVDGAISPEQAVKLRECLNHIDELSAHRDNIEKEILELVKPFSAQLALIRTVPGLDKDPMTAITILSEIGSDMSVFPTAKNLVSWAGCCPRNDMSAKHVKSTRIAAAGSFLKPILVQVANALIKSTKHPEFTERYRRIKSHRGHKKAMIALCKMFLTAIWNILSTGEVYNPSGYILQSPRPVNVKKVLTQKQALELLRLRGFTIVDDSSPQAAPA

SEQ ID NO: 450282 - protein, 457 aa, unidentified
MMETKRRREQRSMLPVHPDAAAIDIGATVHVAAVGPARDPEPVRSFGTFTGDLHRLADWFAQCGIKTVVMESTGVYWIPIYEILEQRGFEVWVVNARDAKHVPGRKTDVSDAAWLQRLHEFGLLRGSFRPQGAIAALRAYLRQRERLLDYAAAHIQHMQKALTQMNLQIHHVISDITGATGMRIIRAIVAGERDPDTLASYRDIRCHSSAETVRQALIGNYREEHLFALAQAVELYEVYQAKVATCDEKIEGVLERLKQPGRAPAKPLRAARHKTRQPNAPAFDARGALYAVLGVDLTQIHGLGPYLALKLISECGTDLSAWPSAKHFTSWLSLAPGNKISGGKILSSRTRPSGNRAAALLRLAATTVGRTETALGAFYRRLSARIGKAKAVTATARKIAVLFYNAVRHGMDYADPGASYYEERYRRRVLTNLQRRAKAFGYVLQPTEIKVVPMAVS

SEQ ID NO: 450283 - protein, 482 aa, unidentified
MEVVHSRCAGLDVSKRDAKVCVRVVGGGRAGTTSTVTTWASVTNQVLALREHLIAEQVTLVVMEATGDYWKPFYYLLEDGPFEVMLVNARHVKNLPGRKTDVSDAAWLAQLGAHGLVRGSFVPPEPIRQLRDLTRTRTTMVRARAKEIQRLEKLLEDAGIKLSSVASDITGVSGRAMLEALIAGQRDPNELADLAKRRLRSKIPALTEALTGRFAEHHAFLARLHLDVIDQHTHVVAELTARIEVVIEPFRGARDLIITIPGISTLVADVIIAETGADMSRFPTAGHLTSWAGTCPGSNESAGRVKSTKTRPGNPYLKGALGIAAMSAAHSNGTYLAAKYRRVASRRGPVKAIVAVERVMLVAIWNMLTNGVFYEDLGGDYYTQRDPAKAKQRALDQLRQMGYDVTLNLTNTAVGQQDLTSQRDTLLDLGIEVDRIYVDHGLTHTPTSAKRQSLRVASKRGQAIGQGCERLTIPASYAAMVS

SEQ ID NO: 450284 - protein, 446 aa, unidentified
MMQKVMAMTSFHHSRRTLMNCTQNEKLNQVTPHTLIVGVDIAKFKHVARAQDDRGKILGKALVFTNTKEGFEAFFSWLEEMQHKHEKSDVLVGMEPTGHYWLNLAYTLKERLVSFGVVNPLHVKRSKELDDNSPTKNDIKDARVIAQLIKDGRFSYPRLPMDEDAEIKAGITIRNQIVGDLQVLQGRVHNWLDKYFPEFLTVFKDWSGKMALATLEHIPLPGQLNQTTPERVAEIWSTYGGVQRPSLKRIQRLQEAAARSVGLNVGLQMAQREIATNIKRYKMLKEELRALEKELETLVLTLRGIAEMLTVPGVGMVTVIELYSELGDIKNFKNPRQILKYAGLNLRESSSGKHKGQARITKRGRAKLRALLFRTVMPLVRHNRAFKALHQYYTTRQENPLRKKQSLIVLCGKLVRVLHTVGQKQCPFDEERMIRDIPHLSLALKV

SEQ ID NO: 450285 - protein, 425 aa, unidentified
MSEKIVVGIDVSKAFSDICILSPNNDIIKRMKISNDVIGMQSLISVLEKVENEYEDRAVIIMEATAHYHQILANFFRKHNYEVIVINPIQSGALKNINIRKIKSDKTDAYNIALLYRIKNYNETITHSDTVNSIKKLCRQHKELTDEIVEHINRLIAFLDISFPDYKKVFPDLQGKTPLSLLEKYPTVQDVLSPENKQDMIQLIKENSHKSYSYAEAKYEKLLQAAEKSIEVCIVNLSSAVLIQTTVSVIFSLQEALKAINYEIKRLSLLDEKFHKEIVLLQSIPGVGEYTACVVLSELGDVSNFSKPKELVAFFGLDPGVSQSGTYNRKNNKISKRGSPHVRLILHMLAKSNVYPNRNREYLNPVMRAYFEKKIAEKPYKVVMCAIMRKMVQIIFAVLRNQKSFELRTPEEHQKLIRENSKLVA

SEQ ID NO: 450286 - protein, 361 aa, unidentified
MEGIIKQCVGIDCSKDELAVCFGQLALPWQESHKATGVFSNSPKGFKQLLKWSDKLSAKGIVVDFVIEATGVYHESVSHFLFDKGRKISVVLPNQANHFAKTLKVRMVNDKESSKMLASFGLQKQLDGWQKPDSVYVRLKGLTREHLQLKDELTVIKNQEHAEQHSAFPIKESLKRMKQRIAFLEKQVEQIKEDIDSIIASHPELKKKIEKICTIPGVATMTAVKVIGETNGFNLIRNKKQLVAFAGYDVVTKDSGTSVHGKPHISGKGNKQIRMAMHFPALTSVKFDKNNRDLYERIEAKSRIKMKGYTAVQRKLLVLIYVLWKKDEAFDPNYQTKKSNQFKLLEQPMLTALTELDQVCS

SEQ ID NO: 450287 - protein, 399 aa, unidentified
MDRNRTVAGLDVHKDSIYLCIMGHDEAIIFEKTYGVLTPDLRQMCNDMTARGVTEAAMESTAVYWVPVWNELCGSMELKLVNPYFIKQLPGRKSDIKDAQWIAECLLKNLIRGSFVPETIVQDMRKLNRRIMDLNEDLTYNTNKLDAALQRCGFRLSNYVSRIKGKSYQSVLSCIIDGGRDPGKLIAKVHGRTINKHGRQTIMAAVTGCFSDTDIIIFRQTKAVIDLIEAQMAECQKELTALCGKHFPQQYRRLQTIPGVKERAATAIIAETGVDMQMFATAASLVGWCGLKPRNDVSNGRYKSRKVTHGNRYLREILIEIAWVASRTRNCFFSNFSYVQTTVKKKSRMKIQVAIARKILVAIWHMLSKEQDFIDIYLKRLEQQRLLEEQLKSFESKMA

SEQ ID NO: 450288 - protein, 350 aa, unidentified
MFIIGCDFHSRFQQIAMLDPATGEVIKRRLEHENGEAKTFYATLPGPARVGMEATCDAQWFEKVLQEHHHELWIGDAAEIRAAMVRKQKTDPRDALHILDLLLANRFPRIWVPSPAERDLRQMLRHRHKLLRFRTSVKNQLHALAMGQGLCRRKKLWAKVGRKELEGLVLDPWASLRRKELLQLLDQLDPWIDKLDEAVIQAAESHPCAVILMQQAGVGPVTALAFVLTIGPVSRFANSKKVVSYLGLNPSEESSGGRQRLGAISKQGNPMMRYLLVEAAQTASRLDPELRRDYQRLKFRRGSAVAKVAIARKLAVRLYWKLREATQSVPSARMQGSPATPVVGESLSAN

SEQ ID NO: 450289 - protein, 333 aa, unidentified
MLNFNFFLGIDASKDFANVALLSGASPKKYKDFKFDQAANGFKSFLKWLLQQSKNDLSKLFVCVEHTGIYIVEICNFLEEHEISYTLISPIALKRSLGLQRGKSDKVDARRIATYAFKNRDDLPIHRLATADLRELQALVTYRKRLQKSLQAIRISAKELALVETFGSVAHISADSERITKELAESMKQVEQKILALIDTCQDIKKKFDIIKTVPGVGWLTAISFIIYTQNFVAFTNPRKFACYAGTAPFEHSSGSSIRGKTGVSQMANKKMKTLLTTSAWSAINHYSEFSDYFNKKVDKKGKNKFSVLNAIRNKIIHRVFAVVRKNKAYVPA

SEQ ID NO: 450290 - protein, 316 aa, unidentified
MTQTPTYAGIDVAKDRLDVMLRPSGEYLEATNDERGIRSVVRRLRKEDVALAVLEATGGLEQPAAAALALGGVPVAIVNPRQVRDFAKATGKLAKTDRIDAAVLAHFAEAMRPEPRPLAEEHARELSAVVLRRRQILAMTTAEANRARTAPKAVRKRIEAHLRWLRKELARVDGELERVVKESLVWKERADLLMSVPGVGPTLSATLLAELPELEYLDRRRLAALVGVAPLNRDSGTLRGIRTVWGGRSGVRTTLYMATQCAVRHNPAIREFYGRLVASGKPKKVVLRACMRKLLTILAAMLRNWTPWQPRLLPAS

SEQ ID NO: 450291 - protein, 342 aa, unidentified
MNHVAIDLGSKESQVCIRRQDGAITEERKYPTRKLVELLATWEPARVVMEASAEAFRIADAAIAAGHQVRVVPGTLVRLLGVGDRGVKNDQRDAQHLSKASWQTDVPSVHIPSEQARELKSICGARDVLVASQRNLANNVRGWMRTQLLRLRAGTMATLPDRLRGHAASTGRPLPEHIERQLTMLTLVMEQVKAADKQARNLAAEHPVCRRLMTVPGVGPITSLRFVAAIDDPTRFSSAHRVQAYLGLVPGEHSSSERERRTGITKAGPMEVRRCLVQAAWAATMVRSVHPMLVWHRQLAERRGRPVAAVALARKLAGILWAMWRDGTSYQPKRAAQAPKAM

SEQ ID NO: 450292 - protein, 340 aa, unidentified
MEAATIGLDISKHVFHIHAVDSQGQVAGRQRLRRGEIVSFFSSLAPCLVGIEACATAHHWAREIRQFGHDVRLIPPAYVKPYLRRGAKNDAADAAAICEAVSRPNMRFVPIKSAENQGFLMLHRARGLLVRQRTMTACAIRAHFAEFGIIVGQGRQRVDGLADLLDDEELTLPAHARIALAVLVSQLKELHRQVKAIERELAEIQRVNPMAKLLSSIPGIGPITATALAATVPDATMFRSGREFAAWLGLTPKQNSTGGKDRLGRITKQGDSYLRHLLVIGARNVVRYPKARCRVGGGWIEALLERRRPMVVAIAVANKLARIVWAMMTTGEFYRPKLAT

SEQ ID NO: 450293 - protein, 390 aa, unidentified
MYCGLDVGKGDHYAVALDPAGKRLHDGPLPNDEQRLRALFDKLGRHGRVLVVVDQPATIGALPVTVARACGIEVAYLPGLAMRRIADLHPGKAKTDARDAFVIADAARTLPQTLRRVDVGDEALAELEVLVGYDDDLAQESTRLTNRIRGLLTHIHPALERVIGPKLDTKAALELLSRHGGPSGLRKAGRRKLTTTAVAHAPRSGARLVEAILAALDEQTVVVPGTTAAETVLPGLADALGDVLRRRDELARQVEGILDAHPLAGVLISMPGIGVRTAARILLEVGDGSHFASPGHLAAYAGIAPVTHRSGSSIRGEHPARGGNKQLKRAFFLSAFAALRDPASRAYYDRKRAEGKKHNAAIICLARRRCDVIYAMLRDRKPYQPRPVTA

SEQ ID NO: 450294 - protein, 313 aa, unidentified
MSQNTMTTIYTGLDIAKLNLQLHLAGRVHDLLNTAAGHRRLLKLLATQSGVHVVCEATGGYERGVVAALHKAQVPVSVLNPARVRHFARATGQRAKTDDIDAALLSAYGQALHPKPTAPRTEQEQQLAELIRRRVQILEILVAQRQQAQRLTVPALRRQAQSLVRRLERDVAHIEAQLKALRTQAATLDERVQKLEAITGVGTITALGVLAELPELGTLNRRQAAALAGLAPHPRQSGQWHGRRSIGGGRAPLRRARYMAALVAAHSNRQLKEFYQRLRAAGKPAKVALTAVMRKLIVLMNHILKNPNFALSN

SEQ ID NO: 450295 - protein, 339 aa, unidentified
MRKVAGLDAHSTYVVVTIVSNEGEVLAGPKRIGNEEADRLEALLADHAPLEVVVEASGSWPWLYDRLESPQVHIVLAHPKKLRVIAESNYKTDAIDAELLARMRLVNLIPEVYPKPIEQRELATLVRHRARLVRQRTGTAGRIHAELHSVGLSLRRGELLTQGGRRWVHTEAWPLFGPEQRLLIETHERLIDLLSEMVRELDRRIERIGREIPAVQLLETVPGIGPYRALLIVSETDPIDRFEHPKHLVSYAGLAPRSSRSGKSVRYGSIPAGANRWLRNVFVQAALSHCRTAPQSPLTTYYEEQKERVGWRVARIAAARKLARVVHAMLRTGEVWSHG

SEQ ID NO: 450296 - protein, 398 aa, unidentified
MSLEPHAEPAAIRTHFGAIFVSLELSRSNWLVTSLIPGGGGKMSKHGVRAGDVAGLLARFSELKRKALARTGENYPIVVIQEAGLDAFWIHRVLEQEGIESHVVDAASIAVSRRRRRAKTDKIDGEALLRALLAFKRGEPRVCSMVRAPTPEEEDRRRICRERKVLIAERVRHVNRIKGLLFSQGIGDYRPLGRDRRRALEMLRTGDGRDIEPHLKKQIGRELDRLELLMEQIVAVEGDRDAMLSAAIEAEVAATPQNAPAPVRMLANVKSIGPEFAAVLWTEGLCRSFANRRQIAAYAGLAPTPWQSGSIDREQGVSKAGNPRLRTTMIQLAWLWLRHQPDSALARWFHERVNRNGGRQRKSTIVALARKLLVALWKYVTAGVVIEGAVMKTAAPAL

SEQ ID NO: 450297 - protein, 470 aa, unidentified
MSSTKQIETEAKKRIPTRKKRGLCQQDRPVVEPNAAGIDVGAREMYVAIPPDRDSEPVRVFKTFTADLECLVDWLIARGITTVAMESTGVYWIPLYQMLEDRGVRACLVNARHMKNVPGRRTDWHECQWLQYLHAAGLLRAAFRPEQNVCGVRTLLRHRNELVRMAVQHVQHMQKALTQMNVHIHHVISDITGLTGLAIVDAILSGERDVAKLAELRHRSIQADEETIRKSLQGDWREEHLFTLNQSRQMYITYRNNIEACDEKIAKLLGGFEAQVDIKLQPLPAHPGPSRKRRTKRTGDFRFEVRTEAYKLFGLDVTRIPGLNELAIPIFSEVGRDLAVRFPTAGHFASWLGLCPDNDKSGGQVLWTGVRRINNRAAQMFRMAASSLHHNRSPLGDFLRRMKAKLGPAAGITATAHKIAIIFYALVTKQIEYDDSIWATRDQHRQKRFEQKLKRQARQLGYELVPVQPV

SEQ ID NO: 450298 - protein, 400 aa, unidentified
MRAVFGIDVSKASSEVAILVNGEKVHGYTISNDALGFARLLGDLKTVHKPEIIFEATGVYSRRLQAFLDEHGYAYTRLNPLEAKKQLDSLRVRKTDQIDAEKLAQSQFVLNRKPTYVQEEVYQELRDFNRFYQNLTEDIVRAKNRLHKVLQVTFPELETILSTPTGEQYWNLFVAFPCKDFLLDLSKDELSESIRQSTSKRISDKRVAYLADKLIALANQSYCAVKKTSPMLEEVRYYAKELLRLSEHRPTVLDQMVELAQPLPEYDILLSIPGIAETTATSIIGELGDIRRFQSANQINAFIGIDLRHYESGNFLAKEHITKRGNPYARKILFKCIHNIASASHTNPCHIADFYEKRKRQSQTTSTKPHTIASIHRLIRTMYYLIMHNKLYDYASTQNR

SEQ ID NO: 450299 - protein, 448 aa, unidentified
MPRKKIFLETSATVPPRKENRNDLCSHRTVCRNRRRQEVFGRVCHGRAVRGEPRVEIRKFGTIRVELEGLRDWLKQQEVTHVVMESTGSYWKPVFNALEDAVKVYLANPQEVKNRKGHKTDNKDGWWLAHLLRHAMIHPSFIPPRTIRELRDLTRRRKRLLGAGTSERNRVQKVLEDANVKLGNVLSDLFGVSGQLMLEALLQGQAKPEEIAHFAKGRAKKKIPEMIAALEGHQMSDHHRRMIRYSVDHMGFLEGQIEQLDQDIVARIREAGLEPQWQLLQSVPGVQETSAAEILAETGTDMTQFPSEKHISSWAGICPGNNRSAGRNKSSHTTGGNRWLRGTLTECAWAASAKKNGFIKDKFWRIITKSGGKKPPAVVAIAHTLLILIYQALLTGQPYQDKRAPVLDQRQKQRLIRHHIRRLGKLGVAVCSARPGSSATAAKTPTGT

SEQ ID NO: 450300 - protein, 428 aa, unidentified
MKKRTYRATYVNKIDEAKINAAVKGKRVVVGVDVAKDVNYARLMVGEQREVVATVKWHLVSQTTRTVEWFKSMGAERVEFALEPSGTYGDPLVHQLMEAQQEVFQVSPKRCHDAAEVYDGVPSMHDAKAADIIARMHLDGLSQPWRVKSEVERDFAAAVDVMGIYDRQYHDNVNRIEALLARHWPELTGILELTSASLLALLETYGGPAAVRRDRVGCAEYLAKAGRRLLSEKKIEQVVQSASSTIGVPMTGAEIDALKAVAKETNRCRKAAAEHKHHVERLSESHEMVKQLSSVLGRVTAAVLVVGAGDPRSYSSAKAYVKALGLNLRERSSGKHKGQLKITKRGPSEPRRYLYMTALRHVKDETVIKAWYARKVAHNGKRSKTPIIVALMRKLVAALWHVARGSEFDPRKLFDCSRFETTTQGRNA

SEQ ID NO: 450301 - protein, 422 aa, unidentified
MLGVGIDWAESFHDVALGRPGEGVIGQFRIEHGPAGVQRLIARCLELEPDPAEVRVVLETRHGLLVEALVEAGFTVLPVNPDLVARRRGPAKKKDDAEDARICCLLALDQYAGLRKLIPHAEAGAELRAIARDDERAARDERRIGNRLRADLLAVFPAAIGIAAGDPGAAVFLQLIERWPSAADLATASRDEIEALARSARHGWPARFADRVEDSMAAPRLPVRPELARAKAGSIRLAAAQLLLLRTQRKAWERRMGELLLGAPRTGRSHTAKDPDPGKAFPGGEIYLSMPGLGDRLAARVAGEIGEHYEQFTTPNALQCYAGRAPVTRRSGRSEFTIARRLAYNRHLGQAVHQWAFCSLTRSAWARQFYDAKIAAGDSHHTALRKLGNRWLEVLWHCLRLDVPYNEATHTANRNRAIKPAA

SEQ ID NO: 450302 - protein, 350 aa, unidentified
MIVGIDVHKRSHAAALIDERGGEVGVLTIANSPAGYETLICWLRHHNAAQAVIGVESPGSYGRSLVAALAAVGFEVLHVPAWRTHRERRHLGPGKTDPGDALAIADVVRRKRAELGPALEPEIVRAIATLELQRRRFVRDRTQTIQRLRADWTQFDPVAEASVVRCDRPKVLRRLKQLKLGDGLAERTAASCIRQLARDVEDFNRRIAELEAETRALLAEHGNPVEDLLGAGDQIAASLIAHAGDVRRFKDAAAFARFCGAAPIPCGSGETSGRHRLHRGGNRQLNAALYRIAIVQQRHHPEAKAFLARKVSEGKTPREARRALKRHLSNVVYRRLLAWANSAPSMNLLT

SEQ ID NO: 450303 - protein, 315 aa, unidentified
MTNLKKSKTNVNVGIDVGKRFLDVCLYEKDLHWQVENNPDGVRKLLGRLGRYQVERLVMEATGRYQLLLAEQAFKKGLPVCIVKPLAVRRYAQAMGKLAKTDKIDAQVIAEFGARVEPIITLAKSKNLMLIKDLLSRRRQLINMRTKELNRVKIMGKALEVSCKRIIRTLDLEIARMEKQLDRLIENESEWAEKKALLKTAPGIGDTMVYTLLADLPELGTMTNKQAAALVGVAPMNRDSGKMKGKRRIQGGRYSVRTTLYMATLSATLCNPIIKEFYQRLTAQGKHNKVALTACMRKFIVMLNAMVRDNCEWQY

SEQ ID NO: 450304 - protein, 341 aa, unidentified
MKEVYRRCCGMDVHKDTVVVCVLPPVGGEGKAIRKTYGTFRNDLIRMRVWLKQLKVSEIAMESTGVYWRPLWNVLEDEGFRLLLVNPAQVKALAGRKSDGRDAQRIAEFLQDRRLDASFVPPAEIRQLRMMLRHRIALLEQRNEVHNQIRDLFETAGLKLSSVVSDLLGVSGRRILEALIAGEQSPEILCWKLRGRLRAKEKLVKESLKGYFTEFHRSMLESHYKHYRFLTSEIGIFEERIARAMKPYDSQIDLLVSIPGVDRIVAWHLIAELGMDPTTFPDADHCASWAGLVPGQNESAGKQKSTRCRKGNRTLRRVLTQAAWAASQRIPNCSIGSRASS

SEQ ID NO: 450305 - protein, 339 aa, unidentified
MMNFSNHLLNRKSKVMKNIIIGIDISSKTLDICIKNETVSYFSIENKVPVIKRFFKRYSEENVIVAMENTGRYNWNLFEVLEKFDFKVYVISALHIKKSIGLVRGKNDKIDAFRICNFIEKNYQESREWKPSSCSVKKIKILLTERASRIKIKKQLIVQQHDYKLMKNIGLDKQLKDLNIKLLRDIDAQIKIIENDIENIIQNQESLNQQQKLIKSVPGVGQVLSWTLLSKTEGFTTITDPRKMACYSGVVPFDFQSGTSLKRRPGVSMLADKNLKTILHLAAMSAIRSDNDLRTYYMRKVDEGKNKMSVLNAVRNKIIHRVFAVIKNQIPYQKDLVLS

SEQ ID NO: 450306 - protein, 326 aa, unidentified
MQGKVPSQRSAAAPVYIGIDVCKARLDVHIHPLGESLVLPNDAGGLKRLKKILARYDVVIVVMEATGKFHRPAHRSLHASGFKVAIVNPLRSRRFAEAIGTLAKTDRVDARMLALMGESLKPGALEPTPELMETLQELARGRESAVDSKTAIGNQIQTSNSKVLVRELKRQLSAVETAIENLEAELERQIDADPVLARRFEILTSIPGIGLVAAVALIVELNEIGRLSSKEAAMIVGLAPIACDSGQKTGRREIRGGRKHLRTALYMPANSAKQHNPDLKIFHDRLIKAGKLAKVAITAVMRKLLVLANTLVREDRLWQPKHVIAR

SEQ ID NO: 450307 - protein, 342 aa, unidentified
MQVTTIGLDIAKNVFQVHGIDANEKVVLRKQLRRSQVIAFFKALPPCLIGMEACATAHYWARELTKLGHEVRLMPAKDVKAYVKRNKNDAADAEAICEAVRRPTMRFVRIKSAEQQGQLMQHRTRDLLMRQRTQLINALRAHLAELGVVAAHGDRGITELLAVVADDRDARLPVDARASVIVLAAQLASLQTMIGSLEKRIQAQHRANEASRRLETIPGIGVIGASAIAATVTDAMEFRSGRDFAAWIGLVPRQDSTGGKHKLGPISKQGDRYLRRILVVGAISVLRRAMQSPDKYPWLTQLLARRPFKVVAVALANKMARTAWALLAHGGTYRAPELAAAA

SEQ ID NO: 450308 - protein, 432 aa, unidentified
MGWLEWDGRLLVMEIDHGEQHLIERVAAIDIGKAEMVCCVRVPGAGRARAQEVRTYSTMTPNVLEMTDWLTGLGVTRVVMEATSDYWKPVFYLLEEQVPETWLVNARDVKHLPGRPKTDRLDAVWLCKVAERQMLRPSFVPPPAVRRLRDVMRYRTDLVAVRTAEKQRVEKLLEDAGVKLSVVASDIFGVSGRAMMAALIAGERDPARLADMALGRMRARTGLLEKAFMARFSEHHAFLLATMLARVDTASEDIAAMDARVTAVLDEELHDAAARLTSIPGIGAVTAVAILAEIGTDMTRFPTAAHLCSWAKFTPLTSESAGRTKGRQSTGHGNRYLARTLGEVAVMAGRSHTFLGARYHRIARRRGKPRAIVAVGRSLLVIIWHLLSHPGTTFTDLGADYYETRINHQRTARTHIRALEGLGYQVTLAPAS

SEQ ID NO: 450309 - protein, 313 aa, unidentified
MVNVGIDVSKDTLDVAVRPTTDRFRVNNDDKGYAELCKRLAKLRPERIVLEATGGYEQAAVQALARAKLPLVVVNPRQVRDFAKAAGRLAKTDEIDADVLAHFGEALKPEVRPLPDEAHRQLEAFVSRRRQLVDIRSAEIKRKQTAPKVVHPSIDLTIEFLTRQIDDVDRDLRDLIRRTPAWREADDLLQSVPGVGPVLSSTLTALVPELGKLNRKQIASLIGVAPFNKDSGLRERKRVTWGGRAPVRAVLYMAASVARRFNPIIRTFYERLLGMGKPTRVALVACMRKLLTLLNAVARDRRPWNPLLVEKSP

SEQ ID NO: 450310 - protein, 349 aa, unidentified
MIIIGVDFHPEFQQIALVDTGSGDFQEKRLMHREEAEGFYRALAVAGEKVRVGMEASGYGRWFERLLGELQVELWIGDATEIQRKRERKQKTDRQDAQHILKLLLKDDFPRIWVPSWENRDLRQLLWHRHRMVQARTRIMNQLQAVAINEGLRCKKRLWRAGGRQQLESFPLGPWASRRRSELLELLDRLSPTIAELSQAIEHEAEKRPEVQRLRTHPGVGALTALAFVLIIGDVGRFQCGKQIASYIGLVPLEKSSGNRRRLGHITKQGNSMLRFLLVEAAQVTVRSVPEWRSQYFRLMMRRGRKTAKVAMARRLAIRLYWMWRQGLNYEELAKFGSHAGQSGHPDGV

SEQ ID NO: 450311 - protein, 367 aa, unidentified
MKKVSIAATRQSRNISQQKLTIGLDLGDRNSWYCVLDEAGQIQLEQRVRTSAKELREVFGAMPRSRIAVEIGTHSPWISRLLSELGHEVIVANARKVRLIGESRKKDDRLDAQTLARLARIDPELLCPVKHRSAQAQADLMMIRARAGLVRARTGLVNTARGLAKSYGERLRGCNVRNMNAEKAEGLSSELQRALEPLLSAIAELSQQICEYNEGIEALAQASYPQVALLKQIKGVGTLIALTYLLTLEDAHRFGKSRDVGCYLGLQPGRRNSGQSEPQMHISKEGDPYLRTLLVQGAQHILGPFGADCDLRRWGLKLAERGGKNGKKRAIVATARKLAVLLHHLWVSGEVYEPLHNSSRMTVAAAA

SEQ ID NO: 450312 - protein, 356 aa, unidentified
MPIQRTEKFSNSQNVYIGLDVHLKQWNVCIIHDGIQRKAFQQLPDVSVLLAYLQRVYPQKRYFSAYEAGVCGCSIHYALEATGIRNIIFNPADISQTHKERVRKTDATDAAKIARALANGELRSIHIPPSWRDNDRNLLRLRSTLVSDIKRSKARIRHYLHVNGIKIPPAYSPGRWPLAFIGWLRQTATDLGNSTGLALTSMVENLEDLNGRLRRTNRQLAALISTGPYHDDYVLLRTVPGVGTTTALTLLLECGDLSAFSSAESFCAYVGLIPDMHRSDEHDVRCGITARRHKNLRYMLTECAWRAIRTDDAMMRRYESYRRRMPPAKAVVKIAHKLAKIIKFVLKNKKAYVQRI

SEQ ID NO: 450313 - protein, 343 aa, unidentified
MGIHAIGIDLGKTLFHLVAVDAKGNVVVRKRCSRTQLLAYTANVRVHVIGMEACSGSHFLGRALQQQGHQVRLMPAQYVKPYVKTNKSDYIDAEAIAEAVQRPTMHFVPIKTEEQLDLQAVHRVRERWVMRRTAVVNQIRGLLLERGVVLPKGRSHLEEGLPKILADATVRLSDSFRILLAQLKLELDALAARIGEMDLVIQRTAQEDEACRRLTTIPGIGPVTATALVAAIGNGTAFRKGRDLAAWVGMVPREYSTGGRQKLLGISKRGNSYLRRLFVQGARSVLPHRNKQPAALSNWLAQLIARAHQNVVIVALANKLIRTAWAVLCKNETYRTSVPVSTT

SEQ ID NO: 450314 - protein, 379 aa, unidentified
MIVIGVDTHKRSHTLVALDAATGAARGQLTIPATDDGTLEALRFAGELDSERVWALEDCRHVSGRLERGVVASGERVVRVAPALTETSRRAVREPGKSDPIDATAIARAALREGIDTLPVAFLDEQALEIRVLTDYRDQLVNERVRLASRLRWHLVQIAPELEAQVRPQGLVGPRIRAMVGRGLARLPRSPRVRVAKAILKRINEIYREEGELLAEIKVLIEAHCPALLDEHGCGPVTAAIIIGHTAGAKRFPTDACFARHAGTAPIPASSGNTKRHRLHRGGDRQLNRALHIIALSKARTDPATRAYLDRRHAEGKTKLEAIRCLKRHLARRIWRLLYDTQPPTTPPPALALIPPPPPHKRPTSTIVGAAPTLMPCTR

SEQ ID NO: 450315 - protein, 453 aa, unidentified
MCKKTEKNKSSVKRITQFEIIRSNVAGIDVSSNSGMMVSYPINETEIVIEEFECYTRDLHRLSQTLKSHHIESVAMESTGIYWVPLFLLLQDAGFEVYLVNAKHVKNVTGRKNDESDAEWIQKLHRCGLLSASFQPDNQTRELRSVVRHRDKLVKTRTTYVNRIQKSLDGMNLKIHNVISDICGKTGQLIIKAILNGERDAQKLAQLRDPKIKTSHEELVKSLEGFWSEEHLFELEQNYSLYTYHDEMIDKCDQKIEKILQQIIKLKNNGVIPKLPKLKRKRNQNNISIDVTNHLYALTKVDVASVSGITGISEVTALGIYAEIGDNLYRFKDEKHFVSWLGLAPNTKISGGKIISSSVPKKKHSAGQYFRLAAMGLCNSKGALGDYYRTLRNRIGYPKAIVALARKIAIIYFQLMTKKEGYNPQLIIDNQEKYKEQKIKNLEKYLSKLKNTA

SEQ ID NO: 450316 - protein, 329 aa, unidentified
MQPCVGIDVSSEHFHAAIYAAQGQVACQRFDNTLNGVEALVKWCDDHDMPLQQVWFVVENTGVYSATVCYGLHERGRRVALLSPLQVRDGFRARKTDEVDAARLAEYGYRFADRLVAWEPPRETVVRLAHWLQIREQHRDRWQRLRNLLESIQRHPRHDAASVQHLEEEITRCQRLQSEVEEQIGQLIAGDAELWARREQVFSVRGCGEGMFWQLAMVTDGFRDIPTGRRLASWAGVCPHERRSGRRVRHGTHSRGYGNEEFRRVLHMAALAAVRLPGELRSYYLRKVGEGKPKLLVLNNVKNKLLHRVVACLRDGRCYSSEYALVGGS

SEQ ID NO: 450317 - protein, 471 aa, unidentified
MAAGKGKADGTGVPGRGGDGAEVAEDSTQVVEYAAAIDVAKGSGMVCTRVPGTRPDRRRQKVWRVEATFNEVTALMDHLRAEGIQRLVLESTSDYWRIWYYLAEAAGLEVWLVNARDVKHLPGRGKSDTADCVWLCKLNERGMLRRSFVPPQPVRDLRALTRTRARLAQDQARHQARVEKILEDALLKISVVISDLFGASGRRFLDALVARERSPAALAALGDKRLRATRAQLAEALTGRFRDIHATEIAVHLRLIDAINAEIGLLDERIEQQLALVPGTAPACATCGLAGGGHAPGCADGDVEVLGLAGRLGEITGIGAVNGRAVIAELGTDPSQFPTPGHAAGWARLTPRSQQSGQTARPGRTGKGNRYLRGALGQAAMTAARTDTRLGAMYRRIARKRGKQKAIVAVSRVICEIAWILICDLSARYTELGPDYYHPLSAARQTQAKIREIERLNPGKKVILADAGAAA

SEQ ID NO: 450318 - protein, 417 aa, unidentified
MALKIVYPVCCGIDAHRSFVVACIAATNDKGVTTYKRHRFSTFTGDLRRLALWLAVNNCRDVCMESTGKYWIPVYNILESTCKVVLAHPKYVKAIRGKKTDTKDAKWIADIFKHDLVSGSFIPPFKIRQLRDLTRYRVKLTNFSVGEKNRVQNCLTVSNIKLDDVFSDVFGKSASAITEQLLAHPDGNFDVTPFIDRRCKASPEKVRAAVEGLMCPEQAKKLKIIRSHTDSLELCKANLESAILVLVEQFRSQFELVMTVPGIQLFSAIAIISEIGVGMPVFPAAKHLCSWAGLTPQNNESAGKKKTTRIGRAGAYIKPLLVQCALTVANSDKRPEIKNRYLALKKRRGHKKAIIAICRMLLTAIYAILKKSEAYNPNLYSKVMSLPANRTFTIEQAVAFVKRHGFLVVDSDGALAS

SEQ ID NO: 450319 - protein, 348 aa, unidentified
MAMLADLVEVVIGVDTHKQTHTAAVVIAATGAMIEQATVAATPAGYRQLLRLANRQDGRRIWAVEGTGGYGAGLTRFLHAYQEQVVELDRPRRTARRHGAKSDPLDATRAAREALGRDQLAQPRAAGHRAALSVRLTARRSAVQATADAQRQLHALVVAAPDPLRGRLRSLTTHQLVTACGRLRLRAHWDIETTTVAASLRALARRIQLLQAEIAEHTRAITTLVRAWRPDLLTPTGVGPIVAAVVLCAWSHPGRCRTDAAFAMLGGAAPIPASSGQTVRVRLNRSGDRHLNQALHLIVLTRLRYDPATRAYAQRRRAQGKTNREIRRCLVRYVARQLYRLLEAQPAL

SEQ ID NO: 450320 - protein, 374 aa, unidentified
MTTTTTNHDKETIVMAIEVSNSNWLLGFSNGEKKSIRNVKAWDIEHFEKEVEKAKTKLKVDGKAIIHCCYEAGRDGFGIHRYLESVGIHNNVIDPSSIDRDRRWKHKKTDRIDVKKMIELQEMRYYMDNKKYRVVRVPSVEAEDERRLHRELDRLTKERTGHINRIKSLLVMHGIKVKSVQSLDIVEIRDWANNPLPPMLREEIVREQERLALVEKQIRTIRQKREQRIKHPENRSDEIVCRLLMLKSIGPQISWTLVKEFFGWRTFKNRKQVGSLAGLTGCPYNSGTMNHEQGISKAGNCQVRTLAIELAWLWLRWQPNSKLSKWYNERFGDSGDRLRRIGIVALARKLLVALWKYIEFGIVPDGAVFKTVAK

SEQ ID NO: 450321 - protein, 389 aa, unidentified
MKIFVGIDIAKLNHFAAAISSDGEILIEPFKFTNDADGFQLLVSKLESFDKNSIIIGLESTAHYGDNLVRYLVAEFYQVCVLNPIKTCQMRKNNVRKTKTDKVDTFVIAKTLMMQDDLRFITFFDLDMMDLKALGRFRQKTIKQRTRLKIQLTTYVDQVFPEIQYFFKSGLHQHAVYALLKEAPSPKEIASMHMTHLANLLKVNSHGHFTKGLAKELRVLAQKSVGANDSAISIQITQTIQQIELLDSQLEKIEAEMTDIMKFNDSVIMTIPGIGYINGGMILGEIGDIHRFSNPNKLLAFAGLDPSVYQSGNFQAKTTRMSKRGSRVLRYALVNAAWNVVRNNATFKAYYDAKRAEGRSHYNALGHCAGKLVRVIWKMLTDEVEFNLE

SEQ ID NO: 450322 - protein, 367 aa, unidentified
MKKNNTRTQNPRGRKTVPQSITIGIDRGDKTSRWCALIDDEVREGTVATNRKAIMALCGTLPRCRVAIEVGAHSRWVDRLFRELGHEVYVANARQVKLITESSRKDDRLDAQTLARLARVDPQLLRPVRHRSDEAQQVLTVIRVRAALVEVRTALVNSARGLVKSFGERLPKCDADQMSAERAQALPERLRETLRPLLEHVAALTASIKDSDRKIEQIARTEYPETELLMQVSGVGNLIALTFVLTLEDRARFARSRDVGCYVGLRPKRSESGERQPQLGITREGDVYLRKMLVQSAHWILSRRGPDTDLKRWGLKLAERGGKNAKKRALVAVARKLGILLHRLWVTSEVYDPLRNSRAREMQRAAA

SEQ ID NO: 450323 - protein, 417 aa, unidentified
MIQLAWLWLRHQPGSALTLWFQMLCSRGLCQTGKPHIWNRSACMSSNVCHQIIYLAIELSSSSWVIAYRVPRNDKAKLHRLEAGDGAGLLAFIAGLRHRLDPPDDASTLVVSCFEAGRDGFWLHRLLTAHGVINHVVEPTSILVTRGARRAKTDRLDAVGLLRVLAAKFAGDPGACRTVVVPSVEEEDAKRPHREREFLVQERVRIENRIAALLATQGVRERPSLRSWDADMRALRTGDGRPLPTHLVAELNRLRRRLSLTLEMIRELDAVREQALEAQHDSASRTVKALCTIRGIGVNFASVLTREVFYRTFENRRQIASYLGLAPTPFQSGGMDRDRRINRAGNSRARKTLVQLAWLWLRYQPESSHAAWFRDRVGSLQGRIRRITIVALARKLLIAIWRFVTLGLAPEGAIIAA

SEQ ID NO: 450324 - protein, 420 aa, unidentified
MKAKKKAKLDLVSDDTLVVGVDVGKRNHYCRFINVRGYEIGKGFSFSNNRDGMEKIISKIEEAKKQNNLAKAVIDMEPSGHYWKASAHYLSGSGYKLVLVNPYHIKRIKEIEDNSQTKTDPKDSILIAKLVRDGDFFDPNLAGGTYAELRRMYRLRLKVAKSLVKEKTKLKILLDEYFPEYEGLFCDILGVTSEYIIDNYFLPESVAKENILSFTGKIKMISRGKIGVSKVLKLIEYAKDSIGITTGKDAAVLEKTYILKDISNLKLRLACLNKKLKYYLDKIECSKYLLSIPGVGIVTAAGFIGEVGDISKYASAKEIIKMAGLNLVEISSGIKKGKKKISKRGNNRLRCLLYQCAIVAISKNSQLKRYFSYQAETKNKMKMVVAVQCKLARIMFALLKYRKYYDPEEVLKSIVAQEVA

SEQ ID NO: 450325 - protein, 383 aa, unidentified
MVRAKEFDSFTITNDLGGFNVLLDQLQCYANPVVVFEATGVYSLPLQSFLDRHNYNYVRLNPLKAKKLMDNNLRHLKTDKLDAKHLAELQFNSPQQLSPKQDYRYHEMQNASRFYEELTNDLVKWKNRLHRALQSTFPQIERLTSSHSGEVYWQIVNLFPHAKFVLNSAYDQIVAQLNQIKGIGHAKANTLACSLQTIAKRTCYYDDYDSITVELGKYCIERLRGIEQRRKHILEYIKEIASNPRDVQLYATIPGIADTTALRIYAELGDLRRFNNRNQINAFIGIDPGRSQSGDVDNHLSVTKHGNAIARKILYRTIGQMETVKSSQPCHITDYYDYKKQLSKARGYKKAAIASMHKLIRTIYALIINDQPYDYRKSLHNQS

SEQ ID NO: 450326 - protein, 386 aa, unidentified
MAASVTSRIEQDTLAQPTLSLAFELGQDTWKLGFTIGVAQQPRERTIPAGDIVRVQQEIAQAKQRFGLPADARVVSCYEAGRDGFWLHRCLVAHGVQNYVIDSASIEVNRRQRRAKTDRLDVRKLLTMLLRHLAGERKVWSVVRVPSVEEEDRRQLHRELTTAKQDRTRIINRIKGLLAGHGVQLVLQGDVETQLDQVHQWDGEPLPSALRTRLKRAWQQVGFLTTQIQTLEAERRALLRRRDDPVIAQVRQLFTLRGIGVNSAWLYVMEFFAWRDFQTPKQVGALAGLTPTPYQSGQARRELGIAKAGNRHIRAMAIEIAWAWRRFQPASALAQWYERRFGAGSARLRKLGIVALARKLLIALWRFVKTGVLPEGAALKTETPSR

SEQ ID NO: 450327 - protein, 338 aa, unidentified
MAIVMGLDQHRAQITAEWVDTVTGEVSRGRIVPADRAGVRKFLARFGGRELEVALEATTGWRFVVEELRRVGAEVHLAEAAQTSALRGTKQHAKNDRADARHLRELLMAGRLPECWIAPGHLLDLRARVRLRHTLVDERGEWQQRMQAVLYHHGLPKRAGLLTSANRAWVGQLPLTGAARGQITVALAMIDAVDVQVSPLERELRSYARRQTGCRAIQAHYGIGPLTSVAVLAELGDARRFSSSREAVRYAGLDITVHASDKRRAPGHLSRQGPPVLRWALYEAAQTARRKTSPDHAYYQQAAERLGDNRALLSVMRKLLKRSYHTLRELGDDALAPA

SEQ ID NO: 450328 - protein, 366 aa, unidentified
MQNQAHDHSTANSAPHASPIAWLGLDAHAQNCVLAQLDDDGTQRQFWRVPTRQPDKLVAQVQAIAAPDKRLALEETNLARWLWQLLRPHVQQLIVCDARHNQLISSHPNKRDERDAFNLARLHRLGELKPVWQAPTEARALFKCAAQSYEDAVGRQTQLKQQIKSTFQHWGLFPTGTRLYSDEGRGPWLQKLPHAELRAQVGLLYAAMDQAVQSQRDTRKLMVRWGQSFPEVQRLSTAPGLGVIGAHVFAAYIADPTRFDSPGGLIRYCRLGLRDRSSDGKPLGYEQLDRHGHGLLKAVSYRAWLQAMKRRDTSVHRFFLWSKENTGSATHARLNTQRKLIRAWWTLWKKGEEWSEEKFFPTPKHT

SEQ ID NO: 450329 - protein, 350 aa, unidentified
MARKKKNRKSSSTLEIINSAAAGIDLGSTSHWACISEPDTGEQLVSEFSTDTPSLRELAEWLEKADISTVAMESTGVYWIPLYEMLSSRGFEVILTDTRSLSSVPGRKTDVLDCQWIQQLHACGLLQGAFRPGDSIVKFRALARMQRTLTDQRADWLRRMQKELDVMNIRVHRAVADITGATGMRIIGAIVDGERDPARLAAMRDARCRLSKEQIQRELTGNWREEHLFNLSMAFRMYENMCQAIKDVEQKILDLLSTIPGTDAAAPPPAKETKAKTMRKRGEEQLRQALYSISGVDLTSIDGIGVGTAQTILSEIGPDVTMFPTEDQFASYLRLAPNTPISGGKRVRGG

SEQ ID NO: 450330 - protein, 341 aa, unidentified
MSDYSYFGGIDLAKNHFSIHVVDSQGKVTLHKSVTRSKLLTTIANMPPMRIGLEACGGAHYWARTLNKLGHDARIMAVKYVVPHRTKGKNDLNDAVAICQAVHHPSTRFVPVKSPEQQAILSVHRMREHWVRERTALMNRIRALLSEFGLIIPVGRSSLMKHVPLMLEDAENELPQLARTVIADAYYHLEQLNQRIADTEQVFEAFSKVSENVQRIMKVRGIGPQTATAILASIGNGSQFDKSRDFSAWLGLVPKQYSTGGKPRLGRITKHGDKYLRTLLVHGARTVIANLGDKQDRHSQWCRGVLERRGMNRAIVALAAKNARIIWSLLHNQTEYENYAA

SEQ ID NO: 450331 - protein, 327 aa, unidentified
MTASVSSHNHIFIGIDVGGASFEAAWHRGGCTQYQNRPDAIAAFVARLSLEKQIIRIAVEPTGGYEKPLVKALRGAGLPVEMVHTSRFAAYRTLIGAKAKSDTSDARLLAALRGRAEEVRGRKAEYVVLPQDAVREQLAELAARRDQLKHMIHAETCRLSTVRNQSVRDEITAHLQALRQADCKIHDTMMQLVRQRDELRNAKRLLKTIKGIGDKTALTSIAAVPELGLISNKAAAALIGVAPFVRRSGTMTAPARIHGGRAPVRNAFYMAAVTASRHNPVLAPFYARLIAAGKPPKVALVAVMRRLVVYANAVLRSGQPWKRAEII

SEQ ID NO: 450332 - protein, 338 aa, unidentified
MKAYAGIDLHSSNNYIGIIDQKDHRLFGKRLPNDLVRIEQVLDPFKKELKAVVVESTYNWYWLVDGLKERGYPMCLANPAAIKQYEGIKHTDDRWDSFWLAKMKRLNILPEGYIYPKEERPVRDLLRRRLLFVHQKTAHMLSLQSTIARNLGVNMSFNTIRKLRPEDAYDLFEDSNLALMAKNNIEAFLHLQKTTREIERAVISQVKIREEFELLQTITGIGNILSLTIMLEVGDIGRFAKVGNYSSYCRCVSSARISNGKKKGENNRKNGNKYLSWAYVEAANFAKRYSKRAQQYYQRKMAKTNKIVATKALSNKMCRASYFVMRDQIPYDEERVFK

SEQ ID NO: 450333 - protein, 412 aa, unidentified
MTLTCVGIDVSKGKSTVSALGWGDVFLMKPHVVSHTASALSELADSLRRLPGDVRVVMEHTGRYWLPVAQVLSKAGLFVCAVNPKLTRDFGNNKLRSVKNDKADSRKLSRYGLKYWTDLIPYVPAEITRQKLLEFSRQLDASNKLLTGLKNNLQAIVDVTFPGVRKLLKSPARDDGHIKWVDFVCTFFHCDYVRKLGEARFMERYRSWCKRHGYKFASRGAGQIYAAAHNQVPTLPCDADTKLLISETARQLTSVSAAVETWRSKTGELASMLPEYDCVMSMYGCGRTTGPQLMAEIGDPTRFSGKKNLVNFAGIAPGDNQSGEHQQKSVPASKKGSSHLRKTLFLVMDCLLKCAPADEPVFQFLDRKRAEGKPYYVYMTAGANKFLRQYYAKVRDFLAKPSSADDTGALTV

SEQ ID NO: 450334 - protein, 332 aa, unidentified
MDNCIGIDVSKASINVHISKNGEDLEFVNSVQGFKSLHAKLKKIYKKEIEDNIFIFEPTGSYSEILRKYCYQQKIKCFIINPKQFSNYAKALGVEVKNDIEDARVLSKALPLAKSHQIRVPMYDEDVERIKELMSYYKFTTKQTTQQKNHLESLTSKDGDLFSIRELNRSIKESKAKEQRILDQMQMVIDANSQYKKAYVNITSIKGVGQIGGIALLHLFLKYPEANQRQITSLAGLNPIYKQSGTSVQSGYKISKAGSSMYRGSLFMGVLTAVRFEPTFQTFFNRLIAKGKHTTIAHIAVMRKIIITAHSLYKNDKRFDNNFSSQEVNMTK

SEQ ID NO: 450335 - protein, 457 aa, unidentified
MSNKLRSKNKTKKFKAADLPIELKHVNLDAAGIDIGSDRHLVAVPVGRDEVSVREFGAFTTDLYALADWLKKCAVTTVAMESTGVYWIPLFEILERRGFEVKLVDARKTKHVSGRKSDVLDCQWLQTLHTYGLLTAAFRPADEICVLRGYLRQKEMLVQSSSMHIQHMQKALQQMNLLLHNVVTDITGVTGMSILKAIIAGERDPKALARYRDERCRNSARTIAKSLVGNYRQEHVFALTQAVELYEFYQAKISDCETAIANFLAIQVTQTEDEPPPSQKNIPPRQRIRAGVDLRSRLFKLTGVDLFSIPGLGADTILIVLGEVGFDMSPWKSEKNFASWLGLCSGTKISGGKVLDRKSKRSANRAAQAFRLAASSLTRSATALGAFYRRIKARIGAPQAITATAHKIAIIFYELLKCRTAYVEIGQQAYEQKFKERRFKAMQKQALAMGYQLIPAA

SEQ ID NO: 450336 - protein, 367 aa, unidentified
MKKTSTAAVRSTKNFSPRKLTIGLDLGDRSSWYCLLDEAGDVLLEQKLATTPKAMREGFGAIPGCRIALETGMHSPWVSRVLAELGHEVIVAHARNVRLIGESRKKDDRLDARTLARLARIDPQLLCPVKHRSAQAQADLTVIRARAGLVRSRTALINTARGLAKSYGERLRGCAPRKVNPEKAQGLSPELQAALAPLLAASEALSERIQEYNQQIAKIARESYPQVARLEQVKGVGTLIALTFLLTLEDAHRFRKSRDVGCYVGLQPGRRNSGQSEPQMHISKEGDPYLRTLLVQGAHHILGPFGVDSDLRRWGLKLAERGGKNGKKRAVIATARKLAVLLHRLWVSGEAYEPLHNSNPAALPAAA

SEQ ID NO: 450337 - protein, 435 aa, unidentified
MQAVYARCAGLDVHKNTVVACRIWQEANGDKHQETKSFGTTTSELLELSDWLSEWECTHAAMESTGVYWKPIYNVLESSFQVLLVNAQHIKHVPGRKTDVKDAEWIAELLQYGLLKASFIPPAPQRDLRDLTRYRTKLVQERAREVNRVQKVLEDANIKLSSVVTDTLGVSGRAMLDALIDGCADPKAMAQLAKKRMRSKIPQLEKALAGIVRDHHRFLLASHLEHIDSLDMHIASISMEIDHRISGAGQTQDDNPKEPSIGDMSIPLSFDQAVNLLDTIPGVNRNISETIVSELGTDMSRFPTAAHAASWAGLAPGNNQSGGKQRSGRTRKGNQALRNALVEAALAASHTKGTYLSSQYHRLAGLKGRKRANVAVAHSILVIAYHMLKYHQPYQDLGANYFDEHKKEALIHRLTKRISKLGYNVTLEPIAARTS

SEQ ID NO: 450338 - protein, 412 aa, unidentified
MEVLYPRCCGLDVHKKTVVACVLITEAGKAIRKEIRTFPTMSADLLGLADWLRECGCTHVAMESTGVYWRPIYNLLEDDLTLLVVNAQHIKAVPGRKTDVADSEWIADLLRHGLLRASFIPPRPQRELRDLTRYRTSLRYERVAEVNRLQKILEGANIKLASVVSDITGKSGHAILLALVAGTTDAAALAHLAYGTLRGKIPQLERALAGQFSAHQRFLVAHQLAHIDALDQLMDQLSAEITARLAPAAVEVTLLQTLPGVGQRTAEVIVAEIGTDMTRFPSAGHLASWVGLCPGNQESAGKHQSGRTRKGSPWLRSALVEAAQSAGRMKRQPTYLAAQYRRLAARRGAKRAAVAAAHSLVVMIYHMLSRHEPYHDLGGGFFEEREPHERERRLARHLESLGYTVTPPAAVA

SEQ ID NO: 450339 - protein, 337 aa, unidentified
MTIIRIGLDTAKHVFQVHGVDENEQTVVRRQIRRSEMGKFFKRLAPTRIGLEACGASHYWARLLRELGHEVVLLPPQYIKPYVKRGKNDANDAEAICEAMTRPGMRFVPIKSAESQAELMLPGVRDLLIKQRTAVINTIRGYAAEFGVIAPKGPAKVAELLQQAHSEEANVPALALDMLKLLGAQLDALDVKLKLLETRLMALHRENPLSQCLASQPGIGPLGAVSFALRVTDPKSFHSGRHFAAWLGLTPKDNSSGGRRRQGRISRQGNEALRKLVVLGATAVIRFAKPGHGSPWLLNLLARKPKKLAAIALANKMARTLWAMMVSGELYRRPLPA

SEQ ID NO: 450340 - protein, 352 aa, unidentified
MEKSNKLDFGGQHIYVGMDVHKKSWSVSIHAEQLEHKTFTQPPEIEKLTYYLQRTFPGATYHTVYEAGFSGFWLHDKLREKGIDCKVVHPADVPTKDKERAGKTDWVDCRKLARGLRNGEIKGIYVLSRVKVEDRSLVRTRQSMVRQQTRCKNQITSILFFYGIVIPEDGRWSRRFIHWIESIRMERASGDLALKAHLEELKHLRQIIANLNRAILSLSRTEEYRADVLLLKSVPGISTLTAMILLTELADVSRFSSLDKLASYAGLVPDIRSSGETEYATGITFRRNAALRALLIESSWIAVRKDPALTMVFNKLSARMKKTKAVVHIARKLLNRIRFVLKNRQKYVPAVV

SEQ ID NO: 450341 - protein, 342 aa, unidentified
MAIVAGFDVHRAQITFDALDTDTGEVTRGRIDAVPAAVTRWTERFEGREIDVAVEACTGWLFVCDALVAAGAVPHLAEPVETRALRGRKRRTKTDREDARWLRELLADGRLPEAWIPPEHVRRWRSRARLRHTLIDERTQWMQRIQAALFHHGVSGTPEKLRTATGRAFLDRLPLPDDARERIEVALAMVDAIDAQIVPLERELRRLARRQTGCKALMGLYGMGELTSLVTLCELGDVGRLSASRKAVRMAGIDIGVHRSDRRSRVGKLNRQGSPQLRWALYEAALAACRPSSPDHADYLALKARGLSHTRASLTIARKLARRSFHVLRELGPAALEPTPTR

SEQ ID NO: 450342 - protein, 333 aa, unidentified
MNTTAITHTLGIDVSKRTLDGCLLDNRTGSLLWEGSLPNDSFAIPPLMDALHRVSASPESVLCVMEATGRYSEQLAALLRRCGFRAAIVNPSQIKHFGRSLNVRTKTDKADARIIARYGRERSPVPTRPLNDLEMELRDLTRELSAQVDDRSRLRLRRSEAQSPWLDSQLKEQIRELDVRIAAIEARALALCKADAAMARNLDLLCTIPGIQVRTALRVLSEIAGKDFQSARQMAAYAGVTPSDHLSGSSVRGRARISKIGNARLRKALYMSAHVARRYCQPLRDWADDLIGRGKAKKAVIIAVMRRLLHIAFGILKHQTPFDPNRAAIRYTP

SEQ ID NO: 450343 - protein, 346 aa, unidentified
MMIIGCDFHPSWQQVCWLDTETGESGEQMLVQANGDAERFYRQVPAPALIGMEATGNCHWLVDLLAEVGHELWVGDAAQIRASYVRQQKTDKRDAAHILKLLVEGRFPRIWMPSSEVRDLRQLLLHRYKLVMIRARVKNELQHLCLNQGVQRKRKLWSQAGQQILRELPLKPWAGRRRDDLLKLMAMLDQQIGPLEEAVKAEAQGDKMARLLQTQPGVGPITALAYVLTMGDVGRFARGKQVASYLGLIPREHSSGGRQKLGAITKQGNRMLRMLLVEAAQIAVRHDPQFRREYLHRCHQKPKAVAKVAAARKLAVRLYWMLRTQVAYPEIVRIESSPRVPLVGAS

SEQ ID NO: 450344 - protein, 366 aa, unidentified
MKKTSTVRVNGNMIFKGHKLTIGVDLGDRWSNYCVLDEADEILLEQKAATTPEAMKQTFERMPRSLMAMETGTHSPWASRLLRELGHEVLVAHAQKVELISKSKRKDDRHDARTLARLARIDPELLGPVRHRSAKAQIHLTVIRARAELVSVRTALVNAARGLAKSYGERLRKCGTEQVSRELAAELSAELREVLEPLLKEIESLNERIKEYDARMDKIARESYPQVALLKQVKGVGTQIALTYVLTLDDPHRFPKSREVGCFLGLRPGRRDSGESQPQMHISKEGDPYLRTMLVQGAHYILGPFGEDSDLRRWGRRLAERGGKNAKKRAVVAVARKLAVLLHRLWVSGEVYEPLRNSQKAMRAVA

SEQ ID NO: 450345 - protein, 346 aa, unidentified
MVIVEGRRAVTGGVDTHLDVHVAAALDEIGGLLGVESFEASRAGNDKLLGWLGSFGPVTRVGVEGTGSYGAGLARLLRTAGVEVVEVDRPNRQARRRQGKSDPADAVEAARAAQSGRAFGAAKTRDGNVEAMRALVVAKRSARSTKNTTLNQIRHLGFTAPDELRERLKGLSRHQLAGEAAALRPRPGGDPVIVATKTALRTLGRRVLALDEEKAALDELLADLVAATAPGLLGLHGVGVDTAATLLVTAGDNPQRLRSEAAWAHLCGVAPIEASSGKVTRYRLNRGGDRQANSALWAIVITRMRSDPRTRAYVARRLEEGRSKPEIIRVLKRYVAREVYRHLPRG

SEQ ID NO: 450346 - protein, 340 aa, unidentified
MEELYVGMDLHSRNTYTGIMTKDFKRVFGKRLTNDLPVILDALEPFRNEIQGIVVESTYNWYWLVDGLMDSGYDCLHLANPSAIKQYEGLKHVDDKSDSFWLAHLLSLGILPEGYIYPKEERPVRDLLRKRSFLVKQRTAHIHSLKSMIERNTGKRISARELTGPKRIDMGRLLKEEYLILSAEASRSNIEFLTSHIKIIEKAVKKKIKIKKGFEFLQTVPGIGDILGLTIMLEVGDINRFPRVGDFSSYCRCVSSKWTTNGKSKGKGNTKNGNKYLAWAFVEAAHFAQRFSPKIKKYYQRKSAKRNEIVGRKAIANKLARASYYIMRDKVPFREEALFC

SEQ ID NO: 450347 - protein, 342 aa, unidentified
MNYYVGIDVSLEASSLCVVDGDGKIIREDKVASEPEALITWLRALKLDLARIGLEAGPLSQWLYAALRQAGFAVELLETRHLHNAIKTMPIKSDRNDARSIAQLLRLGWFRPVHCKSMEAQERRAILTARKLLQSKLQDVEFSVRGILRGFGLKVGKTTPARFAGRVKELVAGHPHLEAIIESLLAARLAMLREFNRLEKQVRNMARTDSRARLLMSIPGVGAIVSLTFASAIDDPSRFTSSKQVGAYFGLTPTKYQSGETDIDGRISKIGDASVRANLYESAHIILTKPLKGCKALKSWAMRLARRAGTKKAKVALARKLAVIMHRMLIDGMCFRDAAAKA

SEQ ID NO: 450348 - protein, 409 aa, unidentified
MEVVHARCAGLDVHKKSVYGCVICFEANGEKRQEKRSFGTVTADLLSLADWLRQHEVTHVVMEATGVYWRPVWAILEGQFELMLVNPHHVKAIPGRKTDAKDCEWIAELLQHGLVRGSFVPPTDIQDLRDLTRYRVELTQAQNRVANRIQKLLEQANVKLSSVASDTLGVSGQRMIEAMIAGEQDPERLADLAQRRLRHRIPELQLALQGRVRDHHRFLLKEFLEEWRALGTRIQRIEEEIDRRIVPFEEAVALWQSIPGMDHVTACNLVAELGVNMGQFPSAQHLASWAGLCPGNNESAGKRRSGATRDGNKWLRRTLCQAAWAVTRKKDCYLAAQFRRLAARRGIKRAVMAVAHTMLIIAYTMLKTGRSYHELGGNYLEQINKDQLQRYFVKRLQKLGLTVTVEPAA

SEQ ID NO: 450349 - protein, 366 aa, unidentified
MDAIYIGVDFHARQQTTCYLKTETGELVISELKHQDKEQVRAFYQQFPSPVIVGLEASGYSPWFEALLEQLGCEVWLGHATEIRRRARWRQKNDRRDAELIWDLMVHDEFPRLHRPAATSREVLRMLRYRQKLIKLRTMAKNSLQAIALQAGLAKGKQLFTAAGQEEFKRAALSPVLQWQREHWFALLRPLNQQLLETMVWFKAQSKDDLRIQRLRTHPGIGLLTALCLLHTLQPVERFRNPRKVAAYAGFDPVERSSAERQHFLGISKAGSRLLRYLLVEAVQTAVRYDEDLKRFYKRVAERRGRPKAKVAAARKLLIRAYIMMRDEIDYAEFRHRAVAVRLARGGQGPINVPAVLIGQPASPGA

SEQ ID NO: 450350 - protein, 364 aa, unidentified
MMDSTTTSATATGLILAIDLGKFNSVACRYDAATNAHAFQTIATSPAAVHDLLIDANPQLLVIEACGVCGWISDLAESLSIEVRVANTLGEAWRWKRVKRKTDRDDALKLAKLAATDQLPVVHIPKLAVRQHRALIRHRHALIDRRTGIKNTIRSLLDAQGLSMPTRSRGWTLASIAELKTLARPLSQCDDNTLWRGQLDLELRLLEMVSALIKEADKKLDAIASRDERVTRLRTIPQVGTRLAELVVSTLDDARRFKTARQVSAYAGLVPKQYQSGQMNRLGRITGQGPGLLRRVLVQVAWGLQRRTETRGHAVFERLCHGQRTRRKQAAVALARKILIWCWALLRDGSTWDETRDRRPLAVT

SEQ ID NO: 450351 - protein, 322 aa, unidentified
MSMAFLGIDIAKQKFDVALLLEGKTKHKACKNSAEGFETLRLWLEKQGIQKVHACLEATGNYGEDLAIYLHEAGHIVSIVNPARIKGFGQSELIRTKTDKIDAALIARFCLAMTPGPWSPPSSEIRALRALVRRVDSLVDMRSQEKNRISTAHESVYLLIKEHIAYLDQEIKKIRQQIADLIGQNPDLKQKKDLLDSIPALGKVTIPAILAELDDLNKFNHVSELVAFIGLAPKETLSGSSIKGKPRLCKIGHARLRKALYMPALVSIQCNPVMIAFYNRLKDKGKNGKVIVCAIMRKLVHVIFGVLKSGKKYDPNFKPVAA

SEQ ID NO: 450352 - protein, 394 aa, unidentified
MDDAGSKLGEKIFKHGGEGLAEMAAWLMATSGAGDPGQIHVAIEVPHGPVVETLIERRFNVYAINPKQMDRFRDRFTLAGAKDDSRDAETMASARRTDPHCFRPLAAMDPIVIELREWSRIAEDLGAERIRLTNRLREQLWRYFPAMLELESNLAAPWLLDLWEAVPTPDRVGRVSETTVARVLKQNRIRRLDAGQVLKVLRQEPVVVADGTTAAAQAHVTMLIARIRLLHQQIGDAHRRLDRLTAELAGSQEGEPGQVKQHDAEILASLPGVGRIVLATLLAEAWEALQRRDYAALRSLTGVAPVTKRSGKSLIVIRRQACHPRLANAVYHWARVAVQRDRTSRAKYAALRARGHSHGRALRSVADRLLNVACAMLKTGTTFNPALATEKAPC

SEQ ID NO: 450353 - protein, 347 aa, unidentified
MKILALDLGKYKTVGCDYERESGAHRFQARITTPAALAELVKEVKPDRVVIEVCNIAGWVSDLMRGLGVEVQVANTSDDAWRWRKVKKKNDRSDALKLARLSAVNQLGEVHIPMIEVRQWRALIAFRQQLVKRRGRVKNHIRDLLISEGQMLPRGARCWTQIGVAHLETLARPLSEVGINELWRGQLDIELRQLREVQQEIDVAEEKLNVIATADPRVALLRTIPGVGPRLSEAIVALLDRPERFQKAREVSAYIGMVPKQFDSGESERAGHITRHGSRVVRSLLVEVAWAGLRYNPWVRETYQRISGGKKSRKKIAIVAVGRRLLVRCWAMLRDGTSWRPPQAQTA

SEQ ID NO: 450354 - protein, 344 aa, unidentified
MHITSVGIDLGKNTFHLVALGERNKVLVRKKFSRSQLLAYTANLPSSLIGLEACAGAHFVGAALREQGHQVRLIPAQFVKPYRKSNKNDLLDAEAIAEAVTKQNMRFAQIKTLEQLDIQAMHRVRDRLVQRRTALINEIRGFLLERGITFAVRPIHLYKNLPTVIEDAEQNLNPRMRWLLQRLWQEWKQLDRDIETITDEIERISDEDVLCRRLRQIPGFGPLVSTATVAAIGNGAAFRRGRDFAAWVGVVPRQYSTGGKQKLFGISKRGNVYLRRMLIHGARAVLFRIKYNTGGFGQWVQRLTQRAPHNKIVVAIANKLARIAWAVLSSGKDYRHQPLAATAG

SEQ ID NO: 450355 - protein, 388 aa, unidentified
MNFEADKSEPLTAVHTDLGAIFVSLELSRSSWLITSLSPGGGEKMSKHSVPGGDFAGLMERFARLQEKARLRTGQSFRIIVVQEAGLDGFWIHRALQNEGIESHVVDAASIATSRRRRRAKTDKIDGETLVRALLAYKRGEPRVCAMIKVPTPGEEDRRHLCRERKALTAERVRHVNRIKGFLYSQGVSGYQPLRRDRRQRLEELQTGDGRAFPQHLKALVNRELDRLELLLKQIKTVEVARDALLAVEQTAKPATAAMLLDIRGIGPEFAAILWSEGLFRHFENRRQIAAYAGLAPTPWQSGAVDREQGVSKAGNPRLRTTLIQLAWLWLRNQPRSALSVWFHERVSRNGGRLRKTTIVALARKLLVALWKYVTTGVVIEGATMKAA

SEQ ID NO: 450356 - protein, 345 aa, unidentified
MELHTIGIDLGKTVFHLVGLDLRGEVVVRKKFSRTQLLRFTANVHVGLIGMEACGGSHFLGRALREQRHEVRLIPAQYVKPYVKTNKSDYIDAEAIAEAVARPTMRFVPIKTDDQLDLQSLHRVRERWVMRRTAVINQIRGLLLERGITLRKGRHHVDAALPLILEDADAKLSGAVRMLLAQLKLDLDQLAVRIDEADAVIKKTAHENEACRRLVAIPGIGPVTATALIAAIGNGGAFHKGREFAAWMGVVPREHSTGGKQKLLGISKRGNSYLRRLFVQGARAVLQQRTKQSSGLSTWLAQLTSRTHRNVAAVALANKLARIAWAVLAKNEQYRPSVVADVAAA

SEQ ID NO: 450357 - protein, 250 aa, unidentified
MQSYGIDLAKEKFDVSFFDLTSKKVSNQPSHKVVKNNLKSIGRFLETLPSDAVLVAEHTGVYGDTLLKCCMDCNVKIAFVGGYVIHRYRATPDRAKTDVLDCALLREFGERYPDKLKYKTFPEEALYELRQLARHREMLVEQRKQLITADKSEDCRPVRSLVVKRSMDRIKEMLDTEIAETEKEMLKVINGHDSIHHNYELVKSVDGVGLITAVELLVKTENFTKITTARQYSAYAGTAPYEKSSGKMDK

SEQ ID NO: 450358 - protein, 335 aa, unidentified
MQVYGIDLSKEKFDVNFIDAKGKEKNRVVKNAVVSISRFLSFVSEDSILCAEHTGVYGDILVYLCNQMNISIALVPGYTIKHSLGLLKGKSDPLDSKRIREYGERFSDKLEYAEYAEENIAEIKQLYTLRNQLVKQRRALRTVDTGRGHLPMQSISVHNHIHAVFSSLDNEITSIEDEIEALIKANQDLNENYELAKSVFGIGPVIATDLLIKTGNFKTIDTHRKAASYAGVCPFPNRSGKMVGKSKTSPHADKKLKSLLYMGAKAVVKNNKEFRLYYQKKQLEGKPHYVIMNNVSNKLLRIVFSVVRNKTPYTSDHVCLDPREKNNNSSTKKVA

SEQ ID NO: 450359 - protein, 339 aa, unidentified
MNEVTLIGIDLGKHSFHLHAQDAAGRMVFRKKLSRQQLLRTLANVPSCRVVMEACAGSHWLARQLAGMGHEPRLISPQFVRPFVAGNKNDFGDAQAICEAACRPSMRFVSPRNEAQQTVSAMHRLRERLVRERTATVNQIHGFLLEFGISLPRGAALMSRLPTVLDHETLPPRLVGLVVRLRAQVHYLEEQLRQVEQDLKAALREDDKSRRLLEIPGIGPITASALAVELGDARQFANARQFAASIGLVPRQYSTGGKPTLLGISKRGDRNLRRLLVQCARAVMQHTASRTDALSLWVKTLSTRRHSNVVACALANKLARIAWAVLARGTHYQARALTT

SEQ ID NO: 450360 - protein, 338 aa, unidentified
MQKVSIIGLDIAKNTFHAHGAGADGSVLLRKALPRSRVLEFLARIAPCAIAMEACSGAHYWGRKIRALGREVRLLAPRYVKPYVKRQKNDAADAEAIAEAASRPSMRFVAVKSAEQQGQAMVLKTRDLLAGQKTQTINALRGHMAEHGIIAPKGTQHLVRLQEALEMNGSGLPAPVVALCDLLLDQIRHLTDRIDGLTIQIRQAVRDNEIAQRLSMIPGVGPITAMTLATLAPPAEMFRKGRDFAAWAGLTPRQHSTGGKTRLGRTSKMGQKDIRRLLIIGAMSVIQGAGRRGGAPAGTWLARMLSRKPKMLVAVALANKMARICERLPLTVNVRSGP

SEQ ID NO: 450361 - protein, 396 aa, unidentified
MRNDVTIYVGIDFSKEKFNACLLMEQGVMGESEFPNSKTGYLKLTKWVKNTSELGRSFDSSLVLFCGEHTGTCSIGLCEYLYAKGMKIWLESALKIKYGSGLKRIKDDKADAEMIAYYAKRFYEPGSCALFEPDSADLKTLRTLYQFRNRVVCDRVAIGNRISSGAFDCSTLVRNRMVKHHKEAQKDEKDIEKEMVKLMETSEELASNYQILISFKGIGPITAAALIIYTSNFKKFDNPRKFACYCGIAPFGKQSGTSINTKPHVSRFAHIGIKAAMVQACKSAMQHNAVIKAYAQRLYAKGKHEGIVMNNVKNKVMHIIFKMIQTQTLWEQEYQQKHTKECKPIQGKNGIGATEAAPIINATLKTSSSVVECTFLEKHSFQKNSKKTSSFSCVET

SEQ ID NO: 450362 - protein, 343 aa, unidentified
MDHFSGLDVSVKETSLCIVDDAGRIVREVRVASEPEALLGVLTDPAWHFKRIGLEAGPLSQWLFNALAEAGLPVICVETRHMRAVLKAQINKTDRNDARGIAQMMRAGLYRPVHVKTLGSQKLRMLLTHRKLLQSKAVAIENDLRATLRNFGLKVGVVGAAKFEARIKELVENLPDLALLVEPLLVVRRVLREQIGILHRRLLAVVRDDDVCRRLMTVPGVGPVVALTYRATVDVPSRFRNSKAVGAVFGLTPSKHQSGESDRTGGISRCGDEMVRTMLYEAAHILLVRSTKWSWLKAWAMQIARRRGMKKAIVALARWLAVILHRIWIDGTEFRWTREAVAA

SEQ ID NO: 450363 - protein, 343 aa, unidentified
MEVYVGLDVSLKETSICVVDGSGTVVSEGTVLSEPSALGEFLRNKAGSAKRIGLETGPTSTWLWHELKALGFPVICIDARHAKAALSLQINKSDRHDALGLARIMQCGWYKEVQVKSLPCHEVRAVLNSRAQLVKTRCDLENQIRGLLKNHGLVIAKASGQTFRRRAEELLGEYQLLREAVRPLLAVHEVVRREIAGLTRKLIAMARNNRESRRLMTVPGIGPINALAFCAAIDEPGRFRRSRSVGAYFGLTPRRYASGEVDWTGRISKCGDAMVRTYLFEAAGVLLTRVPKWCGLKAWGHRLWKRIGFKKAKIAVARKLAVVLHRMWRDGTDFIWSTKEAAA

SEQ ID NO: 450364 - protein, 313 aa, unidentified
MNQKEQECFVGIDIAKSELVVAVRPTGAIQSFPNAQDGLSDLVEWLGPLCPTLVVMEATGGFSRAAVNALAMANLPVVAVNPRQVRDFARSVGLLAKTDAIDAHVIARFAEAVRPEERPLKDLDTQKLEELNTRRRQIVEMLTAEKNRLSAARGWAFKDIQAHIAWLEKRLENVNRELDDFITKSPLWRRKQTILTSFLGVGPVVTATLLCGLPELGTLSGRKISALVGVAPFNRDSGKYRGRRSCWGGRARVRAALYMAALTAIRHNPVIRVFYQRLREAGKPFKVAIVACMRKILVTLNAMLKNNTCWNET

SEQ ID NO: 450365 - protein, 424 aa, unidentified
MKVTYQTCCGVDVHKSFLVATIVKTTGGIEPSYQKKRFSTFNNSILEFKQWLLDNDCHDVCMESTGKYWVPVFNLLEDDIHVVIANPKWVKAVKGNKDDTKDSKWIGDLFRLGLVKGSYIPCKKVRILREYTRYRYKLVSCRSSEKNRYQNALTVCNVALDSVVSDIFGKSSTSIIDYLLEQSGTSINHEEIASKLLRSLKSKEDAVIESVEGYQMTDAQKYRMRLVRAHMDYITAEINDVDKMIQNMISSNPDFENAVQFLCTIPGVKRDSAITIISEIGTDMSQFSSSKRLCCWAGLTPGSNESAGKKKSVRITRAGIYLKPALVQCAHAAVKSDKSPYYKKKYDSLVKRRGKKRAIIAIARMILTAIYQMLSTGEQWNPSDLYKIDMPVALVEKQKAKAIKQAKKLLQQEGLLPPDEPLAS

SEQ ID NO: 450366 - protein, 339 aa, unidentified
MYCMGIDHHKQYSFITVLDEGGDIVKRGKVNNMSLDLEKFLIGMEEMKAVVEAGRSSYTMVDVLEGLGVDVVMAHPRDVKAIAKAKIKTDKRDSHILAHLLRTGMIPEVYRRSRENRSYQRVLRQRVFYVGNLTRVKNRIRALLAQQGEEIRVEVLRVKNIFGREGLVVLKGLRFPEGDKQLIGGLIKTFEHLEKRIRESHALVERLSRQLPEARLIQTVPGFGVFLSVLVAVEIADIGRFEDEGKLHCYAGVIPSTHSSGERTYHGRIIREGNRWLRWAAVEAVWPAIRADYDLRLHYQRRKKRKGANMAKVATARRLLTIIYRMLKENRAYIPYRKQ

SEQ ID NO: 450367 - protein, 446 aa, unidentified
MNYYLGGDVSKGYCDFIILDKSKKVIEQGFQLDDTKESHTILYNILASLLKKESSSVIYAAIESTGSYENNWVKSIQKFQLTLNIHIARLNPYGVSHSSKANMERIITDQISARTVAEYLINYQPKIRFIEEDNFSTLRRQWKYISLLKKQKVQFYGQLESLVYNSFPEILTFCKNGFPNWVLELLLNYPTAERVSRARVKTLSKMPYITNEKAEILISKAQRSVASENNSTIEGIIKSIIEQIIGLDKTIASQKKMMTNSVSKENLPEVQLLTSFKGIGDYSAIGLIIEIGSVDRFATSKQLASYFGLHPVFKKSGDGTYAMRMSKKGRTSPREILFNVAFTAIRDNELIKEIYARHLKKGMSKMAAIGAIMHKILRIVYGMLKNNESYNPEKDRNDTKVVHELGQKKTDNTRRHQDYDIYAPISSRQSRKRTMIKKELELNVPK

SEQ ID NO: 450368 - protein, 450 aa, unidentified
MAGRKRKMAMKVPNPLDLPIINPHAAGVDVGSEKFFVSVAGQEPRVFLTVTSQMQEVCEYLKAEGVQTVAMEATGVYWINLHGALEEAGLQVKVVNGAHCRNFPGRKTDMQDCQWIAVLHAHDLLSGGFVPPSAIRRLRDYMRLRGDLVSMAAQHVQHMQKALDRLNVKIHVVISDITGWSGMRIIKAILAGERDAEKLVTLCDPQILKTKKAPMIEALRGLWRQEHLFALRLAVESYESYQQQISQCDAQIAEVIKELSEGRATPPLSPPKELRHNAIILEGLQQQVAQIYSKDLTRLPCINESTAALLLSEIGNDMSQWPDWRHFGSWLALAPCSAQSGGKRRRVKRYLTRAGQILCRAVQCMAVGKHTWLASFYRRIRAKRGAKVAIKATAYKLAKLIFLVLTKGWEYVEQGIAKYEERIRQMRLKALQKLAKELDFVLLPKNMANS

SEQ ID NO: 450369 - protein, 357 aa, unidentified
MTSMTRIGGPVTGGVDTHGQTHHAAVIDSVGRQLGDREFPTTPAGYRQLSTWLRGHGELDRVGVEGTGAYGAALARHLHSEAITVVEVDRPDRKARRAHGKSDPLDAYAAARAALSGAATGTPKQRDGQVEAIRALRVARRSAVKARTQAMNQLRALLLTGPAGLREQLRHLSPTVLITTCAALRPSVDLADPEQAVKTALRRLARRHQRLGEEIADADADLHVLVTSAAPELLALQGVGIDVAGQLLTTAGDNPDRLQSEASFAHLCGVAPIPASSGRTHRHRLNRGGDRAANHALHTVVLCRLRYDPRTRIYVERRTNEGLSKTEIIRCLKRYVIREIYAALPATPHNNDLGLAA

SEQ ID NO: 450370 - protein, 381 aa, unidentified
MTTAVAHKTNVHTTEATLFVAFELSEKTWKLGFTMGHGQKPRERNVTARHQERVLDEISLAKHRLGLPETAPVVSCYEAGREGFWLHRFLLAHGITNHVVDSSAIEVSRRQRRAKSDGLDVRKLLSMLIRYEQGEHQVWQVVKVPSAEAEDQRHLHRDLETLKRERASTTTRIQGLLSSQGIQVSTLAKLPEQLDTLRLWDGTPIPPGLRRRVLRVYAHHTFLNEQIAAIEAERRAQLQTSSEASIDQIRQLMMLKGIGINGSWLLVMEFFGWRAFKNRREVGGLAGLTPTPYQSGESAREQGITKSGNPHVRWMITELAWSWVRFQPESALSVWFRERFGDGGKRLRRIGIVAVSRKLLIALWRFLETGVLPEGAVLKEG

SEQ ID NO: 450371 - protein, 370 aa, unidentified
MSATRMPCGYVNVKWVGLDVAKDAIAVSVLDGSSEATPRLEKIAHDEVSIRRVVSRLGEPARLRACYEAGPTGYELYRLLMSMGVGCEVVAPSLVPVARGDKVKTDRRDARRLVRLYRAGELVTVRVPTREEEGCRDLCRLRGSAMVDRRRARQRLGSFLLRRHLVYRDGTPWTLKHRRWLRSLAFDDTSAQATFAHLLASVEERELRVVAIEADLAGFFERGLFVDEVARLAAYRGIAPLSALGLACEVCDWRRFPAPARFMGFVGLVPCEYSTGASTSRYGITKSGNAHVRNILVEAAWAYQYPARVNPELHRRHQGLAPEVVARAWAAQIRLCGRFRRLAARKDRRTVVATAVARELAGFVWAEMTA

SEQ ID NO: 450372 - protein, 341 aa, unidentified
MNVKTIGIDLAKNVFQIHGVDEHGKRLFNKQLRRAQMASFFANIPPCLIGMEACASAHFWANKLISMGHNVKLMAPQFVKPYVKTNKHDAADAEAICEAVTRPNMRFVPVKTAEQQAVLALHRSRQSFIKQRTAQANQIRGLLAEFGIVVPRGIQQLQRRLPELVEDADNPLPVLFRTQLSLLQHHMAYLFDVIATLDKQIEQCYRQNALCQRIGKIPGIGPVTASALIATIGKANNFENGRQLAAWLGLVPRQHSSGGKQVLLGISKRGDTYLRTLLIHGARAVLQSAEHKQDAVSSWANQLMARRNNNIASVALANKNARTVWALLAKEREYCAPIISA

SEQ ID NO: 450373 - protein, 374 aa, unidentified
MLSIGIDVSKGKSTVCGMKPGGEIVYAPFEVQHTREGMSELVLLLHNSGEEVRAVLESTGSYHCPVVAALLENGIFVSVVNSLRMKRFCSQSIRKVKTDRIDAMQIALYGLAYWQELQPTKLPEDTYRELQLLARQYYQMTSLLIKAKVDFNAICDQVLPGMQELMNDHAGRHKLSDFVLRYRHTTHILEMGETRFRKDYCKWAEKKGYRNCERMAVLIFATAQNGIPVLPNAPSTQIVITEAIRVLHTVEASRDAILTQMQALAKTLPEYSLVREMPCIGDTLAPRLIAEIGDVRRFHSKRALIAYAGIDAPPYQSGKFCANNRHISKRGNRYLRKTGYEVMQSYVMHKPANDPIFTFIEKKRGEGNSPWWQA

SEQ ID NO: 450374 - protein, 464 aa, unidentified
MTAHKILWRNRKERKEWARRLQSEDPGLEVVHPHAAGIDVGNSAHYVAVRPDRDAEPVRRFECFTADLHRLADWLQSCGVKTVAMQSTGVYWIPLYEILEERGFEVYLVNARHTKNLPGRKSDVQESQWLLKLHTYGLLSNSFHPPAEIRVLRTYWRQRGEHVAGGATCILRMQKALTQMNVQLANVISDISGLTGQTIIRTIVAGERDPLTLAALSDPRVHASQEEIAKSLEGNWRPELLFVLQQEVDMYDIYQKRITECDQRLQEHLASLTHSLPVQLPTQKAKTKKPAAKNAPRFDLSSELQRVTGVDLTRIDGIDVMIAQTLLSEVGLDMSRWKTESHFASWLGLCPDNRISGDKVLSRGTRRVVNRAATALRQAANTLLRSRSYLGAQYRRLRTKLGAPKAITAMAHRLARLVYRMLKYGQAYVDKGTEYYEERFRQQQIQLLRKRAAKLGLQVAEIHA

SEQ ID NO: 450375 - protein, 416 aa, unidentified
MDVIVARCAGLDVHKNTVMACVRAPGPDGGRISTVRRFGTFTDALRQLRAWLVAEGVTQVAMEATGVYWKPVWHVLEAVPEFELLLANAHAVKNMPGRKTDVADAEWLALLCECGLLRPSFVPPPVIAELRDLTRYRKKLIEERSRETQRVQKLLEDAGIKLDSVVSDILGVSARQMLEALIAGVRDVEALAELAQTRMRPKIPQLRRALEGRFGAHHALMLQMHLDHVDQLSAAITRLDVEVDRVIRPFSAQLQRLITIPGVGRRTAEVIIAEVGVDMRRFATAGHLASWAGMCPGNHESGGKRRSGRARKGNQALRAALCEAAWAAAHGKTGYLPAQYRHLMRTFGKKGQTRAVFAVGHSILVIAWHLLANDCDYTDLGAEHFTRNADPEARKHYLIRQLEALGHKVTVEPAAA

SEQ ID NO: 450376 - protein, 344 aa, unidentified
MNSIKVVGIDLAKSVFQVCVWMSDGTVASNRKIPRNKLLDTLRQFPANTLIAMEACATSHYWGRTFKSIGLLVRLIPTQHVKALTRHQKNDANDALAICEAALRPGIHFVTIKTVGQQDIKALRSARQLMVEQRTAVANQARALAAEQGIELPVGIHILSQRLPELIEDPALDISPVLRGLLFSLLENLHLLDERIRSTEHNILALCQQLPKYKVLMTIPGVGPLIAAAFLSEVNAEQFTNGRQLSSWCGLVPRQRSSGGKNNLSSMTKNGNRDLRTLIIHGARSVMFWSQKRDDALGSWMKHLIERRGKMKATVALANKLTRIIWRLLTGSENFNINKAFATN

SEQ ID NO: 450377 - protein, 347 aa, unidentified
MRFYTRQHRHYCGVDLHARSMYVCVLDRDGNVLVSKNIASAPEPFLELIAPYREDLAVAAECMFTWYWLADLCAREAIVFVLGHALYMRAIHGGKAKNDRIDAHKIAGLLRGGMLPQAYVYPQAMRATRDLMRRRNYLMRQRAELLAHITNTNHQYNLPAFGVRPARPAERSGLAEHFAEVPVRKSIEVDLSVIEHYDRELPALERYLESNAQAHDPLALAIVRTVHGMGKVLGLSILYEIQDIGRFARVQQFLSYGRLVKPTKESGGKILGHSGRKIGNAHLKWAFSEAAVCFLRANKPAQALRARLMAKHGKGKSLAIIAAKLARAVYFMLKRGEPFDAERFFAH

SEQ ID NO: 450378 - protein, 301 aa, unidentified
MTIVGCDLHTRKQQVAVLHTDTGEVVEQELLHSGDAVEQFYRALPCPVTVGIESTGYALWFHELMQRLGHTLLVGEAAKIRAMVVRKTKTDRRDAQHRLDLLKHERFPAVWIPDPATRDLRALVTHRVRLVRIRTMVKNGLQALALNRRLALGSKLWSQRGRAQLTALDLPRHTAQRREDSLELLTWLETHIDGLDARIVDAARAHPGARLLLTHPGVGALTALTTVLVLGPTARFPGSKHVVSYVGLAPAVRASADTCHLGQITKQGSALLRWVLGQAAPLAAREDSGPRAAVPVRAFSE

SEQ ID NO: 450379 - protein, 342 aa, unidentified
MTKVAIAAIDLGKHSFHLHAQDDRGHELCRKKFNRVTLIRYLANLESCTVVMEACGGAHFMAQEVAKLGHTPKLIAPHLVRPYVKSNKNDFADAEAICEAATRPTMRFVPPKTQAQQALAMSNSLRESFIKDRTATVNRIHAALLEVGVSLAAGFKAIKELPALLEVSSFSERIKKNLMVLHGHFNYLDGQVKAQDKDMECQAAEDDLATRLMTMPCIGPITSTVLAAELGDGKQFKCGRGYAASIGLVPKQHSTGGKTVLLGISKRGDRNQRRLLIQCARVYLIQLERQKGALADWVRQLLASHHHSNLVVCALANKLARIAWAIAAHHTEFDAGPSVMNA

SEQ ID NO: 450380 - protein, 385 aa, unidentified
MQKHHDDSKACLTAFVQDNTAIAVIEMSLASWVVAGLIPGVNREPLKKIAADPEELLRLLYRWRDQAIKAGKDITRIAVAYETGRDSFWLARWLRDRGIDAHVIHATSVAISREHRRAKTDRIDTAMLRRGFLGWLRGERGHCSMAVVPTIAEEDAKRPHRERESLLKERTSTINRMKAILAQFGVRNFKPSLRKAAEKIDAVRTPEGVPLPPNAAAALRRQIERFRLINEQIKTVEKTRMQRLRQNPTGKYNTMVFLLVRIIGLGVETAEQLVHEMLSRNLRDRKAVARYAGVTGSPDESGASRREKGLSRSGNGRVRRILIQLSWRMLQFQPDSRLARWFKNRTANSQRSRKPMIVALARKLIIALWRYVNTGVVPDGFKLAK

SEQ ID NO: 450381 - protein, 343 aa, unidentified
MEHYAGIDVSLERSSVCVVDATGKIVREAKVASEPEALVRFFRELGLPLARVGLEAGPLSQWLHAGLTGAGFEAVLLETRHVKAALSAMVVKTDRKDARGIAQLLRMGWYRPVHRKSPPAQEVRALLVGRKLLQGKLVDVELGIRGLLRGFGLKLGDVSKGRFAARVRELVAGQPMLERVAEPMLEAREALRREFHVLHRAVLAIVREDAVCRRLMTVPGVGALVAVTFASAVDDPARFRRSRSVGAHFGLTPKRYQSGETDVSGGISKAGDAMVRAALYEAANVMLTRSGRFSTLKRWGLEVAKRRGVRRAKVAVARKLSTVLHRLWVDGSEFRFGKEVAAA

SEQ ID NO: 450382 - protein, 332 aa, unidentified
MYYIGMDLHKQDLVMAVEDEQGPVGRPRRIACRDVDAIQAAVARWRPFRAVVEASASYRWLYDLVSSQGEVVLAHPLRLRAIATARAKTDKLDAALLARLLRADLIPEAYVPPARYQRLRDLTRTRARLSYGATLAKNQMHALLARANVHSPFKTPFGKRGRRWLAALDLGLSGNLARDELVRRLEHYGREIATFDAHLEAVASEFPEAEALEVLHGIGRYSALLVVAEIGEPERFRNGRQVGAYAGLTARVHQSGGHEHRGGISKQGSRWLRWILVQAAMKLVRRDERLANFYQRVRKRRGRNVARVAVARKLAGICWVRLRRWQREQAAA

SEQ ID NO: 450383 - protein, 344 aa, unidentified
MIYVGLDISGESLVLHGMNEKKKVVFKEEIPPNQRALRKAMLGLGVETRLVVFEASNQLKWIADCLRKIKGVHIHVVHPNELKWITQSNGKTDKADARKLAELARGNLLPPKVHIAEGVIRELRELISARNTAMRKRVSLTNCLRSYALQEGCSVNAGFLLNPKWPELLPSLKIIENLKVIFTTIMPAVDALKDAEEEFLLRIKDIEDDRLDLVRTIPGIGPLGSATIVSALDNVERFANKKCVAKYGALAPTIYQSGNVTRLGHINFDGRREIRRVLLQSAHIIIRIKSPAAKPLRNFYNRIKARRGKKIATIALCRKLLTIAYGILKTGNPYEPFVLTPNAV

SEQ ID NO: 450384 - protein, 313 aa, unidentified
MAKEVFVGIDISKKQVDVHVLPDNQAFSCSRNQKGLRSLVKFLKEVSPVLIVLEATGGYQNLVAAELGGALLPFCVVNPARIRNFARAIGKLAKTDAIDAYVIARYGEAIKPQPQVLPSQDQIAMKEHLARRRQLVRMCTAEKNHLSTVSTASLKVRIECLLQTIEEEIGAIDNELDGMIKTDPDRFEKDRLLQSVPGVGPNTSRTLLADLPELGTLNRQQIASLVGVAPMNRDSGLMRGKRKITGGRPSVRNILYMATVASLRFNPRIAPFYRRLRESGKPPKVAMVAAMRKLLVMLNAILKSKTPFEEVLA

SEQ ID NO: 450385 - protein, 354 aa, unidentified
MTVYCGVDFHARQQTVCYCDTADGEVKFSELKHNREEIIAFYGSMTGEVIVAIEATGYSRWFEELISGLGHQLLFGNPTLIRRRAPRKQKNDRRDAELILTLLIKGELPIVQPHPAESGEVLRQLRYRHKLVKVRTLAKNSLHNISISAGCSLQKSMLYKGRAKLEALKLPEDLGRQRRQWLETIERQDKLVDEIESWLEKKASGDRLVKFLQTHPGIGLISSMVIRHTLEPVTRFSTTRKVVAYVGLDPVEDSSGERKRFGSISKAGSRLLRFVLGQAGLVACRRDESLGRFYKRIAARRNHQTAKVAVARKLLVRAFIMMRDEIDYAEFIRRGVEARSARKTQRPAVQSSHQ

SEQ ID NO: 450386 - protein, 335 aa, unidentified
MYIHESLVHLHSQSKEIPMYYSGIDLHSDNCYMTTIDDTGAVIKQQRVENISELVLDYFHSLPGPHQAVVESTTGWYWLNDLLQDNGIELVLAHAKYLKAISYAKVKTDKVDSQILAILLRQDLIPRAHKISRELRGLRDTMRIRLRLVQQRTACLLRLNSIRLKFNGSVPDPYRFQLAVLEHTRDTFTSQILALEKSLHPVLIPNDDIQRLLYIPGIGKLSAFTIYLEIDGIERFTSDKHFVSYCRLVPAADNSNRSVHHRSSKDGNKYLKIAFSDAAVHAVQYYPEYKRLFQKLARRSNEPIAYAVVAKELAKIVYYVLKNKTQYKGLKGWKH

SEQ ID NO: 450387 - protein, 343 aa, unidentified
MQITTIGLDLAKSIFQVHGVDAAGQAVVRKSLRRSQMLPFFAKLPPCLVGIEACGTSHHWARELIKLGHEVRLMPPAYVKPYVKRGKTDAADAEAVCEAVTRPTMRFVPVKSPEQQAALSMHRTRDLLVKQRTQLVNMIRGLLAEFGVDIPKGLERALLMARQIVDGKAPEVPTEAVKIVATLSQQALDTHVRLREIDRDLTIWLRGNDVARRLTTIPGIGPVGATALAASVTDPHQFRSGRQFAAWLGLTPLQKSSGGKERLGRITKMGDKYLRKLLVVGMTALVRRTRQNPEGNPRLADLLARKPTRVATVAMANKTARIIWAIMAHGETYHAGHRPALAA

SEQ ID NO: 450388 - protein, 414 aa, unidentified
MNRQQWYAGIDWATESHHVFLTDGSGRKIGEKIFKHSGAGLAEMAAWLMAASQAKEPGHIQIAIEVTHGPVVETLIERGFTVHAINPKQMDRFRDRFTLAGAKDDSRDAEVMASALRTDPRCFRLLAAPDPVIAELREWSRIAEDLSAERNRLTNRFRQQLWRYFPAMLELESDLGAEWFLDLWEAAPTPCKAARIRETAAAKILKRHRIRRFAAGHVVAVLRTAPVQVAAGTVKAACAHTETLIARIRLVNAQIKEAQRHLDALTARLIPTEDSEAGQQKQHDVEILASLPGVGRIVLATLLAEAWDALLRRDYAALRSLTGVAPVTKRSGKSCIVIRRQACHDRLANAMYHWARIAVQYDAKSKAKYTALRGRGHSHGRALRSVADRLLNVACAMLKAGTLFDPSLKTQNAP

SEQ ID NO: 450389 - protein, 354 aa, unidentified
MTASSIRRRSAAWTILLDWTFSVKETSVCIVNDTGRIVREVKVASEPEALLAVLKNPAYHFERIGLEAGPLSQWLFSALAEAELPVVCVETRHMQAVLKAQINKTDRNDARGIAQMIRVGLYRPVHVKTLRSQKLRMLLTHRKLLQSKAIAIENDLRGTLRNFGLKVGMVGKVRFEARIQELVENLPDLAELVEPLLIVRRALREQIVILHRRLLAIVRDDEVCRRLMTTPGVGPVVALTYRATVDVPARFRKSKSVGAVFGLTCSKYQSGEIDRSGSISRCGDEMMRVMLYEAAQSMLRSKKWSWLKAWAMQIARRRGMKKAIVALARRLAVIMHRIWVDGTEFRWTREAAAA

SEQ ID NO: 450390 - protein, 430 aa, unidentified
MWRGDEAAVLAESEDNEEIIARVAALDIGKAELVCCVRLPAPRERRKRLQEVSTHSTMTAPLTELANHLVELGVQRVVMEATSDYWKPVFYLLEAHGLDPWLVNARDVKHLPGRPKTDVIDAVWLCKLAERQMLRPSFVPPRPIRRLRDLTRYRVDLVTARTAEKNRVEKLLEDACIKLSVVASDIFGVSGRAMMAALIAGERDPKVLAQLARKRMRTKIAQLEEAFNGHFGDHHRFLLARMLGRIDSIDADIAAVDEQIEAHLAPFAQAAARLDEIPGIGPTAAAAIIAEIGLDMSRFPTAGHLCSWAKFSPGINSSAGNTKGNGSTGHGNRYLARALGEAAVVAGRTDTFLGERYRRIAKRRAKKRAMVAVGRSILVIVWHLLANDDARFTDLGPDHFTKHLNPDRQKRNHIHQLEALGYTVTLTPAA

SEQ ID NO: 450391 - protein, 401 aa, unidentified
MIDIRDVAVFLGLDVGKGEHHATGLTPDGRSVVDKPLPNSEPKMRAVLDKLTDKYGRVLVVVDQPASIGALPLAVARAAGCEVAYLPGLTMRRIADLYPGEGKTDARDAAIIADAARTMPHTLRSIELHDETIAELHMIVGFDDDLAGEVTRVANRLRGLLTQIHPHLERVLGPRIQHPAVITLLEQFGSPKAIRKAGRRRLITLLRPKAPRMVERLVEDIFIALDEQTVVVTGTDAAAVIVPKLAKNLAALLDQRKELASDIEELLTSHPLSELLTSMPGIGVRTGARILIDVGDASSFPTAGHLAAYAGLAPVTRRSGSSIRGESPSRRGNKHLKRAFFLAAFASLSDPASRAYYERKKAEGKRHKQALLCLARRRVDVLFAMLRDGTFFEPQAAPQAA

SEQ ID NO: 450392 - protein, 419 aa, unidentified
MAKIDTNLTGYVLVAIDISKNRHDILIAAPGKKRRRRVTLMNTFEDYRRLIDLLRDYGCPVKIGFEATGNYHRTLVYQLAMAGFELQLISSVAIARTREALHNSWDKNDPKDAQVILHMLEIGAVQVFYDPLIAQTNDIQELSKTHDIVSQSKTQLWHRILTHYLPLYFPEADRFHRNSRTEWFLAFLEKFPSPHMISALSKEEFISQAWEVVGRKVEKKLLLSDIYETAKDSIGLPIAADSDAIRMFRMVLAEGRSLIRQRDTIEARADELLSNQEDYKLLRSIPGIGPISALTILAEAGDVRRFRHHRQFLKFCGMDLATIQSGMFRGRSKISKYGNARLRRMLWVAAHAAVLKRANSFRDKFERYISKDRHNPDLRRKALTAIAAKMARTVHAVIKSGAPYRPFFEGTSPGGKTSF

SEQ ID NO: 450393 - protein, 408 aa, unidentified
MERYYLGVDWADEFHQVWVSDPEGKKVIEKKVIEDVEGLTEFGRWLDETRAKGIELWAAIEKPHGRIVEFLLDHGVVVYPVNPKALDRARDRFRMSQSKSDSFDAYVLAEFVRTDHGHLRALEPNSDPAQELKLLTRDQYRLVRQKTRLLNQLSRTLKEYYVRPLEIFSDLETNIALDFLQQYPTPQALAKLTRRQWNRFSKREHHLGEDHCKELWEKLNQPQLEVPEHVVRAKARLLAVLVVQLKTLRDAVDSYNERVKSFFACMPAAELVRMLPGAKTGTIVATLWAELGDAKSRWESFRHLQAEAGVVPVTKASGKSRVVQFRFSCNKIMRHAAYWLAFVSLNRSEWANQYYRDQRAKGHSHHQALRALGAKWLKIIFVMWRDHKPYDENIHLANITRQKMRQAA

SEQ ID NO: 450394 - protein, 344 aa, unidentified
MKHYVGLDVSQKVTSVCIVDENGAKQWAGKCPSTPEALAAVIRERAPQVARVGLETGPLCVWHFHGLTALGVPVVCIDARHAKAALQMQVNKTDENDAEGLAQIMRTGWFRAVHVKSFEAQLQRSLLLSRLQMVNMRRDTSNQVRGALKVFGIVLPAGRLSTFDKLAREHIGAREELVAFIEPLLAAWHALGEQIAILDRRIRKIAREHPVVKNLTSVPGVGVLISMAYVATIDDPCRFKKSRNVGAHLGLAPRRFQSGEMDHQGSISKCGDSLLRHYLYEAAGVLLTRTQRWSTLKAWGVRLAQRIGMSKAKIAVARKLAIIMHRMWRTGESFRWGSIKEATA

SEQ ID NO: 450395 - protein, 355 aa, unidentified
MSSEKYIGLDVHQATISVAVVDSQGKVVMESILETKASTLLEFFAGLRGSLFVTFEEGTWAAWLYDLLKPHVTEVLVCNPRKIPLLKHGNKSDKIDARKLAERLRLHDLKPVYHGETGIRILRELARSYLTVVKDLSRVMNRLKALYRSWAIPCAGRDVYYTRHRSQWLEKIPEAGTRRRAEQLYQQLDLLQRLRQQARRELLAESRKHTITAKLRKIPSLGPIRSALAVALIQTPHRFRSKRQLWTYSGLGLETRDSGEYHYVRGQVRRRKKQATIRGLNKDYNHDLKGLFKGAATRASVQPGPFQEFYQRSLAKGIKPTMVRLTLARKIAAITLTLWKKGEDFDIDKLNSQAA

SEQ ID NO: 450396 - protein, 348 aa, unidentified
MKIVGCDFHPSFQQVAILDISTGEVEELKLVHGSGEAERFYRELEAPALIGMESMGNSLWFEQLLEGLGHELWIGDAAQIRASYVRRQKTDRRDAGHILRLLVEKRFPRIWIPSREERDQRQLLLHRHRLVQLRTRLKTELQHLAMNQGLQKKRSLWSVRGRADLEKLSLEGWTARRRLDLLRVLDMVEVQVEELDEAVSTVAAANPGARLLMTQPGVGPITALAFVVTIGDVSRFKRSKQVSSYLGLIPTEHSSGGKRRLGAISKQGNVFLRTMLVEAAQSAVRYDEEFKKEYAHRCHSKAKGVAKVAAARKLAVRLYWMLRTQTPYPDVVKKAVRNEGSPSHSLVG

SEQ ID NO: 450397 - protein, 403 aa, unidentified
MKIRFAGLDWASQSHAACVIDERGAVALQLEVKHDAAGLAELCRRLCEAGVTAVAIERPSGLIVDALLEAGLSVVPIHPNTVKASRPRYRSHGGKSDASDAYLLADLLRTDGHRFKPLSPQSDEIRALRALVRGRDDLLASRVALANQLRSLLQSFWPGAAEVFADLDSPIALAFIKRYPTPESASRLGRKRMAAFCAQHGYSGRRSPQELLQRLHQAAAVTLGELETEAKGELAMALVRTLSLLVEQIRLMTSRIEHHVGEIDDGRILMSFPRAGRLCAAQILSELGSVRERFDSDEHLAGEAGVAPVTYASGKSKAVVFRWACNHRLRAALTCLADNSRHASAWAAHVYAKAKARGCDHPHAIRILARAWLRVIWRAWQDRQPYEPTRHRAAAALLQTARG

SEQ ID NO: 450398 - protein, 387 aa, unidentified
MTQVDDLSRSLAVFDQNTSLIVVVELSEASWLVAGLVPGVDRQPLKKLAPDPDALLRLLERWQAEAVRAGQTIGRITLAYEAGWDGFWLARWLQARGVEVHVIHSTSVAVSREHRRAKTDRLDTAMLMRVFLGWLRGERGHCGMVAIPRLEEEDAKRPSRERESLVAERTRIANRMKSTLARLGIRGFKPELRRAPQRLAALRTPEDLPMPPNTLDEIRRDMARLAVVRGQIEEIEQAWLERLERAPDEGPNAMVRLLARIVGVGVETADMLVQEVLSRNLRDRRAVARYAGLTGAPDESGSKKREKGLAKSGNARVRRGLVQLAWRFLMFQKGSALAQWYRARTEGAQGKRKTTMIVALARKLLIELWRMVTTGAVPEGVVLRPVA

SEQ ID NO: 450399 - protein, 420 aa, unidentified
MSVQEAAVSMLQRVLFYVGIDWAAETHAVCVMDATGRIKAQFMIGHTAAGFAELLHRLGQLAGDPADVAVGIERPDGRLVDALLEAGYPVVPVSPNAIKTWRDGEVLSGAKSDAGDAAVIAEYVRLRAHRLHPATPYTAETKALRTVVRTREDIVDMRVAATNQLTALLDAHWPGAKAIFADVESAIALAFLTRYPTYASAQHLGEKRLRTFCVKHGYSGRRSAAELLTRLRAAPAGTTDEALTDAVRDAVMAQVTVLTALTAAEKNLDRSVIAHLGEHPDAAIFTSLPRSGQINAAQVLAEWGDSRAAYDSPDAVAALGGVTPVTKASGKYRAVHFRWACNKHFRKAITCFADNSRHASPWAANVYAQAIARGHDHPHAVRVLARAWIRVIYRCWNDGVPYDPNKHGNASKLHENPAAA

SEQ ID NO: 450400 - protein, 412 aa, unidentified
MEVVYRRCCGLDVHQKTVVACRRIIGQNGKLDAQVRTFSTMTRDLLALSDWMAEAGVTHVAMESTGVFWKPIWNIFEGRFEILLVNARHIKQVPGRKTDVKDCEWIAQLLQHGLLRGSFVPPTPIRELRDLTRHRAKLVGDRTSVVNRIHKTLEDANIKLGAVASDILGVSGLAMIKAIVEGEEDSEKLAELACRRLRGKIPDLRLALHGRVRDHHRFLLKTLLDHLAFLNSQIARLDERIDEVARPFQEAVQRLTTIPGIQKRTAENLIAEIGPNMEQFPSAAHLASWGGLCPGNNESAGKRKSGKTPKGNRWLGRCLTEASWAAARTKNTYLAAQYRRLAPRRGKKRAIVAVAHTILVAAYYMLRSSVSFHELGPDYFDRLHPESLTRYLVRRLEKLGHKVTLEPLQNAA

SEQ ID NO: 450401 - protein, 345 aa, unidentified
MQESIYVGLDLGSSHCFQSIINSDGALCSARSIPTGEHHLRAAFAKLDGDVRVHLEAGEISNWVASIIEPLVSEVIVSHPRSLAWIGKDSNKDDKVDAGKLAELLRIGRVHQVFYQSDDSRQTFKYLVTHYEQLSREQARFKSKIKARLRTLGIIRKDSHLFSMSGQTALLDEIKSVSIKQMLTQSFSVLNQMLASFDEAKQAMIEFSQQFREVELLQTAPGVGIITACRFVAYLQTPHRFSNKRKLWRFCRLGVTRRESNGKRLAHPKLDSAGVGSLKDVSRKVFEAARRTKSANSFKQFYEMSLANTKNAVHARLSTQRKILATLRAMWISNQPFRNDLTEIG

SEQ ID NO: 450402 - protein, 347 aa, unidentified
MQVTTVGIDLAKNVFCLHGCDASGKPVLRKQLSRRQLLNFIANLPRCLVAMEACASAHYWAREFEKLGHQVRLIGPRFVRPYVKGNKNDASDAEAICEAAGRPTMRFVAVKSTAQQEVQAVHRVRQQLVKTRTALVNQARGLLAEFGIVVAQGVGRLRRALPTILEDRENGLSGVMRELLGEIGARLRFIDDRLHKYDLTIQRLFRQDERCQRVAAVEGVGPLVATALVAAVGNATDFRSGRELAAYLGLVPRHRASGGRTVLLGISKRGDRYLRTLLIHGARSALLRIERQRSARAIWAARLKLRRGSNVAAVALANKNARVLWELLNRHQSYQPAPFPARVPQSG

SEQ ID NO: 450403 - protein, 429 aa, unidentified
MNISTSIAEADSKYVWSVGIDWADEKHDISQRCWADGRYQTFQIGADPVSVRTWLEELKELAGPQGRIVVGFEQNRGSLFEMLREQKDWLDLCPLNPLTLSRYRQSFYTSGAKDDPLDSQLIEELLRKHLDRLRLYEPPEPVLRQLNLLCQLRRKAVDSAVGLENQLRSHLKVYYPLAVELHEDLSSTLTLHFLKRWPTLQSLKRAKAQTLRSFYYQHHSRSQSLIEERLQKIARAEAVTEDCTLIDPLVLSVQGLVNQLLAHKASEAAFDKAVQKLALKHPDYEIFNSLPGAGPQMTPRLMVAFGSNRSALTDPSQMQKKSGIAPVLDRSSQSQRIHRRWCRPKFLCQTFHEFAAYSIPHCTWAKAYYEQLMARGKSHHTAVRALAFKWIRIIFRLWQDHTTYDEERYLRDLQKRHSPLSQKIQLQPL

SEQ ID NO: 450404 - protein, 346 aa, unidentified
MEHHVGIDVSLELSSLCVLDATGKVIQEAKVASEPEALVAFLRGLNLSIVRVGLEAGPLSQWLYDGLHEAGLEPVLLETRHVKAALSAMAVKTDRRDARGIVQLLRMGWYRPVHRKSVPSQEVRALLGARKQLQVKVIDLEQTVRGLLRGFGLKVGDVSRGKLPARIRELAAGHVMLEKIIEPLLAAREAMWREFAKLHREVLIIVKEDQVCRRLMTVPGVGALVSLTYRAAVDDPGRFAKSKSVGAFFGLTPKRYQSGETDVTGGITRVGDASVRTALHDAANALLTRAHRFSTLERWAVDVAKRRGMRRAKVALARKLATVLHRMWADGTEFVWGKDPAAVAAA

SEQ ID NO: 450405 - protein, 345 aa, unidentified
METMYYIGLDVHKKTIDYCVKDGSGRIYAAGSIRATRLELDMWMKTLPQPWTVAMEATIFTAWIYDHLQPHAAAVKVAHPLMLRAIAVAKKKNDRIDAKKIADCLRCDFLPECYMASTEIRERRRTLRYRNLLVRQAVQMKNKIAVLLMEAGVSYNKQKLHKVGYFRELLATNQDIDEGLKPLLRLCRETVVRLGKTESALVRSLERDSLLVERVERLMTIPAVGPITALTWALEVGDVQRFSSIKKAISYCGLCGAERSSANISKRTPLSKQRNKHLQTVLIEAAKMAPRNSPELAMVYEQEKQKGNANRATLAVARKMVAYLVAVDRRQKGFLVVEDRNRTAA

SEQ ID NO: 450406 - protein, 299 aa, unidentified
METPIKQTAGIDCGMQELVVSFGILTGDGTFICKLTKVFANTAKGFQQLLQWINEVSSKETAVLYAMEATGVYYEKLAYYLVANDCHVSIVLPNKINAFAKTCTSKKQDDQQASKVLCEFGCVKHVDEWQPPHPLFAALKQLTREKHQLQQELVIIKNQLHAEQTKAITASASIKRMKARCRLIEKQIAEVEKEIIDTLNDDAAIKEKINKICTIPGVGLSTAVTVIAETNGFNLIRNARQLVSYAGLDVVQKQSGISVKGRAHISKKGNPHLRHCLHLPSFVAVKYNLPMQQLHHRIC

SEQ ID NO: 450407 - protein, 355 aa, unidentified
MKYYTSTTKFNCGIDLHARQMYVCVMDRDGKKLVHTNVKNNDFEFFLKLVAPYRHDLTVCCECMFGWYWLADACQAAGLSFVLAHALYLRAIHGGKNKNDRIDSEKITHLLRSHLIPPAYVYPADKRPLRALLRQRLFYVWRRAELLARIASHQLAHNRAPLKQTRRSRDPWEAQLLAAEAHPLRQFALQNDLAMIRHFDTQLGALEAQLQRQAKQVAARDYALLQTVPGIGEHLGLTLLCEIGDIARFPTVKDFLSYSRLVKGTVASAGKIKGLRGAKLGNPYLRWAFGEAAVIAKRDPVVIGPLAQRLEAHLGGNKFKANTVLAIKLARAVYYMLRTGTVFDPARLVAALARN

SEQ ID NO: 450408 - protein, 325 aa, unidentified
MTKVLSVAGIDISKQFFEAGVLINGKEQLRRFAYNQEGLKALVKWLPEGAHCVMEATGPYYLRLACYLHQQGLTVSVVNPLVIKRFSQMRLLRAKTDRADAKLIARYALSEQPPLWQPPVAYQLKLQQLEALLQQLQKQHTALDNQLEAFEATGLMDKEVKELLEKTTKHLQKQIERITAKMEALTQEHHGELLDHLVSIPGIGKKTAIVLIVLSNGFKKFSNYKQLSAYIGLSPRIYESGTSVKGKAKICKMGMSSSRAMLYVCAWSACKCNKGCKELYERLLTKGKAKQVALIAVANKLLKQAFAIATNNTSYDENYLKNICF

SEQ ID NO: 450409 - protein, 428 aa, unidentified
MNYNQNNKIAQITSQTLIIGVDIAKFKHVARAQDFRGLEFGKPLYFENARDSFDIFVEWIKEIQAQQNMNKVIIGVEPTGHYWLNLAYYLKKTNLKLVVVNPAHVKKTKELDDNSPTKNDVKDAKVIAQLVKDGRYAEPNIPEGIYANLRIARKIRDQLSVDLQAVQGQIHNWIDRYFPEILTVFKDWEGLSALQILKLNLLPHELVQLPDQELLAHIRKVAKRAVGIGRIKELKEAASVSIGIREGSDLAKLELSTLLDKYELITKKFEQLEVKRDELLEQIPGVHQMLAITGIGKDTIAGFFAEIGDLSYYSHPRQIIKLAGLSLREHTSGKHKGQTRITKRGRKNLRALLFRVVMPLVAKNSAFKALHEYYTKRPDNPLKKMQSLIALCNKLIRVLFAIGKKQFEFSEERMLKDIPHMAVLPKVA

SEQ ID NO: 450410 - protein, 343 aa, unidentified
MEYFAGLDVAVKETSVCIVDDTGKIVREVKVASEPAALLAVLKNPAYRFKRIGLEAGPLSQWLFSGLAEAGLPAICVETRHMRAALKAQINKTDRNDARGIAQMMRAGLYRPVHVKTVRSQKLRMLLTHRKLLQSKAIAIENDLRATLRNFGLKVGIAGKVKFEARIQELVENLPDLAVLVEPLLIVRRVLREQIGILHRRLLVIVRDDDVCRRLMTVPGVGPVVALTYRATVDVPARFRKSKAVGAVFGLTPSRYQSGESDRAGGISRCGDEMMRAMLYEAAHIMLVRSTKWSWLKAWAMQIARRRGMKKAIVALARRLAVIMHRIWVDGSEFRWTRQAAAA

SEQ ID NO: 450411 - protein, 318 aa, unidentified
MGNTETYVGVDVSKDVLDLAVQPRQQAREFENNDVGINEAVAYLKKLAPTLVVMEAAGGLESSLAAALSAVRIPVAVVNPRQVRDYAKAMNRLAKTDSIDAQVMADFAKAVHPEPRPLSDGQTQELKDILTRRSQLNEMITAEKNRLFRARRPVSDHIEAHIAWLEHELNDMNSRLNRFIEESPIWREKDNLLRSVPGVGPVLSTTLLAELPELGTLNRKQIAALAGVAPLNRDSGKFRGKRTIWGGRAKVRAALYMGALVATRHNPTIRCFYQRLTGCAKSKKAAITACMHKLLTILNAMIKHRAPWHYTLNPPAIS

SEQ ID NO: 450412 - protein, 355 aa, unidentified
MSDSKFIGLDVHKTSISAAVVDESGKLVMQAVFMTNAAAVLGFVRGLRGTLRVTLEEGTHAAWLHSVLKPQVAEVVVCNPRKNALLKSGNKNDRIDARKLADLLRTNLLTRVYHDDSQTLTLKELGRTYRALTDDTTRVMRRLKALYRSQAIDTGGKKLYTRRRREQWLEQLKQVGQRYRAERMFEQFDSLQAMRRQIRCDLIQEARQHAATATLSSVPFVGPIRSALLIARVQTPFRFRTKRQFWAYCGLALETRSSADHQVIAGELRRKTKPVFIRGLNLNHNHDLKNLFKSAATTASATPGPFRDYYENLLTKGMKAEMARLTLARKIAAISLSVWKKGERFDPEQLRTPAA

SEQ ID NO: 450413 - protein, 396 aa, unidentified
MFTTFVGIDISKNSFDIAVVNSYNSVILKNRKFPMTQDGFLQFLNILLKYDSSTTLIAMEATGCYHFNLLDFLLSYSFNTTVINPFLIKSFSSSFSVRKTKTDKKDALTIAFFAKEKSSFLHLSVKSQFDSIRTLIKAREAVTDDIASYKVRLSALLSVTFPELNDTVSDIFTKTILNILIQAPSAKAISAKGFDFINSIVANSFIRTPSSAIWEAATSSIGTTNQYIEMLIVSYIEILFKLIEQREVLEAQMKEIASADNKLAENIAIISSIPGIKPKSALCILAETGIFDRNITDVFANHRKLTAFFGTDPSVKQSGTSVRGNGSISKRGNPILRKKARNLAFTIVLNVKIFKDYYNKKINEGKCHTQALIAVWNKVLRVIFAMLKNREHFIQA

SEQ ID NO: 450414 - protein, 346 aa, unidentified
MEHYVGLDVSLKLTAICIVDQAGKIVREGTVASNPEAIAAFVKSHAPHVVRIGLETGATSTWLWTELKKMGLPIICIDARHAKAALKMQINKSDRNDAFGIARIMQCGWYKEVRVKDLDCHAIRALLVSRALLVKIKRDVENQVRGLLKNLGLVIGRCKLNTFTVRANELIDGKPGLSAAVGPLLKVREAIERQIGDLDGKVLRLARSVPQVRRFMTVPGVGPITALCYLATIDDPTRFKRSRSVGAYLGLTTRRYASGETDRTGRISKCGDGLLRSYLYEASNVLLTRVAKWSALKAWGMRIAKRRSLSKARVAVARKLATILHRMWIDGTEFSWSSEGTAMQPA

SEQ ID NO: 450415 - protein, 438 aa, unidentified
MKSTDHNDSIERAETEEGGFAALIGLDWGSEEHALCLHDCTTGARESSTLEHIPEAIARWAAALERRFPERPIALCLEQAKGALISALMAYPFLVLYPVNPATAARYRQAFKTSRAKSDPSDAQVCLELLLQHREKLSPWRPNDPQTRALTRLLEHRRGTVDLRTLLTNMLRDALKSYYPQALALAGQDLFAPLACQFLLKWPSLQQLQKARKETVRKFYYAHNCRRLDVINKRLDALAAMIPLTSDQAVLAPAKVHVTMLTRQLLQLAVALKEYDARIAQLFARQADAFIWKSFPGAGPTLAPRLACAFGSEHSRYQSAAALQQYSGIAPVTERSGKNQHWVHRRWAQPHFVHQTFFEYAHQSVLHCAWAKLYVQEQMAKGKKHPTAVRALAFKWQRIMFVCWRDRVAYDEATYLHSLKRRGSPLAAKLALTLQKAA

SEQ ID NO: 450416 - protein, 428 aa, unidentified
MLGVGIDWAEDFHLVAVGRPGEGVVEVARVEHTPAAVEALVARIAGLEPDPAEVRVVIETRHGLLVEALIDAGYTVLPVNPDLVARRRGPAKKKDDAEDARIACLLALDQYTELRALVPHGQLAGELRAIARDDVRACRDERRLLNRLRADLAATFPAAATIAGDDLGSPVMLKLLHRWPTAGELAAAGRAEVEALARQARHGWPHRLADRVDQALAGEHFQPRDYLVRAKADTIRLTCAQLLLLREQRRSWQRRMGELLLGDRRRGRAKQPGDQRGPAVPGGEIYLSFPGLGDRLAARIAGEIGDAIGQFDTPNALQCYAGKAPVTRRSGKSELVVASRLACNRYLADAVQQWAFTSLNTSGWAREFYDTQRSRGKKHHAALRALGNRWLEVLWHCLTRNTPYDESVHVANRNRALGRVNQPTKLAA

SEQ ID NO: 450417 - protein, 367 aa, unidentified
MADVTTYVGLDVHQASIAVARLTGRDRTPETWEIPNDRAAVRRLARKLRREAAGPIQSCYEAGPCGYAVQRQLIAEEVPCQVIAPALMPRKPGDRVKTDRRDARKLAELLRAGLLTEVHPPTPAEEAARDLVRARDDARGDRQRCRHRLGKLLLRRGLRAPGRAWTQAHTRWVDSLTWEHEAERQVVDDYRLALAQIEARLQALDTALTALADTPPYREAVGWLRCFRGIDTLTAITILAELHDVRRFPTARALMAYLGLVPGEHSSGGTTRRGRITKTGNTLVRRVLTEAAWQYQHRPGIGKGLAQRRVGQPARVIAIADKAQQRLCGRFRRMALTRMPPPKIAVATARELAGFIWAALQPPSATM

SEQ ID NO: 450418 - protein, 420 aa, unidentified
MSKRKKLKEQDLDMTLLSQINPNAAGIDIGADKHWVSVPVGRDEENIRNFSCFTPDLYAMADWLKQCDIETVAMESTGVYWIPVFQVLESRGFDVKLVNAHYVKTVPGRKTDVLDCQWLQQLHTYGLLSGSFRPEDQICKLRSYIRQRDNLIKSACIHIQRMQKALTQMNIQLHRVISDITGTTGLSIIKAIVSGERNPIKLAALKDGRIKASVEQIAASLTGDYRPELVFILEQELQLYEFYQAQIQKCDIQIEQCLASFTDKVDVEKKPLSKPKRRGKKQPGNAPQFDLRTHLYRISGVDFTAIDGLGSLSVLVLLSEVGLDPTRFPTVKHFTSWLGLCPGSRVTGGKVKSSKTRPVANRAATAFRMAAQTLCRSNSALGGYYRRMQSRMGAPKAITATAHLPRTHFLPSLDIWRCLQ

SEQ ID NO: 450419 - protein, 347 aa, unidentified
MRGTVHMQISTIGLDIAKNVFQVHGIDAAEKVVVRKQLRRGQVTAFFEALAPCLVGMEACATSHHWARELTKLGHEVRLMPAKDVKAYVKRNKNDAADAEAICEAVRRPTMRFVRIKSAEQQGQLMLHRARDLLMRQRTQVINALRAHSAEFGITAAQGREGIKELLAMVAHEEGSRLPSDAHASLTVLATQLQAVQTMIGSLEKRIVAQHRSNEASKRLETIPGIGVIGATTIAAVVPDPRVFRSGRDFAAWIGIVPRQDSTGGKQKLGPISKQGDQYLRRILIVGAHAVLRRARQQPETYPWLTQLLARRPFKVVAVALANKMARIAWALLARGGTYRAPQLVAV

SEQ ID NO: 450420 - protein, 345 aa, unidentified
MPNIEIGVDSMVKENFIYVGIDLHKETHTAVMIDCYNQKLGEITFPNRPADFPKLVTKVKKCNTDGKEVVYGLENAYGYGRALAVWLIDKGYLVKDVNTAISHRQAKHRGAMYRKSDSDDAKAIALATLNMLDKLPDACPNDAYWSLGQLVHRRDNIMKQRTRLVNQLHEQLCIAYPSYKQFFNDISRPTALYFWEHYPSRKYLKGKSVEDLRAELVPVSHNKCSTKTCEKILDAVASDKVKNNAYQDARDMVTLSIVSDLQHYDSQLTEVDKMLEQMYKMLGCTLTTIPGVNVITAVKILAEIGDIKRFSNANKLAQFAGIAPLHLSSSGKGKDVATKQGNRRL

SEQ ID NO: 450421 - protein, 414 aa, unidentified
MKTNWTEQPYFAALDWAKDHHDVIVVDRLGAIVADFRFAHTADGWRDFEQRMQPFGKCPLAIETSSGLAVDQLVQRAYPLYPVNPKAAKRYRERKVPSGTKTDRYDAWSLADALRTDGQAWRALRAQDEATSTLRLLCGDEIGLIEQRTALVNQLQAALADYYPLALESFEDWTQPFAWAWVKQFPTPSALQAAGKRQWEKFLHGHKLWRPQTAPQRLASWAQGQALNASPAVLTAKSLLAQSLVRVLETLQHQIEEYRRRITEAFAAHPDHDIFGSLPGAKQTLGPRLLSGLGSARERFPDTQSLLCQAGVSPVSYESGQIRKAHVRWACDQFLRHTVHLWANASRKKCAWAQAYYQAKRTQGHSHASALRCLGKRWLKLLWRLWQDRVCYNEQIHLNSLECHGSFVWQKLQT

SEQ ID NO: 450422 - protein, 393 aa, unidentified
MVYVGIDVAKDKHDCFIVNSDGEVLYDVFTIQNDMDGFEDLLFKIKTASKDLSKVKVGLEATGHYSCNILGFLHNKGLTTIVINPLYTSLSRKSVSLRKTKTDKVDARTIASIIMSDVSLKPYSDTVYHNEDLKSLSRYRFDKVSDRSKLKQSVSRLVNILFPELERLVSTLHAKAVYALLSEFPGAHQVASANLKHLTALLSTASKGHFGREKANEIREAARRSISSYLPAKSLELRHTIKLIHELNAEIAEIETEIKKIMDSIDSPTLSVPGISYALGSVIVSEVGDFSRFDNPDKLLAFAGCSPSTYQSGQLYSTHAKMEKRGSKYLRWALLNAAKYVCKWEPTFAVYLRKKLAEGKHYNVAVSHAAKKLVRLLYHLETTGEKYIPQTLS

SEQ ID NO: 450423 - protein, 341 aa, unidentified
MKEVTIIGVDLAKNVFQLHGATADGSVVFRKKLTRVQFHKFMSAHPTCLVAMEACGSAHYWAREVAQMGHDPRLIAPRYVKPFVKRHKNDTADAEAIVEAALRPTMRFVDPKTPQQQAGAVLFRTRSQFIRQRTEAINALRAHLYEFGYVAPTGVQNVKQLALIVEADSSELPALVRFSCRELIEQITRLTERLGVLDKEIARLSGQGEVARRLRTMPGVGPITALAIETFAPVMESFRCGRAFAAWLGLVPLQRSTGGKQILGKTSKMGQRDIRRLLIVGAMAVVGWAGRRGAAEGSWLAKMLARKPRMLVAIALANKMARGLWAMLTKNEEYRGPVMVG

SEQ ID NO: 450424 - protein, 348 aa, unidentified
MRFYTQNHKHYCGIDLHARFMYLCVLNADGEKLLHRNIKAEPETFLRAVAPYREDLVVAVECIFTWYWLADLCADEGIGFVLGHALYMKAIHGGKAKNDRIDAYKIAVLLRGGTLPQAYVYPKAMRATRDLLRRRNHLMRKRAELLAHVQNTVSQYNLPPLGDRVDRKSQRSSLPEHFPDPIVRRSIELDVQLITVYDDLLRPLELELTRLAKSHDAFAYHLLRSVPGIGKILSLVLLYEIDDIRRFPRVQEFLSYSRLVKCQKSSNGKVSGYSGKKIGNVHLKWAFGEAAVLFLRNNADGQRYVERLAKKHGKGKALSILAARLGRAVYTLLQRRQPFDQTRFFAQG

SEQ ID NO: 450425 - protein, 389 aa, unidentified
MRAVFGIDVSKASSEVAILVNGEKVHGYTMSNDALGFARLLGDLRTVHKPEIIFEATGVYSRPYTRLNPLEAKKQLDSLRVRKTDQIDAEKLAQSQFVLSRKPTYVQEEVYQNLRALSRFYQNLTEDIVRAKNRLHKVLQVTFPELETILSTPSGEQYWNLVIAFPCKDFVLELSKDKLSESIRQSTSKRISDKRVAYLAEKLIGLANQSYCAVKKNSPMLEEVRYYTKELLRLSEQRQTVLDQMVELAQPLPEYDILLSIPGIAETTATSIIGELGDIRRFQSANQINAFIGIDLRHYESGNFLAKEHITKRGNPYARKILFKCIHNIASASHTNPCHIADFYKKRKRQSQTTSTKPHTIASIHRLIRTMYYLIMHNKLYDYASTQNR

SEQ ID NO: 450426 - protein, 349 aa, unidentified
MEQILKQVLGVDVAQKELVVTLGRMYNDLTIDLYAHKVFKNNKSGIISLLKWVKPLIDKDVAVQFVMEATGVYHQKFAYYLDEKGYSLSIVLPNKISNYMRTLDTKTVTDKTASQAICRFGLERKLDLWNRPKKIYKELQQLTRERDQIVEERVMVKNQLHAEKVEAEPNKGSLKRMTARIKFLNKQEQEIKNEIQEIVNQDANLKQELQNICTIPGLGILTAVIVLAETNGFELIRNKKQLTSYAGLDVKEKQSGTSVKMKTRISKKGNRNLRKAMHLPSLSAVKYNETHRGLYKRLVEKSGIKMKALVAVQRKLLELIYVIHKNKTIFNKNHEQEKRATKLELLVAL

SEQ ID NO: 450427 - protein, 435 aa, unidentified
MNANGKLPLRDISLPWERPMSLQRSKVCGIDVHKTFFVAAVLSNTGEFWIERFSHDRPGLLALKDWILDHGCEVVAVESTGVYWYSIYSTLEDSVPVIVANPYLIKNIPGRKTDIIDAQWIAELTLNNLIKPSRIFPKDDRELRNLTRARENLVQNRTRLKNRIHRSLESASIKLSSVLSDIFGKSGQYILEHLLQGTPIDEIIQGIPSQKIRDKEEALKNAIQYNLSDDQILIIEQSLEEIGLINRQIQELDDAIQGRLGDRNEDLQIAMSMPGIGWTSGVMILAEIGDYRDFDSPDKLAAWAGLVPTVYQSADKMRTGGITKQGSKHLRWILVEAAQAAAKKRGSILRRFFLRIKNRKGYNVAVVALARKILCILWHILVNKEYYTEENSPPKKVRMPRRIGITRKSVEQSIELLVEAGYLVWKQNIIELGGG

SEQ ID NO: 450428 - protein, 352 aa, unidentified
MAKGTKLDFTGQHIYVGMDIHKKSWSVSIHTEQFEHKTFNQPPEVEKLTNYLQRTFPGATYHCVYEAGFSGFWIHDRLTEEGIHCMVVNPADVPTKHKEKAGKADKVDCRKLGRNLRSGDIKGIYVPSRVQAEDRHLIRTRQSMVRKQTRCKNQIKAILFFYGILIPEEGHWSRNFINWIETIRMERASGDLALKAHLEELKHLRQIIAGLNKAILALSRSDTYRDKVLLLKSVPGISTLTAMTLVTELCDITRFPSLDKLASYTGLVPDIKSSGETAYTAGITHRRNPILRTVLIEASWVAVRKDPALMMAFNKFSLRMKKTAAIAHVARKLLNRIRFVLMNQERYVPAVV

SEQ ID NO: 450429 - protein, 429 aa, unidentified
MRAVGLDIHRDFCEVAILEGGELRSAGRVDTSPQALELFAGSLGPEDWVAFEVSGNAAEIARIIEPHVARVVVVSPSDTGIRQARAKTDRLDARTLARLLAAGSLDAVWMADERTRVMRRRLARRAQLMTARSRCKNEIHAALIRRLIARPEVSDLFGQEGRRWLGKLVLPLEERESVDASMRQIEFLERELADVDRLVALDALGWAQVKRLMSVPGVNVICAASFLAAVGDISRFKDPRKLVGYLGLDPKIRQSGPGPGTSGHISKQGSASARWALVESSWSAVRQPGPMRAFYQRVRSRRGHQIAIVAAARKLASLFWFLLTREQDYAYAQPSLTKKKLRRLEIAAGAPKYQGRSNIWSTNDAMREAERALAEQAEHAYRNTVRDWHAAQANKTAAKEPVKVGASATPGRASNKPKEGKAARQTTSP

SEQ ID NO: 450430 - protein, 340 aa, unidentified
MHTTIIGLDIAKSVFQLHAEDASGKVLWKKRLRREELEPFLRKLPPGLIGMEACGSAHHWGRVISADGHEVRLMHAKYVKAYVKRGKSDVRDAEAICEAVQRPNMRFVPIKSVEQQIDRSLERARDLLVKQRTQLMNATRGLLAEFGVIARVGLRGFKTLSDKVDAGDAAIPKRLLTAVKPLLEQWRGLHASIDELEERLVKRARSDERMRRLMKIPGVGPFTAHALVTAIGDPRRFSTGRDFAAWAGLTPLTDSSAEKTRIGHISRQGDHSLRRLLVLGAANMARHAKAKPSEARAWLLGIIGRRPVKVAMVAQAAKTARIAWALLRSGENYRASTAVA

SEQ ID NO: 450431 - protein, 334 aa, unidentified
MKQVHQIGVDVDSEELVCATKHARQGLALARFVNTAAGHNKFIRWATKGGHRARVCLEATGIYSLEFALALHHAKNVEVMVVNPRAIKDFVRACMQRAKTDAVDAGGILDYLERMPFVAWQPPAPEVLELQAINRRIVQLNTELTREKNRRHAAEFGGASAGAIAHDIEVNIHHLERRIERMHDSGLKLVRGVPALATKLAHLVSTKGIAETSAMRLLAELLVLPDDLAAPQWVAHAGLDPRPYESGISIHRPRRISKVGNRHLRAALYMPALVAIQHEPNVKAFYNKLVAAGKKPMQAVVAVMRKLLHAIWGMLKHDQDFDGEKFFKIAKENT

SEQ ID NO: 450432 - protein, 420 aa, unidentified
MQNKQNQLIERISVTHLIVGVDIAQQFHVARAVNFRGIVVGDPLTFVNNEEGFVKLQNWIEKLKRLKNLDSTIVGMEPTGHYWKNLSKWLVKQKIEVVTVNPHLVKRNKENRDNTQSKSDKKDALVIADMVKNGYYSFVRPSSESFEKLRVLISNRDVIVKRLVSSTNQIHRWVDIVFPELRQVFKDVTCKGAISTLRLFPTPNEIASFEPLDVMRGWKSLMQRQPGPKKAQLLINLAKSSIGTGQALDAYKFHLEQLLEEYDLAIKQLERVEQQVKEVLNKIPFARKLLMIKGISEISLAGILGEAGDLSGFSHGNSLLRHAGLHLAEASSGKWKGQIVLSKRGRSRLRRFLYLATMSLVMNNPEFKAIHAYNVKVKKMKKMKSIMKLVGKLARIFVGIAKRNESYCANKLQETIPLAA

SEQ ID NO: 450433 - protein, 320 aa, unidentified
MEAKNTVIYAGVDVAKATLQVHLLGRQNEWSNTPAGLRQLLKALQKVPGVHVICEATGGYEQPMVKVLHEAQIPVSVANPARVRAAAQAQGQRAKSDPIDAGGLTDYGRRFEPKATPPTSATQEELVALTQWLQQLVSGQAMAKTQAEHHQDPFVRRQHAKLMVHLQGQITAVEKQIETLVEKDAELRARVECLDAIQGVGPRTAWMVLAHMPELGQLNRQQVAALAGLAPWVRDSGAMKGKRCIGGGRSQVRVALYMASLSAARCNPVLSVLYKRLRGNGKLGKVALTAVMRRLLIFMNHELKALAAKTAVEETEVATA

SEQ ID NO: 450434 - protein, 347 aa, unidentified
MLHVGLDLSRTRLDVHVMDQTGTSVAVTTAAPDAGGLTSLAYRLGEFGQPITAVIESMNGARFIHDQLELRGWTVEIADAVKVKGFAPLACKTDKIDAWVLAELSRRDLVPAIWLPSPGVRANRERARWRLHLVRHRTALKNRIHATLLAFGHPCPVSDLFGVAGRRLLDGLGLPEPWAGDVTAALRLIDVLDGEIDDCEAALRREGAEHRYVPTLMTAPGIGWVLGYTIAAEIGDITRFPTAKKLVGYTGLCPSVDQSGGHDWRGSLAKNGPKYLRWALIEAATHAARHPVYRDRYQHTKARLGRQRGPSIARVDIARKLTEAIWHMLTDNKPFAPAGATNTALAA

SEQ ID NO: 450435 - protein, 323 aa, unidentified
MMGLPNSLYIGIDVSKNSLDIASNQTISPLSASNDVDGFDAIIAELKQHSIALVLMEATGGLEVAVACSLQAHGFDVAVINPRQARDFARSMGYLAKTDRIDAAMLAQMAEVINRHPERARFIRNLPDAEREVLTAMVVRRRQLITMLTAERNRLHPSHPQSRKSISTIIDALKDELKRINKSMEVHISTHFKTLAEILGGVKGIGAATIATLLAEVPELGHLSRREISALIGLAPFNRDSGNMRGRRTIFGGRANVRSALYMATVVATGHNPVIKRFYNRLVKSGKVKKVALVACMRKLLTILNAMIKKNEPWDSSHHYLSQ

SEQ ID NO: 450436 - protein, 391 aa, unidentified
MTRISAGVDVSKNRSTVCIIDQDGKFIMRPFLVWHSTEELDFLADTLKRLNGEVRVIMESTSVYQYPIALQLKERGLFISIVNAYEMKQFANTDFRGGKTDKKDSRTIASYGISYWYKLVEWQIPKDTYFNLDLLNRTYMNAKKHRQIILQELQHYIDCAMPGMDKELHSLNLSTKKDFMLDFVEKFWHRDEIVNMTEAEFTEVFTAWAKKKGYRPVEGKAAKIYAIAKSCIPYYPANPTVKTILQCIVDKLSGVNRTLVTIVTQMIEEAKKLPEYQIVREMPGVGDPLAARFFGSVGDIRRFKNSKALVAYAGIDSPPDESGDFSSTHRHITKKGSKVFRDTGYEIMMALRAQKRTWEKVRKNPEVYDYMLRKEAEGKPPTKLNELARFN

SEQ ID NO: 450437 - protein, 351 aa, unidentified
MEKPIKQCVGIDVSKDELVVSYGMMDGNFDSRMLSNTCFANQPPGFKKLLKWSNKLHSDQGEVVYVLEATGVYHQQLALYLHDKGCKVVVMLPNRAKAFMKTLSVKTINDKVSAQMLSQLGLEKKLDRWEPPAAIYRELKQLTRERDQLIGEQTQIKNQLHAEQSGAWPSSSSIKRMKSRLQLLAKQIEQIKDEIAQAVEEQPWLKQKIDTICTIPGVGLITAVTVIGETDGFHLIRNKKQLVSYAGLDVITKDSGISVKSKARISHKGNKYLRKCMHFPALTAIRSTPLMKALFVRLVSKHGIKMKAAVAVQRKLLILIYILWKNNQPFDENYPLKLKEPRMIGALHELA

SEQ ID NO: 450438 - protein, 394 aa, unidentified
MDESGKRLGSRRLPEGLTGIGQLHELIAQHAEEPDQVVVGIETDRGLWVGALTAAGYQVYAVNPLAVARYRDRHHLSGAKSDASDAKLLADLVRTDRHNHRPVAGDSADAEAIKVLARAHQSLVWTRTRHTNALRNALREYYPAALAAFEDLAHGDALGVLDRAPSPIQGARLPLTAIQSALKRGGRQRNIAARARQIAAALRTQQLAAPAPVAAAFAATTRATVGIIAELNRQISELETTLAEHFETHPDADIYRSLPGLGVVLGARVLGEFGDDPNRYTDAKSRKNYAGTSPLTIASGKKRAVLARHVRNRRLYDALDRWAFCALSTSPGARLFYDQRRAAENTHHQALRALGNRLVGILHGCLRHHTDYDENTAWAHRTLSRLDDLRPWDV

SEQ ID NO: 450439 - protein, 338 aa, unidentified
MQTYAAVDLHSNNGVLMIIDERDRILKQRRISNKLEQFVAELEPFRATLKGVAIESTFNWYWLVGGLEAQHFPVVLVNTSAIQQYKGLKRSDDQYDAWWLAHMMRLGILPRGHIYPREERAVRDLLRKRATLVQQRTANILSVQNLEARNRGTKISSNEVKHLTRARIAEWYDNEELALALTTTMEVIDTLSAQTRVLERAVLKKARLRNEFKLLLSVWGIGEILALTIMYEAGQMARFASPGNFASYCRCVDAKRLSNGKKKANNNAKNGNQYLAWAFVEAAHFAVRFYPQAKRYHDRKAAKTNGVVAIKAIAHKLARAVFHVLREQQPFDPNKVFG

SEQ ID NO: 450440 - protein, 348 aa, unidentified
MKNYQMGIDISKEKLNICLKKGTQTIREEEIKNTVMAIKKCVKRIEKENCVANDDVLVCAEYTGRYIYPLVCACEEMELFLWMEDPTRIKNSFGVTRGKDDRVDARRIAEYAFRFSDKAVAYEMPDRPLVSLKNLLSDRDTLLADRHKYEMQLHDQKGYMDAADYARKKRSWTAVVKTLDKQIALIDDEIQVLVESDEKLKHQTELLKTVDGVGDRIAVRMVVVTMAFTRFETPRQFNCYAGLAPFRYTSGKSIYSKSKVSQRANKQIKALLHLAAVSAATHMKSSEYRDYYERKTEEGKHPMCVLNVIRAKLVSRMFAVIKRDEAYQRNYKIFTPTEKNSQKIIVNS

SEQ ID NO: 450441 - protein, 357 aa, unidentified
MTTMTQPASTQVTVGVDTHLDVHVAVVKDQLGRRLATTSVATTPAGYAELLGWAEQFGSVEAWGIEGTGSFGAALNRFLRAHGQVVVEVNRPDRAARRRRGKSDSLDAEAAARTAQAHQGSMPKAGDGLVEMIRVLRVARASAMKARTQAINALKALVVTAPEELREQLRTLSTVRLVKAAAELESGAATDPSAAAKLAVQLLARRYQALTAEIMTLDAELDRLTATAAPKLLARFGIGSDSAGALLVAAGGNPARLRSDTAFAMLCGASPLEASSGKVRRHRLNRGGDRQANAALYRIVVARLRHDQQTRDYLARRIREGKSKKEAIRCLKRYVAREVFAVLRGNPQLQPAALPSP

SEQ ID NO: 450442 - protein, 421 aa, unidentified
MRGLRAKRARTVKEGTLIATVDIGVANNTGYCTTLDGRSTKSFRFDNTKEGFEKFWCMTIASKNKLGCDEVLVGYESTGPYAEPLVHYLANRRVKIVQVNPMHTKKMKEVNDNSPLKTDDKDPRVIADIIRLGHALTIVVPGGDAAYLRRLNNARERHVGEQTAFLNQLQQLVFLIFPEFKTVLKNMKGKAAQYILKQYTAPERIGTLSKEALGEEMRKRSRGKFGIKDAESLISLARETVGIKEGLGGILMDIRHILMQLEAEGRFISEIEAEMRATLERIPYSIRLLSIKGLGTVSVAGLIGEVGDFSKFSTQSEIMKLAGLDLYEISSGRRKGQRRISKRGRSLLRKILFYAAIQMIRKNGIMYDYYARLTGRGMERMRALIAVSRKLLRIIHAIVRDNRDYVEQYQAPERRVIKKAA

SEQ ID NO: 450443 - protein, 340 aa, unidentified
MNIKTIGLDSAKIIFHLVGLNEHGKQVLKKKLRRSQLLTYFANLPPCTIAIEGCASAYYWKRELIKLGHRVKILPAQHVKAYVRGNKNDYNDALALAEASRVPEMREVTPKTIDQQSIQALHRLRESAIGDRTALSSQLRGLLAEFGIIFPKGIKHIRGGLYGVLEDAENDLTHSLRAALALKHAQFVQLDDLVRELKQLINESSEAHQEIGLLQSAPGYGDILSSAFYSVIGDGKAFAKGRDASASLGVVPKQHSSGDKTVLLGISKRGDSYLRKMLINGARSVVNHAHKKDDALSVWVTQLVERRGKNKATVALANKLARIGWAIITSGKAYEENYAV

SEQ ID NO: 450444 - protein, 340 aa, unidentified
MNATTYGLDVAKRVFQMYWVDAQTGEIANRRFGRAELVEFLARRPAGRVALEACGSAHWWARKIRALGHEVVLLHAKFIRPFVQTNKTDAADARAIWTAVQQPGMRTVAAKTEDQQAMLALHRMRSLLVKFRTMQVNQLRGLLYEFGATFRAGRVAGLAEVRARMAELAEVLPGTMACGLQDQLQRIDALEQDIDRLERQIGSWQKQEAACRAIAEVPGIGKLTATALVATMGDAKAFKSGREFASFLGLVPRQSGTGGKIRLGSISKRGDPYLRTLLIHGARSVLCHAKVPTKWQREIQARRPANVAAVAMAHKMARTAWAILAHGQAYQKDYVTVKPT

SEQ ID NO: 450445 - protein, 435 aa, unidentified
MDEVTDEPLYRDRVCGIDIGKAGMVATIRVPSDRDPARRMAETRSFGTTKKEVLALADWLRCWQVPAVVMEATGDYWKPVFYRLEAEGFECVLADARQVKNLPGRPKRDPADSRWLTACFERGAVRACFVATPEFRLIREHTRYRRDLTAERTREKQRAEKLLESAAVKLSCVLSDLHGVTGRDIMGHLIAGERDPKALAQLARRSARRKIPQLEEALDGAEFFTPQHAALLAAMLARIDQVTAAIDELTAAIERLLAPCEEQLQQAESMPGWGRRAAQDAIAETGPDMGRFPTGAHLASWAGRAPLDHQSGARKGRARSKKGNRYLGAVLGETAAAAGRTQTREGARYRKLARRTGKAKAQVALGNTQLKVYHKLLSTPGTRYEDLGPDYYDQRAQAGRQVAHHVGKLSALGYEVTLCRIPGPGPHDPGQAHTA

SEQ ID NO: 450446 - protein, 402 aa, unidentified
MNCVGIDVSKGKSMIAVMRPFGEVVVSPFEVRHTASELSELARLLKSLDGETRVVMESTGNYHAPVAWLLHDAGLYVSVVNAMLVHDYGNNSLRRAKTDKKDAVKLANYGLDRWLTLPRYVPEEDTRLMLKTCYRQYQQYSKVQTMLKNNLISLLDTAFPDVNRLFTSPPRADGSEKWVDFVATFWHCECVCGLSEKAFTAKYQRWCRKHRYNFSEEKALDIYASACGHFGVIPKTDTAKLLVEQAIFQLRATSAALAALKQEMQSLAASLPEYPVVMEMFGVGPTLGPQLMAEIGDVRRFHSKKALVAFAGIDAPPYQSGQIDVRSRSISKRGSASLRRALFLVMGVILQCAPGDEPVYQFMNKKRSEGKPYRVYMMASANKFLRIYYASVKAFLDSLEHA

SEQ ID NO: 450447 - protein, 387 aa, unidentified
MTKNKGRVVGLDVHPDSFAGAVVQGRDPASAVVLSTSTRVELERLEHWALRHTRTEDTLVLEASGNAFAVAARLRAIGREVEILDSHRAGKVGKVYCANDRVDAVKIARIYLSALSPTVWQPDQKTLERREVFSAYQAVVKESTRAKQQLRSMLNEHCVRLEKGFRLCHPNAIGRLVRLREWTPARRMLLQQLHSTLVAARTRRTLLRRHMAQEIVAEEALLRLTRLCGINLITLYGVVAAVGDVRRFAHSKKLVAYLGLNPSVSQSGNFEGSGALKRHGRGALRALLIQSGKKLLEVNNPLQKWGLAVAARRGRNKAAVAVARKLCVALWHVLMGHAIGTLERLDTLQTKLSKFATEIGPAALIAFGYNNKADFVEKKLYVLRSYP

SEQ ID NO: 450448 - protein, 343 aa, unidentified
MEYYVGLDVSLKQTSICVVNQTGSIVQEGVVDSNPEAIASFVRSRAPGTVRIGIETGPTTTWLWTELNRLGLPVICIDARHAKAVLKMQINKSDRSDAAGIARIMQTGWFKEVRVKDLDSHAVKALLASRALLVKIKRDLENQVRGLLKNLGLVIGRAKFNVFAVRAEGLIENRPELVAAVRPLLEARKAIEQQVDDLDRKVHKLARRDVQVRRFMTVPGVGAITALCFKATIDDPTRFKRSRSVGAYIGLTTRRHASGEIDWSGRISKCGDAMLRMYLFEAAGVLLTRVPKWSGLKAWGAKLTKRNGLRKAKVAVARKLAVILHRMWIDGTEFNWSMKKAAA

SEQ ID NO: 450449 - protein, 365 aa, unidentified
MFERTHVGLDVHALTVVACAIDGQTGEILRARLTPDHHEILAWIEALPGPCRIVYEAGPTGFPLARALRAAGIDCVVAAPSKLQRPPGERVKTDRNDALHLARLLILDQITEVIVPSPEQEAARDLVRAREDIRGDLMRARHRVSKLLLRQNIRYTGGKTWTQDHLAWLYRQRFGSPALQLTYDLALESVAETLARRGRADQAIRTMAYDSEYTPVVRALECLRGVSTLTAFGLAVEVGDWNRFTGRTIGAYLGLVPSENSSGQHRSQGAITKTGNTHARRLLVEAAWHHRRSYTHPSAALRARWDAATPWAKARGQTGNRRLHERWLSYQERKKRPVVAAVAIARELAGWCWSLASQAQQTQLL

SEQ ID NO: 450450 - protein, 372 aa, unidentified
MNYNTVYVGMDVHKESFTLCSCKYEDEKASHYQRTPASYKNVLRYLAFLRTIYGEDTRFVCGYEAGCLGYSLYHQLENFNVECVILAPTTMLEQRSKRRIKTDKRDAEIITKSLAQHNYSPVHIPTKMDNQTKEFIRMRDDHKAELKKIKQQILSFCLRQGYQYDGSGNWTAKHVKWLRSLKPAGLYKEILDEYLLTYTILTDKLNRLDQRIEELASKEEYKESVSKLTCFLGIKTHTALSVIVEVGDFQRFVSARKFAGYLGLVTGQHSSGDDRNGLGITKAGNTHVRRLLVESAQSYTRGKIGYKSRVLRSRQAGNSPQVINYADRANERLRRRYYKMVLKDGKKYNIAKTAIARELACFIWGMMTDNIY

SEQ ID NO: 450451 - protein, 309 aa, unidentified
MKQSVVYIGIDVAKAHLDVAWQEQSRRFANDKCGQAALIKWLKQSAFPVQLICEASGGYEQALVESLEHTDIAASVVQANRVRQYARAAGILAKTDKVDARVLAAFGAAMQPKPTAPLCPEQKRLRQYEAQRRHLSAALVAEQNRLAQLSYAELRVLSRSLISKIKKQIATIDARINGLIAQDKQLCQKAQKLTSITGVGARTAALVLAQMPELGQLNRRQAAALGGLAPFNRESGTFRGKRTIFGGRRALRSGLYMAAMVAARRNPILCSFYQRLRAKGKPHKLALTAVMRKLLLVLNQNLKPITSPA

SEQ ID NO: 450452 - protein, 398 aa, unidentified
MTRKNTLTSLDSHRQYAVIGLDLAKYDVSVAAIPMDNLSPTLVERMVYSDLMELASIISPTLFVMEPCNGYSLLCLELQALGHETKVISGKAVSMWINTHMSGQKTDINDALALARLAFDCDLQPIREKTLEESRMMTLQATRRQLLTQRTKTLVCFKGLCQQWGIRLKAGRRSLKKMRLAVEAKTALLSESVVHALIQLLERIRDLDHQIAELDKALEAILMQDERGQLLDKVFGIGPQIATRFITVVGDIRRFPSPRSLVAYIGCAPRNIITGHRNLPKIKKNGAPDLSHKGQGKISRHGDKYLRSLLIQGAASIYMQYSKGQLKDCALKDWIKKQIDSRKPYGKILVSLAAKLIRIMWAVLTYKEKFDIDKAGVSRSVLASMEKKRLTDEAVESA

SEQ ID NO: 450453 - protein, 338 aa, unidentified
MTYYAGIDVSLESASVCVIDAAGKIIREGKVASEPQALTDWLRATGSGLERVGLEAGPLSQWLYAGLQQAGIAAELLETRHVRRAFEIMPVKTDRKDAHGIADLMRLGWFRPVHCKSIDAQETRAMLTARKLVQKQVLEVESSLRGILRGFGLKVGKTTPVKFEGRIKELVAGNPSLERITDALLATRAVLRREFNGFERQLRTMARNNTRARLLMSTPGVGTIVALTYASAIDDPSRFKSSKTVGAHFGMTPKRYQSGEIDYTGRISKLGDASVRAALYEAAHVILTKPLKGCTALKSWAMKIARRAGMSKAKVALARKLAVVMHRMLVNGTTFHSA

SEQ ID NO: 450454 - protein, 332 aa, unidentified
MTAVSTLGIDLAKNTFSVHGVDAQGVVTVRRTVSRAKLGELVARLPPCLIGMEACSGAHEWARRFSEAGHTAKLMAPKFVTPYRKSGKNDGNDAEAICEAVGRPNMRFVPIKSVQQPCDLSLHRVRLGFVEERTATLKRIRGLIAEFGYVVPLGTERLRREARDLLERLPARAASCVRDLLEHAERLRSKALEYEREIRSSLQHNELALRAHTRPGIGPINASALVATVGNGHDFRNGRQFSAWLGLVPRQYSTGGKTRLGHITKRGDPYLRTLLVMAARSVLQRAYRETDPLSRWALALQQRRGYHRACVAIAAKNARVAWALLAKGAAAA

SEQ ID NO: 450455 - protein, 436 aa, unidentified
MTLINFVAANQKYYAFNLLSVFIMVFWSVQYLLQHLLVQTQVSHQLLQPLILILQLPQTPQFRHARPGKFFLPVNGMDYFLPLRLTVRNVLTRRITMNIVFLGIDLAKNVFQLCGLNQAGKPVYTKRTGRKELLQTLANIPACLIGIEASTGAFYWQREFEKLGHKVKVISPQYVRPFVRGQKNDGNDAQAIAVALMQPTMQFVPPKSPEQQDIQALHRARQRIVNHRTATVCQIRGLLLDRGIPIGSAVSRARRAIPLILEDAENGLSSRMRRTIAELYDLFNDLGRRIHFFDKEIETVFRQSEACPRIAKVKGIGPKTATAVVAAIGKGTEFKNGRHFAAWLGLVPRQHSSGDRQVLMNMTKKGDKHLRTLFIHGARAVVRVATNNNDGHINQWVNQLKERRGFNKTTVAVANKNARIIWSMLRNDTGYQVVCN

SEQ ID NO: 450456 - protein, 423 aa, unidentified
MPYRIAGIDVHKKKLAVVVADVEVEDEYQFERRWYGSNPEQLQLLAEWLIQQQVEEVVMESTAQYWKPVWGALEQYWKPSCEKREGAGRMSGTLHLAQALSNRGRRGRKKDFRDAERLLKRLVSQELTLSFVPHAEQRLWRTVTRTKYQLRRNKVRLHNQLEALLEEAHIKLSSLVSDLLGASARRMLQALAEGETDPAALAALADQRLRATSTQLRDALGACTELNPVYRRLVKMVLEELQWIEQQIGQLDQEMASLLRQHQDAVQRLAEVPGLGVDSAQQIIAEVGAKAATFASAKNLSSLVGACPGEEESAEVNYSARSPKGNRHMRRLLNQAANAAVKVKGSIFEIVYRRLGPRLGHNKTIGAIAHRICQLIWIILNKGVRYEERGPAVSENSRRARTSRMIRTLRKLGYRVELQADPA

SEQ ID NO: 450457 - protein, 421 aa, unidentified
MEILYSRCCGLDVHKASVTACCRWRDEVDHRSRKEIRRFGTYTSDLLDLAQWLQQHQVEQVGMESTGSYWRPVWNVLESRGLPLLLANAQHIKNVPGRKTDTLDPEWISDLLMHGLIRPSFVPGQKMRDLRDMTRMRSKVVQDHTRVVNRIQALLEDANIKLGNVVSDILGLSSRAMLQGLIEGRAPGELAELAQGRLRAKLEPLAKALEGHFRPEHGFLLQRMLMQTRFLEQQERALRRQIERHLDNQAQQAVALWDTIPGVNQAIGWVLAAEMGTRTEQFPDAHHAASWTAICPGNRESGGKRRSGKMRKGNPWLRAALCEAAWAASRSKGTYLAALYRRMAGRKGHKRAIVAVAHAILIIAYQMLNNNQPYRELGENYFDNIKPEKTADRLVRRLQKMGYQVFIQKPAAGKGAPATTT

SEQ ID NO: 450458 - protein, 456 aa, unidentified
MQTFYLGIDVSKGYADFIILNSQKKVVVENFQLDDTFEGHCLLFELLSRFFRDHPESIIYAAVESTGGYENNWYNALLAFQGSLNLQTVRLNPLGVYHDSKAEMKRNVTDKISAKSVAGYMIGHPEKVSYQQQDHLASLRKQWGFVKMLTKQSTQLLNQLESLLYNANPEILVYCKEGVPAWVFKLLVKYPTASNLTKAKVTSIARIPYVSSAKAQAIVLNAKRSVASATDKITQQLVVATVKQILHLKKTIKTQTEIMAKECSVPEVELLKTFIGVIDYSAIGLILNIQSVKQFKTAKKLASFFGLHPKLKISGDGVVVVRMSKTGRTEPRQILFMVAMTAITKNPLISGIYQEHVQKGMEKMAAIGLCMHKILRIIYGMLKHNSAFDPEIDIRNRQKSVQRRKSRKDNKIRRYQDYDPKAPISSWHKTKRMEQRQSQSDNGAEYGILAPVPFPT

SEQ ID NO: 450459 - protein, 401 aa, unidentified
MKRACGLDVHKDTIFCATFNGKRQGPVSEYSTLTTSIRAMGKDLHSEGVDAIAMESTGIYWIPVWNILEDMGFQLILVNPFLIKQMPGRKSDVKDAQWIATLLHKGLLRSSLVPFKEIRELRTYSRRYVKLQQRQTSVLQDMERTLEMCSIRITSFVSNISGKSILRVIEQIVQGETAPDVLVESIHGRIVNAHTKQNIKESLTGFITEHHRFMLELSLQEYELLISQSNQCILKMEELCNEHYKQQMKLLITIPGISTISAMIVLAETGADMKAFENSGKFSSWTGLRPRNDESAGKYKSTATTKGNRFLRSVLVQIAWAASRTKGTYFKEKFNRLAMRKSRKKALIAIARKVGVLIWNVLYYKQEYNPEKLIVYDPGKLQAKISYHQKEWDRLQILLQK

SEQ ID NO: 450460 - protein, 359 aa, unidentified
MLETMTYVGLDVHARSTHAAAIDVGSGELRRARFGGGSEQVVEWLQTLPVPLKGCYEAGPTGYGLYRAAAAAGLQLEVVAPSKTPRAPGDRVKSDRKDAELLARLLLAGQLKPVAVPPLPFEAARHLARGREQVRGDLMRCRHRVSKLLLLHGRVYEGSAWTKRHRCWLAQQRFDEPAAELAYLDCLAAVDGLVARKQTLDERLSRLACEGDWSQTVARLRCFRGVDTLTAFALALEIGDFGRFAGPAKLSAWLGLVPSLEQSGESRRQGAITKTGSGYARRLLVEAAWHYLPRPSEGPTLAARRAGQPDHVIQIAQRAERRLHRLYQRLRERGKPGNLTTVAVARELACFLWAAAVAD

SEQ ID NO: 450461 - protein, 336 aa, unidentified
MNDATWFLGIDVAKRKLDIALLVTDKIKSKVFDNNTSGHAALTRWLIERGAIQSHTHICLEATGPYSEALAIALVDAGWCVSVVNPARIKGFAQGELARNKTDRADASMLARFCAAMRPGFWTPPSSEWRELRGWVDRLQALKDMHQQESNRLEAHLASGQAALVEAVQTHLDWLTKHIAQLERNIDDHIDRHPELKRDAELLHSIPGIGNTTIAKVLAYAGDVRRFASAKALAAFVGVTPRQRLSGTSVKGRSMMSRTGHADLRRALYMPGLVARWHNPLLKVFGDRLSAAGLAPKAVVGAVMRKLAHLIYGVIKSGQPFDPKFSTARLDFQDGI

SEQ ID NO: 450462 - protein, 462 aa, unidentified
MTKRRKKAKSRSFQITKLPAQLQHINLNAAGIDIGSERHLVAVPEGRDEVSVREFGTFTVDLEALAAWLKTCGVTTVAMESTGVYWIPLFELLERRGFEVKLVDARHVKNVSGRKSDVLDCQWLQQLHTYGLLAGAFRPPDEVCVWRSYLRQREMLRQVASQHIQHMQKALQQMNLLLHNVVSDITGVTGMKIIKAILAGERDPRVLASNRDDRCKQSRATIAKSLVGNYRAEHLFALRQALDLYAVYQAKIADCDEAIIKQLEKKPDLSDDQPPSGDRYVQARDRVRGGIDVRELLFKKSGVDLFAIPGLAADHLLTLASEVGFDMSPWKTEKHFSSWLGVCPGTKRSGGKTLDSKTKRNPNRAAQAFRMAAASLSRSRTALGAFYRRLKARRSGAQAVTATAHKLARIYYAMLTKGANYIELGQQAYEQRYKERRIAHLKIQAKSLGFQLVACTADESSF

SEQ ID NO: 450463 - protein, 430 aa, unidentified
MSSTDSTNQKPVAAFVGIDWADQKHAIVLRAATSTASLEHRSIGAEPDALVEWVLEVRERFASAGRILVCLEQSRGALIHFLMGYECFELYPINPKQLASYRETFRPSGAKDDPIDAELLCQLVSLHHRQLRPWHPDDVLTRKLALLCQKRRQAVDARTALSNQLKSELKQYFPLALAVLDNDLTTALAADFLLQWPNFESLKKTAPHKLRKFFYGHQSRSEQKLQARLERIQAAQPLTRDAAIIEAGTLTVQMLAQQLKALVPYIARYEKEIAQLFELHPDSALFNNLPGAGPTLGPRLLAAFGTDRERFQSPLDAVTFFGVAPVTEQSGKSKWIHFRWACPKFLRQSFHEFASQSIRFCDWAAVYYQQQRARGKGHHAAVRALAYKWIRIRFRCWKSRQPYHPQLYLTALLQRGSPYTSPVKNSTPKT

SEQ ID NO: 450464 - protein, 309 aa, unidentified
MNEELVYLGVDIAKAYLDAAIANEKRRFSNDAVGHRRLIQWLKQIKGPVQVICEPSGGYERALVRALVAAQIKVSLVPANRVRQFARAGGILAKTDRIDAKLLCAFGEAMKPGIISASQLEQEQLRELESQRRHLTHLLVMEQNRAARVSEVCARKLNRRLITEIKKQVEQLDLLIQEQIAASRELATKAQKLTTISGVGARTAALLLAQMPELGQLNRREVAALVGVAPFNRDSGRMRGKRAIYGGRRSVRHGLYMAALVAARHNPILRGFYLRLRAAGKPAKVALTATMRKLLIVLNSALKPDLNYA

SEQ ID NO: 450465 - protein, 356 aa, unidentified
MAQTLNPVTAVVGIDIGKNSFHIVGHDERGAIVLRQKWSRGQVETRFANMPPCLVGMEACVGAHHLSRKLKTLGHDARLMPAKYVRPYSKGQKNDFRDAEAIAEAVQRPTMKFVSTKTADQLDLQALHRVRERLVSQRTGIINQIRAFLLERGIAVRQGQRFLRAELPRILTTPPDVLSPRMVRVIEGLCGDWRRLDERIEGLSSEIEVIARQDAGCERLMSVPGIGPIISSAMVAAIGAGDAFTKGRDFAAWLGLVPRQMSTGDRTILGKISKRGNRYLRVLFVQAAWVVLIKPTVWQRHGLKPWIEAAKKRLHHNVLAIALANKLARIAWSVLARGRAFEVRKINKAATQPACS

SEQ ID NO: 450466 - protein, 384 aa, unidentified
MPDVSSNAPGVVRMRAALDVHKRTIVCASQPDDPRAGELRLQEIPNTERALRALIRRLGGAEGLVVCYEAGPCGYEPYRLLSEMGVACDIVAPALVPVAPGARVKTDRRDAKRLLVLHRAGALKFVHPPTPAQEGLRDLVRCREDLVCARRAARHRVAKQLLRHGHIFREGKKSWTKIHQAWVRRQRLADPLAQSALEHMLAHLDALDAQIAVLDHQLDKIAQREPWSDPVRWLSCFRGITTLTALALLAELGDFRRFGTARELMGFLGLTPSEYSSGEQRHRGHITLAGNTHARRLLIEAAWHYQHAPRVSQRIAAVQPHVPPDVAARAHSAQVRLHHRHRSLTGRGKRSTVTNVAVARELAGFIWAAMTRQPLRDPEVNAAA

SEQ ID NO: 450467 - protein, 375 aa, unidentified
MTKSNILFIGMDVHKESIEIAIADDGPQGEVRRYGRIGGSMDALKKTLRKLESTGKSLHFCYEAGPCGYELYRYLIDAGHICIVVAPSLIPKKPGDKVKTDKRDAVQLVRLFRAGELTPVYVPDREDEAMRDLSRAREDAMIIQKSARQRLKSFLLRHNIRYQNRANWGEKHLRWLANEVRLPIPPQQVVFQEYVNTVTEAAYRMERLVAEIHHHAKVWRLYPVVQALMAMRGVRLIVAVTVIAELGDLTRFENPQQLMSYLGLTPCEYSSGERQRRGAITKTGNHHVRRILIEAAWSYRFSPKVSPEIQKRQQNLPLPVRDIAWKAQLRLTKRYKMMIQRGKVPNIVVVAIARELAGFMWAMAQAVPLSNQPTV

SEQ ID NO: 450468 - protein, 355 aa, unidentified
MNQEKYIGMDVHQATISVAVMDGKGKLIMECIVETKASTLLEFIQGLHGSLSVTFEEGTSAAWLHDLLKPHVHHLVVCDAGKNALLKDGSKSDRIDARKLAELLRLNKLNPVYPGEHGVRTLKELGRSYLTITKDLTRVLSRIKALYRSWAIPCSGATVYAPRHRAEWLAKILEPGVRLRAERLYQQLDLLQPVRQEARRDLLGESHKHPAVKLLRQIPSIGPIRAALLVALLQTPHRFRTQRQLWAYSGFAVETQDSGEYRFVRGKLRRNRERIPVRGLNHNHNHDLKNLFKGAALSASTRPGPLCDFYVALLEKGMRPTMARLTLARKMAAITLTIWKKGVEFDAQPLNRQAA

SEQ ID NO: 450469 - protein, 438 aa, unidentified
MKVLHEHVAGIDVHKDMIKVAIRSPGEKPWTRKTEVLEFRTFYGVLQEMARELRRRGVTHVAMEASGVYTEPVYHALCEQDFTEVIVVNPAHVKALRGYKTDARDCARIAELLECGLLHGSFIPSAEQKEVRDLTRYRMKTVQARTSEIQRLHKALESAGIKLGSVLSDITGVSGRLMIDALIDGERRAQVMADLAKGTLRQAGKQADLSMALAARFTDHHAMLCRLHRDQIKLADHAIAGLDAQIADRAGRWPRELGLLDSVPGFGDVVSAAWLAEIGPAPHRWFPSHGKLASWVTLCPGNNISARKRKHGRTGDAGTYIKPVLVQAAWAAIRVRGRLQARYRRLVRRFGGDKNPGAKKKAIIAIAHTLLKIAYQVLKTGQPYTDLGADFYTRRQSPEQQQAYLARRLQKLHPGCTVTITISPPPGSPPPSAPAEAA

SEQ ID NO: 450470 - protein, 342 aa, unidentified
MPRSGLCRPAVRTMGGCSTTRFVGLDVSQKLTAVCVVDEAGRRVWRGQCATDPEHIERMVRGHAGDDARVGLETGSMTPWLVHELRDQALDVTCLDARHARAALKMQINKTGQNDAEGLAQIMRAGWYRSVHVKSLDAHRARALLGARAQLVGMTTRLSNHIRGVLKTFGMLPGAMRGLPFDRRVEALLVDRDDLAPIVQPMLVAWRQPREQIAAFDKAVRALAKESPTCRLLMSVPGIGVLSVLAYVSTVEDPGRFTRSRSVGAHMGLTPRQYQSGDVDRSGRISRCGGMLARTLLYEAAVVILTRVKRASRLKDWAQAIAKRSGTALVHVWTAPRMQEKK

SEQ ID NO: 450471 - protein, 412 aa, unidentified
MQVVYARCAGLDVHKKTVSACVSVCEADGGKRQQLRTFGTFTRDLLALADWLKQNAVTHVAMEATGIYWRPVWAVLESQFEQMLVNPQHIKAVPGRKTDAKDCEWIADLLQHGLLRGSFVPPTPIQDLRDLTRYRAELRQSQNRVANRIQKFLEQANLKLSSVASDALGVSGRRMLEAIIAGEADPEQLAQLARGRLKSKVAELELALEGRVRDHHRFLLAEYLDEWEALGERIKRIEVEIHQQIGPFEEAVALWKTVPGVDRVTACNLVAEVGVNMSQFSSAQHLASWAAVCPGNHESAGKRKSGRTRDGNRWLRRSLCQAAWAVTRKKDCYLSAQFKRLASRRGVKRAVMAVAHTMLIVGYHMLKTGQGYRELGGDYLEQTNKHQLQRYYVKRLQRLGLRVTVEPVPEAA

SEQ ID NO: 450472 - protein, 441 aa, unidentified
MFEPNAAGIDIGAREIFVAVPPERDSDPVRKCETFTGDLHQMAEWLVRCGITTAAMESTGVYWIPVYDVLEQHGIKPCLVNPRNMKNVPGKRTDFHECQWIQHLHSLGLLHSAFRPDGEVCAVRSLMRHRNDMVMMASEHIQHMQKALTQMNVQFQHVIDDITGLTGLAILDAILAGERDPAVLAKLRDPRIKANEETIRKSLEGNWRAEHILALKQRLSLYRSHRDLINECDKEIEKLVAAFEPRVDPDEKPMPEDRKQKQRKRKKKSGHPDFNVRAEAYELFGVDLTQIPGLMTLVFMLFSEVGRDMSRWPTAAHFVSWLGLCPDNDISGGKVLWRGARRTKNRAGTLFRLAAHSLHRDQTPIGDYLRRMKAKLGPAAATTATAHKIAIIFYTMVNKQVEYDASLWAQRDEMREQRLETRLQKQAARRGYKLVPLEPAA

SEQ ID NO: 450473 - protein, 457 aa, unidentified
MQSFYLGSDVSKGYADFVILDSRKQQVMKNFQLDDTFEGQSHLYDILSQFLAAHSGANLFAAVESTGGYENNWYNTLVKFQSTLNIQTARLNPLGVMHNSKADLKRNNTDKISAQSIAEYLITHPEKVTYQQEDQMASLRKQWGFIKMLTKQSTQLLNQLESLLYTANTELLAYCKDGTPGWVLKLLLKYPTAARLSKARVPAVSQIPYVTSERAQKLVISAKRSVASASDRITEKLVSATAKQILNLKKTIDEQAKLMIKECPIPEVDILKTFTGIDDSSAIGLILEIQAIERFKTVKKLASFFGIHPIYKISGDGSGGFRMSKKGRKEPRKILFMVALTAVRSNPLIRNIYLERTEKGMEKMAAIGLCMHKILRIIYGMLKHGKPFDPQIDLNNRQRSFKKKPAVKRDESRRFQDYDSKAPISRRQNKKRLERKPSHSVNDTKFGIDTPVPELVS

SEQ ID NO: 450474 - protein, 368 aa, unidentified
MDQHSTVVGMDVHKRNLTVAILPPGKARPIEVLTIENRGKAIARMATRLTTGRAVFVYEAGPCGYEVQRQLHRLGCRAVVIAPALTPIRPGDRVKTNRRDAEKLARLYRAGELTEIRVPTREEEAARDLVRAREDAVADRLRARHRLSKFLLRQGRLYHDSKAWSKGHRVWVRQQRFDLAAAQQTFDAYLRALEEAEARLESLNSQVLELAQTPAYAGLVRALSCLKGIDTLSAVTIAVETQDFRRFPDARGYMKFTGLVCAEDSSGDKTRRGGITKAGNAHLRRVLVEAAWSYSHRNTTGPTIRRRRHGRPTSVVQIARRAQDRLHRRFWRLVHRNKLRQVAVVAVARELAGFVWAIARESTAALIA

SEQ ID NO: 450475 - protein, 365 aa, unidentified
MRHSTKRVSVRANQPQRNTIGVDTSDKKSRICVLSPDGEILEETEIPTSMPGYTRYFKRQVPALVTCEVGSHSAWIEIVLRDCGHDVIVANPREIEGMRKRNHKTDKRDAFLLARSALQSPESLHGITQRSPEIRRDMTLMNARDSLVEARTALVNAVRGFVKPTGHRIPKISTHAFHKKALEHIPADLGPALEPLLVTIAGLTQQIDHYDREIERCAKKHPVTERLRQVGGVGPITSLLLVLVIMDPKRFKKSRDVGAYLGLVPKTYQSGESSPQLGITKSGNVLLRRLLVGSAHYILGPFGEDSDLRRYGLALAERGGKAAKKKAVVAVARKLAVLLHRLWVTGEDYEPLRNSTRRTSKRAIA

SEQ ID NO: 450476 - protein, 454 aa, unidentified
MSRKSRTPKKIQNLDALTVLHPHAAGLDIGASEIWACVPATADKDSVRRFSTFTPDLHALADWFGACGIDTVAMESTGVYWIPIFEILEARGLTVYLVNAWHLKHVPGRKSDILDCQWIQKLHSLGLLRASFRPDAEMCALRTLLRHRAALIQHRAPHILHMHKALLQMNLQLGLAVSDLTGDTGLAILRAIVAGERDPHKLAQLRHPRCEAPAADFVKALTGSWRTELLFTLQQALELFDCYTRQLATCDTELEHRFAATQPRWDAPAEIPPLPKVKARSHSKNAPAYDARAALFRLVGVDLCAIKGLDASLLQTILTETGTDMSKFPTDKNFCAWLGLAPHPEISGGKVLRNHTLQTHNRAGQAFRQAAACVIRANSAFGAYYRRKKVHLGPMQALVATAHKIARTVYHLLKTKQPYLDIGAEAYDQQQKDREIAYLKRKAAKLGFSLTAAA

SEQ ID NO: 450477 - protein, 441 aa, unidentified
MAMRKRDDDLVFPNAAGVDVGGSSHWVAVPRHTCDEPVREFGAMTDDLNAMAEWLLACGVDTVALESTGVYWIPVFEVLTQRGLRVWLVDARQMKYVPGRKSDVQDCQWLQRLMSQGYLRAAFRPDDEVCVVRAVTRQRDVLVADQASWVQRMQKALVQMNIQLTEVLSDVMGTTGQAIIRAIVAGERDPKVLARHRNGRVKASEQDIAKALTGNWRDEHLFVLRQALAMYDDIGRHLGECDAKLQGLLTQLGQSKVDLGRAPRAGSKTRAEFDTRQILANWAGVDLTRINGLGLAVVMKILSELGPDLSRFANVKHFCSWLGLCPGTKISGGRVLSAKTKRSANRVRQALKMAAMSLSHSDSALGAFYRRMSGRMDKPRANTATAHKLARMVYFMLTRGEAFVDHGQQRYEEQQRQRSIAALKRRAAALGFAVTPTPTPA

SEQ ID NO: 450478 - protein, 331 aa, unidentified
MKTIEIVGIDVSKKTLDFHLFNHKLSFKTSNSPEGYVFMLQTCKDKLGEEIQNILFCFEDTGRYSKLLSVFLYDTGYKFKIINPLDLKRSLGLVRGKTDKKDARLIAKYTWEKRDEITPTILPSPTTDQLKALLTLREKLIKHRTSYKNGSKDLLDCYKEGEYDAIRDAHIRMINHLNKEIKIVEDQIIGIFGKHQTLEKNYNLLLTIKGIGKVLSIYLIVLTENFTKFNDPRKFACYAGIAPFPYISGTSVKGRTKLNSCANKQMKSLLNVASMSAIQLKGEYKKYYLRRCEEGKNKMSTLNIIRNKLVFRAFAVVKRGTPYVDLSAFAA

SEQ ID NO: 450479 - protein, 361 aa, unidentified
MAMKKRLSKKEMFFNKVKLTKDDDLYVGIDVHKETYGVALWLNDTPAIDFLMPADNAKLLKLLEKVHIALKKVVYEAGPTGYTLARTLQKANIPTAVIAPSKTPRQSARDSKTDQLDAKTLARYAAKGLLRPIAIPTRQQEADRQLTRTRDQLVSKQSRLKLQIKSFLLQHGIEQPPAVRGWSAKAVDQLCALKLSKQLRLCLDLLAQELQFLQSQLTTIEERLKDNFDKGGHARDVALLKTHPGVGPVIARQYAAEIFNPKRFKHKTEVAKYVGLAPTIIQSGQSYRDGPVTKTGRPQLRSNLIQGAWIWITKDPQARKTFNRILHNTANKNKAITAMARRLAVHLWKMLCDNKPFTNAA

SEQ ID NO: 450480 - protein, 355 aa, unidentified
MSEKFNSEIAVIGIDIGKNSFHIVGQDRRGSIVLRQKWSRGQVEARLANLPPCLIGMEACTGAHHLSRKLQALGHDARLMPAKYVRPYSKGEKNDYRDAEAIAEAAQRPTMKFVATKSADQLDLQALHRVRERLVGQRTGIINQIRAFLLERSIAVRQGLHFLRAELPGILAKRTDVLSPRMLRVIEDLARDWRRLDERIDALSDEIMMLARQDKGCERLMTVPGIGPIISSAMVAAIGSGDTFSKGRDFGAWLGLVPKQMSTGDRTILGSISRRGNRYLRTLFVQAAWVVLVKIKPEGRERYGLKSWIETAKQRLHRNVLAIALANKLARIAWAVLHKGRAFECVTNATASRPA

SEQ ID NO: 450481 - protein, 350 aa, unidentified
MNVTHYIGFDVHKKWIFYCTKTRGGTVVEEGKIQSVRPALKAWAQQRSEVWMGGLEATLFTGWIYDELKPYAAELKVANPAMLKVIAASKKKNDRIDARKIADMLRCDLLPECYMAPSWIRELRRMLRYRNLVVAQAVRLKNRIAGLLMEEGVSYDQRRLHGKRYFAGLLHSLETPASVLQLLRLSRASLEMFQTVERRLIRELASNPQLQARVELLETIRGVGVILALTWALEIAEVERFGSIRQAVSYCGLTSAERESGGKQYRGPISKQRNRHLQTILIEAAKLAPRWNPELAALHERELARGNRNRATLAVARKLVAYLMAVDRSGEPFQARGSAVESAGVAQAAD

SEQ ID NO: 450482 - protein, 416 aa, unidentified
MDIIHTNCAGLDVHKKTVVATIIVPDGQGGLRKETHTYGTMTADLLELSDWLLSQEVTHVAMESTGEYWKPVFNILENNFEVLLVNAQHVKNVPGRKTDVKDSEWLAELLRHGLLKASFIPPVGQRELRELTWHRTHFVRERATLVNRVQKTLESANIKLASVASNVMGVSGRAMLEAIIAGKASSTEMAALAKGRLREKRDELRQALQGRVKPHHQFVLAELLCQIDSLDETIARFDAEIEEYCRPFEQAVELLDTIPGVARRTAEVIVAEIGKDMSRFPTADHLAAWAGVAPGNHESAGKRYSGTTRKGDKALNTALIQAAHAAAHARDTYLSAQYHRLAGRRGKKRAIVAVAHSILVIAYHMLQRKEPYRELGGDYFDKRRPEATAKRLLKRLQRLGYDVSRIEQSFPLPAAA

SEQ ID NO: 450483 - protein, 459 aa, unidentified
MDVLYERVAGLDVHKDTVVACVRIVADGKTKRECRTFATTTEQLGELRRWLEECRCTHVAMEATGVYWMPVLRILDAGKFELIVANAAHIKNVPGRKTDMNDAMWIADLLACGLIQASFVPNEEVQELRALTRTREQLVREQTRHVQRIEKTLAEANIKLSSVISDIMGASGRRMIQAMIDGVRQPNKLAELAGKQIKATPKELYDALHGRLTDHHRFLLELHLKQWDNIDGMIRKLDVEIDQRIARMEATTEGSRTPFRALIELLTTIPGVSAVAAPAILSEIGADMSRFPTSGHLMAWAGLCPGQNESAGKRKSSRLRKGAPWLKTMLVQCAWAAKRTKDSYYRAQFFRLQARRGPQKAICAVAASILTAIYHILKHGTEHHDLGSSHFDRRPVQVKASRLVQHLKKLGFTVQLQPIAEAPCRHPISRFFLGATATTRRRSLCELWRAWSPPKRPCA

SEQ ID NO: 450484 - protein, 348 aa, unidentified
MRFYTGQHQHYCGIDLHARTLYLCVLDAEGNVLLHKNLPCDRIRFLEAIEPFRDDLVVASECIFNWYWLADLCVDHDIHFVLGHALYMRAIHGAKAKNDKIDSHKTASLLRGGLLPQAYAYPSKMRPTRDLLRRRTHFVRKRGQLTAHIQNTFHQYNLPRPPGHLVYKHQRAPVPDAFEDPIVRKAVEADLVLCETYDHLIRDLENTVLRQARIHDPNALLCLNTIPGIGKILSLTFLDEIHDIGRFDSVQRFASYARLIKCETSSAGKRTGSSGAKIGNAHLKWAFGEAAVTVLSHFPESKKLHSRLKRKHGNGKALSILAHKIGRTVYFMLKRNQAFDPDRFLANA

SEQ ID NO: 450485 - protein, 384 aa, unidentified
MKKNISRFVEMKATVIETKGDGTTPPRRTISQRPDYRAVVGLDVGDRQTHYCVLDLDGELAVEGAVATREASLRVQFEGKARMRIALEAGTHSAWIHRLLVELGHDVIVANPRKVRLISSSDSKNDPADARTLARLAHVGPELLSPIQPRSEKTQVDLALVRARDVAVQSRTKIVNAVRGIVKSTGHRLPKSSTLTFARKAKDACPEALQPALLPLLRVIEELTREIELYEKLVSQKAETEYPQTKAIRTIHGVGPITALTLVLVLNNDRNRFRNSRDVGCYIGLRPKQRDSGQRAPQLGITKAGDSLLRRLATQCAQYILGPFGKDSALRRWGLSLALRGGKNAKKRAVVAVARKLVILMHRIWITQEVYEPLRGVALKSTAA

SEQ ID NO: 450486 - protein, 348 aa, unidentified
MDATTVAIDLAKDVFEVAIGNRGGQVLHRHRFTRARLQRFLEGQAAGTEVLMEACGTAHHWGRLCQRLQLVPVLLPVQYVRAYVRRNKSDRTDAAALLEARRCGEIAPVPVKTPEQQAWQGLHRIRQQWQKTRTARINGLRGLLREYGIVVGLGARRLHAHVPAIVTTEEAPVPGPLLAALQTLLEEIRELERRIKALDATLVAHLATDDVGQRLQTIPGVGPITASALLASVPHIHQFRRGRQFASWLGLTPREAASGHRVWRGRITKRGDVYLRTLLIHGARSVIRHAHAQARQARVALTARQRWVLALVSRRGVNKAATAFANHQARVIWAVWRSEQPYRCVATP

SEQ ID NO: 450487 - protein, 338 aa, unidentified
MPLYSAIDLHGNNNVTLVLDEQDQVVYQKRLTNPLPLILEALAPFQAQLQGIVVESTFNWYWLVDGLMEADYRVHLANPTAIQQYSGLKYTDDHSDARWLAHLLRLGVLPKGYIYPKEQRPLRDLLRKRGHLVEQQTSNVLSVQNIISRNTACRLSVNQIKQLTPDEVQVLLPNEDQDLVVSSTLRVITCLMEQIHLVEKRVQSRIKSTPLYELVQSVNGIGPILAQTILLETGDIDRVADVGDYVSYCRLVNSTKLSNGKRKGKGNVKNGNKYLSWAYSEASHFAIRFSPEIQRFYQRKASKTNVPVAYRTVAHKLARACYHIMRNKVPFDVAKAFG

SEQ ID NO: 450488 - protein, 375 aa, unidentified
MKATRLNPEEIERIAAIRCGRGLLPVGVDVASRVFQACWLDPASGRICNRQFTRDRFFDFVRDGSQGRRLFGIEACGACAFMSRFMESCGSECRIMPASRIKAFLGLDKTDRIDAAGILKALISPSIPSIRPRSLDGQALMALINARLLLVKLQVQAVNAAHAAIYEMGGLAGYCRAKAPRRVLDGLGQAAASLPAGSPAASHFACLSSALSSSIGKEAALIKAIDAHLAQFGECDSTCRLMATVPGIGLHTAVLLRAAMGEPSRFASARSFAAFIGVAPRVSGTGGRTSVLGVRRSGVPAAKRALYMCAMAYLGHAMKSGEQSPWLRQRLDAGACRKKLVCALMNRLCRIAFAVARTGKPFDKDRSNLVKPLRR

SEQ ID NO: 450489 - protein, 342 aa, unidentified
MKSTTIGLDIAKNVFQVHGVDAKGNVVLRKMLKRRQVLEFFANRAPSLIGMEACAGAHYWARELGKQGHEVRLISPQFVKPYVKGNKNDANDAEAICEAVGRPNMRFVPVKTPEQQDVLALHRVRSGLVKERTAQANRLRGLLGEYGIVIGKGLAQLRKRLPEILEDAENDLSDLVRALFADLHGRILTLDQHVAAYGDKLKTLNQMSAVCRKIGQVPGVGPITATAMAASLGDGQAFETGRQVSAWLGLVPGQDSSGGKPKLLGISKRGDTYLRTLLIHGARAVVKAAAKKHDAQSRWINELVKRRNANVAAVALANKNARVIWALLRRDEDYHAPVCANA

SEQ ID NO: 450490 - protein, 452 aa, unidentified
MTGRKKPHKQDGMALIHPHAAAIDIGSRMHVAAVAPDRNAMPVRTFGTFTEDLYRIADWFEECGVTTVAMESTGVYWIPAFEILEERGFDVILVNARDARHVPGRKTDVSDAQWLQRLHAYGLLRGSFRPHGEITALRAYLRQRERLLDYAASHIQHMQKALTLMNFQIHHVVSDITGMTGMRIVRAIVEGERDPAVLAQFRDARCRASVDTIRQALIGNVRDEHIFALTQALDLYDLYQAKVVDCDRRIEAVLASLERPDAQPAASLPKPRHHTHPPNAPAFDAREALYAILGVDLTQIHGIGPYLALKLVGECGTDLSAWPTAKHFTSWLSLAPSNKISGGKILSSKTRRSNNRAASLLRLAAITVGRTETALGAFYRRLSARVGKAKAVTATARKIAVLFYNTLRHGLIYADPGAKYYEERHRERVIMNLTRRAKALGYSLSPADPAPA

SEQ ID NO: 450491 - protein, 346 aa, unidentified
MRIIGCDFHPSWQQVAWLDAATGETGECRLVNGNGEAERFYRAVPEPALVGIEACGNSQWVVDMLQQIGHEVWIGDAAQIRASYVRKQKTDKRDAAHILKMLVEGRFPKLWTASAEQRDVRQLLLHRHKLVEIRTRVKNGLQHLALNRGLQKKSRLWSAAGQQALRELPLQGWAGRRRQDLLQLLKHLDQQMGELDQAVEEEAQRDKMAQLLRTHPGVGPITALAFVVTIGDVTRFPRGKQVASYLGLIPRERSSGGRQRLGAISKQGNGFLRLLLVEAAHSANRLDEGFRRTYQQRCHRMAKGVAKVAAARKLAVRLYWMLRTNTAYPEIVQIESSPRVPLVGRR

SEQ ID NO: 450492 - protein, 429 aa, unidentified
MKIIYPRVCGIDVHKKFIVAVICISESVEPVYLKKRFSTFHNDLIRFRDWLIQNDCQNVCMESTGKYYIPVYNILESHISNIVVANPKWVRAVKGEKDDDKDAKWIADLFKLGIVKSSFIPQKDFRILRELTRYKYKLVNMRSSEKNRYQNALTSGNCKLDMVFTDVFGKSASNIIDLILSDNPYTDEDILSKVHKNCKASPDMILNSINGTDLTPVQKSRIELVNNHIKQLSSNIQRLDKLIDLMIEPYEDYISFLCQIPGVSRNSAITILSEIGVDMNQFTSTRRLTSWAGLTPSSNQSAGKKKSVRISRAGVYLKPCLVEVAHAAVKDTSHPYYANKFNKISKRRGKKRAYIAIARKILVAAYHMLLTGEIWNPADLAEVETPVEQRIKYVKNNLKSDIKQLLDIGLTVEELTLMIQQNANNIATQ

SEQ ID NO: 450493 - protein, 387 aa, unidentified
MPPLNDLSRSLVALDQDSTIIAVVELSQSSWLVAGVLPGIERQPQKKLEPSAERLLGLLHRWRDEAVRAGKKITRIALAFEAGRDGFWLARWLNARGVEAHVIHPSSVAVSREHRRAKTDRLDTELLKRGFLGWLRGERGHCSMARVPTIAEEDAKRPNRERECLVGERTRIVNRMKATLARLGVRNFKPTLRKAAERLATVHTPEGTPLPRNVLAELQRDMARLGFVVSQIREIEQARQKRLEQETETGPHAMVRQVARVIGIGIETADMLVHEVLSRPMRDRKAVARYAGLTGSPDESGARRREQGLARAGNARVRRGMIQLAWRFLRFQKESALAQWYRARTADSRLGTRKTMIVALARKLLIALWRFVTTGETLDGVILRPAG

SEQ ID NO: 450494 - protein, 392 aa, unidentified
MYIVGIDIGKNHHEASIVSPEGKQIGHSLRFATTHKGADSLMSFIFNNIGNSSCIFGMEATGHYWYPIYSFLKARGYTIYVINPIQSDSLRKMYIRQTKNDSIDSFLIAEVIRFGQFTTTSMADENILAMRQLCRYRDSVISSRTEIKLRISTIMEQIFPEYEKQFSSLWVSTSMGILEKYLTPENIENAPIDELFEIIKDKSHNKLTMKKAISIREAAADTFGIKIAQDAFSFQLKQLIDRMNFLDKQIEALDCQILEYYEKFDCYLHTIPGIGMIAAATILTEIGDINRFKSSSALVAFAGIDPTVRQSGEFSSTHNHMSKRGSPYLRHAIFLAATTCSFHNSPLNAYYKKKREQGKHHLTATGAVARKLTTVIYAVLRDGKPYEPKSFC

SEQ ID NO: 450495 - protein, 394 aa, unidentified
MRFAGIDIASETHVLAIVAADGTVAVKPTAFAEDDLGYQNALTLLGTPGEVLVSMEATGHYWKNLFAVLVAAGHAVALLNPLRTHRFAGVDLERTKTDAIDALAIARFAAQKRPPTTPLPDALAEELRELVQLRQRLMQDFGDRVRQLHRLVDLGFPEFTRYVRTLDSELATAILRDYPTAAAFRGVSARRLAAVRYDGRHQVGPNLARTLIDAARRSVGQHHSATYRLQIRYACDDLDTLRGRLRTLDRDLDGKLRQHEVGRLLTSIDGIGPQTAARVIATVGNPAHFRSGTALAAYVGTIPALKQSGKRQSLRGGHTPIGNAQLRAALWMPTLSAVRCNPWLRAHYQRLIARGKLPKVALLACMRKPLLVIYSVAKHGQPFAPRLQPPQAAT

SEQ ID NO: 450496 - protein, 373 aa, unidentified
MPNTRAGFLALSELFGAWKARPDSAVIVGVESTGSYGVNFVRWLSEHGCRVVLVPSLHVCRVKELLDNGRGTSDNKDALIIADLVARGQYLGFVALSGACIELRPLVSLRARLVREQSGWLNALHQTVDVLFPEFETVFADLKPPSARLVLGRFGTVAAALAHSPAAMRRLLARDGAARVSLAKLKRLQAAAAESIGPLAVSAGQERSLREMLETLATLAERIAGLEAEIVRLLKQLPEAEYLMSVKGVGAMTAAVILAETGGLAQYSCARAVLKLAGLNLYQNSSGQYQSGRRISKRGRSQLRRALYMVAVQHAKRGWPLQPYYAALVARGKPKNVALTAVCCRLVRLLYALVRDGRCYSEHPSEAGCLQAA

SEQ ID NO: 450497 - protein, 412 aa, unidentified
MEVIVERPAALDVHKAQVTACVRIADEHGNREERVAEFATTVRGLLGLRDWLAAHRVQQVVMEATGVYWKAPWAILEDEFECLLVNARHVKQVPGRKTDVSDAAWLCRLAEAGLLKASFVPPKPIRQLRNLTRYRKTQIQERSREVNRLHKALEDAGIKLDCVAADVLGKSGRDMLDALVAGTTDPEVLAQLARRQMRKKIPQLQEALAGHFDAHHALWIGAILAHIDFLDDQIDRLSDAIEEQIRPFAAAVELLCTIVGIQRRGAECILAEIGADMTRFASARHLASWAGQCPGNDQSAGKRRSGKTRDGSKWLDFALEEAAMAAIRVKANYPAAQYQRLKPRRGHKRALGAVKHSMISAIWHMLSTGETYRDLGADYFTQRDPERQTKRLVKQLERLGHHVTLAEGAAAA

SEQ ID NO: 450498 - protein, 405 aa, unidentified
MNAVGIDVSKGKSTVTIRKPGDVVLMSPCDIPHSQSAINDLIKQIKSLEGETKVCMEHTGRYYEPVATWLSDAGIFVSAVNPILIRDFGDDSLRTPKTDKADSKKIARYTLDRWAKLKQYGIMDKTRNQLKTMNRQFGFYMAQKTAMKNNLIALIDQTYPEANDFFDSPARNDGSQKWVDFIHTYWHVDCVRSKSLNAFTEHYQNWCKRKNYNFSAEKAAKIYQISSDLIAVFSKDDITKMLIWQAVALLNTASETVESLRSKMNELASTLPEYPVVMDMNGVGATLGPQLIAEIGDVSRFTHREALTAFAGVDPGKNDSGKHIQNSVRTSKKGSPYLRKALFQIMDSLIKRSPVDDPVYAFMDKKRSEGKPYYVYMTAGANKFLRIYYGRVREYLSNLSNNETI

SEQ ID NO: 450499 - protein, 376 aa, unidentified
MNEKLRFLGLDVHAETIAVAVAEPNGEVRSLGMIANREDSIRKFIRKLGSPEHLRACYEAGPTGFVLYWQLTQLGVKCDVVAPSLVPKKPGDRVKTDRRDALKLARSHRSDDLTAVWVPDEGSEALRDLVRAREAAKQDQLRAKHRLTKFLLRTGQRPPLGVKAWTEKYVEWVQQVRYTHPAQEATLLDCLNEVQHMEERVKRLEQSIVEVIQLAPAPMQEVVRGLQALRGIAHISAVTIAVELGNITSRFESARDLMGYSGACPSEDSTGKRIRRGGITKSGNAHLRRIVVESAWSYRHRPAIGARLRRRQEGLPAEITEIAWKAQNRLHKRYMTLMARGKEQRKTMTAIARELLGFIWAIGIKAEAACKQQMAA

SEQ ID NO: 450500 - protein, 488 aa, unidentified
MSATGQQEGKKDPTLNARAPKRKARGSNCHQGKGHQRRSKLTITNPDAAGIDIGAQVHYAAVPEDRAPVSVRSFGAYTAQLDELVQWFKDCGIKTVAMESTGVYWIPLYQKLEEAGFEVLLVDARQAKHVPGRKSDVQDCRWLQQLHSYGLLRAAFRPEDSICRLRTLQRHRKNLVEYAAMWVQHMQKALNEMNLHLHHVLSDISGLSGLRILDGILAGERDPAKLASLAHHRVRKSRAQIEAALTGDYRPELLFVLEQSLQNYRQIQQQITQCDLSIEKQLAKMTDGPAPRQAAEPMPSSPELGGGKSGKRKPPVALETSLAGHLKRILGVDLTTIPGLNVLAILTLISEIGTNMTKWRNEKAFVSWLGLSPNNKISGQRVLSSRTRKVVNRAATILRLAAMIVGKTDTPLGSFYRRKRAQLGGPKAVTATARKLGCLVYRLIKNGQGYNAPDLHTYELKYKDQILNSLRKRANTFGFDLVELPKAA

SEQ ID NO: 450501 - protein, 457 aa, unidentified
MSKRRSKAKSKNIKVPKLPPQLQHMNLNAAGIDIGSERHLVAVPEGRDTLAVREFGAFTTDLEALASWLQQCGVTSVAMESTGVYWIPLFELLERQGFEVKLVDARHVKNVSGRKSDVLDCQWIQQLHTYGLLAGAFRPPDEVCVLRSYLRQREMLTQAASMHIQHMQKALQQMNLLLHNVVSDITGVTGMKIIKALLAGERDPRVLARNRDERCQHTLGTIAKSLVGNYRAEHLFALRQAVDLYETYQAKIADCDHAIIKQVEQQPDRSDDGPPAPEKKTPAKARIREGIDVRDLLFRKSGVDLFAIPGLAADTLLTLASEVGFDMRPWKTEKHFASWLGLCPGTKISGGKVLQNKTKRNPNRATQAFRLAAASLYRSQTALGAFYRRIKSRSGGQQAVTATAHKIARIYYAMLTHGTSYVELGQQAYEQRYKERRIERLKVQAKSLGLQLLPCAP

SEQ ID NO: 450502 - protein, 334 aa, unidentified
MEQITTVGIDLAKRVFALHGVDAQGRVMLRRTVRREQLLETIATLPPCLIGMEAGSGAHEWGRRFETFGHRVRLMAAKFVAPYRQNGKNDGNDAEAICEAVGRPKTRFVPLKSAEQQAVLSLHRVRQGFVTERTATMNRIRGLLAEFGVVLAQRSPTVRRQALKAAETLPVLARRAIEDLCAQVRILDERIDSYDRDLQQQAQTSEAARRLMQIRGIGPLSALAIVATVGNARDFNNGRQFAAWIGLTPQQHSSGGKTRLGHITKRGDAYLRSLLVQGARSALHTATRHRDRVSRWACELEQRRGYHRTLVAIAAKNARIAWALLSKGETLRPS

SEQ ID NO: 450503 - protein, 316 aa, unidentified
MQDQAVFVGVDASKSELVSSVHGHQGCAALPNQDAPVAAWLQTLPPGAKVAVESTGECHLTLVRQAVRLGVTVYVLNARDVYFYAKALGMRAKTDRVDARVIARYLAEHHAQLRPYRPPSPTQAEIEQLLGQRWVAVTKRTALRQALRGNAAIEQQIQHLDASFDSLLQAIDQRIEQLIDADPALKASQRQLLTIVGVGSQASALLSSLLARLHFASADALVAFSGLDPRAHDSGRSHGKRRLSKRGSPDLRRQMYMAAMSASHSKVFSPLYQQLRSRGFKTTEALVILARKLLRVAYAVWRSGMPFEPDRFTVPA

SEQ ID NO: 450504 - protein, 377 aa, unidentified
MHSENIAAYIGLDVHKETLAVAIAAPERLGEVRYYGTINNEAQAVRRLFQKLQGLYGNILSCYEAGPCGFGLYHQLTAMNIKCQVIAPSRIPKSPTDRIKNEHRDAISLARLLRAGELTPVWIPDLTHEAMRDLIRARAAAKRDSRVARQRILSMLLRTDKRYAGKHWTGKHRTWLANQSFSQPSQQIAFQHYCQSLEQIEDRILQLDQEISRLLPEWSLCNLVCQLQALKGVGQLIAITLVAELGDFSRFSNPKQLMAFLGLVPGEYSSGNSIRPRGITKVGNSELRRLLYEAAWSYRTPAKVGAWLIYYRPDSVTQYSKDIAWKAQQRLCSRYRTLTAKGKKSQVAITAVARELTGFMWDIALAAQSSFSQQKQN

SEQ ID NO: 450505 - protein, 482 aa, unidentified
MRPKPKEKTQKATDHPTQSHWHEMNRKQRREMMRKMQSEDISLEVVHPDAAGIDIGNESHYVAVPPSRDSQPVRRFGCTTAELKAMAAWLKRCEIRTVAMQSTGVYWVAVFDILEQAGFEVYLVNARDTKNLPGRKSDVQESQWLMKLHTYGLLRNSFRPSQEIRTMRTYWRQRNDLVQSAGRHILRMQKALTQMNIQLANVLSDVSGMTGQTIIKAILGGERDPHKLATFRDCRVKASEEEIARSLEGNWQEDLLFVLKQEQDGYEFCQQQMAECDRQLAQYLQQQEDRSHGASLPEEKRKGRLKKKRANKPRFDLREALFRITGTDLTRIDSIDVTTAMTVISEAGWDMSKWETEDHFVSWLRLCPDNRISGNKIIGKGRLPTNNPITIALKLAASTLRLSNTYLGAQFRRFRTRLGAPIAIKAMAAKLARLVYRILRYGMKYVDQGTAFYQAQHRNLQIKHLKSKAASLGYQLIQVPAA

SEQ ID NO: 450506 - protein, 370 aa, unidentified
MSEFNAYIGLDVHKETISVAVADQGRSGEVRHYGEIPNTPEAVAKLVRRLGKQHGQIEMVYEAGPCGYTLHRQVTSMGVACRVIAPSHTPKRPGDRIKNDTRDAIMLARLLRAGELTFVWVPDEAHEAMRDLVRARRTASNDVRQARGLIQMFMLKRGLIYRGKPWTWRHRVWLADRNLDHPAQRIALQSYINRLEQAEGRKTDLDRQIEALVAEWNMGPVVRALQALKGVGLVIAATIVAEIGDFARFSNPRQLMAYLGLVPGEHSSGGSVRPRGITKAGNSMARSLLFEAAWSYRLPAKVGQAGWVQQRDCAQWLKDISWRAQLRLATRYRRLVLRGKRSQVAITAVARELVGFIWAIATQVGAPIAA

SEQ ID NO: 450507 - protein, 400 aa, unidentified
MLSIGIDVSKGKSTVCGMKPGGEIVYAPFEVQHTREGMSELVLLLHNSGEEVRAVLESTGSYHCPVVAALLENGIFVSVVNSLRMKRFCSQSIRKVKTDRIDAMQIALYGLAYWQELQPTKLPEDTYRELQLLARQYYQMTSLLIKAKVDFNAICDQVLPGMQELMNDHAGRHKLSDFVLRYRHTTHILEMGETRFRKDYCKWAEKKGYRNCERMAVLIFATAQNGIPVLPNAPSTQIVITEAIRVLHTVEASRDAILTQMQALAKTLPEYSLVREMPCIGDTLAPRLIAEIGDVRRFHSKRALIAYAGIDAPPYQSGKFRANNRHISKRGNRYLRKTGYEVMQSYVMHKPANDPIFTFIEKKRSEGKSGKLAMVAGLNKFLRVYYGKVTELYRSLSAIE

SEQ ID NO: 450508 - protein, 355 aa, unidentified
MYGLKHQKEKRSMDYFAGLDVSVKDTSVCIVDSTGKIVREVKVASEPEALLAVLTNPAYHFKRIGLEAGPLSQWLYSALAEAGLPVICVETRHMRAVLKAQINKTDRNDARGMAQMMRVGLYRPVHVKTLRSQKLRMLLTHRKLLQSKAIAIDNDLRGTLRNFGVKVGIVGSARFEARVKELIENLPDLAVLVEPLLVVRRVLREQLGILHRRLLAVVRDDDVCRRLMTVPGVGPVVALTYRATVDVPARFRKSKSVGAVFGLTCAKYQSGESERTGAISRCGDEMMRTMLYEAAQSMLFHSTKWSWLKAWAMKIARHRGMKKAIVALARRLAVIMHRIWVDGTEFRWTREVAAA

SEQ ID NO: 450509 - protein, 407 aa, unidentified
MEVLYRRCAGLDVHAKSVTACVRIAADATITYDQFTASTTTRGLLTLDAWLTAHGCTHVAMEATGVYWKPVWHVLEEHFTLVLANAMHIRNVPGRKSDTNDARWIADLLAHGLIRGSFIPPASIQALRDLTRTRRQLGREVARHIQRVQKTLEDTNIKLTRVLTDIMGMSGRAILAAIIAGETDPDQLADLTRGRLKASRADLREALHGRVTEHHRFVIQLHLLQIDGLERAIAAIDVRIGDALGPVRAAVALLSTMPGLSETTARSMVAEIGTDMTRFPSSGHLVSWAGLCPRQDQSAGITRSTRTRRSAPWLKPMLVNAAWSATRKKDSYLRAQFLRLKSRRGPKKAILAVASSMLTAAYVMLRDGVEYHDLGPYHFEQQDKDRVTKRLLQRLRNLGVTVQVTAA

SEQ ID NO: 450510 - protein, 399 aa, unidentified
MKNPCIAIDISKGSSFYQGFIKLGKSFSKAKRIKHDLNGYDILLKTGNSLKEEYGEVTYVFESTGIYHKSLQQYLEEHEQKYIILNPLEAAKIRKMNLRSTKTDKKDCESISKAYFLKDYKLHEKQEEFFETIQSMNRFYNFLIDQYIEIKVSFRNQLDIVYPKFDELHHTPYLEIPIAILKKYPHPDFLRNSKVKTIENYLVKTTTHRKRFSELEAKKLKEYSLKAQSGCEQSSIEVAILKELINSLDNKQLQIKKHLEIMKKMCINKTLYQQLLSIPGIGENLAMRLIGELGNLSRFSNKRQLVAYAGIDPTVYQSGKITGEHLHITKKGNKHLRTLLFLAVSSNIRNRKSNSILDFYKRKRQQNKPLAYKTAIIACANKLLRIIYSMHESGEMFRT

SEQ ID NO: 450511 - protein, 442 aa, unidentified
MKGLAIRDERACGIDVGSERLHVSVAGAPAQVFGTMTRDVELLLEYLSSQGVRSVAMEATGVYWLYLYEALEAAGMEVLVVNGRHVRNVPGRKTDMSDSQWLATLHAHGLLRSGFVPPAQVRSLRDYMRLRQDHVGVAGSQVQLMQKALERMNIKLHDVISDLSGISGMKVVRAIVQGERDPQRLLQLCDAQIRKNKADRVRESLRGIWRAEHLFALRQALKGWDFYRQQIAECDEAIAQLLAEMAGPPNDDLPDTKGKPPSANTPRIDGLRRMLLQIYGGRDATMLPGLAEHSLLKLLSEVGTDLTRWPSEKHFAAWTGLAPAAAQSGKRRAHQKRHLNQTGRFFCDMARSLGASVDKGFGGFYRRLKGRRGGLVANKAVARKLAVMFWRVMVHGVEYVEYGLRQYQDRVRLTEQRTLAKLASKLGFAIAPKINNLAGVPG

SEQ ID NO: 450512 - protein, 430 aa, unidentified
MEEVTDEPLYRDRVCGIDIGKAGMVATIRVPSDANPARRAQETRSFGTTKREVLALADWLRSWQVPAVVMEATGDYWKPVFYRLEAEGFECVLADAKQVKHLPGRPKRDPSDSRWLAACFERGAITSCFVATPEFRLIREHTRYRRDLTGERTREKQRAEKLLESAAIKLSSVVTDLHGVTGRDIMDHLIAGERNPKVLAQLARARARRKISELEAALEGAEFFTPELAALLARMLGRIDQLNASIDELTGVIETLLEPYEEQLQQAESMPGRGRRSAQDAIAETGVDMTRFRTGGHLASWAGRTPLDHQSGTRNGRARHKKGNRYLAAITGETAVAAGKTQTREGARYRRLARRRGKAKAGVAIGNTQLKVLHALLSSPGTRYEDLGVGYYDNRSAGRQLRALIKRAHDLGYNAEFTPIPDLTGCPEIA

SEQ ID NO: 450513 - protein, 342 aa, unidentified
MLLIGCDYHPSVQQIAMLNTETGDYSEHRLKHSDGEAERFYRDLKLHTPKIRVGLEATGHRRWFERLLMDLDCELWVGDAARIATMRVRKQKTDRQDAQLLLKLMMEDRFPRVWISSLEDRDLQQLLWHRHRTVQMRTRILNQLQSIAMNEGIQRRGGLRSVQGRKRLEQIPLGPWGARRRNDLLVHLDQMNQRVNELTAAVQQEAEKRPEAQLLMTHPGVGPVTALAFVLIVGYPERFQCGKQIGSYVGLIPAECSSGVHQRLGHISKQGNILLRFLLVEAAQAAARFDPEWHKKFAHLAMRREREIAKVAMARKLAVSLYWMWRRQGSSQMASQVGSYAG

SEQ ID NO: 450514 - protein, 342 aa, unidentified
MNDMIIGVDLAKSVFQLHGVFLAEGEVFRKKLTRTQFEKFLKDTAPCLIVMEACGSANFWARQLAEMGHEVRLIAPQYVRPFVKRQKNDAADAEALVIAARQPEMRYVEPKSREQQAQAVLFRSRERLVRQRTELVNALRATLFEFGFTLPQGPAAMKRAKELLDDPTVDLSDLVVTECRDMLCQLAEKTDRINKRSKEIKQLAEQTEALRRLTSMPGLGPITAFAIGAFAPAMTEFRRGRDFAAWLGLVPRQNSTGGKAHLGSVSKAGQSDIRRLLIIGAMSRLNWLGRKTIPDGGWIDRLMQRKPKMLVAIALANRMARQIWAMTTRGELYNEPAEAVAT

SEQ ID NO: 450515 - protein, 450 aa, unidentified
MIGVHRVNALKKPIMKGDTLTMKFKSSDAINQRIERISTNHLIIGIDIAKEKHVAGAVNFRGIQLGRTLAFSNTQEGFQKLMKWVRHLQKSHGLTQVLFGAESTGHYFLNLAFWLHEHKEEIVLVNPLTTKRNKENRDNRPSKNDDKDAIIIGDSISRGYYSDWVIHDLEYRKLRCLVNEREGIAVTLTALGNRIQNALDQVFPEFTSVFGEWNCPRGLATLKAFPLPSEIKEHTIEQIIQQWREKGMMRAGGIRGRAAAATLLCAARSSVGLRDIAQEMKAHILRLIETYELTQLQKEALDREIEGKLYTLPESVLKPLQAVGLSSWLVAVILANSGDLSHYAHGRQLLALAGLSLAESQSGKRKGQIVICKRGRRQLRKYLYLAVVGLVSNHPQFKAWHDDNVNKRKMKKQRSIFKLIGKLARIMVSLAHSGEQFDPVKPQPLLPQAA

SEQ ID NO: 450516 - protein, 337 aa, unidentified
MMYGGIDLHSNNSVIAIIDDADRVVAQKRLPNDVTKVVGFLARWQDELVGVVVESTYNWYWLVDGLQDAGFHVHLANTAAIKQYEGLKHSGDEADARHLAHLLRLGILPTGTILPREHRAVRDLARKRMQLVQSCTAHILAVENIMARQLGGRMTSNQIKRLTDDAVDSLPLAADVSLAVKANAAVIATLQAQIEILEKRLQERVKPRAQYGLLTSVPGIGQTLATVILLETGPIDRFADVGNFASYARCVASVRTSNRKKKGEGNVKNGNKYLAWAFVEAANFARRFCPEAKRFHERKKARTNNIVATKALAHKLARACYHILKEGKPFDVTRCFA

SEQ ID NO: 450517 - protein, 406 aa, unidentified
MLFVGDDWAQDHHDVEIQDETGRRLAKARLPEGISGIARLHALVGRFLPEDGDAAEVKIGIETDRGPWVAALVASGYQVYAINPLQSARARQGNGVSGAKSDAGDAHVLADLVRTHSHQLRTVAGDSKEAGAVKVLTRMHQSLIWDRTRQVLRLRSSLREFFPAALEAYEDLACPDVLELLAKAPEPSSAARLTRAQIAAALKRAHRRDRDTKTTAIMAALRTEHLTQPPLIAAAYGATVRALAALIATSNEQITALEGPVEACFGRHPDAEIYLSQPGLGPVLGARVLAEFGDDPTRYEGARARKNYAGTSPITRASGKKKVVLARYVRNKRLTNALHQQAFSALSGSPGARAYYDALRDRDISYNAALRQLGNRLVGILHGCLKTRTRYDEATAWNQHTQRVAA

SEQ ID NO: 450518 - protein, 413 aa, unidentified
MLRVIHERGAGLDIHKKTVVACVLVTKQDGQVEQQKRTFGTTTGEILGMAEWLKSPGVKSVAMESTGVYWIPVYNLLEGDFQLVVVNAHHMKAVPGRKTDVSDAEWIAQLHRHGLLKGSFVPPKPQRQLRELVRHRTNVVERRSQSVNELQKVLETGNIKLASVVSEITGVSAMEMVHGLIAGQQEPPLLAELARGRLRDKKPQLAAALNGRLEKHHRFILSQLLADISFCEEQILELDLEIMIQMKDYQEVIQRLDQIPGVNRRIAEVIIAEMGTDTSRFGDAAHVVSWAGMCPGNNQSGSKRRTARVRQGNKSLKRVLVEAAHAAGRKKDSYFSAQYHRLAARRGKKRAKVAVGRSILETAFHMIQRQSTYNDLGSDYFDRRNPEKLAKRLAERITKLGFKVSYTPLVQAG

SEQ ID NO: 450519 - protein, 440 aa, unidentified
MAFIRDEAGGSLGQSFSFPRTSAGFNQLLEKALAGMPETARLTVVMEPTSLAWVPLATYLSLKGHIIYLVNPRRVSDLRKFYSRRKNSDRLDAKVLSNLPNLEEDILTELYLPTGELNALKRHSQQRDKLKQSIGDQKNRIQAVFTEANPTALEAFGEDKFSRVGRAFLRKYINPLKVKGLGLKRFTQVLERKAYGELKQSTVNRLFEACCDTINIYREALEKDKLPFSYEQIQEEINLELDLMEFKEAQVKKLDKKIANLYQQVDPRGDLKSLRGVGDVHAPIILGYAGYIGRFGNARSYCGFTGLVPGKKQTGGTDRKGLKITKEGPNLLKKTYYMVGETARHWDLEMAERYHRLIGRGLHHKQAITAIGRISAARAYAVMKRMELARKGLIKPEDVPYKLRDLDGKQISAQEAREQILIRYPSKNSLKKRGRAATAV

SEQ ID NO: 450520 - protein, 350 aa, unidentified
MNIHHYIGFDVHKKSISYCLKTADGKIVEEGRLQARRQAIEEWARKHSEPWHGAMEATLFSAWIYDVLKPFAAKLEMGNPAMMKAIGAAKKKNDRLDARKIADMARCNLLPACFVVPPEMRDLRRLLRYRNLVVQQGVQMKNRMSGLLMEVGAEYSKQRLHGAKYFSELLDQLQDVPESVKDLLQLSRGALETFTATQRQLLDRLQKDPRLVKRVELLRTIPGVGEVTALTWALEVCDAARFPSIDDAVSYCGLTAAQNSSAGKEQRGPISKQRNSHLQTVLVEAAKLAPRWNQQLAAVHERELKNGHRNRATLMVARKLVSYLLAVDRSGRPFQIRNPTKETKEAPAAA

SEQ ID NO: 450521 - protein, 324 aa, unidentified
MIFIGIDISKLTFDAAYILNSRYIHKQFTNNAKGFNEFFIWMNKPNDDVFTCLEATGIYSFDLAQYLSQKKINVMVVNPIIIHAFFKMELNRNKTDKADAQLIARYCEHAVLTGDFEKKSYQPKGVDYEAIQRLVTRCDQLEKSKTQENNRLEASVNKEASRSIKRLQKAIDTEISNVKKNISDIVKNNVSLSQQVKLLVSIKGIGERTAWSILAYIGDINFFSSSKQIASYAGLTPKIIQSGTSINKSSLSKLGHKRLRKSLYMPALVAIRFNPTLKVVYERLISNGKPKKVAIVAVMRKLLILSYGVLKSENPFEVNYQHQV

SEQ ID NO: 450522 - protein, 375 aa, unidentified
MSSATTIYLGLDVHKESVTIAVLPSGAVAPTRVDTLPNDLVKLRRFCERQASQGTVRACYEASGAGYVIQRAMTAWGYHCDVIAPSLIPIKPGQQRKHDTGDAIQLARLYRAGELTIVRIPTEAEERVRDVVRCRETFQREILKSRHYILKFLARRGFVYREGTNWRQAHYEWLRQLARGDSPLAPDDRQVFGEYLGLLEYKLSRRDELDRRIGELALTPALAAAVATLQCFRGIQQQAAMVLATEISDWRRFGSPRQLMAYLGLVPREHSSGDRKRRGSITKAGNTHCRHVLVQAAWAYRFQPKIGVALKARQRGQSPVVIAHAWKAQHRLHTFYQRLAFRRRPQIAVVAVARELVGFLWAVMRDVDPATSATA

SEQ ID NO: 450523 - protein, 393 aa, unidentified
MVVSVGIDVSKDKHDCFILSSEGEVLVDGFTIPNTMDGFNCLLQRIQDCTTPQDKMKVGLEATGHYSYNLLGFLLDNGLATYVLNPLRTNLYRKSLSLRKTKTDRVDARTIASMLLSDAGLKPYTDTAYHNEELKSLTRYRFDKVKERAKLKSSVARLINILFPELEKLVPSLHMVSIYALLAEFPSSAQIASCHLTRLTNLLANASKGHYNKEKAIEIRNAAKHSIGSNMPAKSLELKHTIRLIQELTSEIDEIESAIKQIMVEEIQSPILTIPGISYRMGAMIIAEIGDFSRFDSPDKILAYAGMSPSTYQSGQLDNCYSHMEKRGSRYLRYALYNATKYVCHWDENFGAYLAKKRAEGKHYNVALSHATKKLVRTIFAMEKSGQAYIPTV

SEQ ID NO: 450524 - protein, 343 aa, unidentified
MSQPPVAAESIVFVGLDVHQYVVQVCVLNRAGQVLSHRRMANDVTAIIAAIRGHGAVHGVALECSTGTAVLADALIQRTGWDVHLCHPGYVRRWRQNPDKTDLSDAHLLADLVRVGYLPRVWLAPPAIRDLRTAVRYRQQVVDALRNTKLRIRALLREHRVPDVPQYVWTKAGLAWLRNLRTLPVLAGWVLENHLSELDSALARLARVSVRLREVADQDALIPVLLTQAGIGLVTACVLRAEIGHFRRFRTAKQLARFCGVTPCNASSGARQADAGLIRGCSRLLRDTLIEAAHRLARCDPHWKQFREQLKARGKAGSLIAAAVANRWTRRLFHELCALESAA

SEQ ID NO: 450525 - protein, 410 aa, unidentified
MRRDKYIYIRLDLHKFQHTAVILDCWNEKLGEMTFLNKPSVFPSLLEYVNRYLTEDLTPVFGLEDVGGYGRDLALYLIERGYIVKFVNSSLSNAERNSYAMTEKNDGWDAQCVADVLIRKLPYLPDATSSNIHWIIAQLVGRRNALVKAQTALKNQLHMQLNYHYPSYKDFFSEVDGKTALAFWESYPSPSHLEGATVEDLRTFLLEASSNACSTRKAEQILSLVQADGEIKREYQTSTDFIIQSMVRDIRFKKQEIQKVDKELKVTIQTLGMKLETMPGIDVVTSSALIAEIGDIHRFANSDKLAKYAGIAPIKMGSGGKETMKKTKQGNRKLYDIFYNLAVQQVQVCKGSKIPRNPVFYAYYNQKLNEGKSKSQALLCIMRRLVRIIYGMMKNKTAYIMPEMPEAKVS

SEQ ID NO: 450526 - protein, 430 aa, unidentified
MKSNTQNAKIEAITEKTLVLGIDVGSETHYARAFDYRGIEYSKKPFKFSNTEAGFVTFKEWILDIKERHEKDKVVLGMEPTGHYWFNLGRFLQDNEMKPVLVNPHHVKKSKELDDNNPTKNDRKDPKVIAGLVREGRYMIPYLPDGVYADLRTASNIRFQLQAELTRIQNRISRWFNIYFPEYKTVYGKPDAKSGILILKAAPLPEDILTLGIDGVNQIWRDAKLRAVGKARAKTLIEAAEHSVGSKEGAVAARMEIRMLLEDYESRNTRLQEVMVLIEELVRKIPMAEKLLEIKGVGIRTVSGFLAEVGDISRFNNPKELQKLAGLALVENSSGKHKGETTISRRGRKRLRYLLFEVAMSLVAKNPEFRELHNYYTTRRLNPLKKMQSLMAIAAKLIRVFYVMLTKGVNYDPKKMVNDIKRPAVYLQTA

SEQ ID NO: 450527 - protein, 457 aa, unidentified
MNRKRSKPKIDRTMPMVHPNAAAIDIGATMHMAAVRADRTSEPVRSFGTFTTDLHRLVNWFKECGVETVVMESTSVYWIPIFELLDARGFTVFLVNARDAKHVPGRKTDVSDAQWLQRLHSYGLLRASFRPKGQIAELRAYVRQRERLLEYAASHIQHMQKALTEMNLQLHHVIADITAATGMRIIRAIIAGERDPKVLARLRDYRCHSSVETIEKALTGSYRAEHLFAVEQALALYEAYHEKVSACDVRIEAVLKELSIDRGHGSASLPSSRRRTDQPNELAFDVPAALFAVLGKDITQIDGLGPYLSLKLIAECGDDLSAWPSAKHFTSWLCLAPSNKISGGKVLSSRTRRRGNRAAALLRLAAVTVGRTDTALGAFYRRLSARIGKAKAVTATARKIAVLFYNAVRHGMQYVDPGASFYEMRYRTRVIGNLHRRAKAFGFVLQPMEPTPGAAVS

SEQ ID NO: 450528 - protein, 338 aa, unidentified
MKDIKYFIGLDVHKERTSYCVRDKLGNILTEAETATLYSELEPRLKPYLAYSLIALEASTSYYTLYQTFLKKGYRIKVANTIQLRQLIAKNDKLDAQRLAEMLRLGTLPCSYIPEERIQHLRSMVQMRHALMQEKVRCNNRIQAFLDRNGVVMPPVKAFSKKWKHALMQHLGTGTASMELRYEYNHYVYLEKTNEQADQEIIGYTKTYWKLEYNLLRSITGFGVLLPCYVIAFVHPIERFLSNRKLRRYAGVIPLSKESGDTTSPGRIPKTTSKALLRWALVQAANTIGKTNTRLGRYYRRKKNQKKKSGIAKIAVASTLVDIIYKVLTTKKPYVPTC

SEQ ID NO: 450529 - protein, 365 aa, unidentified
MNKNTNAKRMAREETKQPLAFYIGIDLGDKNSDVCVLDQAGEVNQEFRLRMKEADVRAYFSKIGRSRVAIEAGGQSRWVAEVIEKCGHEVYVSNTRKVPYIHDSDDKHDPGDAYKLAELVHFKPQLLHPIRHRSQEIQADLSWIRAREVLVESRTQLINAVRGISKAFGERLAKCSTEAFPGKRAEQIPAEIRGAVAPLLETIDHLNEQIRYYDQMEEQIARQRYPKYWLLEQVDGVGVHTALSYMLTIGDPGRFEKSRMVGCFLGMRPKKKDSGSSQPQLGITKAGDEYLRKTLVNCAHYILGVHGKDSDLRRFGQRICARGGKNAKKRAVIAVARKLSVLLHRLWVSGEVYEPLRNSQERTAA

SEQ ID NO: 450530 - protein, 329 aa, unidentified
MNNNKSILGIDIAKDKFNATLLAGARTFRQEFENHPRGFRALRQWLARSGAQAVHAGLESTGRYGLALARFLHAQGFTVSVLNPLALHHPQSRLQRSKHDRLDADLIAEYVAKESPAAWTPPTAAQTQLQELSRLLQARKRDLARERNRLASLPQSRAAKAAIQRFIRLLEKEVDKLQAQLLASLHLDPGMLSDWELLLSIPGIAELTAAIILAELPRTLPTARAAAAYSGLTPARHQSGTQDTTKGLTPIGNHTLRRALYFPALTAITHNPPIHSKAARLRLKGKAELCIIGAAMHQLLRQAWGVLKHKKPFDPSWTSRPLISVSAAV

SEQ ID NO: 450531 - protein, 353 aa, unidentified
MSPARSSTAPLKYVVGIDIAKDTFVACFGRIDPNQHLSFGKETTFANTPAGFTALLVWTARQQVMAAPRWFVVEATGVYYEELAYFLADNAQALSVLLPNKVKHFAQSTEQKSKTDQLDARLLCRLGLERALPAWQPPTPALRQLRALSRERQSLTQQAARLKTQRHAYQHSYQPDARTLERLKTRVQVLEQQLKAVDQDLATLLDAEPELARKLAHLTSVPGIGVTTAIVVVAETNGFVLIENERQLASYAGLDVVQRQSGLSAGATRISRRGNVRLRTALYLPAVSSLRFNPQQMAFYARLRARQPSGKPGVIAVMRKLLLLCYSLWKNDLPYDPHYHPAHQPQKEITSAT

SEQ ID NO: 450532 - protein, 345 aa, unidentified
MEIRTIGIDLGKTVFHFVGVNARGEVVIRKKGSRTQLLRFTSNLRECLIGMEACGGSHFLGRALREQGHDVRLMPAQYVKPYVKTNKNDYIDAEACAEAVTRPTMRFVPIKTDDQLDLQSLHRVRERWVVRRTAVINQIRGLLLERGITIRKGRHHIEESLPRILEDPDNKLSGALRVLLRQLQLEMQYLHGQVEESDQLIVRIAGELEPCRRLIAIPGIGPITATATIAAIGNGASFKKGRGFAAWLGVVPGEHSTGGKQKLTGTSRRGNKYLRKLFVQGAHSVLLQRTKQSSGLSMWLANLVTRKRKQVATVALANKMACMAWAVLFKGEAYRPPLLPQTVAA

SEQ ID NO: 450533 - protein, 408 aa, unidentified
MEVLHQRCAGLDVHKATVVSCLRVQEGGRVRREVRRWGTTTAELLALGDWLRQAGCTHVAMEATGVYWKPVWHLLEGELELLLANPAHIRNVPGRKSDVNDATWIADLLAHGLMRASLVPPGPIQELRDLTRTRKQLMREIGQHKQRIQKVLEDANVKLASVVSDVFGESGRRMLQALSAGATDAWQLAALRDGRLTASHETLAAALHGKVTAHHRFLLSQHLGTIAHLEQTVAAFETQIEALLAPFHTAVERLRTVPGISATAAHVIIAEIGLDMSRFATAGHLRSWAGLCPQLNESAGKVMSRRLRHGAPWLKTVLVQCAWAATRNKNSYLHAQFVRLRARRGPQKAIIAVAASILTVVYHLLRNQAVYRDLGALYFVRTDKERTAQRLARRIKELGYEVEIRKAA

SEQ ID NO: 450534 - protein, 345 aa, unidentified
MQNMYYIGLDVHKRTISYCVKDGSGTIHAQGTIPATRLDLDRWMKTLPQPWTAAMEATVFTGWIYDHLQPHAAALKVAHPLMLRAIAAAKKKNDRIDANKICDCLRCDFLPECYMASTAIRERRRTLRYRNLLVRQMVQMKNKIGMLLMEAGVSYNKQRLHKAGYFRELLASNPDIDEGLCSLLRLCRETVVRLGKTESALVRSLERDSLLMERVERLMTIPAVGPITALTWALEVGDAKRFSSIKKAISYCGLCGAEKSSANTVQRTPLSKQRNKHLQTTLIEAAKMAPRNSPALAMLYDKEKQKGNANRATLAVARKLVAYLMAIDRGQRNFQVVEVSDCAAA

SEQ ID NO: 450535 - protein, 396 aa, unidentified
MSKLITAPAAHGDVATLFAGFELSKSTWLIGLYAPELGSMVSRHKIDGGDLEKAVMLIETTKKRLAERGKPVRVVSVYEAGYDGFWIHRALIAAGIENRVIDAASIPVDRRSRRPKTDRLDLELLIRMLLALERGETRICRVVRVPTPSEEDAKRQHRERQVLVADRTAHSNRIKGILMTLGIRDTNPRRHDFAEHLETLRTANGDPLPLYTKQALLREHQRLCLLGRQIKEIEVAQAAALKAKTADRKDEGRAGEAYDTGGAQAAALIRLRGIGQIGAITLTREAFYRHFDNRREVASYFGLTPSPFNSGTMRVDQGISKAGNPRIRTLAIELSWLWVRHQPQSALTSWFLQKVGNATGRIRRVAIVALARKLMIALWRYVTIGLIPEGAVLCQA

SEQ ID NO: 450536 - protein, 340 aa, unidentified
MDATTYGLDVAKRVFQMYWVEAETGEIVNQRFGRDELIRFLARRPPGRIALEACGSAHWWARKVKALGHEAVLLHAKFIRPFVQTNKTDAADARAIWTAVQQPGMRTVAAKTEDQQAMLSLHRMRALLVKFRTMQVNQLRGLLYEFGATFRTGRAAGLAEIRARTAELEDALPGTMMCCLQDQLRRIEELQLDIDLLEKRIGVWQKQDAACHAITAIPGIGRLTATALVATMGDAKAFRSGREFAAFLGLVPRQSGTGGKVRLGPMSKRGDPYLRTLLIHGARSVMYNAKAPTPWQRDIQARRPANVAAVALASKIARTAWAILARGQEYQRDYVSVRPA

SEQ ID NO: 450537 - protein, 345 aa, unidentified
MQTVTTIGLDIAKSVFQVHGVDAQGKVMVRRQLKRRYVLAFFQKLPPCLIGIEACASSHYWSRELQALGHTVRLMPPAYVKPYVKRQKNDCADAEAICEAVTRASMRFVATKTVEQQSCLMLHRTRHLLIRQQTAVINAIRAHFAEFGIVAPVGRTGVEELLKVASDGNDKRLPDVARVCIAALGAQLQMLKARILEFDRLIMAWHRSNQVSKRLDEVPGVGPALATALVGSIADPKAFRSGRDFSAWIGLVPKQHSSGGRERLGGISKQGDRYLRSLFVAGALAVIRYAKKRGSKHRPWLAALLARKPTKVAAIALANKIARMAWAMMAKGERYKQPVALAAAW

SEQ ID NO: 450538 - protein, 322 aa, unidentified
MSAPILGIDIAKQRVEVALLVEGKVKNKSFKNAPDGFEALALWLRKLGIQQVSACLEATGNYGEDLAIYLHEAGHTVSIVNPARIKGFAQSELTRTKTDKVDAGIIARFCLAMKPESWIPPSPEIRSLRALVRRADSLIDMRSQEKNRLGTAHESVTPLIKEHIDYLDKEIEKVRDQIADLIDRDPNLRQKKDLLASIPGIGKATIAALLADLDNLGKFTHVRQLVAFIGLAPRETLSGSSIKGKPRLCKTGNARLRKALYMPALVSIRYNPIMIAFYKRLKEKGKNGKVIVCAIMRKLVHVIFGVLKSGKKYDPNYKPIYA

SEQ ID NO: 450539 - protein, 346 aa, unidentified
MIPVASDVHKGRCWMAMIPPGEELKMLEPIECTREAWRERLAELPPEAEIALEVSTSGYFVMSVLEEAGWRERAHWVHTAGIDSLRKQKSDRLDTRRLVKKLAVHDVEPLPEAWFPPPPIRELRLLARQRCGMARLRAQTKNRVNSLLEMHGLRPQRCVFTAKGRAWIQQQALSSAAQLCFERMFRLYDFLSAERETSEAELLAAAAALPEVALLRTIPGLGHMLAAVVWSEIGDLARFDSADALLNYTGLVPSSYDSGEVSIHGPITRQGPAWLRWALITAANALTRSKSPLGQRYWHLRRCHKQPNVAKTAVAGSVARCVYGVLKHGAPFQAERWGRRAGKLGQ

SEQ ID NO: 450540 - protein, 343 aa, unidentified
MQAVTTIGLDIAKSVFQVHGVDCNGQVVIRRQLKRRYVLAFFEKLAPCLIGIEACASSHHWSRQLLALGHDVRLMPPSYVKPYVKRQKNDATDAEAICEAVSRANMRFVPIKTPEQQSGLVLHRTRHLFIRQQTSVINAIRAHCAEFGIVAPVGRQGVEELLNVIADAEDEQIPEIARACLSALGDQLHRIKAQILEFDRMIGAWHRSCEASRRLDEIPGVGPALATALVASIADPRTFRSGRDFSAWIGLVPKQSSSGGKPRLGSISKQGDRYLRGLFTAGALAVIRYAKIHGIGHRPWLTALLARRPTKVAAIALANKIARMAWAMMARGERYREPVALAA

SEQ ID NO: 450541 - protein, 314 aa, unidentified
MSVVSVYVGADVAKDQIELGLGDELALPAAIANGTAACRVLARKLAAAARPVHVVCEATGRYHRALVGALHQAGVAVSVVNPRCVRDLARAQNRLAKTDKIDAATLADYGRRFQPAPTPPPAPQLVALRELVGRRAQLVADRARETNRAEAGVAHRRVQASLRRLRHCLELEIAALDRAIADLIAATPTLAAKAAALRGVKGVGAVTAAVLLAEVSELGTLHKNEAAALAGLAPFNRDSGAWRGTRSIHGGRQAVRNALYMAALSASRCNAVLRPVYQRLRARGKAHKVALVAVMRKLLLHLNALLKKLALTPA

SEQ ID NO: 450542 - protein, 371 aa, unidentified
MTEAVKYVGLDVHKETIAVAVADGERGGEVRFVGTVANDDDAIRKLVKRLIGPGVTLNVCYEAGPCGYGLHRLLTKLGQSSIVIAPSMMPRRPGDHVKTDRRDAMTLARLLRAGELTAIWVPDEAHEAVRDLIRARRSAQEDAIGAKQTVRSFLLRHDRRFGGKAAWTKMYSRWLSEQRFDFPHQQLAFQEMQKRVLEAQARVGRLEAALAEAVDAWCFAPLVRNLQVLRGIRLVSAATLVAEVGDLTRFDNPKQLMAYVGLVPSEHSSGARTKRGRITRAGTAQARTMLIEAGWSYRLPAREERRYRERVIDLPEDIQAIGWKAQVRLCQRYRRLAATGKPQPKVTTAIARELVGYAWDIARRVSPAVAG

SEQ ID NO: 450543 - protein, 353 aa, unidentified
MHTHQQSTEPVATIGLDIGKNTFHLVGLDRRGAIAMRIKVSRNQLVRRLVNLPPCLIGLEAGSGSHHIARQIQSLGHDVRLIPAQYVKPFLKGHKNDYRDAEAIAEAVQRPTMNFVAIKTPEQSDLLSLHRVRSRLVRQRTAIINQIRGFLIERGITVRQGPGPLRKVLPEVLSSPPEALSPRLLHLISELDQDWRHLDDRLEVLSGEIESLSENDAACQRLMTVPGIGPIISSAVVAAIGTGSGFKQGRDFAAWLGLVPKQESTGDRTKLGRISKRGNKYLRTLFVQAAHVVLERRPAAAMRALWPWIAQASKRLAHRNLLAIALANKLARIAWAVLARGRDYQPRITPNAP

SEQ ID NO: 450544 - protein, 343 aa, unidentified
MKAYVGLDVSQKKTAICVVNEAGEKVYQADVDSSPVAIRGFLVAQGYKDAKIGMETGPLAVWLYHSLKAGELDVDCIHAQHVHAALRMQLNKTDRNDALGIARLVRSGWYRPTHVKRLDCHHQRLMMTAREKLIQIRVTISNQIRGLLKTFGVILPPEKNSVFKRSILESEPTIEAIKPVVLMLLDTWTHITGQIRQFDKMLAKQAKNDPVCQLLTSIPGVGVLTALSFRTAVDDPSRFKSVSDVGAFLGLTPKKYPSGEVDRNGGISKHGSRQTRSLLYEAASCLLSRYGTETTLAKWANSLRQRMGYKKAVVALARKLSSLILSMWKSGEFYNDNQGKLAA

SEQ ID NO: 450545 - protein, 347 aa, unidentified
MERTLNHHWCVGVDLHKDTLMACVFCGCCGEVSFQKLPCKCRRQIAAYLAALPRPHTVAIESVGFYRWLWETLEPVVQELVLADARQARALAGRRLKTDREDSLNIAELLSAGRLPTSYAPPLEVQILRDITRHRNGFSRQHARVLHRVKSIMNANNRPGPARLASDGLIRYVRAQGAKLPARHVAMLWQCVDSLALTERQMQEAERTIGEVVRRDSFREVYEILVSFPGVARLTAATVIAEVGDFRRFPDAKAIGRYAGLNPRVFASGGKQRIGHIAKTGSADLRWILQQAAWTAIRTDEHVRRIFLRIAKRSGRKAAAVAIARKLLTWMWSAVCKGEPYRTRSAA

SEQ ID NO: 450546 - protein, 416 aa, unidentified
MDQRRYNVCCGADIHKKFLVATVLLLDGTKLTKRFSMNLRSLLEFRDWVNANGCEAVAVESTGSYWVPIYRVLEGHVELIVANAYKIKNVPGRKTDTIDSEWIAELCRNGQINPSRIFPKDSRDLRSLTRARERCVDDKTRVKNRIHHILDSNCIRLSSVLSDIFGKSGRYILNCLLEGTDIDEIIDGIPVKRIKKKEDQIREALIIQLSCTDIILIRGYLEQIDSIQKNIEELESEIRKRIAPLRKDMAIVMSVPGIGFISALVILAEIGNYNDFHKAEQLAAWCGLVPSVYQSADKIYMGSITKQGSRHIRRVLVEVAHVIARTKGRSKLKSFFLRIKAKKGTNIAAVALARKVLCVLHHLLTAQEMYQEEEKDGDAGLEYLGIPSQGISLDDMIRHLANAGYEVRKRAPGAGG

SEQ ID NO: 450547 - protein, 438 aa, unidentified
MIHPHAAGIDIGSREHWVAVPEERDEHPVRRFGCFTADLYALADWLKRCGVETVAMESTGIYWIPLYQILEDRGFEVKLVNARHVKNVPGRKSDVQDCRWLQRLHSYGLLSGSFRPEAQVCVLRSYLRQRDNLVRYASAHIQHMQKALGEMNLQLHKVLSDITGVTGMRIIRAILAGERNPAALAALRNYRVKSTEDEIAKALEGDYRAEHLFALQQAVELYDTYQQKIADCDGRIEALLGSFEPRLKGQPCVPATPRKRRKNEPYFDLRGHLHRVTGVDFTQIKGLDTSTVQTLLSEVGLDPTRFPSEKHFCSWMGLCPDHRITGGKVKKRSTRKVSNRAADAFRLAAQTLANSASALGGYYRRMRARLGAPKAITATAHKLARLFYRLWKTGDAYQDPGADYYERMYKERILSNMKRKAKELGFTLELKPLERAVS

SEQ ID NO: 450548 - protein, 403 aa, unidentified
MYKYFLGIDISKDSFDFCFTDETEKVLYKDHYQMDMTDFTKLSDYLAPFSKDEILIVMEATGIYHLTLLSYLLEQELNVSVVNPLFIHAFTKSMTIRKTKTDAKDAHIISIFAKRNYTTIRLSSASDIETIKPIVREKEKLTNQISAIKTDIKSIVNQVFPEMLKNTNIFLKSSLNLLLQAPSKRIIRNLKEKKIASYLSCDTKRGAKPKVDAKEILLMAKNSIGINNQSLEKILVSKIKQLNFLQTQLDEFNKTIEQFVDKHHNNDIDLLTSIAGVGKPSAASFLTELGDINNFATYKQLTAFIGTDPTIYQSGTSVNVKGSISKRGNSHLRRTLWHMARAATVWNTTLKEYYDKKRSEGKTFKQSVIAVANKLIRIIFSMLKNNTKFDTNFSNLAIKSASI

SEQ ID NO: 450549 - protein, 326 aa, unidentified
MQGKDVSEQETKGKSTVGIDVCEGWLDIHILPAEHAFRVPNSHQGHRTLKRRLERYDLGLIVVEATGKWHRQLHRSLHAGGYKVRVVNPLRARLFAEGMGLLGKTDRLDARMLAAFAEVLGNAARPPAPELIEELKELVQARVSAVEEQTALTNQLKSAETAFLRRQLGRRLKRIAADIKAIETELLRRVKLDEALARRYAILLSIPSFGPVVAMTLLARLPELGSCEDKQIAALAGLAPWPDDSGQRQGPRQIRGGRHMVRIVLYLAAVSATRYNRDMKAFFRRLTAGGKHSKLALIAVARKLVILANTLIAADRLWMPEPPKYA

SEQ ID NO: 450550 - protein, 358 aa, unidentified
MIAMKYYTSTTQFNCGIDLHARQMYVCLMDRDGHKLVHTNIKNNDFDYFLQRVAPWRHDLTVCAECMFGWYWLADACQAAGLTFVLAHALYLKAIHGGKNKNDRIDSEKIAHLLRTNLIPPAYVYPAAKRPLRALLRQRILYVWRRSELLARIQSHQLAHNRSPVRQTRSNRDPWEQQLLAQEDHPVRQLALQNDLALIRHYDAQINTLEVQLQKLTKENAPRDYALLQTTPGIGEHLGLTILHEIGDIARFPTVKDFLSYCRLVKGTVASAGQIKGLRGAKLGNPYLRWAFGEAAVIAKRDPAVIGPLAQRLEARMNGNKFKANTVLAIKLARAVYYMLRNHTVFDPERLVAALTHK

SEQ ID NO: 450551 - protein, 340 aa, unidentified
MGNITAIGLDLAKKVFQMHTVDEAGSVIMRKQLRRGQVLAFFAGLPSCLVGLEACATAHHWARELTALGHVPRLMPPAYVKAYVRRNKNDVADAEAICEAVRRPSMRFVPIKTTEQQSALMIHRARDLLIRQRTMLVNALRGHLAEFGLIEAQGLHKVAKLIAIVLDEEDRRISDIARQVLTVIVSQIEDTQTRIAGLEKQILAWHKNNPVSQRLATVPGIGPIIATAIAATVADPKTFCSGREFAAWLGLVPRQNSTGGKARLGRISKRGDSYLRRLLVNSAHTVLLCSKQAKADPWLRSLLSRKPRLVVAVALANKTARVAWAIMSRQDTYRNAALAA

SEQ ID NO: 450552 - protein, 359 aa, unidentified
MTSMQDAPRRRRVVVGVDTHKHIHVAVALDELGGRIEARSFAADRSGYEQLIDWASSLGREVMFGVEGTGSYGAGLASAIRRRSIGVLEVLRTDRRDRRLRGKSNTIDAENAARAVLNGQASAVPKSADGTVEMIRLVKVAKDVAVKARTSAMISLKAVLVNAPAELREQLQPLTKMALIRRCAALRPGPVTDPMTAAKHTLRAIARRWLALDAEIKAHEQVLNRLTTELVPDLVAAFGIGADIAAEMLIVAGDNPERVHSEPAFARLCGVAPIPASSGMTTRHRLNRGGHRQANAALYRAVIVRLQYHQPTQAYYQRRTAEGRTKAEIIRCLKRLLAREIWSYLRPLRQARQPLVLAA

SEQ ID NO: 450553 - protein, 375 aa, unidentified
MGEHRRAFVGIDTSKLRNAVAIAEEGRDGEVRYLGEIDTAEATTRKLVVKLAAKYRQLTFCYEAGPTGYGLYRLIRELGHDCLVAAPSLIPKRPGDRVKTNRRDAVGLVKLLRAGELTAVWVPDERHEAMRDLSRAREAARKDLKGKRQQVSSFMLRLGRHYPGKKTWGPAHMKWLMLQKLEHREQRIVLEELLEAVRQESERVERLEQAIRDAVPEWSLAEVVTALQAMRGIDLVAAVTVLAEIGDLSRFQTPRELMGYLGLVPSERSTGDAVNRGGITKAGNGRARRILVEAAWSYRHPPRVSCVKQIKVAAAPRAVREIAWKAQMRLCARYRSLARKGKRPTVVATAIARELSAFIWAINREVVGSHVAANE

SEQ ID NO: 450554 - protein, 411 aa, unidentified
MQVVYARCAGLDVHKESVSACVSVCEGEEKRQVTRQFGTFTGDLLALADWLKEQGVTHLAMEATGVYWRPVWTVLEGQFEQMLVNPQHIKAVPGRKTDTRDCEWIADLLQHGLLKGSFVPPTPIQDLRDLTRYRAELRQSQNRVANRIQKFLEQANLKLSSVASDTLGLSGRRMLEAIIGGQDDPQRLARLAQGRLKRKIPQLEQALAGRVRDHHRFLLGEYLDEWKTLGERIQRMEREIDKRIGPFEEAVALWQTMPGVDRVTACNLVAEVGVDTRPFPTAQQLASWAALCPGNHESAGKRMSGKTRDGNKWLRRSLCQAAWAVTRKKDCYLSAQFKRLAARRGVKRAVMAVAHTMLVIGYHMLKTGQGYHELGGDYLERINKHQLQKYYLKRLQRLGLAVTIQPATATA

SEQ ID NO: 450555 - protein, 450 aa, unidentified
MRSTYAGVDWASEKHDVVIADETGEEVVAATFAHDEAGVRALCRALVRHEVRLVAIERPDGLLVERLLDAGLRILALHPNQVAATRDRFRASGGKSDRFDAFVLCELARTDHHRFRVLEPDTDQTKALRALTRAREDLVGTRTALVNQLRAELALFWPGPLGLFTSLHSRISLAFLERYPSPADARGLGEQRLQAFLARQRYSGAQKPARLLAKLRRAPEARVGELELGVRRALVLSLVATIKTLNEQIKQLDRQIATAIREHPDGAIFLSLFKQPNSVITAAELLAEIGDCRGRYLTRDTLAADAGQAAVAIESGKRKAASFRWACNKRLRQAFVTLADTSRHHNPWAQDLYAAALARGHDHPRAIRTVGRGWCRIVWRCWQDGVPYDPARHRALQRHVTVTIPTSSGPRPDTAATQRMAGAAVTQRAARRDERAALDGKPTSATALGT

SEQ ID NO: 450556 - protein, 349 aa, unidentified
MSDKRKSAIAVIGIDIGKYSFHIVGLDERGAIVLRQKWSRSQVDARLANMPPCLIGMEACVGAHHLSRQLKVLGHDARLMPAKYVRPYSKGQKNDFRDAEAIAEAVQRPTMKFVATKSADQLDLQALHRVRERLVSQRTGIINQIRAFLLERGIAVRQGLRFLRAELPDILANPSDVLSLRMVRVLEELSLDWRRLDERIEGLTTQIELLARHDTACERLMSVPGIGPIISSAMVAAIGTGDVFSRGRDFAAWLGLVPKQISTGDRTILGKISRRGNRYLRVLFVQAAWVVLIKPKAWERYGLKRWIEAAKKRLHRNVLAIALANKLARIAWSVLARGRAFETSKLQAT

SEQ ID NO: 450557 - protein, 369 aa, unidentified
MEDYNAFVGLDVHKDSISVAIADAGRDGELRMYGTIVNTPDAVSRLMRKLVQRHGKIEVTYEAGPCGYGIYRQLTEMGINCRIVAPSHTPKRPGERVKNDTRDALMLARLLRAGELTYVWVPDATHEAMRDLVRARQVASQDVRAARALIQMFLLKHGLRCKSKAWCLRYRKWLTSLPLEHAAQKFALQSYINRLDQAEARKAEIEGQMVDLIPGWALAPVVHALQVFKGIGMVIAATLAAEIGDFSRFASPRQLMAYLGLVPSEYSSGGKHRPGGITKAGNKIARVMLVEAAWSYKWPPKVGVLLMLKRDNYSQALKDIGWKAQVRLNQRFRRLEGRGKRSTVAAAAVARELVGFIWATAISAMPKAA

SEQ ID NO: 450558 - protein, 349 aa, unidentified
MNATTVAVDLAKNVFELAVADAEWRIVERHRLSRARFARFFVHRPPCQVVMEACGSAHHWARRLVAEGHSVRLLPAHYVKPYVGRSKTDRADAAALIEAARSSQIRAVPIKTLEQQQLQSLHRLRSQWLSTRQRYLATLRGILREFGIMIPLGPSVAKAQIGGALAQADSDIPEGLRPALAEMLCEITPLEEKILSVERQLAALTRADERAQQLREIPGVGLLTSTALLSSVGDIQRFPSARHFACWLGLTPSERSSAERRRLGKISKQGDVYCRTLLVHGARSALLAAHRAQRAGKPLDRLRHWALNCERQRGHNKATVALANRLARIVWATWKYERSFDGNWGNQAA

SEQ ID NO: 450559 - protein, 327 aa, unidentified
MSVKETSICIVDDTGKIVREARVASEPEALLQVPTNTIYRFKRVGLEAGPLSQWLYSVLAEAGLPVICVETRHMRAVLKAQINKTDRNDARGVAQMMRAGLYRPVHVKTLRSQKLRMLLTHRKLLQSKAIAIENDLRATLRNFGLKVGIVGTVKFEARIKELVENLPDVAVLVEPLLVVRRVLREQVGILHRRLLAIVRDDDVCRRLMTVPGVGPVVALTYRATVDVPARFRNSKAVGAVFGLTPSRYQSGEIDRTGAMRMMLYEAAQSMLVRSAKWSWLKAWAIKIARHRGMKKAIVALARRLAVIMHHIWVDGTEFRWTREVAAA

SEQ ID NO: 450560 - protein, 342 aa, unidentified
MTRLENTEHAVRRFLRRLGDPQGLAAAYEAGPCGYDLLRLLSRIGVACDVIAPSLVPVRAGDRVKTDRRDAKRLVRLYRAGELSFVEPPSPEHEGLRDLVRARDDLRRARTAARHQVAKALLRHGHVYREGKHSWTKRHEAWLGRQRLADPLAQRALSHMRSHLAAIDAQLAAIDHELCQVAQSEPWCDPVRFMCSFRGIGLITALGLIAEIGDFRRFSHPRELMSYLGLTPSEYSSGESQHRGHITKTGNRHARRLLVEAAWHYQHPPRRSRLALSLQKEVPPEVSARAWQAQVRLQHRHRTLTDHGKRSTVANVAVARELAGFVWAAMTHQPLREDALAA

SEQ ID NO: 450561 - protein, 321 aa, unidentified
MAYFRDVVGIDVSKENLDLYVLSAQQRRTVPNTAAGYRDLVSWLKSLGVRMAVMEASGGYEREVAKASRQAGFDVRIVDPKRVRHFAKAAGRLAKNDRIDAEMIAEFGAVFAAAQRCEIPLDAKREHLAGLVAARQALVDHQTSLQNQISACPKGPARQALAAALKPIPASIKQLDRLIAEAIAAHPQFAALAARLDTVPGVGPVTIAALIAWLPELGRLDRRALAALVGVAPFDDDSGKRTGQRYIKGGRGKLRNIVYMAVMGAATQHNPVLKAYYDSLLKRGKLKKVALIACLRKLLTILNTMVAKQQDWNPASMAIAA

SEQ ID NO: 450562 - protein, 348 aa, unidentified
MYYVGVDLHKETSWFYIVDAQGKKYDSKNIQNKPEILKRYFEQIPKPFTLAVEATYNWYFFVDLAEQYAQKVFLANSYELKAFAKRHKKTDKIDARLIAHVLQKGFLPVVAIADQETRQVRELLRYRLNLVTDRSRNIFRLKALLDKLGLNSQVDFTTYKGLKSVIIEKLPGIYTRLIKNYTERITGLAQKLTRIEKEIETVSNLDPDMVNLMSIPGVGYFSAALIKSEIIDIARFASFNRLCAYAGLAPRVSASANKTFHGPLNTNRRKNLQWILLENVYHFIRAVPEMKEKYENLKQRKGHNTAKVVLSRDMLKIIYHVLKEQRPFYSDKKEFQIQSVAAPALCGV

SEQ ID NO: 450563 - protein, 425 aa, unidentified
MQEKILRVSDKTIIVGVDVAKKEHWARITDYRGVDLVKPVKVNNDIDGFEKLMARIEKVCNNTGCDKVMIGLEPSGHYWKALGWYLFLHQSNPMLVGVNPYHTKQAKELDDNSQTKSDKKDALTIAHLVRDGRYFDVYLPEGAYAELRILCNERKRLQKQVNRANNVIVAVMDEYFPEYDGVWEKVTCPTSREVMRKMPFPSDILDAGEEKVAELLRESSGGVEGKARAARLLEAAKRSIGVVEGRNSAKIRLLSLIDELEFYEKKVAAIEDEMTSIMDSLEMGELLQSMKGVGPVISAVFLGEVGDVSRFDNWKQVCKLAGMNLVEQSSGQHKGKTKISKRGRPYLRYMLFLAGQVGSLHNPEMHGYYRCLRERKNNPLTGYQAFVAVGLKIMRILFHMAKNRVPYDPAKALGNVREQQIAALA

SEQ ID NO: 450564 - protein, 466 aa, unidentified
MPEERKNKSSKSSRRQLQGLPVMRRNIAGIDLGSTGHWVCAPTVDGSGREITDFGATTPELIRMAEWLKERKVESVALESTGVYWIAPHEVLEAQGFEVLLVDTRQLAQVPGRDKKTDPTDCEWIQRLHSCGLLRGSFRPAEQICMLRTLVRDKANLISESGDWVRRMQKSLDQMNVRVHRAVASIAGTTGMAILRAIAGGERDARKLAQLRDPHCRKSEEEIAEQLSGHWREDHLFSLQQALKMYDAIQERMAAYEKEILRKLGELEREKQQGQSAPPPKNANKAKLMKNRGQEPLRQALYRMSGVDATQIDAIGVETTEVVISEYGPDLSRFPTEKQFVSHATLAPHVPKSEGKTVKKKRRHSASARVAAALRMAALSLRHSQTALGAYYRRTAQRAGGDIAVFATARKLATLIYRLLRWGQPYVDEGAEAYEQPYRDQRIRSLTAKAKELGYRLTSVTTQLTA

SEQ ID NO: 450565 - protein, 421 aa, unidentified
MHKQRKWFAGVDWASQEHVVSLHDDTGTKVGQRKFAHGGAGLSDMIAWLLKASGGTAGEIHVAIETPHGPIVEALLERGFNVYSVNPKQLDRFRDRFTVSGAKDDSRDADVLADSLRTDMRAFRKLSIAEPTIVELREWSRIDEELKVEHVRLTNRLKHQLWRYYPQMLELADDVGANWFLDLFEAVPTPEKAANVREKTIARILKNHRVRRFDASHVLAELRKPALAVAPGTIEATTARIRGLIERLRLINGQLTDARQQLDRLCKKLSEPAAEDDAETALGQKNEQRDAAILDSLPGVARTVLATLLAEASDTLQRRDYHALRLLCGSAPVTRRSGKSCMVVRRYACNHRLRNATYHWAQNAIQHDPTSRAKYDALRAKGHGHARALRSVIDRLLQVACAMLNSATLFDPEFASKRTTA

SEQ ID NO: 450566 - protein, 340 aa, unidentified
MQDQVSRQYVGIDLHRRRSVIVRIDEAGKVLGKAQVLNDPVEFALAMAGAGEGPEVALEATYGYYWAADLLQENGAHVHLVHPLGLHWDNRRVKNDELDATELAKRLWRDDLPEAWVAPAEVRDLRELIRYRAELVALRTSAKAQVHAVMAKCGILPALDDMFGPGGQVLLDKMELPQPYRYRVDSLRRLLGVFDDEIDIAESQARKRLRGHRGYRAVQAIKGVGPVMAAIFVAEIGDVSRFASARHLCSWAGVTPSHRESDDKAHRGHITKQGSTLVRWAAVGTVARYHGGAPIAPAFRRVQERRGTMIARVAAARKLLTLVYYGLRDGEVRCLRKEAA

SEQ ID NO: 450567 - protein, 338 aa, unidentified
MKLYAGIDLHSNNSMVAIIDEQDRVVLQKRFANALQQILLALASFKEHLLGVVVESTYNWYWLVDGLMEAGYTVHLANTAAIVQYGGLKYSADEHDARWLAHLLRLGILREGCIYPREARAVRHLMRRRMQLVQTRTTQLNSMQSQYMRSTAQRPSTNELKRMLPEDVDAHLHQPNVASGIRANLAVVHTLSGEIARLEREVLEQVRLAAQFEPLLSIPGVGRILALAIMLETGEIERFESVGNFASYARCVQAKRLSNDKKKGEGNSKCGNKYLAWAFVEAAHFAVRYNPRIKRFYERKAAKTNKIVATKAVAHKLARAAYHVMRERVPFDEARAFA

SEQ ID NO: 450568 - protein, 310 aa, unidentified
MTLHPFYIGIDISKAYLDIFEESTSKHLQIENTSEAISAWLSALPDMPSLNIIFEATGRYDRKLTHALHTLKIRFSRVNPARARDFARALGQMAKTDQIDARMLADMGKCLKPDATTQRAPERDQLAALHKRRDELVDTRKKERQRLAQALSEEHASIARHISWLNEEIKFIEQKRDTLLKETAEFTHDNKLLRSIPGVGPVAATTLLALMPELGHASPKAIAALAGLAPFNVDSGQFRGHRAIKGGRKRVRNALYMAAVTAARSNSHFASFAQALIKRGKPFKAAMIALARKILITANALLRDGVPFNA

SEQ ID NO: 450569 - protein, 347 aa, unidentified
MKFYNQQHKFYCGIDLHARKMYVCIISHKGKVKVHKNIKTDPELFFELVFPFMEDVIIGVECVFCWYWLADLCAEHQIPFTLGHALYMKAIHGGKTKNDKIDSYKIALLLKGGNFPTAYPYPAKWRATRDLLRRRMYISRRCGELVAHIHNTNTQYNLPSFRKKLSRKYNHDGVAERFEDPAVRKSIEVDLAIIDSLNQVLKKLEWHIEKVARQHDYHTLYLLRSIPGVGQILALVILYEIHDVRRFPRVQDFSSYARLIRPVKESNGKWAGHSNKKIGNHHLKWAIKEAAILMLRDSSDAKYYVGKLERKYNKGKALGIFTHKLGRAIYFMLKTKEAFDMKRFFAQ

SEQ ID NO: 450570 - protein, 353 aa, unidentified
MQTIIRVGVDIAKNVLQVHAVDAQGKVVTNRAIQRSKFLAWCAQLPAGCLVAMEACGGAHHWCRQLQGMGLDARMIAATLVAPYRMQGKGGKNDANDAAAICEAASRPQMRFVSVKSIDQQGMLCVHRLREGFKEERTAGINRIRGLLAEFGVVLPQSPRVLRAHLHDILEDASNEIAGTARLVLHQALMHWQELDGHIHWCEQRINAHYKDDEQVQRAAGIKGLGPLSASAVVATVGDFKQFKNGSQFAAWLGLTPRQNSSGGKSSLGSITKRGDSYLRSLLIQGAKAVLLTGKYNLDPISQWAITLRQRSGWQKAVVALANKNARILWALMTHQRSYEATHISTRPGEIIA

SEQ ID NO: 450571 - protein, 322 aa, unidentified
MAKRITICAGIDTGKRKLDVAIEGRGEQLQVENTAEGHQILLAWLQRHKVRRIGIEASGGYEQAVVAALRRKRLVVIVFQPAQVRAYAMFHLQRAKNDKIDAALIAACTAAVKKIHPAPDPRLSPFAEHLTMIDQIGEDITKLKNRIETCRNERFRALWKEDIARLAKRQRSELKTLVAAIRQYPDLAERLELIHSVSGAGLPTAVAVLVRMPEIGRLTREQAAALAGLAPYDDDSGKQVGARHIDGGRARLRRALYLAAQPASIRWNPQLMDLYRRLTAAGKEHKRALVACARKLLIFINTVVARGTPWQSDQPAANPSTA

SEQ ID NO: 450572 - protein, 369 aa, unidentified
MVEGKEAFVGIDAAKLRNAVAIAAAGRDGEVRFYGEVDASPDSMRRLAAKLAGRYQRLNFCYEAGPTGYGLHRLLTELGHSCVVVAPSLVPRKPSDRIKTNRRDALTLARLLRAGELTPVWIPDTAHEAMRGLVRARAAAARDAGTKKRQVSAFLLRHSRLFPRKKNWGARYRCWLQEQSFEHPADQIVLQELIEDVRLAEERRARIERAIGEFLPTWGLAPVVEALQALRGVELVTAVTFAVEVGDIRRFENPRQLMGYLGLVPGERSTGETVRRGSITKMGNARLRHLLVESAWTYRHPPRVGKAKLARLERVSPRVREIAWKAQSRLTARYRALTARGKKTTVACTAIARELAAFMWAVAREARPA

SEQ ID NO: 450573 - protein, 423 aa, unidentified
MDKYDDSRLEEFRQLRREIRGSSEYLVVGIDIAKERHYAFFGTPSGKTLLHRLVFDNSKEGFDKLSFQADILKTQHSLTKVVFGMEPTADYHKPLGEYLIQKGYLVVFVLGNAVKKNRELLDNRWDKNDTKDAANVADLLAQGKCLFYELASPPLPELRSLLSLQRRLKKQEHGYRVRIRNHLIAQYFPELDPYYGCGEGPAIVKWCLDPDEITALPFDEFARMVSSKNGGEKQQRRLQEIREKAASSIGCEAHPSVAFEARVLVEEVRHVQDLLRETQVRIREVCHHFPEYFFLLTIPGFGPDISAKVLEAIGDPRRFENHRQVLKLAGLDLSAERSGKRQDVVPVISKKGKADLRYGLYQAAFIASTRNTQFMTYFTGKLKGREKEKGIGTKMRVKLAAKMLIIAWTLMKKKEKFDPGCIA

SEQ ID NO: 450574 - protein, 371 aa, unidentified
MEHTRFIGLDIHKERISIAVAESGRAGALEYHGEIANDPGAIGKLCDRLRRCGQSLAFCYEAGPCGYGVHRQLTSLGHRCDVVAPSLIPMKSGDRVKTDRRDATMLARLHRAGELTPVWVPDADHEAMRDLIRLRSVVRQIVTRARQHLQGFLLRHGRKHGGGTAWRMAYRRWLSTLAFEHPAQQIAFQDYVDAVMDAERRLKRVEEQIVGLLPEWNLRPVVEALQAMRGIALINAVVLVTEVGDFTRFSNPRQLMAYFGLVPGERSSGETVRRGGITKTGNAHARRALVEGAWAYRMKPRIGRHKVDRIEALPKIVRDIGWKAQIRLCARYRRLSARGKTANVVNVAIAREMVGFIWSIACAIQSTPMAR

SEQ ID NO: 450575 - protein, 349 aa, unidentified
MTEQRHSYAGECVYVGVDVHKETYAVTCVCHKQIVKTATVQAEPTGLAASLLRWFPGATLYSAYEAGFSAFVLHRALTTAGITNIVVNPASIAVAANDKVKTDRRDSKKLAVDLADGRLRGIYIPTEEEELARLLPRTRAQLVEHRATLARQIKAKLHQFGLITPSSRRLLSHRYLREIESWMLPPELRASLKMLAEQWRFVTRQLIEMRCLLRDQAKAQEDIEKVYRSVPGIGEVVARTLATELGDMTRFANERALFSYTGLTPSEYSSGASVRRGHISRQGSSRVRHLLVETAWRALPRDGVLKEIFDRIAATRGKKRAIVAIARRLTGRMRACFRQGTTYAVGTYA

SEQ ID NO: 450576 - protein, 337 aa, unidentified
MKRYLGVDLHRRQFVVCTRWENGEQEIRQWRIAELTKFVEQLQPEDQIAVEAMGTTMRFHDAVVGRVGRVVVVNPHQFKVISESVKKTDRKDAAALALYLEKDLLPEVRVKPKQNRELMHLAETRDLLVKQRSALKGKINNLLAMQGIELKREALSSKIALERVLAQPVSGMVQLELRILVEQIRSLSESIAELDERLEEEGQQLPGYENLTSIKGIGALSATVLLTVIGKISDFADENKLAAYLGLVPKIANSNESERSGRITKQGNKLARTCLVQCGLVAKRYSPYLNRFYERIKQRRGGGKAKIALARKLVKIVYDTLKNQWVFEDFPSFTLAA
